United States Patent Application Publication US 2018/0126003 A1 - sequence listing, part 68

SEQ ID NO: 122934 - protein, 1210 aa, Artificial Sequence
  derived and/or modified sequence
METSLSLESGHHGSYRRGDRPGLAWTMVLLWEPAGAWLALGLALALGPSVAAAAPRQDCTGVECPPLENCIEEALEPGACCATCVQQGCACEGYQYYDCLQGGFVRGRVPAGQSYFVDFGSTECSCPPGGGKISCQFMLCPELPPNCIEAVVVADSCPQCGQVGCVHAGHKYAAGHTVHLPPCRACHCPDAGGELICYQLPGCHGNFSDAEEGDPERHYEDPYSYDQEVAEVEAATALGGEVQAGAVQAGAGGPPAALGGGSQPLSTIQAPPWPAVLPRPTAAAALGPPAPVQAKARRVTEDSEEEEEEEEEREEMAVTEQLAAGGHRGLDGLPTTAPAGPSLPIQEERAEAGARAEAGARPEENLILDAQATSRSTGPEGVTHAPSLGKAALVPTQAVPGSPRDPVKPSPHNILSTSLPDAAWIPPTREVPRKPQVLPHSHVEEDTDPNSVHSIPRSSPEGSTKDLIETCCAAGQQWAIDNDECLEIPESGTEDNVCRTAQRHCCVSYLQEKSCMAGVLGAKEGETCGAEDNDSCGISLYKQCCDCCGLGLRVRAEGQSCESNPNLGYPCNHVMLSCCEGEEPLIVPEVRRPPEPAAAPRRVSEAEMAGREALSLGTEAELPNSLPGDDQDECLLLPGELCQHLCINTVGSYHCACFPGFSLQDDGRTCRPEGHPPQPEAPQEPALKSEFSQVASNTIPLPLPQPNTCKDNGPCKQVCSTVGGSAICSCFPGYAIMADGVSCEDINECVTDLHTCSRGEHCVNTLGSFHCYKALTCEPGYALKDGECEDVDECAMGTHTCQPGFLCQNTKGSFYCQARQRCMDGFLQDPEGNCVDINECTSLSEPCRPGFSCINTVGSYTCQRNPLICARGYHASDDGTKCVDVNECETGVHRCGEGQVCHNLPGSYRCDCKAGFQRDAFGRGCIDVNECWASPGRLCQHTCENTLGSYRCSCASGFLLAADGKRCEDVNECEAQRCSQECANIYGSYQCYCRQGYQLAEDGHTCTDIDECAQGAGILCTFRCLNVPGSYQCACPEQGYTMTANGRSCKDVDECALGTHNCSEAETCHNIQGSFRCLRFECPPNYVQVSKTKCERTTCHDFLECQNSPARITHYQLNFQTGLLVPAHIFRIGPAPAFTGDTIALNIIKGNEEGYFGTRRLNAYTGVVYLQRAVLEPRDFALDVEMKLWRQGSVTTFLAKMHIFFTTFAL

SEQ ID NO: 122935 - DNA, 144 bp, Artificial Sequence
  derived and/or modified sequence
atggcatccgtcttgagtaggcggcttggtaaacgctccctcttgggggcacgggtgcttggtccctcagcttccgagggaccctctgctgccccaccgagcgaacctctgctggaaggggctgcccctcaaccgtttacctag

SEQ ID NO: 122936 - DNA, 4127 bp, Artificial Sequence
  derived and/or modified sequence
ggacggacgccgagcgcagtgccccgcgggtcttacaggagaggggaccgtcctgggctggcctggaccatggtgctgctctgggagcctgcaggagcctggcttgctctgggcctggccctggccctgggccccagcgtggccgcagctgcccctcggcaggactgcacgggcgtggagtgcccgccgctggagaactgcattgaggaggcgctggagccgggtgcctgctgtgccacgtgtgtgcagcagggctgcgcctgcgagggctaccagtactatgactgcctacagggtggcttcgtgcgcggccgcgtgcccgccggtcagtcctattttgtggacttcgggagcactgagtgctcctgcccaccaggcggcggcaagatcagctgccagttcatgctgtgcccggagctgccgcccaactgcatcgaggctgtagtggtggctgacagctgcccacagtgcggccaggtgggctgcgtccacgcgggccacaagtacgccgctggccacactgttcacctgccgccctgccgggcctgccactgccctgacgccggtggagagctcatctgctaccagctccccggttgccacgggaacttctcagatgccgaggagggtgaccccgagcgacactacgaagacccctacagctatgaccaggaggtggccgaggtggaagcagcaacagccctggggggtgaggtccaggcgggtgcagtccaggcaggcgcagggggccccccagctgctctgggaggtgggagtcagccactgtccaccatccaggcacccccctggccagctgtcctccccaggcccacagcggctgctgccctgggtcccccagccccagtgcaggccaaagctaggagagtgaccgaggacagtgaggaggaagaagaggaggaggaggagagagaggaaatggctgtcactgagcagctggcagcaggtggccacagggggctggatgggctgcccactacagccccagctggacccagtcttcctatccaggaggagagggcagaagctggggcaagggcagaagctggggcaaggcctgaagagaacctcatcctggatgcccaagccacgtcccgcagcactgggccggagggcgtgacgcatgcaccgagcctgggcaaggctgctctcgtcccaactcaggccgtgcctggctctcccagggacccagtcaagcccagcccccacaacatcctgtccacatcactgcctgatgcagcctggatcccacccacccgagaagtgcccaggaagccgcaagttctgccccattcccacgtggaggaggacacagaccccaactctgtccattctatccccagaagtagccctgaaggctccaccaaggacctgatcgagacttgctgcgcagccggacagcagtgggccattgacaatgacgagtgcctggagatccctgagagtggcactgaggacaacgtctgcaggacagcccagaggcactgctgtgtctcctacttgcaggagaagagctgcatggccggcgtcctgggagccaaggagggtgagacctgtggggctgaggacaacgacagctgcggcatctccctgtacaagcaatgctgtgactgctgtggcctgggcctccgcgtgcgggccgagggccagtcgtgtgagtccaatcctaacctgggctatccctgcaatcatgtcatgctctcctgctgtgagggtgaagagcctctcatagtacctgaggttcgccgacctccagagcccgcagctgcaccacggagagtttcagaggcagagatggcgggccgagaggccctgtcactgggcacagaggccgagctgccgaacagcctgccgggcgatgaccaggatgagtgccttctcctcccgggagagctgtgccagcacctttgcatcaatactgtgggttcttaccactgtgcctgctttcctggcttctcactgcaggacgatggccgcacttgccgcccagagggtcaccctccacagccggaagccccacaggagcctgcactgaagtcagaattttcccaggtggcctctaacaccatcccgctgccactgccgcagcccaatacctgcaaagacaatggaccctgcaagcaggtgtgcagcactgttgggggctcagccatatgctcctgttttcccggctatgccatcatggcggatggcgtgtcctgtgaagacatcaacgagtgtgtgacggacctgcacacgtgcagccggggcgagcactgtgtgaacacactgggctccttccactgctacaaggcactcacctgtgagccaggctatgccctcaaggatggcgagtgcgaagacgtggatgagtgtgcgatgggcacgcacacctgccagccgggcttcttgtgccagaacaccaagggctccttctactgccaggccaggcagcgctgcatggatggcttcctgcaggatcctgaaggcaactgtgtggacatcaacgagtgcacgtcactgtccgagccatgtcggccaggcttcagctgcatcaacacggtgggctcctacacatgccagaggaacccgctgatctgcgcgcgcggctaccacgccagcgatgatgggaccaagtgtgtggacgtgaatgagtgtgagacaggtgtgcaccgctgcggtgagggccaagtgtgccacaacctccctggctcctaccgctgtgactgcaaagccggctttcagcgggatgcctttggccggggctgcatcgacgtgaatgagtgctgggcctcgccaggccgcctgtgccagcacacgtgtgagaacacactcggctcctaccgctgttcctgcgcctccgggttcctgctagcagcggacggcaagcgctgtgaagacgtgaatgagtgtgaggcccagcgctgcagccaggagtgtgccaacatctatggctcctaccagtgctactgccgccagggctaccagctggctgaggatgggcacacctgcacagacatcgacgagtgtgctcaaggcgccggcatcctctgcaccttccgctgtctcaacgtgccagggagctaccagtgtgcatgccctgagcagggctacaccatgacggccaacgggaggtcctgcaaggacgtggatgagtgtgcactgggtacccacaactgttccgaggctgagacctgccacaacatccagggtagcttccgctgcctgcgcttcgagtgtcctcccaactatgtccaagtctccaaaacgaagtgcgagcgcaccacgtgccatgacttcctggagtgccagaactcgccagcgcgcatcacgcactaccagctcaacttccagacgggcctcctggtgcctgcgcatatcttccgcattggccccgcgccagccttcacgggggacaccatcgccctgaacatcatcaagggcaatgaggagggctactttggcacgcgcaggctcaatgcctacacgggtgtggtctacctgcagcgggccgtgctggagccccgggactttgccctggacgtggagatgaagctctggaggcagggctccgtcaccaccttcctggccaagatgcacatcttcttcaccacctttgccctgtgaggtgccagcacgggccacctgcgggtgtggcgcagcccagggctcacactgcgtgggagggactgggtcactattgtggtttttactataactttgtaaattaacttaattttgctgacttgactcctgtggcttctggacccctcctctgccccgcaggaggaagttccacggcaggtggtgcgttcccacgcaggcaccaagtggaagcttgcacggtgggccacggccgtggcgggtgccctgtgggtgaggctgggtgatgacctgaggaccagagacacgcgaccatgttggggctcttggactcctctggatgacccgtccccaaagttgacattccatttcatgttccactgtgattaattcttttcttttttaaaaaatcattttaaagttttttgtttaactataaagtagtacatgtacattatataaaaaaaagttcaactagtatgaaagggttataaagtaacagaggaaaacgcctcttggtcccttta

SEQ ID NO: 122937 - DNA, 584 bp, Artificial Sequence
  derived and/or modified sequence
acacatacacgccccattgggagcagctgtggagatgtgaggacagtgaggtctgctattctcccagggtcttacaggagaggggaccgtcctgggctggcctggaccatggtgctgctctgggagcctgcaggagcctggcttgctctgggcctggccctggccctgggccccagcgtggccgcagctgcccctcggcaggactgcacgggcgtggagtgcccgccgctggagaactgcattgaggaggcgctggagccgggtgcctgctgtgccacgtgtgtgcagcagggctgcgcctgcgagggctaccagtactatgactgcctacagggtggcttcgtgcgcggccgcgtgcccgccggtcagtcctattttgtggacttcgggagcactgagtgctcctgcccaccaggcggcggcaagatcagctgccagttcatgctgtgcccggagctgccgcccaactgcatcgaggctgtagtggtggctgacagctgcccacagtgcggccaggtgggctgcgtccacgcgggccacaagtacgccgctggccacactgttcacctgccgccctgccgggc

SEQ ID NO: 122938 - DNA, 3873 bp, Artificial Sequence
  derived and/or modified sequence
agacaccgagaccaagagcttggccggggctgtggggcgaagcttcctgggcccttggtggggatgagctgggggggcctctggggaggggagttaatgatcctgggcacgaggccggtggccactgggacatagtcaccgagggtgatggagacttcccttagcctggagagtggccatcatgggtcttacaggagaggggaccgtcctgggctggcctggaccatggtgctgctctgggagcctgcaggagcctggcttgctctgggcctggccctggccctgggccccagcgtggccgcagctgcccctcggcaggactgcacgggcgtggagtgcccgccgctggagaactgcattgaggaggcgctggagccgggtgcctgctgtgccacgtgtgtgcagcagggctgcgcctgcgagggctaccagtactatgactgcctacagggtggcttcgtgcgcggccgcgtgcccgccggtcagtcctattttgtggacttcgggagcactgagtgctcctgcccaccaggcggcggcaagatcagctgccagttcatgctgtgcccggagctgccgcccaactgcatcgaggctgtagtggtggctgacagctgcccacagtgcggccaggtgggctgcgtccacgcgggccacaagtacgccgctggccacactgttcacctgccgccctgccgggcctgccactgccctgacgccggtggagagctcatctgctaccagctccccggttgccacgggaacttctcagatgccgaggagggtgaccccgagcgacactacgaagacccctacagctatgaccaggaggtggccgaggtggaagcagcaacagccctggggggtgaggtccaggcgggtgcagtccaggcaggcgcagggggccccccagctgctctgggaggtgggagtcagccactgtccaccatccaggcacccccctggccagctgtcctccccaggcccacagcggctgctgccctgggtcccccagccccagtgcaggccaaagctaggagagtgaccgaggacagtgaggaggaagaagaggaggaggaggagagagaggaaatggctgtcactgagcagctggcagcaggtggccacagggggctggatgggctgcccactacagccccagctggacccagtcttcctatccaggaggagagggcagaagctggggcaagggcagaagctggggcaaggcctgaagagaacctcatcctggatgcccaagccacgtcccgcagcactgggccggagggcgtgacgcatgcaccgagcctgggcaaggctgctctcgtcccaactcaggccgtgcctggctctcccagggacccagtcaagcccagcccccacaacatcctgtccacatcactgcctgatgcagcctggatcccacccacccgagaagtgcccaggaagccgcaagttctgccccattcccacgtggaggaggacacagaccccaactctgtccattctatccccagaagtagccctgaaggctccaccaaggacctgatcgagacttgctgcgcagccggacagcagtgggccattgacaatgacgagtgcctggagatccctgagagtggcactgaggacaacgtctgcaggacagcccagaggcactgctgtgtctcctacttgcaggagaagagctgcatggccggcgtcctgggagccaaggagggtgagacctgtggggctgaggacaacgacagctgcggcatctccctgtacaagcaatgctgtgactgctgtggcctgggcctccgcgtgcgggccgagggccagtcgtgtgagtccaatcctaacctgggctatccctgcaatcatgtcatgctctcctgctgtgagggtgaagagcctctcatagtacctgaggttcgccgacctccagagcccgcagctgcaccacggagagtttcagaggcagagatggcgggccgagaggccctgtcactgggcacagaggccgagctgccgaacagcctgccgggcgatgaccaggatgagtgccttctcctcccgggagagctgtgccagcacctttgcatcaatactgtgggttcttaccactgtgcctgctttcctggcttctcactgcaggacgatggccgcacttgccgcccagagggtcaccctccacagccggaagccccacaggagcctgcactgaagtcagaattttcccaggtggcctctaacaccatcccgctgccactgccgcagcccaatacctgcaaagacaatggaccctgcaagcaggtgtgcagcactgttgggggctcagccatatgctcctgttttcccggctatgccatcatggcggatggcgtgtcctgtgaagacatcaacgagtgtgtgacggacctgcacacgtgcagccggggcgagcactgtgtgaacacactgggctccttccactgctacaaggcactcacctgtgagccaggctatgccctcaaggatggcgagtgcgaagacgtggatgagtgtgcgatgggcacgcacacctgccagccgggcttcttgtgccagaacaccaagggctccttctactgccaggccaggcagcgctgcatggatggcttcctgcaggatcctgaaggcaactgtgtggacatcaacgagtgcacgtcactgtccgagccatgtcggccaggcttcagctgcatcaacacggtgggctcctacacatgccagaggaacccgctgatctgcgcgcgcggctaccacgccagcgatgatgggaccaagtgtgtggacgtgaatgagtgtgagacaggtgtgcaccgctgcggtgagggccaagtgtgccacaacctccctggctcctaccgctgtgactgcaaagccggctttcagcgggatgcctttggccggggctgcatcgacgtgaatgagtgctgggcctcgccaggccgcctgtgccagcacacgtgtgagaacacactcggctcctaccgctgttcctgcgcctccgggttcctgctagcagcggacggcaagcgctgtgaagacgtgaatgagtgtgaggcccagcgctgcagccaggagtgtgccaacatctatggctcctaccagtgctactgccgccagggctaccagctggctgaggatgggcacacctgcacagacatcgacgagtgtgctcaaggcgccggcatcctctgcaccttccgctgtctcaacgtgccagggagctaccagtgtgcatgccctgagcagggctacaccatgacggccaacgggaggtcctgcaaggacgtggatgagtgtgcactgggtacccacaactgttccgaggctgagacctgccacaacatccagggtagcttccgctgcctgcgcttcgagtgtcctcccaactatgtccaagtctccaaaacgaagtgcgagcgcaccacgtgccatgacttcctggagtgccagaactcgccagcgcgcatcacgcactaccagctcaacttccagacgggcctcctggtgcctgcgcatatcttccgcattggccccgcgccagccttcacgggggacaccatcgccctgaacatcatcaagggcaatgaggagggctactttggcacgcgcaggctcaatgcctacacgggtgtggtctacctgcagcgggccgtgctggagccccgggactttgccctggacgtggagatgaagctctggaggcagggctccgtcaccaccttcctggccaagatgcacatcttcttcaccacctttgccctgtgaggtgccagcacgggccacctgcgggtgtggcgcagcccagggctcacactgcgtgggagggactgggtcactattgtggtttttactataact

SEQ ID NO: 122939 - DNA, 3555 bp, Artificial Sequence
  derived and/or modified sequence
atggtcctgttgtgggagcccgctggtgcctggttggccttaggactggcactggcactgggcccttcagtggccgctgctgcaccacgccaggattgtaccggggttgagtgtccccctttggagaactgcatagaagaggccctggagcctggggcctgttgcgccacatgcgtccagcagggctgcgcttgcgaaggctaccagtattatgactgcctccagggcggcttcgttcgcgggcgtgtgcctgctgggcagtcttattttgtcgacttcggtagcacggagtgttcttgccctccagggggaggcaagatttcatgtcagtttatgttgtgccctgaactaccacctaactgtattgaggccgtggtggtggccgactcatgtccccagtgtggccaggtcggctgtgtgcacgccggccacaaatacgctgccggccatacggttcatttgccaccatgccgcgcgtgtcactgtcctgacgccgggggggaactgatatgctaccagcttccaggctgccacggtaactttagcgatgcggaggaaggtgatcctgagcggcactatgaggatccctattcctatgaccaagaagtagctgaggttgaggcagcaaccgccctcggaggagaagtgcaggcaggcgccgtgcaagccggggccggcgggcccccggccgctttggggggcggatctcaacccctgtcaacaatccaggctcccccttggcctgctgtactgcctcggcccacggccgctgcagctctggggcctcctgctccggtgcaggcaaaagctcgacgcgtgacagaggatagcgaggaggaagaggaggaggaggaagaaagagaggaaatggccgtaacagaacagttagccgccggaggccacaggggcctggatggtctccccactaccgctcccgctggcccgtctctgcccatccaagaagagagagcagaggccggcgctagagccgaggccggtgccagacccgaagagaaccttattctggacgcccaagctaccagccgctcgacagggcccgaaggagtaacccacgcaccctctctggggaaggctgccctcgtcccgacccaggccgtccccggctctccacgggatcccgtgaaaccatcacctcacaatatactgtccactagcttgcccgatgcagcctggattcctcccacacgagaggtaccacgaaaacctcaggtcttgcctcatagccacgtagaggaggatactgaccccaattctgtccactctatcccaaggtctagtcctgaaggaagtacgaaagacctcattgaaacttgttgcgctgccggccagcagtgggcaattgacaacgacgaatgcctggagataccggaatccggcactgaagacaatgtatgccgcaccgctcaacgacactgttgcgtgtcttatctgcaagaaaagagctgtatggcgggtgtgctgggagctaaggaaggcgagacttgtggcgcagaagacaacgatagctgcggcataagcctgtataagcagtgctgcgactgctgtgggctaggactgcgcgtgagggccgaaggacagtcctgtgaatctaatcctaatctcgggtatccctgcaatcatgtcatgttaagctgctgtgaaggagaggagccactcattgttcctgaggtgaggcggcctcccgagcctgcggctgcacctcggagagtgtctgaagcagaaatggccgggcgggaagccctttcccttggcacagaggcagagttacccaactccttgccaggcgacgaccaggacgaatgcctgctcctgccaggcgagctctgtcaacatctgtgcattaataccgtgggcagctaccactgcgcttgtttccccgggttctccctgcaggacgacggtaggacatgtcggcccgagggacaccccccgcagcctgaggctccacaagagccagctctcaaaagtgaattttctcaagtggcttctaatacaattccccttccattaccgcagccaaacacttgcaaggacaacggcccatgcaaacaggtgtgtagcacagttggtggatccgccatttgtagctgcttcccgggctacgctattatggccgacggggtaagctgtgaagacattaacgagtgcgtcaccgacctccacacctgcagcaggggtgagcactgcgtgaatactctcggctcatttcactgttataaagcactgacctgtgagcccggctacgccctcaaggatggggaatgtgaagacgtcgacgagtgcgcaatgggaacacacacttgccagccaggcttcctgtgtcaaaacacaaaagggtctttttactgccaggcccggcagcgctgcatggatggttttctccaagaccctgaaggtaactgcgtggatattaatgagtgcacgtccctcagtgaaccttgccgacccggcttctcatgcatcaatacagttggctcctacacatgccagcgaaaccccctcatatgcgcccgtggatatcacgcctccgacgatgggaccaaatgcgtcgacgtgaacgagtgcgagaccggcgtgcaccggtgcggtgagggacaggtctgtcataacttgcccggctcttatcgctgcgactgcaaagcggggttccaacgcgatgcttttgggagggggtgtatcgatgtgaatgagtgctgggcctctcctggtcgactgtgtcagcacacatgtgagaacaccctcgggtcttacaggtgtagctgcgcaagcggcttcctgttggccgctgacggaaagaggtgcgaagacgtcaatgagtgcgaggcccagcgatgttcccaggaatgcgccaatatctacggctcttaccagtgttattgtagacagggatatcagctggcagaggacggccacacttgcacagacatcgacgaatgcgcacagggcgctgggatactgtgcacgtttcggtgcctgaacgtaccagggtcataccagtgtgcttgccccgaacaaggttacacgatgaccgcgaatgggaggtcatgcaaagatgtggatgaatgtgccctcggtacccacaactgctctgaagccgagacctgtcacaatatacagggctcttttagatgcctacggtttgagtgcccacccaactacgtccaggtctccaagaccaaatgcgaaagaacaacctgtcacgatttccttgagtgccaaaactcacctgcacggataactcattatcagctgaacttccagacaggcctcctcgtcccagcccatatctttcgaataggccccgctccagcgtttaccggcgatacgatcgcattgaatattattaagggaaacgaggaggggtatttcgggacaagacggctcaatgcatacacaggcgtagtgtacttacagagagcggtcctggagcccagggatttcgcactcgatgtcgaaatgaaactctggcgccaagggtccgtgacaacctttcttgctaagatgcacattttctttacaacatttgccctgtag

SEQ ID NO: 122940 - DNA, 480 bp, Artificial Sequence
  derived and/or modified sequence
atggtcttactgtgggaacccgccggagcctggttagcgctcggactcgctctagcactcggccccagtgttgctgccgctgcgccccggcaggactgtaccggcgttgagtgtccaccactggagaattgcattgaggaggcattagaaccaggcgcctgctgtgccacatgtgtgcagcagggatgtgcgtgtgagggttatcaatattacgactgtctgcagggtggctttgtgcggggccgggtgccggctggccagagctacttcgttgacttcggaagtacggaatgttcctgccctccaggaggggggaaaataagctgccagttcatgctgtgccccgaactgccacccaactgtatcgaagcagtcgttgttgccgattcatgtccccagtgtggtcaggttgggtgcgtccacgccggacacaagtacgccgcaggacacacagtgcatcttccaccctgtagggcctag

SEQ ID NO: 122941 - DNA, 3633 bp, Artificial Sequence
  derived and/or modified sequence
atggaaacctcactttcactcgagtcaggccaccatggtagctaccggcggggtgaccggccaggccttgcatggactatggtgttgctctgggagcccgcaggtgcttggttagccctgggactcgccctcgccttagggccttcagttgcagccgccgctcctaggcaagattgtactggcgtggagtgtccaccactggagaactgcatagaggaggctctggaaccgggtgcctgttgtgccacctgtgtccagcaaggatgtgcctgcgaagggtatcaatactacgattgtttacagggcggctttgtccgtggtcgtgtaccagctggtcagtcctactttgtcgatttcgggtctaccgagtgtagctgccctccgggcggtgggaagatttcttgtcagttcatgctgtgtccagagctgcccccgaactgtatagaagcagtcgtagtggcagattcatgtcctcaatgtggacaggtgggatgcgtgcatgcaggccataagtacgctgccgggcacacagtgcacttgcccccatgccgcgcatgccactgcccggacgcaggcggtgaactgatatgttatcaactgcccggctgtcacggcaacttctctgacgccgaagagggtgatcccgagcgacattacgaggacccatattcctacgaccaggaagtagctgaagtcgaggcagcaactgccctgggcggagaagtacaggcaggagccgtgcaggctggggctggcggtccaccagctgccctcgggggaggttcccagcctttgtccaccatccaggcccctccatggccagccgttctgcccaggcccactgccgcggctgccctgggccctcccgcccccgtgcaggcgaaggccaggagggtcacagaggacagcgaagaggaggaggaggaggaggaagagcgcgaagaaatggccgtcactgaacagctcgccgccggcggacacagagggctggatgggctacctacaacggcacctgctggaccatcccttcctattcaggaggaaagagcggaggcaggcgcccgcgcagaggcaggcgcacgccccgaagaaaacttaatactggacgcacaggcgaccagtagatctaccggaccagagggagtgacacacgccccaagcctcggaaaagcagccttagtgccaacacaggcagtgcctgggtcgcccagagaccctgttaagcccagtcctcacaatatcctgtctacatctctgcctgacgctgcttggatacctcctacccgggaagtgcccaggaagcctcaggtgctgccccactctcacgtggaggaggacactgacccgaacagcgtccacagtattccaagaagttctccggaaggcagcacaaaggatctgatagagacttgctgcgctgcgggacagcagtgggcaattgataacgatgagtgcctcgaaatcccagaatcgggcaccgaagataacgtctgtcgcacagctcagaggcattgctgcgtttcttacctgcaggagaagtcctgcatggctggtgttcttggggccaaggagggagagacatgcggagccgaggacaacgatagctgcggcatcagtctgtataagcagtgttgtgattgctgcgggctgggcctgagagtgagggctgagggacaaagctgcgaatccaaccctaacttaggttatccttgcaaccatgtgatgttgagctgttgcgagggggaagagccattgattgtgccagaggtcagacggccccccgaacctgccgccgcccccaggcgagtgtccgaggccgagatggcagggagagaggcactgagcctggggactgaagcagagttacctaattccctccctggggatgatcaagatgagtgtctgcttttgccaggcgagctgtgccagcacctttgtatcaatactgtcggctcctaccactgcgcttgcttcccgggtttctctttacaggatgatgggcgtacatgtcgacctgaaggacaccccccacaaccggaagcgcctcaggaaccagcactgaagtctgaattctcccaggtagctagcaataccattccccttccactcccacagcctaacacctgtaaagacaacggcccttgcaagcaagtgtgctctaccgtgggcgggagcgcaatctgttcttgttttcccggttacgccattatggcagacggggtgagttgcgaggacataaacgaatgcgtgacggaccttcatacatgtagccggggcgagcattgtgtgaatactcttggttcttttcactgctataaggctctgacatgcgaaccaggctatgctttgaaagatggagaatgcgaagacgtggatgagtgcgctatggggacccacacttgtcagccaggctttctatgccagaatactaagggctcattttattgtcaggcccggcagagatgtatggacgggtttttgcaagatcctgaagggaactgtgtcgacatcaacgaatgtacaagtctgtccgagccttgtaggccgggtttcagctgcatcaataccgttggcagctatacatgtcaaagaaatcctcttatttgcgcacggggataccacgcttcagatgacgggacaaaatgcgtagacgttaacgagtgcgagaccggtgtgcaccgatgcggggaaggccaggtctgtcataacctgcccggttcttaccgctgcgattgcaaggctggatttcagcgggatgcatttggcagaggatgcatcgatgtgaatgagtgctgggccagccccggcagattatgtcagcatacctgcgaaaacacccttgggtcttatcgatgctcatgtgcttctgggtttctgttagccgccgatggaaagcgctgtgaggatgtgaatgagtgcgaggctcagcgctgctcacaggagtgcgccaacatttatggcagttaccaatgctattgccgccagggttatcaactagccgaagacggccacacttgcaccgacatcgacgaatgtgctcagggcgctggcatcctctgtacttttcgctgtctcaacgtcccaggcagctaccagtgtgcctgccccgagcaaggctatacaatgacagctaacgggagatcttgcaaagatgtagacgaatgtgctctagggacccacaactgctctgaagccgagacatgtcataacatccaaggctcattcaggtgcctgaggttcgaatgtcctcctaattacgtgcaggtgagcaagacaaagtgtgagcggactacttgccatgatttcctcgagtgccagaattcgcccgcacgcattactcactaccagttgaactttcagactggcctgttggtgccagctcatatctttcgaatcgggcccgcacccgctttcaccggtgatacaattgcacttaacattataaaaggtaacgaggaagggtacttcgggactcgccgactgaatgcttatacaggtgttgtatacctacaaagagcagttctggaaccgcgcgactttgccctcgacgtggagatgaaactgtggaggcaaggctcggtcacaactttcctggctaaaatgcacatcttcttcaccaccttcgccctgtag

SEQ ID NO: 122942 - DNA, 3555 bp, Artificial Sequence
  derived and/or modified sequence
atggtgctgctgtgggagcctgctggggcctggctggccctgggcctggccctggccctgggccccagcgtggccgctgctgccccccggcaggactgcaccggggtggagtgcccccccctggagaactgcatcgaggaggccctggagcccggggcctgctgtgccacctgtgtgcagcagggctgtgcctgtgagggctaccagtactatgactgcctgcagggcggctttgtgcggggccgggtgcctgctggccagagctactttgtggactttggcagcacagaatgtagctgccccccaggcggcggcaagatcagctgccagttcatgctgtgcccagagctgccccccaactgcatcgaggccgtggtggtggccgacagctgcccccagtgtggccaggtgggctgtgtgcacgccggccacaagtatgctgctggccacacagtgcacctgcccccctgccgggcctgccactgcccagatgctggaggagagctgatctgctaccagctgcccggctgccacggcaacttcagtgatgctgaggagggggaccctgagcggcactatgaggacccctacagctatgaccaggaggtggccgaggtggaggccgccacagccctgggcggggaggtgcaggccggggctgtgcaggccggggccggcggccccccagctgccctgggcggcggcagccagcccctgagcaccatccaggccccaccctggccagctgtgctgccccggcccacagctgctgctgccctgggccccccagcccctgtgcaggccaaggcccggcgggtgacagaagattctgaggaggaggaggaggaggaggaggagcgggaggagatggctgtgacagagcagctggccgccggcggccaccggggcctggatggcctgcccaccacagccccagctggccccagcctgcccatccaggaggagcgggcagaggccggggcccgggcagaggccggggcccggcctgaggagaacctgatcctggatgcccaggccaccagccgcagcactggacctgagggcgtgacccacgcccccagcctgggcaaggccgccctggtgcccacccaggccgtgcccggcagcccccgggaccctgtgaagcccagcccccacaacatcctgagcaccagcctgcctgatgctgcctggatcccccccacccgggaggtgcccaggaagccccaggtgctgccccacagccacgtggaggaggacacagaccccaacagcgtgcacagcatccccaggagcagccctgagggcagcaccaaggacctgattgagacctgctgtgccgccggccagcagtgggccatcgacaatgatgagtgcctggagatccctgagagcggcacagaggacaacgtgtgcaggacagcccagaggcactgctgcgtgtcctacctgcaggagaagagctgcatggccggcgtgctgggcgccaaggagggggagacctgtggggctgaagataatgacagctgtggcatcagcctgtacaagcagtgctgtgactgctgcggcctgggcctgcgggtgcgggcagagggccagagctgtgagagcaaccccaacctgggctacccctgcaaccacgtgatgctgagctgctgtgagggggaggagcccctcatcgtgcctgaggtgagaagacctcctgagcctgctgctgcccccaggagagtgtctgaggccgagatggccggccgggaggccctgagcctgggcacagaggccgagctgcccaacagcctgcctggagatgaccaggatgaatgtctgctgctgcccggggagctgtgccagcacctgtgcatcaacacagtgggcagctaccactgtgcctgcttccctggcttcagcctgcaggatgatggccgcacctgcaggcctgagggccaccccccccagcctgaggccccccaggagcccgccctgaagtctgagttcagccaggtggccagcaacaccatccccctgcccctgccccagcccaacacctgcaaggacaatggcccctgcaagcaggtgtgcagcacagtgggcggcagcgccatctgcagctgcttccctggctacgccatcatggctgatggagtgtcctgtgaggacatcaatgaatgtgtgacagacctgcacacctgcagcagaggagagcactgtgtgaacaccctgggcagcttccactgctacaaggccctgacctgtgagcccggctacgccctgaaggatggagaatgtgaagatgtggatgaatgtgccatgggcacccacacctgccagcccggcttcctgtgccagaacaccaagggcagcttctactgccaggcccggcagcgctgcatggatggcttcctgcaggaccctgagggcaactgtgtggacatcaatgaatgtaccagcctgtctgagccctgcaggcctggcttcagctgcatcaacacagtgggcagctacacctgccagaggaaccccctcatctgtgcccggggctaccacgccagtgatgatggcaccaagtgtgtggatgtgaatgaatgtgagaccggggtgcaccgctgtggggagggccaggtgtgccacaacctgcccggcagctaccgctgtgactgcaaggccggcttccagagagatgccttcggccggggctgcattgatgtgaatgaatgctgggccagccctggccgcctgtgccagcacacctgtgagaacaccctgggcagctaccgctgcagctgtgccagcggcttcctgctggccgcagatggcaagagatgtgaagatgtgaatgaatgtgaggcccagcgctgcagccaggagtgtgccaacatctacggcagctaccagtgctactgccggcagggctaccagctggctgaagatggccacacctgcacagacattgatgaatgtgcccagggcgccggcatcctgtgcaccttccgctgcctgaatgtgcccggcagctaccagtgtgcctgcccagagcagggctacaccatgacagccaacggccgcagctgcaaggatgtggatgaatgtgccctgggcacccacaactgcagcgaggccgagacctgccacaacatccagggcagcttccgctgcctgcgctttgaatgtcctcccaactacgtgcaggtgtccaagaccaagtgtgagaggaccacctgccacgacttcctggagtgccagaacagccctgcccgcatcacccactaccagctgaacttccagacaggcctgctggtgcctgcccacatcttccgcatcggccctgccccagccttcaccggggacaccatcgccctgaacatcatcaagggaaatgaggagggctacttcggcacccggcggctgaatgcctacacaggagtggtgtacctgcagagagctgtgctggagccccgggactttgccctggatgtggagatgaagctgtggaggcagggctctgtgaccaccttcctggccaagatgcacatcttcttcaccacctttgccctgtag

SEQ ID NO: 122943 - DNA, 480 bp, Artificial Sequence
  derived and/or modified sequence
atggtgctgctgtgggagcctgctggggcctggctggccctgggcctggccctggccctgggccccagcgtggccgctgctgccccccggcaggactgcaccggggtggagtgcccccccctggagaactgcatcgaggaggccctggagcccggggcctgctgtgccacctgtgtgcagcagggctgtgcctgtgagggctaccagtactatgactgcctgcagggcggctttgtgcggggccgggtgcctgctggccagagctactttgtggactttggcagcacagaatgtagctgccccccaggcggcggcaagatcagctgccagttcatgctgtgcccagagctgccccccaactgcatcgaggccgtggtggtggccgacagctgcccccagtgtggccaggtgggctgtgtgcacgccggccacaagtatgctgctggccacacagtgcacctgcccccctgccgggcctag

SEQ ID NO: 122944 - DNA, 3633 bp, Artificial Sequence
  derived and/or modified sequence
atggagaccagcctgagcctggagagcggccaccacggcagctaccgccgcggggacaggcctggcctggcctggaccatggtgctgctgtgggagcctgctggggcctggctggccctgggcctggccctggccctgggccccagcgtggccgctgctgccccccggcaggactgcaccggggtggagtgcccccccctggagaactgcatcgaggaggccctggagcccggggcctgctgtgccacctgtgtgcagcagggctgtgcctgtgagggctaccagtactatgactgcctgcagggcggctttgtgcggggccgggtgcctgctggccagagctactttgtggactttggcagcacagaatgtagctgccccccaggcggcggcaagatcagctgccagttcatgctgtgcccagagctgccccccaactgcatcgaggccgtggtggtggccgacagctgcccccagtgtggccaggtgggctgtgtgcacgccggccacaagtatgctgctggccacacagtgcacctgcccccctgccgggcctgccactgcccagatgctggaggagagctgatctgctaccagctgcccggctgccacggcaacttcagtgatgctgaggagggggaccctgagcggcactatgaggacccctacagctatgaccaggaggtggccgaggtggaggccgccacagccctgggcggggaggtgcaggccggggctgtgcaggccggggccggcggccccccagctgccctgggcggcggcagccagcccctgagcaccatccaggccccaccctggccagctgtgctgccccggcccacagctgctgctgccctgggccccccagcccctgtgcaggccaaggcccggcgggtgacagaagattctgaggaggaggaggaggaggaggaggagcgggaggagatggctgtgacagagcagctggccgccggcggccaccggggcctggatggcctgcccaccacagccccagctggccccagcctgcccatccaggaggagcgggcagaggccggggcccgggcagaggccggggcccggcctgaggagaacctgatcctggatgcccaggccaccagccgcagcactggacctgagggcgtgacccacgcccccagcctgggcaaggccgccctggtgcccacccaggccgtgcccggcagcccccgggaccctgtgaagcccagcccccacaacatcctgagcaccagcctgcctgatgctgcctggatcccccccacccgggaggtgcccaggaagccccaggtgctgccccacagccacgtggaggaggacacagaccccaacagcgtgcacagcatccccaggagcagccctgagggcagcaccaaggacctgattgagacctgctgtgccgccggccagcagtgggccatcgacaatgatgagtgcctggagatccctgagagcggcacagaggacaacgtgtgcaggacagcccagaggcactgctgcgtgtcctacctgcaggagaagagctgcatggccggcgtgctgggcgccaaggagggggagacctgtggggctgaagataatgacagctgtggcatcagcctgtacaagcagtgctgtgactgctgcggcctgggcctgcgggtgcgggcagagggccagagctgtgagagcaaccccaacctgggctacccctgcaaccacgtgatgctgagctgctgtgagggggaggagcccctcatcgtgcctgaggtgagaagacctcctgagcctgctgctgcccccaggagagtgtctgaggccgagatggccggccgggaggccctgagcctgggcacagaggccgagctgcccaacagcctgcctggagatgaccaggatgaatgtctgctgctgcccggggagctgtgccagcacctgtgcatcaacacagtgggcagctaccactgtgcctgcttccctggcttcagcctgcaggatgatggccgcacctgcaggcctgagggccaccccccccagcctgaggccccccaggagcccgccctgaagtctgagttcagccaggtggccagcaacaccatccccctgcccctgccccagcccaacacctgcaaggacaatggcccctgcaagcaggtgtgcagcacagtgggcggcagcgccatctgcagctgcttccctggctacgccatcatggctgatggagtgtcctgtgaggacatcaatgaatgtgtgacagacctgcacacctgcagcagaggagagcactgtgtgaacaccctgggcagcttccactgctacaaggccctgacctgtgagcccggctacgccctgaaggatggagaatgtgaagatgtggatgaatgtgccatgggcacccacacctgccagcccggcttcctgtgccagaacaccaagggcagcttctactgccaggcccggcagcgctgcatggatggcttcctgcaggaccctgagggcaactgtgtggacatcaatgaatgtaccagcctgtctgagccctgcaggcctggcttcagctgcatcaacacagtgggcagctacacctgccagaggaaccccctcatctgtgcccggggctaccacgccagtgatgatggcaccaagtgtgtggatgtgaatgaatgtgagaccggggtgcaccgctgtggggagggccaggtgtgccacaacctgcccggcagctaccgctgtgactgcaaggccggcttccagagagatgccttcggccggggctgcattgatgtgaatgaatgctgggccagccctggccgcctgtgccagcacacctgtgagaacaccctgggcagctaccgctgcagctgtgccagcggcttcctgctggccgcagatggcaagagatgtgaagatgtgaatgaatgtgaggcccagcgctgcagccaggagtgtgccaacatctacggcagctaccagtgctactgccggcagggctaccagctggctgaagatggccacacctgcacagacattgatgaatgtgcccagggcgccggcatcctgtgcaccttccgctgcctgaatgtgcccggcagctaccagtgtgcctgcccagagcagggctacaccatgacagccaacggccgcagctgcaaggatgtggatgaatgtgccctgggcacccacaactgcagcgaggccgagacctgccacaacatccagggcagcttccgctgcctgcgctttgaatgtcctcccaactacgtgcaggtgtccaagaccaagtgtgagaggaccacctgccacgacttcctggagtgccagaacagccctgcccgcatcacccactaccagctgaacttccagacaggcctgctggtgcctgcccacatcttccgcatcggccctgccccagccttcaccggggacaccatcgccctgaacatcatcaagggaaatgaggagggctacttcggcacccggcggctgaatgcctacacaggagtggtgtacctgcagagagctgtgctggagccccgggactttgccctggatgtggagatgaagctgtggaggcagggctctgtgaccaccttcctggccaagatgcacatcttcttcaccacctttgccctgtag

SEQ ID NO: 122945 - DNA, 3555 bp, Artificial Sequence
  derived and/or modified sequence
atggtgctgctgtgggagcccgccggcgcctggctggccctgggcctcgcactcgcattaggcccaagcgttgcggccgccgctccacgtcaggactgtacaggggtcgagtgcccccccttggagaattgtatagaggaggccttggaacctggtgcttgctgcgccacctgtgtgcagcaggggtgtgcatgtgagggataccagtattatgactgcctccagggcggctttgtgcgcggccgcgtgcctgccggtcagtcgtactttgtggattttggatcaacggaatgctcttgtcccccgggtggggggaagatctcctgtcagttcatgctttgtccagaactgccaccgaattgcatcgaagctgttgttgtggccgattcctgcccgcagtgtgggcaagtgggttgtgtgcatgccggtcataaatatgctgctgggcataccgtgcacctgccgccttgtagggcctgccactgccccgatgctggtggcgaactgatatgctatcagctgcccggctgccatggaaacttctcagatgcagaggagggcgatcccgaaagacactatgaagatccatattcttacgatcaagaagtcgcggaggttgaggcagccacggcactcggtggcgaagtccaggccggcgccgtccaggctggggcaggaggaccaccggccgcgctgggtggaggcagtcagcctctgtcaaccatccaggcccccccttggcccgcagtgctcccgcgccctacagccgccgccgcactaggtccaccagctcctgtgcaggccaaagcgcgacgggtgaccgaagattcggaggaagaagaagaggaggaggaagagcgcgaagagatggcagtgactgaacagcttgcggccggcggtcatcggggacttgatgggctacctaccaccgccccagctggaccttcgctccccatccaggaggagcgggcggaggctggtgcccgagcggaggccggcgcccggcccgaggaaaacctgatactggacgcgcaggctaccagcagatcgacaggacccgagggcgtcacacatgccccaagtcttggtaaagccgccctcgttccaacccaggccgtgccgggtagcccccgcgaccccgtgaagccctccccacacaacattctctcaacatccctccccgacgcagcctggatcccaccaactcgtgaagttccaaggaagccacaggtcttgccacattcacacgtcgaagaggacacagacccaaacagcgtgcacagcataccccgctcatcccccgaaggctcgactaaggacctgatcgagacttgttgtgccgccggtcagcagtgggcaatcgacaacgacgagtgtctggagattcccgaatctggcacagaggacaatgtctgtaggactgctcaacgccactgttgcgttagttacctgcaagaaaagtcatgtatggcaggtgttctgggggccaaagagggggagacatgcggtgctgaagacaatgattcatgcgggatatccctatacaaacagtgttgcgattgctgcggcctcggattgagagtgcgggccgaaggtcagtcatgtgaatctaacccaaaccttggatacccatgcaaccatgtaatgttgagctgttgtgaaggtgaagagcctcttatagttccggaggtacgtagaccccctgaaccggcggccgcccctagaagggtaagcgaagcagagatggcaggccgggaggcgctgtcactcggtactgaggccgaactaccgaacagcttgcccggagatgaccaagatgaatgtctcctgctgcccggtgaactttgccaacatctgtgtatcaatactgtaggatcttaccactgtgcctgctttcccggcttttctctgcaggatgacggaagaacctgtcggcctgaaggacatcccccacagcctgaagccccacaggaacctgcactgaaatccgagtttagtcaggttgcctccaacacaatccccttaccattgcctcagccaaatacctgtaaggacaatgggccttgtaaacaggtatgttctaccgtcggcggctctgccatttgcagctgtttccctggctacgcaataatggcagacggagtgtcttgcgaggacatcaacgagtgcgtgactgatctgcacacctgctccaggggagagcactgcgtgaacacactgggttccttccattgttacaaagctctcacatgcgagccagggtatgctcttaaggacggcgagtgcgaagacgtggacgagtgtgccatgggcacgcacacctgccagcccggattcttgtgccaaaatacaaaggggagtttttactgtcaggccagacagcgctgtatggacgggtttctgcaggacccagagggtaactgcgttgatatcaatgagtgcacatccctgagcgaaccatgccgccccggctttagttgcatcaatacagtcggttcatacacttgtcaacgaaaccccctgatttgcgctcgaggttaccatgcatcggatgatggcacaaaatgcgtggacgtgaatgagtgtgagacaggagtgcatcggtgcggggaaggacaggtatgtcacaacctcccaggctcatatcgctgtgactgtaaggcaggctttcaaagggacgcgttcggcaggggatgtattgacgtgaatgagtgttgggcctcgccagggaggctgtgtcagcacacttgtgaaaatacacttggaagctatagatgctcctgcgcttccggctttctgttggccgccgatggcaagagatgcgaagatgtcaatgaatgcgaagcccaaagatgctcacaggaatgcgcaaacatttatgggtcttatcaatgctattgccgacagggctaccagttggctgaagacggccatacatgcactgacattgacgaatgcgctcaaggcgctggtatcctgtgtacgtttcgatgcttaaacgtgcctggctcataccaatgtgcttgtcctgagcagggatacacaatgactgcaaatggccggtcctgcaaagatgtggacgagtgcgctcttggcacacataactgttctgaagccgagacctgccacaatatccagggatccttcagatgtttgcgctttgagtgtccacccaattacgtgcaggtgagcaaaactaaatgtgaacgaacaacctgtcatgattttttggagtgtcaaaattcgcctgcacgaattacccattatcagctcaacttccagactggtctgcttgtgcccgctcacattttccgcataggtcccgctcctgccttcaccggagacacgattgccctaaatatcatcaagggtaacgaggagggctacttcgggacccgcaggcttaatgcctacactggcgtcgtctatcttcagcgagccgtcctggagccgcgagatttcgccctcgatgtggaaatgaaactctggcgacaaggttcagtcaccactttcctagctaagatgcacattttcttcacgaccttcgctttatag

SEQ ID NO: 122946 - DNA, 480 bp, Artificial Sequence
  derived and/or modified sequence
atggtgctgctgtgggagcccgccggcgcctggctggccctgggcctggccctggcattaggccccagtgtggccgccgctgctccaaggcaggattgcacgggagtggagtgtcctcccctggagaactgtatagaagaagctctggaaccgggagcatgttgcgccacttgtgtacaacagggttgtgcgtgtgagggttatcagtattacgactgcctgcagggcggcttcgtaagaggccgcgtgccagctggacaaagttatttcgtcgacttcggatctaccgagtgttcctgtccccccggagggggtaagatcagttgtcagttcatgctttgcccagaactgccacccaattgtatcgaagcggtagtagtagccgactcttgtccgcagtgcgggcaggttggttgtgttcatgcagggcacaagtacgccgccggtcatacagtgcatttgcctccatgcagggcctag

SEQ ID NO: 122947 - DNA, 3633 bp, Artificial Sequence
  derived and/or modified sequence
atggagaccagcctgagcctggagagcggccaccacggcagctaccgccgcggcgaccgtcctggactcgcctggaccatggttctgttatgggaacccgctggggcatggctcgctctgggactcgccctggcgctgggcccctctgttgcagcagctgctccacgtcaggattgtaccggcgtcgaatgcccaccactggagaattgcatcgaggaagccctcgagccaggggcgtgttgtgccacctgcgtgcaacagggctgcgcctgtgagggttatcagtattatgattgcctgcagggaggctttgtgaggggtcgagtgccggccggtcagtcctactttgtggatttcgggtcaaccgagtgctcttgtccgcctggaggagggaaaatttcctgtcagtttatgctctgcccagagctccctccaaattgcatagaggccgttgtggttgcagatagttgtccccagtgtggccaggtcgggtgtgtgcatgccggacacaagtatgccgccggacacacggtacaccttccaccgtgccgcgcctgtcactgccccgacgcgggtggcgaattgatatgttatcagttgccaggatgccacgggaactttagtgatgcggaggagggagatccggagcgtcactacgaagacccatacagttacgaccaggaagtggcagaagtggaggcagcgacggctttgggcggtgaggtacaggcaggcgcagtgcaggcaggcgcaggtggccctccagcggccctgggtggaggtagccagccactgtccactatccaggcaccgccttggccggcagtgctgccccggcccaccgcagcagctgctttaggacctccagctccagttcaagcaaaggctagaagagttaccgaagattctgaggaggaggaggaagaggaagaagagagggaagaaatggcggtgacagagcagctagccgcaggcggccacagaggactggacggcttgcctaccacagcccctgccggccccagtctgccgatacaggaagagagggccgaagctggtgctagagccgaagctggtgccagacccgaagagaatctgatcctggacgctcaggccactagcagaagtactggtcccgagggagtgacccatgcaccctcgctgggtaaagctgcgttggtccccacccaagcagtacccgggtccccacgggaccccgtgaagccatctccccacaatatcctttcaaccagtctgcctgatgccgcatggattccccccacacgggaggtgcccaggaagccgcaggttctccctcactctcacgtggaagaagacacagatccgaacagcgtccattccattccccgatcttcacccgaaggctcaactaaggatttgatcgagacctgctgcgcagcaggccagcagtgggccatcgacaacgatgagtgtctcgagatccctgaatctggtaccgaagacaatgtgtgtcgcacggcacagcgtcattgttgcgtgagctatcttcaggaaaagtcctgtatggctggcgttctgggcgccaaggaaggcgagacgtgcggtgcagaggacaatgatagttgcgggatctccctctataagcaatgctgtgattgctgcggactgggactccgtgtacgagccgaaggacaatcttgcgagagtaatcctaatctgggatacccgtgcaaccacgtcatgctgtcgtgttgcgaaggagaggagccacttatagtgcctgaagttcggcggccccctgagccagcagccgctcctagaagagtgtctgaagctgagatggcaggtagagaggctctctctctcggcactgaagcggagctgccaaattcgcttcctggagatgatcaggacgaatgtcttttgctgcccggagagctgtgccagcacttgtgcatcaacacagtcggatcctatcactgcgcctgctttccaggattctccttacaggatgacggtaggacgtgccgacctgaaggccacccacctcagccggaggccccccaagagcctgctttgaaaagtgaattcagccaggtggctagcaacactattcccctccccctgccccaaccgaatacctgcaaagacaacggaccttgcaagcaggtgtgtagcacagttgggggttccgcaatctgttcctgttttcctgggtatgctattatggctgacggggtttcatgcgaagatataaatgagtgcgtgacagatctccacacttgtagccggggggaacactgcgtgaataccctgggatcattccattgttataaggccctgacttgtgagcccggttacgcactcaaggacggcgagtgtgaggatgtggatgagtgcgccatgggcacacacacttgccagcctggctttctgtgccagaacaccaagggctctttctattgtcaggctagacagcggtgtatggatggatttctgcaggatcctgaaggaaattgtgtggatattaatgaatgcaccagcctatctgagccatgccgtcccggcttctcctgtattaacactgtggggtcctacacctgtcagcggaaccccctaatctgcgcccgcggataccacgcatctgacgacgggaccaaatgcgttgatgtaaacgaatgtgaaacaggcgtacatcgatgcggcgaagggcaagtgtgccataatctccctggctcttaccgatgtgactgcaaagctggatttcagagagatgctttcgggagaggttgtatcgacgttaacgagtgctgggcaagccccgggcgtctgtgtcagcacacttgtgaaaacactctcgggtcctatcgctgttcctgcgcctctggatttctccttgcagcagacgggaagagatgcgaagacgtgaacgagtgcgaggcccagaggtgcagccaggagtgcgccaacatctacggatcatatcaatgttattgtcgacagggctatcagttggccgaggacgggcacacgtgtaccgatattgacgagtgcgcccaaggcgctggtatcctttgtacgtttcgatgtctgaatgttccaggatcctatcaatgcgcctgccctgagcaagggtatacaatgaccgcaaatggacgttcgtgtaaggacgtcgatgagtgtgccttaggaactcacaactgttctgaggcagagacatgtcacaatatacagggtagctttagatgccttaggtttgaatgtccccccaactatgtgcaggtttccaaaacgaaatgtgaacggaccacttgtcacgatttcctggagtgccagaactccccagcccgaatcactcattatcaactgaatttccaaacaggactgctggtgccagcccatatcttccgtatcgggcccgcccctgctttcaccggcgataccatcgcattgaacattattaagggcaatgaggagggatacttcggtacgagaaggctaaacgcttatacgggtgtggtgtacctgcagagagccgtactggaaccaagagacttcgcgcttgacgtcgagatgaagctgtggcggcaaggcagcgttacaaccttcctggctaagatgcacatattttttactacgtttgctttgtag

SEQ ID NO: 122948 - DNA, 743 bp, Artificial Sequence
  derived and/or modified sequence
aaaataaacccatttgttaaggctctgggaccaacgctgggcgaaccagctccgctccggaggggtctgcgcggctggcctcgcccgccccctagcggacccgtgcgatagtgcagcctcagccccagcgcacagcgccgcatccagacgctgtccgcgcgcgcagcctgggaggcgctcctcgctcgcctcctgtacccatccagcgaccagccaggctgcggcgaggggattccaaccgaggctccagtgagagacctcagcttagcatcacattaggtgcagccggcaggccatcccaactcgggccgggagcgcacgcgtcactggggccgtcagtcgccgtgcaacttccccggggggagtcaactttagtggaagccgctgaacatcccgaggaactggcacgctgggggctctgggcttgtggccggtagaggattcccgctcatttgcagtggctcagaggagggtggacccagcagatccgtccgtggagtctccaggagtggagccccgggcgcccctacaccctccgacacgccggatccggcccagccgcgccaagccgtaaagggctcgaaggccggggcgcaccgctgccgccagggtcatggagggcgcgctcgcagccaactggagcgccgaggcagccaacgccagcgccgcgccgccgggggccgagggcaaccgcaccgccggacccccgcggcgcaacgaggccctggcgcgcgtggaggtgg

SEQ ID NO: 122949 - DNA, 3555 bp, Artificial Sequence
  derived and/or modified sequence
atggtgctcctgtgggagcccgcaggcgcttggctggcccttggccttgctctggccttaggcccaagcgtagctgccgctgctcccaggcaggattgtaccggcgtggagtgtccaccgctcgagaactgtatagaggaagccttagaacctggagcatgttgcgctacttgtgtgcagcaaggctgtgcttgcgagggttatcagtactatgattgcttgcagggaggcttcgtgaggggacgggtgcccgctggacagtcctattttgtggacttcggtagcaccgagtgctcatgcccccctggaggcggaaaaattagttgtcagttcatgctttgccctgagctacccccaaactgtatcgaggctgttgtggtggccgatagctgcccccagtgcggtcaagtaggttgcgtccacgccggacacaagtacgccgcaggtcacaccgtgcatctaccaccctgtagggcctgccactgtcccgacgcaggtggagaactgatttgctaccagctccccggatgtcacggcaacttctccgatgccgaggagggtgaccctgaaaggcactacgaggacccatattcttacgatcaggaagttgccgaggttgaggctgcaaccgccctgggcggtgaagtacaggcgggagccgtacaagccggtgccggaggcccacccgcagctctcgggggaggatctcagcccctcagcacaatacaggcaccaccttggcctgccgtcctgcctaggcctaccgctgccgcagcacttggtccgccagcacccgtgcaggcaaaggcgagaagagtgacagaggactcagaggaagaggaggaggaggaagaagagcgggaggaaatggcggtcaccgagcagttggctgctggcggtcaccgagggcttgatggactgcccaccaccgctccagcaggaccaagcctgcctatacaggaagagagggccgaggcaggcgctagggcagaagctggtgccaggccagaggaaaacctcattttggacgcacaggccactagccgatctaccggtcccgaaggggtgacccatgcccctagcttggggaaggccgcactagtgccaactcaagccgttcccggtagcccgagggaccccgtaaagccaagtccccacaacattctgtctacaagccttcccgatgcggcatggattcccccaacacgtgaagtgccccgaaagcctcaagtgctaccacactctcacgtggaggaagataccgatccaaacagtgtgcatagcattccgagaagcagcccagaaggttcaactaaggatcttatcgaaacttgttgcgccgcaggtcaacagtgggccattgacaacgatgaatgtctggagatccccgaaagcggcacagaggacaacgtttgtcgaacggcgcagcggcactgttgtgttagttacctgcaggaaaaaagctgcatggctggcgtgctcggggctaaggaaggagagacatgtggagcagaggacaacgactcctgcggcattagtttatacaaacagtgttgcgattgctgtggccttgggttgcgtgttcgagccgagggccaatcatgcgagtctaatccaaacttgggctacccttgtaaccatgtgatgctatcttgttgtgaaggtgaggagcccctcatcgtcccagaggtgaggcggccaccagagcctgccgctgccccaagaagggtgtctgaagcagaaatggccggtcgcgaggctctttccctggggactgaggcggagctgcctaatagcctgcctggtgatgatcaggatgaatgcctcctgcttcctggcgaattgtgccagcacctgtgtatcaacacagtaggtagctaccattgtgcatgttttcctgggttctccctgcaggacgacgggaggacttgccgacctgagggtcacccccctcagccagaggcaccccaagagcctgcgcttaagtctgagttctcgcaggtagcctctaacactattcctctgcccctcccacagcccaacacatgtaaggataacggaccttgcaaacaggtgtgcagcaccgtggggggatccgcaatttgtagttgttttcccggatatgcaattatggccgacggcgtgtcatgcgaagatattaatgagtgtgttacggacctccatacctgcagtagaggagaacactgtgtcaacaccctgggcagctttcactgctataaagcgctcacttgtgagccaggctatgccctgaaggatggcgaatgtgaggatgttgacgaatgcgcgatgggaacacacacctgtcagcccggatttctgtgtcagaacacgaagggatctttttattgccaagcgcgtcagcggtgtatggatggttttttgcaggacccggaaggcaactgtgtcgatattaacgagtgtacaagcttgtctgaaccctgcagaccgggtttcagctgtattaacacagtgggcagctacacttgtcagcggaacccactgatctgtgctagagggtatcatgctagtgatgatggcactaaatgcgtggacgtgaacgagtgtgagacaggcgtacaccggtgcggcgaggggcaagtgtgccacaatctacccggatcatacagatgtgattgcaaggccggtttccagagagatgcatttggaaggggctgtatcgacgtaaatgaatgttgggcctcaccaggaagactgtgccagcatacctgtgaaaataccctgggcagctacagatgttcctgtgcctcaggtttcctgctggccgctgatggaaaacgctgtgaggatgtaaacgagtgtgaggcccaacgatgctcccaggaatgcgcaaatatttatgggtcctaccagtgctattgcaggcaaggctatcaacttgccgaggacggccatacctgtactgatatcgacgaatgcgcccagggtgccggtatcttatgtactttccggtgcctgaatgtccctgggtcgtaccaatgtgcttgtcccgagcagggctacaccatgactgctaatggacgtagctgtaaggatgtcgatgagtgtgcactgggaactcacaactgtagtgaagcagaaacttgtcacaacatccagggaagtttccgttgtctcaggttcgaatgtcctcccaattatgtccaggttagtaagactaaatgtgagcgcacaacttgtcatgacttccttgagtgtcagaacagccctgctagaattactcactaccaactgaatttccaaaccggtcttctggttcccgctcatatatttcgcattgggcctgctcccgctttcaccggggatacgattgctctgaacataatcaaaggcaatgaagagggctatttcggtacccgcagactgaacgcctacaccggtgtagtgtacctccaaagggcagttttggagcctcgagatttcgcactagacgttgagatgaaattatggcgccagggaagtgtcacaacattcctggcaaaaatgcatatcttcttcactacctttgccttatag

SEQ ID NO: 122950 - DNA, 480 bp, Artificial Sequence
  derived and/or modified sequence
atggtgctcctgtgggaacctgctggggcatggttggctttaggactggccctggccttgggaccgagtgtcgcagctgcagctcctagacaggactgcacgggcgttgaatgcccgccacttgagaattgtatagaagaagcactggaaccaggcgcttgctgtgccacttgtgtccagcagggctgcgcgtgtgaaggctatcagtattacgactgtctacaagggggtttcgttcgtggcagagtacctgctggccagagctatttcgtggatttcggttctacagagtgttcctgtcccccagggggtgggaaaatttcctgccagttcatgctctgccctgagctgcctccaaactgtatagaggcagtggtggtcgccgattcatgcccccaatgcggccaggtgggttgcgtacatgccggacacaagtatgctgcagggcatacggtacacctgcctccttgtagggcgtag

SEQ ID NO: 122951 - DNA, 3633 bp, Artificial Sequence
  derived and/or modified sequence
atggagacctctctctccttggagagtggccatcacgggtcctaccggagaggcgaccgaccgggtctggcatggaccatggtgctgctgtgggaacctgcaggtgcatggttggcactggggctggctctggccctgggccctagtgttgctgccgctgcacctaggcaggactgtacaggcgtggagtgtcccccattagaaaactgtattgaagaggcactggagcccggagcttgttgcgccacctgcgtccagcaaggttgcgcctgtgaagggtaccaatactacgactgcctgcagggcggattcgtcaggggtcgagtgcctgccggtcagagctatttcgtcgatttcgggagcaccgagtgctcatgccctcccggtggaggtaaaattagttgccagtttatgctctgcccagaattgccacccaactgcattgaggccgtagtggtggcagactcttgccctcagtgtgggcaagtcggttgtgtgcacgccggtcataaatatgctgcaggacataccgtgcatcttccgccatgtcgtgcttgtcactgtccggacgcaggcggagagctcatatgctaccaactccccggttgccacggaaatttctctgacgccgaggaaggcgatccagaacgccactacgaggacccatattcttacgaccaggaagtggctgaggttgaggccgcaaccgccctgggtggtgaggtgcaggccggagcagtgcaggccggtgccggtggtcccccagccgcacttggcggaggctctcagccactgtccacgatacaggcgcctccctggcccgctgtgcttccacgtcctactgctgctgctgcactgggtccccctgccccagttcaagccaaagcaaggagggtgactgaagattctgaggaggaggaagaggaagaagaagaacgtgaggagatggccgttacagaacaactagccgcaggcggacaccgcggtctggacgggctgcctacaacagctcccgcaggcccttccctgcctattcaggaggaacgcgcagaagcaggcgcaagagccgaggccggtgctcgccctgaggagaatcttatacttgatgcccaagcaacctccagatctacaggtccagaaggagttactcatgcaccatcactcggtaaggcagcgttggtcccaacccaggccgtccctgggtccccgagggacccggtcaaaccctccccacataatattctcagcacgagcctccctgacgcggcttggatcccaccaacccgggaagtgcccagaaaaccccaagtgttgccgcactctcacgtggaggaagatacggatcccaactcggtgcactccatccccagaagttctcccgaagggtccacaaaggatttgatcgaaacttgttgtgcggctgggcaacagtgggctatagataatgacgaatgtcttgagattcccgagagcgggaccgaggacaatgtgtgccgcactgcccagcgccattgctgtgtctcatacctgcaggaaaagtcgtgtatggccggagttttgggcgcaaaagaaggggaaacgtgcggtgctgaagacaacgacagttgtggcatatcgctgtataaacaatgctgcgactgttgtggtcttgggctgcgagtaagggccgaggggcagagctgtgaatctaaccccaatttgggatatccttgcaatcacgtgatgctctcatgttgcgagggggaagagcccttaatcgtccccgaggtccgccgacctcctgagcccgctgccgctcctaggagggtatcggaggcagagatggccggacgcgaggcgctctccctggggaccgaagccgaacttccaaattctctccctggggacgaccaggatgagtgtctgttgttacccggagagctttgccagcatctgtgtatcaatacagtgggatcctatcattgtgcctgcttccctgggttctcccttcaggacgatggcaggacatgccggccagaaggacatccgcctcagccggaagctccacaagaacctgctctgaagtctgaatttagtcaggtggccagtaatacaatccccctgcccctgccacaaccaaacacttgcaaagataatggaccatgcaaacaagtgtgcagtaccgttggcggaagcgccatatgctcatgctttcccggatatgctataatggccgacggcgtgtcttgtgaggacataaacgagtgtgtgaccgatctgcatacatgctcccgcggagaacattgcgtgaatacattagggagcttccattgttacaaggctcttacatgcgaacccggttacgccctcaaggacggagaatgcgaagatgtggacgagtgtgctatgggtacgcatacgtgccaacccggatttctgtgtcaaaataccaaaggaagtttttactgtcaggcccgacagcgctgcatggatggatttctccaggacccagagggcaactgtgtcgacatcaatgagtgcacttccttatccgagccctgcagaccaggcttctcgtgcatcaacacagtcggcagctacacctgccaaaggaatccactgatatgtgcccgagggtaccatgcgagtgatgatggcacaaaatgtgtcgacgttaatgagtgcgagactggagtgcaccgctgtggtgagggccaggtttgccacaaccttcccggtagctacagatgcgactgcaaggctggattccagagggatgctttcggtagaggatgtatcgatgtgaatgaatgctgggcttcacccggtcgactgtgccagcacacatgcgagaatacattaggaagttaccgctgcagttgcgcatcagggttcctgctggccgcagatgggaagaggtgcgaagatgtgaacgagtgcgaagcacagaggtgttctcaggagtgtgctaacatctacggaagttaccaatgctactgtagacagggttatcagctcgctgaagatggacatacatgcacagatatcgatgagtgtgcccaaggagccggaattctatgcacattcagatgcctgaacgtgcccggatcctaccagtgcgcttgcccggaacagggatacaccatgaccgcaaacggacggtcttgtaaagatgtggatgaatgtgcactgggaacacataactgcagtgaggctgagacctgccacaacatacagggatcctttagatgcctgagatttgaatgcccccctaactatgtgcaagtgtctaagactaaatgtgaaagaacaacctgtcatgatttcttagagtgtcagaacagccccgcaagaattacacattatcaattgaattttcaaaccggattgttagttcctgcccacatcttccgaattgggcctgctccagcatttacaggtgacacaattgcgctgaatatcatcaagggcaatgaagagggatactttggaacccgacgcctaaacgcctacaccggcgtggtttacctccagcgggctgtcttggaaccaagggactttgccttggatgtggagatgaagctctggaggcagggatcagtgacaacatttctggccaaaatgcatatcttctttaccaccttcgctctatag

SEQ ID NO: 122952 - DNA, 3555 bp, Artificial Sequence
  derived and/or modified sequence
atggtgctgctgtgggagcccgccggcgcctggctggccctgggcctggccctggccctgggccccagcgtggccgccgccgcccccagacaggactgcaccggcgtggagtgcccccccctggagaactgcatcgaggaggccctggagcccggcgcctgctgcgccacctgcgtgcagcagggctgcgcctgcgagggctaccagtactacgactgcctgcagggcggcttcgtgagaggcagagtgcccgccggccagagctacttcgtggacttcggcagcaccgagtgcagctgcccccccggcggcggcaagatcagctgccagttcatgctgtgccccgagctgccccccaactgcatcgaggccgtggtggtggccgacagctgcccccagtgcggccaggtgggctgcgtgcacgccggccacaagtacgccgccggccacaccgtgcacctgcccccctgcagagcctgccactgccccgacgccggcggcgagctgatctgctaccagctgcccggctgccacggcaacttcagcgacgccgaggagggcgaccccgagagacactacgaggacccctacagctacgaccaggaggtggccgaggtggaggccgccaccgccctgggcggcgaggtgcaggccggcgccgtgcaggccggcgccggcggcccccccgccgccctgggcggcggcagccagcccctgagcaccatccaggcccccccctggcccgccgtgctgcccagacccaccgccgccgccgccctgggcccccccgcccccgtgcaggccaaggccagaagagtgaccgaggacagcgaggaggaggaggaggaggaggaggagagagaggagatggccgtgaccgagcagctggccgccggcggccacagaggcctggacggcctgcccaccaccgcccccgccggccccagcctgcccatccaggaggagagagccgaggccggcgccagagccgaggccggcgccagacccgaggagaacctgatcctggacgcccaggccaccagcagaagcaccggccccgagggcgtgacccacgcccccagcctgggcaaggccgccctggtgcccacccaggccgtgcccggcagccccagagaccccgtgaagcccagcccccacaacatcctgagcaccagcctgcccgacgccgcctggatcccccccaccagagaggtgcccagaaagccccaggtgctgccccacagccacgtggaggaggacaccgaccccaacagcgtgcacagcatccccagaagcagccccgagggcagcaccaaggacctgatcgagacctgctgcgccgccggccagcagtgggccatcgacaacgacgagtgcctggagatccccgagagcggcaccgaggacaacgtgtgcagaaccgcccagagacactgctgcgtgagctacctgcaggagaagagctgcatggccggcgtgctgggcgccaaggagggcgagacctgcggcgccgaggacaacgacagctgcggcatcagcctgtacaagcagtgctgcgactgctgcggcctgggcctgagagtgagagccgagggccagagctgcgagagcaaccccaacctgggctacccctgcaaccacgtgatgctgagctgctgcgagggcgaggagcccctgatcgtgcccgaggtgagaagaccccccgagcccgccgccgcccccagaagagtgagcgaggccgagatggccggcagagaggccctgagcctgggcaccgaggccgagctgcccaacagcctgcccggcgacgaccaggacgagtgcctgctgctgcccggcgagctgtgccagcacctgtgcatcaacaccgtgggcagctaccactgcgcctgcttccccggcttcagcctgcaggacgacggcagaacctgcagacccgagggccaccccccccagcccgaggccccccaggagcccgccctgaagagcgagttcagccaggtggccagcaacaccatccccctgcccctgccccagcccaacacctgcaaggacaacggcccctgcaagcaggtgtgcagcaccgtgggcggcagcgccatctgcagctgcttccccggctacgccatcatggccgacggcgtgagctgcgaggacatcaacgagtgcgtgaccgacctgcacacctgcagcagaggcgagcactgcgtgaacaccctgggcagcttccactgctacaaggccctgacctgcgagcccggctacgccctgaaggacggcgagtgcgaggacgtggacgagtgcgccatgggcacccacacctgccagcccggcttcctgtgccagaacaccaagggcagcttctactgccaggccagacagagatgcatggacggcttcctgcaggaccccgagggcaactgcgtggacatcaacgagtgcaccagcctgagcgagccctgcagacccggcttcagctgcatcaacaccgtgggcagctacacctgccagagaaaccccctgatctgcgccagaggctaccacgccagcgacgacggcaccaagtgcgtggacgtgaacgagtgcgagaccggcgtgcacagatgcggcgagggccaggtgtgccacaacctgcccggcagctacagatgcgactgcaaggccggcttccagagagacgccttcggcagaggctgcatcgacgtgaacgagtgctgggccagccccggcagactgtgccagcacacctgcgagaacaccctgggcagctacagatgcagctgcgccagcggcttcctgctggccgccgacggcaagagatgcgaggacgtgaacgagtgcgaggcccagagatgcagccaggagtgcgccaacatctacggcagctaccagtgctactgcagacagggctaccagctggccgaggacggccacacctgcaccgacatcgacgagtgcgcccagggcgccggcatcctgtgcaccttcagatgcctgaacgtgcccggcagctaccagtgcgcctgccccgagcagggctacaccatgaccgccaacggcagaagctgcaaggacgtggacgagtgcgccctgggcacccacaactgcagcgaggccgagacctgccacaacatccagggcagcttcagatgcctgagattcgagtgcccccccaactacgtgcaggtgagcaagaccaagtgcgagagaaccacctgccacgacttcctggagtgccagaacagccccgccagaatcacccactaccagctgaacttccagaccggcctgctggtgcccgcccacatcttcagaatcggccccgcccccgccttcaccggcgacaccatcgccctgaacatcatcaagggcaacgaggagggctacttcggcaccagaagactgaacgcctacaccggcgtggtgtacctgcagagagccgtgctggagcccagagacttcgccctggacgtggagatgaagctgtggagacagggcagcgtgaccaccttcctggccaagatgcacatcttcttcaccaccttcgccctgtag

SEQ ID NO: 122953 - DNA, 480 bp, Artificial Sequence
  derived and/or modified sequence
atggtgctgctgtgggagcccgccggcgcctggctggccctgggcctggccctggccctgggccccagcgtggccgccgccgcccccagacaggactgcaccggcgtggagtgcccccccctggagaactgcatcgaggaggccctggagcccggcgcctgctgcgccacctgcgtgcagcagggctgcgcctgcgagggctaccagtactacgactgcctgcagggcggcttcgtgagaggcagagtgcccgccggccagagctacttcgtggacttcggcagcaccgagtgcagctgcccccccggcggcggcaagatcagctgccagttcatgctgtgccccgagctgccccccaactgcatcgaggccgtggtggtggccgacagctgcccccagtgcggccaggtgggctgcgtgcacgccggccacaagtacgccgccggccacaccgtgcacctgcccccctgcagagcctag

SEQ ID NO: 122954 - DNA, 3633 bp, Artificial Sequence
  derived and/or modified sequence
atggagaccagcctgagcctggagagcggccaccacggcagctacagaagaggcgacagacccggcctggcctggaccatggtgctgctgtgggagcccgccggcgcctggctggccctgggcctggccctggccctgggccccagcgtggccgccgccgcccccagacaggactgcaccggcgtggagtgcccccccctggagaactgcatcgaggaggccctggagcccggcgcctgctgcgccacctgcgtgcagcagggctgcgcctgcgagggctaccagtactacgactgcctgcagggcggcttcgtgagaggcagagtgcccgccggccagagctacttcgtggacttcggcagcaccgagtgcagctgcccccccggcggcggcaagatcagctgccagttcatgctgtgccccgagctgccccccaactgcatcgaggccgtggtggtggccgacagctgcccccagtgcggccaggtgggctgcgtgcacgccggccacaagtacgccgccggccacaccgtgcacctgcccccctgcagagcctgccactgccccgacgccggcggcgagctgatctgctaccagctgcccggctgccacggcaacttcagcgacgccgaggagggcgaccccgagagacactacgaggacccctacagctacgaccaggaggtggccgaggtggaggccgccaccgccctgggcggcgaggtgcaggccggcgccgtgcaggccggcgccggcggcccccccgccgccctgggcggcggcagccagcccctgagcaccatccaggcccccccctggcccgccgtgctgcccagacccaccgccgccgccgccctgggcccccccgcccccgtgcaggccaaggccagaagagtgaccgaggacagcgaggaggaggaggaggaggaggaggagagagaggagatggccgtgaccgagcagctggccgccggcggccacagaggcctggacggcctgcccaccaccgcccccgccggccccagcctgcccatccaggaggagagagccgaggccggcgccagagccgaggccggcgccagacccgaggagaacctgatcctggacgcccaggccaccagcagaagcaccggccccgagggcgtgacccacgcccccagcctgggcaaggccgccctggtgcccacccaggccgtgcccggcagccccagagaccccgtgaagcccagcccccacaacatcctgagcaccagcctgcccgacgccgcctggatcccccccaccagagaggtgcccagaaagccccaggtgctgccccacagccacgtggaggaggacaccgaccccaacagcgtgcacagcatccccagaagcagccccgagggcagcaccaaggacctgatcgagacctgctgcgccgccggccagcagtgggccatcgacaacgacgagtgcctggagatccccgagagcggcaccgaggacaacgtgtgcagaaccgcccagagacactgctgcgtgagctacctgcaggagaagagctgcatggccggcgtgctgggcgccaaggagggcgagacctgcggcgccgaggacaacgacagctgcggcatcagcctgtacaagcagtgctgcgactgctgcggcctgggcctgagagtgagagccgagggccagagctgcgagagcaaccccaacctgggctacccctgcaaccacgtgatgctgagctgctgcgagggcgaggagcccctgatcgtgcccgaggtgagaagaccccccgagcccgccgccgcccccagaagagtgagcgaggccgagatggccggcagagaggccctgagcctgggcaccgaggccgagctgcccaacagcctgcccggcgacgaccaggacgagtgcctgctgctgcccggcgagctgtgccagcacctgtgcatcaacaccgtgggcagctaccactgcgcctgcttccccggcttcagcctgcaggacgacggcagaacctgcagacccgagggccaccccccccagcccgaggccccccaggagcccgccctgaagagcgagttcagccaggtggccagcaacaccatccccctgcccctgccccagcccaacacctgcaaggacaacggcccctgcaagcaggtgtgcagcaccgtgggcggcagcgccatctgcagctgcttccccggctacgccatcatggccgacggcgtgagctgcgaggacatcaacgagtgcgtgaccgacctgcacacctgcagcagaggcgagcactgcgtgaacaccctgggcagcttccactgctacaaggccctgacctgcgagcccggctacgccctgaaggacggcgagtgcgaggacgtggacgagtgcgccatgggcacccacacctgccagcccggcttcctgtgccagaacaccaagggcagcttctactgccaggccagacagagatgcatggacggcttcctgcaggaccccgagggcaactgcgtggacatcaacgagtgcaccagcctgagcgagccctgcagacccggcttcagctgcatcaacaccgtgggcagctacacctgccagagaaaccccctgatctgcgccagaggctaccacgccagcgacgacggcaccaagtgcgtggacgtgaacgagtgcgagaccggcgtgcacagatgcggcgagggccaggtgtgccacaacctgcccggcagctacagatgcgactgcaaggccggcttccagagagacgccttcggcagaggctgcatcgacgtgaacgagtgctgggccagccccggcagactgtgccagcacacctgcgagaacaccctgggcagctacagatgcagctgcgccagcggcttcctgctggccgccgacggcaagagatgcgaggacgtgaacgagtgcgaggcccagagatgcagccaggagtgcgccaacatctacggcagctaccagtgctactgcagacagggctaccagctggccgaggacggccacacctgcaccgacatcgacgagtgcgcccagggcgccggcatcctgtgcaccttcagatgcctgaacgtgcccggcagctaccagtgcgcctgccccgagcagggctacaccatgaccgccaacggcagaagctgcaaggacgtggacgagtgcgccctgggcacccacaactgcagcgaggccgagacctgccacaacatccagggcagcttcagatgcctgagattcgagtgcccccccaactacgtgcaggtgagcaagaccaagtgcgagagaaccacctgccacgacttcctggagtgccagaacagccccgccagaatcacccactaccagctgaacttccagaccggcctgctggtgcccgcccacatcttcagaatcggccccgcccccgccttcaccggcgacaccatcgccctgaacatcatcaagggcaacgaggagggctacttcggcaccagaagactgaacgcctacaccggcgtggtgtacctgcagagagccgtgctggagcccagagacttcgccctggacgtggagatgaagctgtggagacagggcagcgtgaccaccttcctggccaagatgcacatcttcttcaccaccttcgccctgtag

SEQ ID NO: 122955 - protein, 2912 aa, Artificial Sequence
  derived and/or modified sequence
MGRRRRLCLQLYFLWLGCVVLWAQGTAGQPQPPPPKPPRPQPPPQQVRSATAGSEGGFLAPEYREEGAAVASRVRRRGQQDVLRGPNVCGSRFHSYCCPGWKTLPGGNQCIVPICRNSCGDGFCSRPNMCTCSSGQISSTCGSKSIQQCSVRCMNGGTCADDHCQCQKGYIGTYCGQPVCENGCQNGGRCIGPNRCACVYGFTGPQCERDYRTGPCFTQVNNQMCQGQLTGIVCTKTLCCATIGRAWGHPCEMCPAQPQPCRRGFIPNIRTGACQDVDECQAIPGICQGGNCINTVGSFECRCPAGHKQSETTQKCEDIDECSIIPGICETGECSNTVGSYFCVCPRGYVTSTDGSRCIDQRTGMCFSGLVNGRCAQELPGRMTKMQCCCEPGRCWGIGTIPEACPVRGSEEYRRLCMDGLPMGGIPGSAGSRPGGTGGNGFAPSGNGNGYGPGGTGFIPIPGGNGFSPGVGGAGVGAGGQGPIITGLTILNQTIDICKHHANLCLNGRCIPTVSSYRCECNMGYKQDANGDCIDVDECTSNPCTNGDCVNTPGSYYCKCHAGFQRTPTKQACIDIDECIQNGVLCKNGRCVNTDGSFQCICNAGFELTTDGKNCVDHDECTTTNMCLNGMCINEDGSFKCICKPGFVLAPNGRYCTDVDECQTPGICMNGHCINSEGSFRCDCPPGLAVGMDGRVCVDTHMRSTCYGGIKKGVCVRPFPGAVTKSECCCANPDYGFGEPCQPCPAKNSAEFHGLCSSGVGITVDGRDINECALDPDICANGICENLRGSYRCNCNSGYEPDASGRNCIDIDECLVNRLLCDNGLCRNTPGSYSCTCPPGYVFRTETETCEDINECESNPCVNGACRNNLGSFNCECSPGSKLSSTGLICIDSLKGTCWLNIQDSRCEVNINGATLKSECCATLGAAWGSPCERCELDTACPRGLARIKGVTCEDVNECEVFPGVCPNGRCVNSKGSFHCECPEGLTLDGTGRVCLDIRMEQCYLKWDEDECIHPVPGKFRMDACCCAVGAAWGTECEECPKPGTKEYETLCPRGAGFANRGDVLTGRPFYKDINECKAFPGMCTYGKCRNTIGSFKCRCNSGFALDMEERNCTDIDECRISPDLCGSGICVNTPGSFECECFEGYESGFMMMKNCMDIDECERNPLLCRGGTCVNTEGSFQCDCPLGHELSPSREDCVDINECSLSDNLCRNGKCVNMIGTYQCSCNPGYQATPDRQGCTDIDECMIMNGGCDTQCTNSEGSYECSCSEGYALMPDGRSCADIDECENNPDICDGGQCTNIPGEYRCLCYDGFMASMDMKTCIDVNECDLNSNICMFGECENTKGSFICHCQLGYSVKKGTTGCTDVDECEIGAHNCDMHASCLNIPGSFKCSCREGWIGNGIKCIDLDECSNGTHQCSINAQCVNTPGSYRCACSEGFTGDGFTCSDVDECAENINLCENGQCLNVPGAYRCECEMGFTPASDSRSCQDIDECSFQNICVFGTCNNLPGMFHCICDDGYELDRTGGNCTDIDECADPINCVNGLCVNTPGRYECNCPPDFQLNPTGVGCVDNRVGNCYLKFGPRGDGSLSCNTEIGVGVSRSSCCCSLGKAWGNPCETCPPVNSTEYYTLCPGGEGFRPNPITIILEDIDECQELPGLCQGGNCINTFGSFQCECPQGYYLSEDTRICEDIDECFAHPGVCGPGTCYNTLGNYTCICPPEYMQVNGGHNCMDMRKSFCYRSYNGTTCENELPFNVTKRMCCCTYNVGKAWNKPCEPCPTPGTADFKTICGNIPGFTFDIHTGKAVDIDECKEIPGICANGVCINQIGSFRCECPTGFSYNDLLLVCEDIDECSNGDNLCQRNADCINSPGSYRCECAAGFKLSPNGACVDRNECLEIPNVCSHGLCVDLQGSYQCICHNGFKASQDQTMCMDVDECERHPCGNGTCKNTVGSYNCLCYPGFELTHNNDCLDIDECSSFFGQVCRNGRCFNEIGSFKCLCNEGYELTPDGKNCIDTNECVALPGSCSPGTCQNLEGSFRCICPPGYEVKSENCIDINECDEDPNICLFGSCTNTPGGFQCLCPPGFVLSDNGRRCFDTRQSFCFTNFENGKCSVPKAFNTTKAKCCCSKMPGEGWGDPCELCPKDDEVAFQDLCPYGHGTVPSLHDTREDVNECLESPGICSNGQCINTDGSFRCECPMGYNLDYTGVRCVDTDECSIGNPCGNGTCTNVIGSFECNCNEGFEPGPMMNCEDINECAQNPLLCAFRCMNTFGSYECTCPIGYALREDQKMCKDLDECAEGLHDCESRGMMCKNLIGTFMCICPPGMARRPDGEGCVDENECRTKPGICENGRCVNIIGSYRCECNEGFQSSSSGTECLDNRQGLCFAEVLQTICQMASSSRNLVTKSECCCDGGRGWGHQCELCPLPGTAQYKKICPHGPGYTTDGRDIDECKVMPNLCTNGQCINTMGSFRCFCKVGYTTDISGTSCIDLDECSQSPKPCNYICKNTEGSYQCSCPRGYVLQEDGKTCKDLDECQTKQHNCQFLCVNTLGGFTCKCPPGFTQHHTACIDNNECGSQPSLCGAKGICQNTPGSFSCECQRGFSLDATGLNCEDVDECDGNHRCQHGCQNILGGYRCGCPQGYIQHYQWNQCVDENECSNPNACGSASCYNTLGSYKCACPSGFSFDQFSSACHDVNECSSSKNPCNYGCSNTEGGYLCGCPPGYYRVGQGHCVSGMGFNKGQYLSLDTEVDEENALSPEACYECKINGYSKKDSRQKRSIHEPDPTAVEQISLESVDMDSPVNMKFNLSHLGSKEHILELRPAIQPLNNHIRYVISQGNDDSVFRIHQRNGLSYLHTAKKKLMPGTYTLEITSIPLYKKKELKKLEESNEDDYLLGELGEALRMRLQIQLY

SEQ ID NO: 122956 - DNA, 96 bp, Artificial Sequence
  derived and/or modified sequence
atgctcaggggtccgggacccgggcggctgctgctgctagcagtcctgtgcctggggacatcggtgcgctgcaccgaaaccgggaagagcaagagg

SEQ ID NO: 122957 - DNA, 10724 bp, Artificial Sequence
  derived and/or modified sequence
ctttccaatatccgtcttcggagcgcacgggaatccgccgagctctgcgtgcaggcccttttttcttttgaggttcacattttttgaaattttacgccagggcttttgtaatttcctcccccgcccgctgacggtcctggagtcgctcggggctttaggccggttatgcaacgtgtaccgctcggggctgccggctgcacctccgccgcgcctcgccgctcactgcgctagacccggcgccccgcgtctcgcttcgcgggcagtcagggggccggcgctctgtcgaggtctccagctagagcagggagcccgagcccgagggagtccccggagccgacgaagggcttattagaccctgactcttttctgaggcgcgcagattttgtctttgatcactccctctccgcgggtctacggccgcgcgctttcggcgccggcgatggggagaagacggaggctgtgtctccagctctacttcctgtggctgggctgtgtggtgctctgggcgcagggcacggccggccagcctcagcctcctccgcccaagccgccccggccccagccgccgccgcaacaggttcggtccgctacagcaggctctgaaggcgggtttctagcgcccgagtatcgcgaggagggtgccgcagtggccagccgcgtccgccggcgaggacagcaggacgtgctccgagggcccaacgtgtgcggctccagattccactcctactgctgccctggatggaagacgctccctggaggaaaccagtgcattgtcccgatttgtagaaatagttgtggagatggattttgttcccgtcctaacatgtgtacttgttccagtgggcaaatatcatcaacctgtggatcaaaatcaattcagcagtgcagtgtgagatgcatgaatggtgggacctgtgcagatgaccactgccagtgccagaaaggatatattggaacttattgtggacaacctgtctgtgaaaatggatgtcagaatggtggacgttgcatcggacccaaccgctgtgcttgtgtttatgggttcactggtccacagtgtgaaagagattacaggacaggcccgtgtttcactcaggtcaacaaccagatgtgccaagggcagctgacaggcattgtctgcacgaagactctgtgctgtgccaccattggacgggcgtggggccatccctgtgagatgtgtccagcccagcctcagccctgccgacggggtttcatccccaacatccgcactggagcttgccaagatgttgatgaatgccaggctatcccagggatatgccaaggaggaaactgtatcaatacagtgggctcttttgaatgcagatgccctgctggtcacaaacagagtgaaactactcagaaatgtgaagacattgatgagtgcagcatcattcctgggatatgtgaaactggtgaatgttccaacaccgtgggaagctatttttgtgtttgtccacgtggatatgtaacctcaacagatggctctcgatgcatcgatcagagaacaggcatgtgtttctcgggcctggtgaatggccgctgtgcacaagagctcccggggagaatgacgaaaatgcagtgctgctgtgagcctggccgctgctggggcatcggaaccattcctgaagcctgtcctgtcagaggttctgaggaatatcgcagactttgcatggatggacttccaatgggaggaattccagggagtgctggttccagacctggaggcactgggggaaatggctttgccccaagtggcaatggcaatggctatggcccaggagggacaggcttcatccccatccctggaggcaatggcttttctcctggcgttgggggagccggtgtgggggccgggggacagggacctatcatcactggactaacaattctgaaccagacaatagatatctgtaagcatcatgctaacctttgtttaaatggacgctgtataccaactgtctcaagctaccgatgtgaatgcaacatgggttataagcaggatgcaaatggagattgtatagatgttgatgaatgcacatcaaatccctgcactaatggagattgtgttaacacacctggttcctattattgtaaatgtcatgctggattccagaggactcctaccaagcaagcatgcattgatattgatgagtgcatccagaatggggttctttgtaaaaacggtcgatgcgtgaacacagatggaagtttccagtgcatttgcaatgccggctttgaattaactacagatggaaaaaactgtgttgatcatgatgaatgtacaactaccaacatgtgtttgaatggaatgtgcatcaatgaagatggcagcttcaagtgcatctgcaaaccaggatttgtcttggctccaaatgggcgttactgtactgatgttgatgaatgccagaccccaggaatctgcatgaatgggcactgcatcaacagtgaagggtccttccgctgtgactgtcccccaggcctggctgtgggcatggatggacgtgtgtgtgttgatactcacatgcgcagtacctgctatggaggaatcaagaaaggagtgtgtgtgcgtcctttccccggtgcagtgaccaagtccgaatgctgctgtgccaatccagactatggttttggagaaccctgccagccatgccctgcaaaaaattcagctgaattccacggcctttgtagtagtggagtaggtatcactgtggatggaagagatatcaatgaatgtgctttggatcctgatatatgtgccaatgggatttgtgaaaacttacgtggtagttaccgttgtaattgcaacagtggctatgaaccagatgcctctggaagaaactgtattgacattgatgaatgtttagtaaacagactgctttgtgataacggattgtgccgaaacacgccaggaagttacagctgtacgtgcccaccagggtatgtgttcaggactgagacagagacctgtgaagatataaatgaatgtgaaagcaacccatgtgtcaatggggcctgcagaaacaaccttggatctttcaattgtgaatgttcgcccggcagcaaactcagctccacaggattgatctgtattgacagcctgaaggggacctgttggctcaacatccaggacagccgctgtgaggtgaatattaatggagccactctgaaatctgaatgctgtgccaccctcggagccgcctgggggagcccctgtgagcggtgtgaactagatacagcttgcccaagagggcttgccaggattaaaggtgttacgtgtgaagatgttaatgagtgtgaggtgttccctggcgtttgtccaaatggacgctgtgtcaacagtaagggatcttttcattgcgagtgccctgaaggccttacgttggatgggactggccgtgtatgtttggatattcgcatggagcagtgttacttgaagtgggatgaagatgaatgcatccaccccgttcctggaaagttccgcatggatgcctgctgctgtgctgtcggggcggcttggggcaccgagtgtgaggagtgccccaaacctggcaccaaggaatacgagacgctgtgcccccgcggggctggctttgctaaccgaggggatgttcttactgggcggccattttacaaagacatcaatgaatgcaaagcatttcctgggatgtgcacttatgggaagtgcagaaatacaatcggaagcttcaaatgccgttgcaatagtggctttgctctagacatggaggaaagaaactgcacggacatcgacgagtgcaggatttctcctgacctctgtggcagtggaatctgcgtcaatacaccgggcagctttgagtgcgagtgcttcgaaggctatgaaagtggcttcatgatgatgaagaactgcatggacattgacgaatgtgaacgtaaccctctcctttgtaggggtggcacctgtgtgaacactgagggcagctttcagtgtgactgcccactgggacacgagctgtcaccatcccgtgaggactgtgtggatattaatgaatgctccctgagtgacaatctctgcagaaatggaaaatgtgtgaacatgattggaacctatcagtgctcttgcaatcctggatatcaggctacgccagaccgccagggctgtacagatattgatgaatgtatgataatgaacggaggctgtgacacccagtgcacaaattcagagggaagctacgaatgcagctgcagtgagggttatgccctgatgccagatgggagatcgtgtgcagacattgatgaatgtgaaaacaatcctgatatctgtgatggcggccagtgtaccaacattcctggagagtatcgctgcctctgctatgatggcttcatggcttccatggacatgaaaacatgcattgatgtcaatgaatgtgacctaaattcaaatatctgcatgtttggggaatgtgagaacacaaagggatccttcatttgccactgtcagctgggttactcagtgaagaaggggaccacaggatgtacagatgtggatgagtgtgaaattggtgctcataactgcgacatgcatgcctcatgtctgaatatcccaggaagcttcaagtgtagctgcagagaaggctggattggaaacggcatcaagtgtattgatctggacgaatgttctaatggaacccaccagtgtagcatcaatgctcagtgtgtaaataccccgggctcataccgctgtgcctgctccgaaggtttcactggtgatggctttacctgctcagatgttgatgagtgtgcagaaaacataaacctctgtgagaacggacagtgccttaatgtcccgggtgcatatcgctgcgagtgtgagatgggcttcactccagcctcagacagcagatcctgccaagatattgatgaatgctccttccaaaacatttgtgtctttggaacatgtaataacctgcctggaatgtttcattgcatctgcgatgatggttatgaattggacagaacaggagggaactgtacagatattgatgagtgtgcagatcctataaactgtgtcaatggcctatgtgtcaacacgcctggtcgctatgagtgtaactgcccacccgattttcagttgaacccaactggtgtgggttgtgttgacaaccgtgtgggcaactgctacctgaagtttggacctcgaggagatgggagtctgtcttgcaacaccgagatcggggtgggcgtcagtcgctcttcatgctgctgctctctgggaaaggcctggggaaacccctgtgagacatgcccccctgtcaatagcactgaatattacaccctgtgtcccggaggtgaaggcttcagacctaaccccatcacaatcattttagaagacattgacgaatgccaggagttaccaggtctctgccagggtggaaactgcatcaacacttttgggagcttccagtgtgagtgcccacaaggctactacctcagcgaggatacccgcatctgtgaagatattgatgagtgttttgcacatcctggtgtgtgtgggcctgggacctgctataacaccctgggaaattacacctgcatttgcccacctgagtacatgcaggtcaatggaggccacaactgcatggacatgagaaaaagcttttgctaccgaagctataatggaaccacttgtgagaatgagttgcctttcaatgtgacaaaaaggatgtgctgctgcacatataatgtgggcaaagcctggaacaaaccttgtgaaccatgcccaactccaggaacagctgactttaaaaccatatgtggaaatattcctggattcacctttgacattcacacaggaaaagctgttgacattgatgaatgtaaagagattccaggcatttgtgcaaatggtgtgtgcattaaccagattggcagtttccgctgtgaatgccctacaggattcagttacaatgacctgctgttggtttgtgaagatatagatgagtgcagcaatggtgataatctctgccagcggaatgcagactgcatcaatagtcctggtagttaccgctgtgaatgtgccgcgggtttcaaactttcacccaatggggcctgtgtagatcgcaatgaatgtttagaaattcctaacgtttgcagtcatggcttgtgtgttgatctgcaaggaagttaccagtgcatctgccacaatggctttaaggcttctcaggaccagaccatgtgcatggatgttgatgagtgcgagcggcatccatgtggaaatggaacttgtaaaaacaccgttggatcctataactgtctgtgctacccagggtttgaactcactcataataatgattgcctggacatagatgagtgcagttccttttttggtcaggtgtgcagaaatggacgttgttttaatgaaattggttctttcaagtgtctatgtaacgaaggttatgaacttaccccagatggcaaaaactgtatagacactaatgagtgtgtcgcccttcccggctcttgctctcctggtacctgtcagaatttggagggatccttcagatgcatctgtcccccagggtatgaagtaaaaagcgagaactgcattgatataaatgaatgtgatgaagatcccaacatttgtctttttggttcctgtactaatactccagggggcttccagtgcctctgcccccctggctttgtactatctgataatggacggagatgctttgatactcgccagagcttctgcttcacaaattttgaaaatggaaagtgttctgtacccaaagctttcaacaccacaaaagcaaaatgctgctgtagtaagatgccaggagagggctggggggacccctgtgagctgtgccccaaagacgatgaagttgcatttcaggatttgtgtccatatggccatggaactgtccctagtcttcatgatacacgtgaagatgtcaatgagtgtcttgagagcccaggcatttgttcaaatggtcaatgtatcaacaccgacggatcttttcgctgtgaatgtccaatgggctacaaccttgactacactggagtacgctgtgtggatactgatgagtgttcaatcggcaatccgtgtggaaatggtacatgcaccaatgttattgggagttttgaatgcaattgcaatgaaggctttgagccagggcccatgatgaattgtgaagatatcaacgaatgtgcccagaacccactgctgtgtgctttccgctgcatgaacacttttgggtcctatgaatgcacgtgcccgattggctatgccctcagggaagatcaaaagatgtgcaaagatctggatgaatgtgctgaagggttacacgactgtgaatctaggggcatgatgtgtaagaatctaatcggcaccttcatgtgcatctgccctcctggaatggcccgaaggcccgatggagaaggctgtgtagatgaaaatgaatgcaggaccaagccaggaatctgtgaaaatggacgttgtgttaacattattggaagctatagatgtgagtgtaatgaaggattccagtcaagttcttcaggcactgaatgccttgacaatcgacagggtctctgctttgcagaggtactgcagacaatatgtcaaatggcatccagtagtcgcaatctcgtcactaagtcagaatgctgctgtgatggtgggcgaggctggggccaccagtgcgagctttgcccacttcctggaactgcccagtacaaaaagatatgtcctcatggcccaggatatacaactgatggaagagatattgatgaatgtaaggtaatgccaaacctctgcaccaatggtcagtgcatcaataccatgggctcattccgatgcttctgcaaggttggctacaccacagacatcagtggaacctcttgtatagaccttgatgaatgctcccagtccccgaaaccatgcaactacatctgcaagaacactgaggggagttatcagtgttcatgtccgagggggtatgtcctgcaagaggatggaaagacatgcaaagaccttgatgaatgtcaaacaaagcagcataactgccagttcctctgtgtcaacaccctgggggggtttacctgtaaatgtccacctggtttcacacagcatcacactgcttgtatcgacaacaacgaatgtgggtctcaaccttcgctttgtggagcaaagggaatctgtcaaaacactccaggcagtttcagctgtgaatgccaaagagggttctctcttgatgccaccggactgaactgtgaagatgttgatgaatgtgatgggaaccacaggtgccaacacggctgccagaacatcctgggtggctacagatgtggctgcccccaaggctacatccagcactaccagtggaatcagtgtgtcgatgagaatgaatgctccaatcccaatgcctgtggctctgcttcctgctacaacaccctggggagttacaagtgcgcctgcccctcggggttctccttcgaccagttctccagtgcctgccacgacgtgaatgagtgctcgtcctccaagaacccctgcaattacggctgctctaacacggaggggggctacctctgtggctgcccccctgggtattacagagtgggacaaggccactgtgtctcaggaatgggatttaacaaggggcagtacctgtcactggatacagaggtcgatgaggaaaatgctctgtccccagaagcatgctacgagtgcaaaatcaacggctattctaagaaagacagcaggcagaagagaagtattcatgaacctgatcccactgctgttgaacagatcagcctagagagtgtcgacatggacagccccgtcaacatgaagttcaacctctcccacctcggctctaaggagcacatcctggaactaaggcccgccatccagcccctcaacaaccacatccgttatgtcatctctcaagggaacgatgacagcgtcttccgcatccaccaaaggaatgggctcagctacttgcacacggccaagaagaagctcatgcccggcacatacacactggaaatcactagcatccctctctacaagaagaaggagcttaagaaactggaagagagcaatgaggatgactacctcctaggggagcttggggaggctctcagaatgaggctgcagattcagctctattaacccttcacagacttgggcccaggctcaaatcctagcacagccagtctgcagaagcatttgaaaagtcaaggactaattttaaagaggaaaaataataataactcttgtttctttcctccctgtcttagactttgaatgttgaccctcacagggagggataatttagactctggtatggccaaagatttgagcacaaaggcaaccgtggttactgtattttttatataacttcattttaaaatatattaaaagaaacctaaatgttcaagatatcagcatatggcactaaatgcacaaaaataatgtgagctttttttttttttcctgttagcagtctgtaacactttgggtattttgctatagttgctaattaaaaaaatatagatgtttatttatttttaatgcagtaatatatggagaaatgaacaaactatgtaaacaaaaagggaaactcacttgtttttctttagatttataaatttgagctattttttttagaggtgctttttaaaaatccaatagatacaagagatgtttcctttggttttctgccagtcatccagctgatacacacctgatgattttaaagaaagccacacagagctgaatgggcagtgtaatcaataatttaaaaaacatgaatgtcattagatcctttataacgtagatcgaagccaaagcagctcatttgtgacaacatttcatatcaccagacacaccaggcaacagaagttgaagcacaaccactgtagcaaaataccttgactgcttgtgagaccattagcattgcaggccaaaccgtactgtatttccttctcataacctcaaggaaccatatgtgctacccacaacacctcattcttacccagggtgcgctgcgtcctcatggtactgtaggcagctgaagaaccgccgttcccttgaaagggaacacctggcattctgtggtgtttcgtgctgtcttaaataatggtgcatttattatgttcaagttatttcaggattgccatatgtgcaaacaaatcatgcaatgcagccaaggaatatatgttgttgttgttgttttaaacccattttttttttagaattttcattaatactgtagttatacaccatatgcctcattttatcatagcctattgtgtatgaaagatgtttgtacaatgaattgatgtttagtttgctttagtcatttaaaaagatattgtaccaggatgtgctattaagagcacgtatccattattcttctcaacccaagaacctgtttcctggaccagtgaccaaacctcatatgtgaaatggccaaagcacatgcaggctcctggttgttcctctcaaacctgtgctgaccaaagattagtaaccagttatacccagtattttgaggttttattgtttttttaataactaaaaagaaaaaaggaacagtgtaaatttgtaatcaagagtttgtgaggaaaaacttatggtttttggttttgtttgtttttgtaggtctgtgtatcaaatatgacacttttcttgcaataaagcttattttggggta

SEQ ID NO: 122958 - DNA, 11132 bp, Artificial Sequence
  derived and/or modified sequence
ggcagttagggcaactggaaggctgggagctgaaatcacctgaagtctcattcactcacatgtctgatggttgatattgtctatcagattcttttttgtctccttctctgcaagaggctggcaccagatcacctcctgagtagagcagacattccaaaggatgtcctgccaacaataatggaaagctggatacaactgaatatgtaaaatgatgttaatgaagaattgaagagcactgtatctagttttctgctctccccttattttgaatcaaacccaggcatcctatcatttcatctataaagactttagttcctaaaagtggaattgctggatcaaagggtaaaggcataggcaattctagagcatttagatttaatgtgatggacaggaatgaaccatgaagccacgagtgtttgatttttaaattgtgatattccactaaatgagaaatgaccaggacttcacagagatttcatgaaaggagggccacaaaggaagaacccagagcaggccggtgagaggcactctaagagctttccaatatccgtcttcggagcgcacgggaatccgccgagctctgcgtgcaggcccttttttcttttgaggttcacattttttgaaattttacgccagggcttttgtaatttcctcccccgcccgctgacggtcctggagtcgctcggggctttaggccggttatgcaacgtgtaccgctcggggctgccggctgcacctccgccgcgcctcgccgctcactgcgctagacccggcgccccgcgtctcgcttcgcgggcagtcagggggccggcgctctgtcgaggtctccagctagagcagggagcccgagcccgagggagtccccggagccgacgaagggcttattagaccctgactcttttctgaggcgcgcagattttgtctttgatcactccctctccgcgggtctacggccgcgcgctttcggcgccggcgatggggagaagacggaggctgtgtctccagctctacttcctgtggctgggctgtgtggtgctctgggcgcagggcacggccggccagcctcagcctcctccgcccaagccgccccggccccagccgccgccgcaacaggttcggtccgctacagcaggctctgaaggcgggtttctagcgcccgagtatcgcgaggagggtgccgcagtggccagccgcgtccgccggcgaggacagcaggacgtgctccgagggcccaacgtgtgcggctccagattccactcctactgctgccctggatggaagacgctccctggaggaaaccagtgcattgtcccgatttgtagaaatagttgtggagatggattttgttcccgtcctaacatgtgtacttgttccagtgggcaaatatcatcaacctgtggatcaaaatcaattcagcagtgcagtgtgagatgcatgaatggtgggacctgtgcagatgaccactgccagtgccagaaaggatatattggaacttattgtggacaacctgtctgtgaaaatggatgtcagaatggtggacgttgcatcggacccaaccgctgtgcttgtgtttatgggttcactggtccacagtgtgaaagagattacaggacaggcccgtgtttcactcaggtcaacaaccagatgtgccaagggcagctgacaggcattgtctgcacgaagactctgtgctgtgccaccattggacgggcgtggggccatccctgtgagatgtgtccagcccagcctcagccctgccgacggggtttcatccccaacatccgcactggagcttgccaagatgttgatgaatgccaggctatcccagggatatgccaaggaggaaactgtatcaatacagtgggctcttttgaatgcagatgccctgctggtcacaaacagagtgaaactactcagaaatgtgaagacattgatgagtgcagcatcattcctgggatatgtgaaactggtgaatgttccaacaccgtgggaagctatttttgtgtttgtccacgtggatatgtaacctcaacagatggctctcgatgcatcgatcagagaacaggcatgtgtttctcgggcctggtgaatggccgctgtgcacaagagctcccggggagaatgacgaaaatgcagtgctgctgtgagcctggccgctgctggggcatcggaaccattcctgaagcctgtcctgtcagaggttctgaggaatatcgcagactttgcatggatggacttccaatgggaggaattccagggagtgctggttccagacctggaggcactgggggaaatggctttgccccaagtggcaatggcaatggctatggcccaggagggacaggcttcatccccatccctggaggcaatggcttttctcctggcgttgggggagccggtgtgggggccgggggacagggacctatcatcactggactaacaattctgaaccagacaatagatatctgtaagcatcatgctaacctttgtttaaatggacgctgtataccaactgtctcaagctaccgatgtgaatgcaacatgggttataagcaggatgcaaatggagattgtatagatgttgatgaatgcacatcaaatccctgcactaatggagattgtgttaacacacctggttcctattattgtaaatgtcatgctggattccagaggactcctaccaagcaagcatgcattgatattgatgagtgcatccagaatggggttctttgtaaaaacggtcgatgcgtgaacacagatggaagtttccagtgcatttgcaatgccggctttgaattaactacagatggaaaaaactgtgttgatcatgatgaatgtacaactaccaacatgtgtttgaatggaatgtgcatcaatgaagatggcagcttcaagtgcatctgcaaaccaggatttgtcttggctccaaatgggcgttactgtactgatgttgatgaatgccagaccccaggaatctgcatgaatgggcactgcatcaacagtgaagggtccttccgctgtgactgtcccccaggcctggctgtgggcatggatggacgtgtgtgtgttgatactcacatgcgcagtacctgctatggaggaatcaagaaaggagtgtgtgtgcgtcctttccccggtgcagtgaccaagtccgaatgctgctgtgccaatccagactatggttttggagaaccctgccagccatgccctgcaaaaaattcagctgaattccacggcctttgtagtagtggagtaggtatcactgtggatggaagagatatcaatgaatgtgctttggatcctgatatatgtgccaatgggatttgtgaaaacttacgtggtagttaccgttgtaattgcaacagtggctatgaaccagatgcctctggaagaaactgtattgacattgatgaatgtttagtaaacagactgctttgtgataacggattgtgccgaaacacgccaggaagttacagctgtacgtgcccaccagggtatgtgttcaggactgagacagagacctgtgaagatataaatgaatgtgaaagcaacccatgtgtcaatggggcctgcagaaacaaccttggatctttcaattgtgaatgttcgcccggcagcaaactcagctccacaggattgatctgtattgacagcctgaaggggacctgttggctcaacatccaggacagccgctgtgaggtgaatattaatggagccactctgaaatctgaatgctgtgccaccctcggagccgcctgggggagcccctgtgagcggtgtgaactagatacagcttgcccaagagggcttgccaggattaaaggtgttacgtgtgaagatgttaatgagtgtgaggtgttccctggcgtttgtccaaatggacgctgtgtcaacagtaagggatcttttcattgcgagtgccctgaaggccttacgttggatgggactggccgtgtatgtttggatattcgcatggagcagtgttacttgaagtgggatgaagatgaatgcatccaccccgttcctggaaagttccgcatggatgcctgctgctgtgctgtcggggcggcttggggcaccgagtgtgaggagtgccccaaacctggcaccaaggaatacgagacgctgtgcccccgcggggctggctttgctaaccgaggggatgttcttactgggcggccattttacaaagacatcaatgaatgcaaagcatttcctgggatgtgcacttatgggaagtgcagaaatacaatcggaagcttcaaatgccgttgcaatagtggctttgctctagacatggaggaaagaaactgcacggacatcgacgagtgcaggatttctcctgacctctgtggcagtggaatctgcgtcaatacaccgggcagctttgagtgcgagtgcttcgaaggctatgaaagtggcttcatgatgatgaagaactgcatggacattgacgaatgtgaacgtaaccctctcctttgtaggggtggcacctgtgtgaacactgagggcagctttcagtgtgactgcccactgggacacgagctgtcaccatcccgtgaggactgtgtggatattaatgaatgctccctgagtgacaatctctgcagaaatggaaaatgtgtgaacatgattggaacctatcagtgctcttgcaatcctggatatcaggctacgccagaccgccagggctgtacagatattgatgaatgtatgataatgaacggaggctgtgacacccagtgcacaaattcagagggaagctacgaatgcagctgcagtgagggttatgccctgatgccagatgggagatcgtgtgcagacattgatgaatgtgaaaacaatcctgatatctgtgatggcggccagtgtaccaacattcctggagagtatcgctgcctctgctatgatggcttcatggcttccatggacatgaaaacatgcattgatgtcaatgaatgtgacctaaattcaaatatctgcatgtttggggaatgtgagaacacaaagggatccttcatttgccactgtcagctgggttactcagtgaagaaggggaccacaggatgtacagatgtggatgagtgtgaaattggtgctcataactgcgacatgcatgcctcatgtctgaatatcccaggaagcttcaagtgtagctgcagagaaggctggattggaaacggcatcaagtgtattgatctggacgaatgttctaatggaacccaccagtgtagcatcaatgctcagtgtgtaaataccccgggctcataccgctgtgcctgctccgaaggtttcactggtgatggctttacctgctcagatgttgatgagtgtgcagaaaacataaacctctgtgagaacggacagtgccttaatgtcccgggtgcatatcgctgcgagtgtgagatgggcttcactccagcctcagacagcagatcctgccaagatattgatgaatgctccttccaaaacatttgtgtctttggaacatgtaataacctgcctggaatgtttcattgcatctgcgatgatggttatgaattggacagaacaggagggaactgtacagatattgatgagtgtgcagatcctataaactgtgtcaatggcctatgtgtcaacacgcctggtcgctatgagtgtaactgcccacccgattttcagttgaacccaactggtgtgggttgtgttgacaaccgtgtgggcaactgctacctgaagtttggacctcgaggagatgggagtctgtcttgcaacaccgagatcggggtgggcgtcagtcgctcttcatgctgctgctctctgggaaaggcctggggaaacccctgtgagacatgcccccctgtcaatagcactgaatattacaccctgtgtcccggaggtgaaggcttcagacctaaccccatcacaatcattttagaagacattgacgaatgccaggagttaccaggtctctgccagggtggaaactgcatcaacacttttgggagcttccagtgtgagtgcccacaaggctactacctcagcgaggatacccgcatctgtgaagatattgatgagtgttttgcacatcctggtgtgtgtgggcctgggacctgctataacaccctgggaaattacacctgcatttgcccacctgagtacatgcaggtcaatggaggccacaactgcatggacatgagaaaaagcttttgctaccgaagctataatggaaccacttgtgagaatgagttgcctttcaatgtgacaaaaaggatgtgctgctgcacatataatgtgggcaaagcctggaacaaaccttgtgaaccatgcccaactccaggaacagctgactttaaaaccatatgtggaaatattcctggattcacctttgacattcacacaggaaaagctgttgacattgatgaatgtaaagagattccaggcatttgtgcaaatggtgtgtgcattaaccagattggcagtttccgctgtgaatgccctacaggattcagttacaatgacctgctgttggtttgtgaagatatagatgagtgcagcaatggtgataatctctgccagcggaatgcagactgcatcaatagtcctggtagttaccgctgtgaatgtgccgcgggtttcaaactttcacccaatggggcctgtgtagatcgcaatgaatgtttagaaattcctaacgtttgcagtcatggcttgtgtgttgatctgcaaggaagttaccagtgcatctgccacaatggctttaaggcttctcaggaccagaccatgtgcatggatgttgatgagtgcgagcggcatccatgtggaaatggaacttgtaaaaacaccgttggatcctataactgtctgtgctacccagggtttgaactcactcataataatgattgcctggacatagatgagtgcagttccttttttggtcaggtgtgcagaaatggacgttgttttaatgaaattggttctttcaagtgtctatgtaacgaaggttatgaacttaccccagatggcaaaaactgtatagacactaatgagtgtgtcgcccttcccggctcttgctctcctggtacctgtcagaatttggagggatccttcagatgcatctgtcccccagggtatgaagtaaaaagcgagaactgcattgatataaatgaatgtgatgaagatcccaacatttgtctttttggttcctgtactaatactccagggggcttccagtgcctctgcccccctggctttgtactatctgataatggacggagatgctttgatactcgccagagcttctgcttcacaaattttgaaaatggaaagtgttctgtacccaaagctttcaacaccacaaaagcaaaatgctgctgtagtaagatgccaggagagggctggggggacccctgtgagctgtgccccaaagacgatgaagttgcatttcaggatttgtgtccatatggccatggaactgtccctagtcttcatgatacacgtgaagatgtcaatgagtgtcttgagagcccaggcatttgttcaaatggtcaatgtatcaacaccgacggatcttttcgctgtgaatgtccaatgggctacaaccttgactacactggagtacgctgtgtggatactgatgagtgttcaatcggcaatccgtgtggaaatggtacatgcaccaatgttattgggagttttgaatgcaattgcaatgaaggctttgagccagggcccatgatgaattgtgaagatatcaacgaatgtgcccagaacccactgctgtgtgctttccgctgcatgaacacttttgggtcctatgaatgcacgtgcccgattggctatgccctcagggaagatcaaaagatgtgcaaagatctggatgaatgtgctgaagggttacacgactgtgaatctaggggcatgatgtgtaagaatctaatcggcaccttcatgtgcatctgccctcctggaatggcccgaaggcccgatggagaaggctgtgtagatgaaaatgaatgcaggaccaagccaggaatctgtgaaaatggacgttgtgttaacattattggaagctatagatgtgagtgtaatgaaggattccagtcaagttcttcaggcactgaatgccttgacaatcgacagggtctctgctttgcagaggtactgcagacaatatgtcaaatggcatccagtagtcgcaatctcgtcactaagtcagaatgctgctgtgatggtgggcgaggctggggccaccagtgcgagctttgcccacttcctggaactgcccagtacaaaaagatatgtcctcatggcccaggatatacaactgatggaagagatattgatgaatgtaaggtaatgccaaacctctgcaccaatggtcagtgcatcaataccatgggctcattccgatgcttctgcaaggttggctacaccacagacatcagtggaacctcttgtatagaccttgatgaatgctcccagtccccgaaaccatgcaactacatctgcaagaacactgaggggagttatcagtgttcatgtccgagggggtatgtcctgcaagaggatggaaagacatgcaaagaccttgatgaatgtcaaacaaagcagcataactgccagttcctctgtgtcaacaccctgggggggtttacctgtaaatgtccacctggtttcacacagcatcacactgcttgtatcgacaacaacgaatgtgggtctcaaccttcgctttgtggagcaaagggaatctgtcaaaacactccaggcagtttcagctgtgaatgccaaagagggttctctcttgatgccaccggactgaactgtgaagatgttgatgaatgtgatgggaaccacaggtgccaacacggctgccagaacatcctgggtggctacagatgtggctgcccccaaggctacatccagcactaccagtggaatcagtgtgtcgatgagaatgaatgctccaatcccaatgcctgtggctctgcttcctgctacaacaccctggggagttacaagtgcgcctgcccctcggggttctccttcgaccagttctccagtgcctgccacgacgtgaatgagtgctcgtcctccaagaacccctgcaattacggctgctctaacacggaggggggctacctctgtggctgcccccctgggtattacagagtgggacaaggccactgtgtctcaggaatgggatttaacaaggggcagtacctgtcactggatacagaggtcgatgaggaaaatgctctgtccccagaagcatgctacgagtgcaaaatcaacggctattctaagaaagacagcaggcagaagagaagtattcatgaacctgatcccactgctgttgaacagatcagcctagagagtgtcgacatggacagccccgtcaacatgaagttcaacctctcccacctcggctctaaggagcacatcctggaactaaggcccgccatccagcccctcaacaaccacatccgttatgtcatctctcaagggaacgatgacagcgtcttccgcatccaccaaaggaatgggctcagctacttgcacacggccaagaagaagctcatgcccggcacatacacactggaaatcactagcatccctctctacaagaagaaggagcttaagaaactggaagagagcaatgaggatgactacctcctaggggagcttggggaggctctcagaatgaggctgcagattcagctctattaacccttcacagacttgggcccaggctcaaatcctagcacagccagtctgcagaagcatttgaaaagtcaaggactaattttaaagaggaaaaataataataactcttgtttctttcctccctgtcttagactttgaatgttgaccctcacagggagggataatttagactctggtatggccaaagatttgagcacaaaggcaaccgtggttactgtattttttatataacttcattttaaaatatattaaaagaaacctaaatgttcaagatatcagcatatggcactaaatgcacaaaaataatgtgagctttttttttttttcctgttagcagtctgtaacactttgggtattttgctatagttgctaattaaaaaaatatagatgtttatttatttttaatgcagtaatatatggagaaatgaacaaactatgtaaacaaaaagggaaactcacttgtttttctttagatttataaatttgagctattttttttagaggtgctttttaaaaatccaatagatacaagagatgtttcctttggttttctgccagtcatccagctgatacacacctgatgattttaaagaaagccacacagagctgaatgggcagtgtaatcaataatttaaaaaacatgaatgtcattagatcctttataacgtagatcgaagccaaagcagctcatttgtgacaacatttcatatcaccagacacaccaggcaacagaagttgaagcacaaccactgtagcaaaataccttgactgcttgtgagaccattagcattgcaggccaaaccgtactgtatttccttctcataacctcaaggaaccatatgtgctacccacaacacctcattcttacccagggtgcgctgcgtcctcatggtactgtaggcagctgaagaaccgccgttcccttgaaagggaacacctggcattctgtggtgtttcgtgctgtcttaaataatggtgcatttattatgttcaagttatttcaggattgccatatgtgcaaacaaatcatgcaatgcagccaaggaatatatgttgttgttgttgttttaaacccattttttttttagaattttcattaatactgtagttatacaccatatgcctcattttatcatagcctattgtgtatgaaagatgtttgtacaatgaattgatgtttagtttgctttagtcatttaaaaagatattgtaccaggatgtgctattaagagcacgtatccattattcttctcaacccaagaacctgtttcctggaccagtgaccaaacctcatatgtgaaatggccaaagcacatgcaggctcctggttgttcctctcaaacctgtgctgaccaaagattagtaaccagttatacccagtattttgaggttttattgtttttttaataactaaaaagaaa

SEQ ID NO: 122959 - DNA, 8739 bp, Artificial Sequence
  derived and/or modified sequence
atgggacgacgtaggcgtctctgcctgcagctttattttctctggttgggctgcgtcgtcctctgggcacagggtacagccgggcagccccaacctccccccccaaagcccccacgccctcagccccctcctcaacaggttagaagcgcaacagccggatccgaagggggctttctggcacctgagtaccgagaggaaggagctgccgtggcatcaagggtgcggcggcgcggacagcaggacgtgttacgaggaccgaacgtgtgtggctctcggttccacagttactgttgtcctggttggaagaccctcccaggcggcaaccagtgcatcgtccctatctgtagaaactcctgcggggatgggttttgcagccgtcctaacatgtgtacctgtagctccggacagattagctctacgtgcggctcaaagtctatccagcagtgtagcgtccggtgcatgaacggtggcacctgtgccgatgatcattgtcagtgccagaaaggctacatcggcacatattgcgggcagcccgtttgtgagaatggctgccaaaatggaggaaggtgtatcggaccgaaccgctgtgcctgcgtgtacggctttactgggcctcaatgtgaacgtgattaccgcacaggaccctgctttacccaggtgaataatcagatgtgccagggacaactcaccggcatcgtgtgcactaagaccctgtgttgcgcgacaatcggccgcgcttggggccatccatgtgaaatgtgccccgcacagcctcaaccctgccgtcgaggcttcattccaaatatacggacaggtgcctgccaggacgtggacgaatgtcaggctatacctgggatatgccagggtggcaactgtataaacaccgtgggctctttcgagtgccggtgcccggctgggcacaagcagtcggagacaactcaaaagtgtgaggacatcgacgagtgctccatcatcccgggcatttgtgagactggagaatgcagcaacactgtgggttcatatttctgcgtttgccctagagggtacgtcacctctaccgacggcagccgttgtatcgaccagcggactggaatgtgtttctccggtttagtaaatggcaggtgcgcgcaggaactaccaggaagaatgactaaaatgcagtgttgctgcgagccaggacggtgctggggcattggaactatacccgaggcctgtcctgtccgaggttctgaagaatatcgtcgcctctgtatggatggacttccaatgggtggaatccccgggagcgccggaagccgccctgggggaacagggggtaatgggtttgcaccttctgggaatgggaacggatacggccccggcggaacagggttcatacctattcccggcggaaacggtttttccccgggcgtgggaggagcaggagtgggtgcaggcggacagggtcccattatcacgggcttgacaatactgaatcagacgatagacatttgtaaacatcacgcgaacctctgtttaaacggcagatgtattcctacagtgagctcgtaccgttgtgagtgtaacatgggatataagcaggatgcgaacggtgactgtattgacgtggacgaatgcacgagcaacccttgcaccaatggcgattgtgtgaatacacctgggagctactactgcaagtgtcatgccggcttccagagaacccccacaaagcaggcttgtatcgacatagatgagtgcatacagaacggcgttctgtgtaaaaatgggcgatgtgtgaatactgacggaagcttccagtgcatctgtaatgccgggtttgagcttactactgacggcaagaattgcgtcgaccatgacgagtgcacaacgacaaacatgtgtctgaacggtatgtgcattaatgaagatggcagctttaagtgcatctgcaagccaggcttcgtgctggccccgaacgggcggtactgtactgacgtggacgaatgccagacaccagggatctgcatgaacgggcactgtattaactccgaggggagtttccggtgcgactgtccccccgggctggctgtgggtatggacggaagagtgtgcgtcgatacccacatgcggtctacgtgctatggcggcattaagaagggcgtttgtgtccgcccgtttcctggagctgtgaccaaatccgagtgctgctgtgcaaatccagactacgggtttggggaaccatgccagccctgtcccgcaaaaaatagcgccgaattccacgggctgtgctcctccggtgtgggcataaccgtggacgggagagatattaatgagtgtgcgctagatcccgacatctgcgcaaacggaatttgtgagaacctccggggaagctaccgttgcaattgcaacagcggctatgagccagacgcgtccggtcggaactgtatcgacattgacgaatgtcttgttaaccgcctcctgtgtgataatggcctgtgccgaaatactcccggatcctacagttgcacatgcccgcccgggtatgtgttcagaacggagaccgaaacctgtgaagacattaacgaatgtgagtcgaatccctgcgtgaatggcgcatgccgcaataacctgggtagcttcaactgcgaatgcagtcccggctctaaactatccagtactgggctaatctgtattgactcattgaagggaacctgctggttgaacatccaagatagccggtgcgaagtaaatataaacggggctactttgaaaagcgagtgttgtgcaactttgggtgcagcctggggttccccttgtgaacgttgtgagctcgacacggcttgtccgcgggggctggcccgaataaagggcgtgacctgtgaagatgtgaatgaatgcgaagtctttcccggcgtgtgcccaaacggccgctgcgtcaacagtaagggaagctttcactgcgagtgccccgagggtctaacacttgacggcacgggccgggtatgtctagacatcaggatggaacagtgctatctgaagtgggacgaggacgaatgcatccatcctgtgcccggaaagtttaggatggatgcttgttgctgtgctgtgggcgccgcttggggcacagagtgcgaggagtgcccaaaaccaggcaccaaggagtacgagacgttatgtcctaggggtgcaggatttgctaaccggggtgatgtacttactgggcgtcctttctataaggacattaatgagtgcaaggcgtttccagggatgtgtacttatggcaagtgtcgcaacactatcggtagcttcaaatgcagatgcaatagtggtttcgctctggatatggaggagcggaattgtacagatattgatgagtgtaggatctcccctgatttgtgcggtagcggaatctgcgtgaatacccctggctctttcgagtgcgaatgcttcgaggggtatgagagcgggttcatgatgatgaagaactgtatggatattgacgaatgtgagagaaacccacttctgtgccgaggtgggacctgtgtaaataccgaagggtcctttcagtgcgactgccctctggggcatgaactcagtcctagtcgcgaagactgcgtagacattaatgagtgtagcctcagcgacaacttgtgtaggaacggcaagtgcgtgaacatgattgggacgtatcagtgtagctgtaatcccggttaccaagccactcctgaccgccagggttgcactgacatagacgaatgcatgatcatgaacggaggatgcgacactcaatgcacaaatagcgagggatcctatgagtgttcatgcagtgaggggtatgccctgatgcctgacggtaggtcctgtgccgacattgatgagtgcgagaataatcctgacatctgcgatggcggccagtgcaccaatattcctggcgagtacaggtgtctgtgttacgatggctttatggctagtatggatatgaaaacttgcatcgacgtgaacgaatgcgatctgaattccaatatttgtatgttcggagagtgtgagaacacaaagggaagcttcatctgtcattgtcagctgggttactcagtgaagaaaggcaccaccggctgcactgatgttgatgagtgtgagatcggagcccacaactgtgatatgcacgccagttgcctcaacataccgggctcgtttaagtgctcttgcagagagggatggattggcaacggtatcaaatgtatcgatttggacgagtgtagcaatggaacacatcaatgctctataaacgcccagtgtgtgaacactcctggctcttaccggtgtgcctgttccgagggcttcactggagatggcttcacttgtagcgacgttgatgagtgcgctgagaacataaatttatgtgagaacgggcagtgccttaatgtccccggggcttataggtgcgagtgcgagatggggttcacgcccgcgagcgactccagatcttgccaagacattgatgagtgctcgtttcaaaacatctgtgtgttcggcacttgcaacaatcttcccggtatgtttcactgtatctgtgatgacggatatgagttagataggactggagggaattgcaccgacatcgacgaatgcgctgacccaatcaactgcgtgaacggcctgtgcgtgaacactcccgggaggtacgagtgtaactgtccacctgacttccagctgaatcccactggcgtgggttgtgtcgacaaccgcgttgggaactgctacctgaagttcggcccgaggggagatggatcactctcttgtaacacggaaattggggttggggtatctcggagctcgtgctgttgcagcctgggaaaggcatgggggaatccctgcgagacatgcccaccagttaatagcaccgagtattatacattgtgcccaggtggagagggcttccggccaaatccgatcaccatcatcttagaagacatagatgagtgccaagaactgccagggttgtgtcagggaggtaattgtatcaacaccttcggtagtttccagtgtgagtgcccgcagggatattaccttagtgaagacacgcggatttgtgaggatatcgatgagtgcttcgctcatcccggagtttgcgggccaggcacctgttacaatacactcggcaattacacctgcatctgcccccctgaatacatgcaggttaacggggggcacaactgcatggacatgagaaagagtttctgttaccggtcctacaacgggacgacttgcgaaaacgagcttccattcaatgtgaccaagcgtatgtgctgctgtacctacaatgttggaaaggcttggaacaagccttgcgaaccttgtcccactcctgggactgctgactttaagacgatttgcgggaatatcccgggattcacctttgatatccatactgggaaggccgtggatatcgatgaatgtaaagaaattcctggaatctgcgcaaatggtgtttgtatcaaccagattggtagctttcgatgcgagtgccccactggattttcttataatgatttactcctggtttgtgaggacatcgatgagtgctctaatggagataatctctgccagcggaatgcagactgcatcaattccccaggttcgtacagatgtgagtgtgctgccggctttaaactgtctcccaacggagcctgtgtggacaggaacgagtgcctggagattcccaatgtctgttcccatggcttatgcgtcgatctgcaaggttcataccagtgtatctgccataacgggtttaaagcaagccaagatcagacaatgtgcatggatgttgacgagtgcgagcggcacccctgcgggaatggcacatgtaagaacactgttgggagctataactgcttatgctaccccggctttgagcttactcacaataatgattgtctggatatcgacgaatgctcctcattcttcggccaagtgtgtcggaatggccgctgctttaatgaaattggaagctttaagtgcctgtgtaatgagggatatgagctcacccccgatggaaagaattgtattgataccaacgagtgcgtggcactaccaggctcctgctcaccaggaacttgtcagaatcttgaggggtcattccggtgtatctgcccccccggatatgaggtgaagtctgaaaactgtatagacatcaacgaatgtgacgaagatcccaatatctgtttattcggctcctgcacaaacacacctggtggatttcaatgcctctgcccacccggctttgtgctctccgacaacgggcgcagatgttttgatacccgccagagcttctgtttcaccaacttcgaaaatggcaaatgttcagttcctaaggccttcaacactactaaggcaaagtgctgttgctcgaaaatgcccggcgaaggatggggtgatccctgtgaactgtgtccaaaggatgacgaggtagctttccaggatctctgcccatacggccacggcacagtcccatccttgcatgacacgcgggaggatgtcaatgaatgccttgagtcccccggaatctgctccaacgggcaatgtatcaataccgatggctccttcagatgcgaatgccctatgggatataaccttgattacaccggcgtgaggtgcgtagatactgacgagtgtagtattggcaacccatgtggtaatggtacctgcaccaacgttatcgggtctttcgagtgtaattgtaacgagggatttgagcctggaccgatgatgaactgcgaagacatcaacgagtgcgctcagaacccattgttgtgcgcattccgctgcatgaatacattcggaagctatgagtgcacttgcccgattggttatgccctccgagaggaccagaagatgtgtaaggacctggacgagtgtgcggagggcttgcatgattgcgaatcccggggaatgatgtgtaagaatctgattggtacattcatgtgtatctgccccccaggcatggcgcgacgacccgacggagagggctgcgtagatgagaatgaatgtcgaaccaagccaggtatttgtgaaaatggcagatgcgttaatatcatcggctcgtatagatgcgaatgtaacgaaggcttccaatcctcatcaagcgggactgagtgcctggacaatcgtcagggtttgtgtttcgctgaagtgctccagactatttgtcagatggcgagcagcagccggaacctggtcacaaagagtgaatgctgttgtgatgggggtcgtggatggggacaccaatgcgaactttgccccctcccgggtaccgcacagtacaagaaaatatgccctcatgggcctgggtacaccacagacgggagagatatcgacgagtgcaaggtcatgcccaatctgtgcacaaatggtcagtgtatcaacaccatgggaagcttccgctgcttctgtaaagtcgggtatactaccgatatttcaggaacatcatgtattgatttggatgagtgctcccaatctcctaaaccgtgcaactatatctgtaaaaacacagagggatcttatcagtgttcttgtcctcgcggctacgtgttgcaggaggatggaaagacttgtaaggacctggatgaatgccaaactaagcagcacaattgccagttcctgtgtgtgaataccttaggggggttcacgtgcaaatgccctccaggattcacacagcaccacaccgcatgcattgataacaacgagtgcggatcccaaccatcgctttgcggggccaagggaatctgccagaatacgcccggcagcttctcatgtgagtgtcagagaggcttttcgctggatgccactggcctcaactgcgaggacgtggatgaatgtgatgggaatcataggtgccaacacggctgtcagaatatccttggaggctaccgatgcggttgccctcagggatatatccagcactaccagtggaatcagtgtgtggacgaaaatgagtgtagtaacccaaatgcctgcggctctgcatcctgctataatacactgggttcttacaagtgcgcttgtccctcgggctttagcttcgatcagttttcttccgcctgccacgatgttaacgagtgcagctcctccaaaaacccctgcaattacggatgtagtaacacagagggagggtacttgtgcggctgtcctcccggttattatagggtagggcaaggccactgtgtctccggtatgggtttcaataaagggcaatatcttagcctcgatacagaagtagatgaggagaatgctctgtctccagaggcttgctatgaatgtaaaatcaacggttactccaagaaggattctcgacaaaaaagaagcattcacgaacctgatcccactgctgtcgaacagattagtctggaatccgtggacatggacagccctgtgaacatgaagttcaacctttctcaccttggttcaaaggagcatatactcgagctccgtcctgccattcagcctctaaataatcacattaggtatgttatttcccaagggaatgatgacagtgtgttccgcatccatcagcggaacggtctttcttacctgcacacagctaaaaaaaagctgatgcctgggacctacaccctcgagatcacctctatcccactgtacaaaaaaaaggagctaaaaaaattagaagagagcaatgaagatgattatcttcttggcgagctgggagaagcacttcggatgcggctacagatccagctgtattag

SEQ ID NO: 122960 - DNA, 8739 bp, Artificial Sequence
  derived and/or modified sequence
atgggacggagaaggcgcctgtgtttgcaactgtactttctatggctgggctgtgtggtgctatgggctcagggaactgctggacagccacagcccccgcccccgaaaccgccacgaccccagcccccaccccagcaggtacggagtgctaccgcgggcagcgaaggtggctttttagcccctgaataccgggaggagggggccgccgtggcctcaagggtgcgcaggcggggtcagcaggacgtcctgcgaggccccaatgtgtgtggaagcagattccacagctattgctgtcctggatggaaaaccctgcctgggggaaaccagtgtatagtccctatttgcagaaactcttgtggggacggcttctgttctagaccaaatatgtgtacgtgctcaagtggccaaatatctagcacatgcgggtctaaaagtatccagcaatgttctgttcgatgtatgaacggagggacttgtgcagacgatcattgccaatgccagaagggctacattggaacttactgtggccagccggtctgtgagaacggctgtcagaacgggggccgctgcatcggcccaaataggtgcgcatgcgtgtacggattcaccggcccccagtgcgagcgggactatcggaccggcccctgttttacccaggtaaacaaccaaatgtgtcagggccagctgaccgggatagtttgcaccaagacactgtgttgcgcaactatcggccgcgcttgggggcatccctgcgaaatgtgtccggctcaaccccagccctgtcgcagagggttcattccaaatatccgaaccggggcctgccaagacgttgatgagtgtcaggccatccccggaatttgccagggcggaaactgtattaatacggttggaagcttcgagtgcagatgtccagccgggcataagcaaagcgaaacaacacagaaatgtgaggatatcgatgagtgtagtatcattcctggcatctgtgaaactggagaatgttctaataccgtcggcagctatttctgtgtatgccctcggggctacgtaaccagcactgacgggtcacgctgcattgatcagcggactggaatgtgtttcagtggcctcgtgaatggccggtgcgcgcaggaattgccaggccggatgaccaagatgcagtgttgctgcgagccaggccggtgctggggcatcgggaccatccccgaagcatgtccggtgaggggcagtgaggaatacagacgtctgtgcatggatggcctcccaatggggggaatccccggtagtgcaggcagtcggcccggaggcaccggcgggaacgggtttgccccttcagggaatggaaacggatatggacccggagggaccggttttattccaattccaggaggaaacggatttagcccgggcgttggtggggctggtgtgggcgctggcggccagggcccaataattacagggctgactattcttaaccagacaattgacatttgtaaacaccacgcaaacttatgtttgaatggccgttgcatacctactgtgtcgagttacaggtgtgagtgcaacatgggatataaacaggatgccaatggagactgtattgacgtggatgagtgtacatcaaacccttgcacgaatggggactgcgtgaatacacctgggagctattattgcaaatgtcatgcggggttccaaagaacaccgaccaagcaagcatgcattgacatcgatgaatgtatccagaatggcgttctctgcaagaacggacgctgcgtgaacaccgacggctcttttcagtgcatttgcaatgccggctttgagcttactactgatggcaagaactgtgttgaccatgatgagtgtactactacgaatatgtgcctgaatgggatgtgcattaatgaggatggcagcttcaagtgtatctgtaagcccggatttgtcctcgccccaaatggtaggtactgtactgatgtcgacgaatgtcagaccccaggaatctgtatgaatggacattgtatcaattcggaaggctcatttcgctgtgattgtcctcccgggctagccgtggggatggatggacgcgtttgtgtggacacgcacatgaggtctacctgttacggcggcatcaagaagggggtctgcgtgcgccccttcccaggagccgtgacgaagagtgagtgctgttgcgctaatccagactatggctttggggaaccatgccagccatgcccagctaaaaactccgccgaattccacggcttatgttccagtggagtcggcattaccgtagacgggcgggatatcaacgaatgcgccctcgaccccgacatctgcgccaacggtatctgtgaaaacctaagagggagctaccgttgtaactgcaactccggttatgagccagatgcatctgggcgaaactgtatagatatcgatgagtgccttgtgaatcggctgctctgcgataatggactgtgccgtaatactcccgggagctattcttgtacatgtcctcccggatacgtcttccgaacagagacagaaacctgtgaagatatcaacgagtgcgaaagcaatccctgcgttaatggcgcctgccgcaataatctcggcagtttcaattgtgagtgctccccaggtagcaagctgtcctccacgggattgatatgcattgactcccttaaggggacctgctggctgaatatccaagacagtaggtgtgaagttaatatcaatggtgccaccctgaagtccgagtgctgtgccaccttaggcgcggcatgggggtctccttgcgagaggtgtgagcttgacaccgcctgcccccgtggcctggctcggatcaagggcgtgacctgcgaagatgtgaacgaatgtgaagtgtttccgggcgtttgtcctaacggacgctgtgtaaattctaagggctcctttcactgtgagtgcccagagggtctgactctggacggcactggcagagtgtgtctcgacatacgaatggagcagtgttatttgaagtgggacgaagacgaatgtatacaccccgtgccgggcaaatttaggatggacgcttgttgttgcgccgtaggagccgcctgggggaccgagtgtgaggagtgtcccaagcccggcacaaaagaatatgaaaccttgtgccccagaggagccggttttgcaaaccgaggggatgtcctcaccgggcgccctttctacaaggacattaacgaatgcaaagcatttcctgggatgtgtacctatgggaagtgccgcaacactattgggtcctttaagtgccggtgtaacagcggattcgcactggacatggaagagagaaattgcactgacatcgacgaatgtagaattagtccggatttgtgtggaagcgggatttgcgtcaatacgcccggcagcttcgagtgtgaatgttttgagggctacgaatcgggttttatgatgatgaagaattgcatggatatcgacgaatgtgagcggaatcccctgctgtgtcggggaggaacatgcgtaaacactgagggttccttccagtgcgactgtccactcggtcacgagctgagtccatctcgtgaagattgcgtcgatatcaacgagtgctccctttctgataacctttgtcgcaacggaaagtgcgttaacatgattgggacctaccagtgctcttgtaaccccggatatcaggccacccccgataggcaagggtgcaccgacatcgatgagtgcatgatcatgaacggtggatgcgacacccagtgcaccaactctgaggggtcctatgagtgcagctgcagcgagggctatgccttgatgcctgatggccgcagctgcgccgacatcgacgaatgtgagaacaaccccgatatttgcgacgggggtcagtgcacgaacattccaggcgaatacagatgcctttgttatgatggctttatggctagtatggacatgaaaacctgcatagacgtcaacgaatgtgatctgaacagtaacatctgcatgtttggtgagtgtgaaaatactaaggggagttttatctgccactgccagctcggatattccgtcaaaaaggggacaacagggtgcaccgatgttgatgagtgcgagatcggtgcccacaattgcgacatgcacgcctcgtgcttgaacatccccggttcgttcaagtgcagttgtagagaaggctggattggaaacggcattaagtgtattgatctggatgaatgcagtaacggcacacaccagtgtagtatcaatgcacaatgtgtgaacacacctgggtcatatcgttgcgcctgcagtgagggatttaccggcgacggattcacctgttctgacgtcgacgaatgcgccgaaaacattaacctatgcgagaatgggcagtgcctgaacgtcccaggcgcctaccggtgtgaatgcgagatgggatttaccccagcttcagactctcggagttgccaggacatcgatgagtgctctttccagaacatttgtgtctttggaacttgtaataatctacctggcatgtttcactgcatttgcgatgatggatacgagctggatagaactgggggaaattgcaccgatatcgatgaatgtgccgatccaattaactgcgtcaatggtctgtgtgtcaatacccctggccgctatgagtgtaactgtccccccgacttccagctcaaccctaccggggtcggctgcgtggataaccgtgttggcaattgttacctgaagttcggaccaaggggcgatggcagtttgtcctgtaacactgagatcggtgtgggagtcagtcggagctcctgctgctgctctcttgggaaagcatggggcaatccatgcgagacgtgcccaccagtcaattcaacagagtactacacactgtgccccgggggggagggattcagacccaatcctattacaattatcctggaggatatcgatgagtgtcaggagcttcccggtctgtgccagggaggcaactgtatcaacactttcggcagctttcagtgcgaatgtccacagggctactacctgtcagaagataccagaatttgtgaagatatagacgagtgttttgcccatccgggggtctgtgggccagggacctgttataatacactcggaaattatacatgtatttgtccaccagagtacatgcaggtgaacggcggccacaactgtatggatatgcgcaaaagtttttgttacagaagctataacggtaccacatgtgagaacgaactcccattcaacgtgaccaagcgcatgtgttgttgtacatataacgtgggcaaggcttggaataaaccttgcgaaccctgccccacacctggcaccgctgattttaagaccatttgtggaaacattcccggctttacattcgatatacatacagggaaagccgtcgatattgacgagtgcaaagagatcccagggatttgtgccaacggtgtgtgcatcaaccagatagggagttttagatgcgaatgcccaaccggcttctcctataatgatctgctcctggtgtgtgaagatatcgatgaatgctcaaacggtgataatttgtgccaacgaaacgcggactgcattaatagccctgggagctacagatgcgagtgcgcagcgggtttcaagctgagccccaatggcgcgtgcgtcgaccgtaacgagtgtcttgaaatcccaaacgtgtgttcgcacggtctttgtgtggatttgcagggatcataccagtgcatatgccacaacggctttaaggccagccaggatcagaccatgtgtatggacgtggatgagtgtgagcggcatccatgtggaaacggcacatgtaaaaataccgtcggctcttataactgcctttgttatcctggcttcgaactaacccataataacgactgcctggacatcgacgagtgttcctctttcttcgggcaagtctgcaggaacggtcggtgctttaacgagattggctccttcaagtgcttatgtaatgaaggctatgagctgaccccagatgggaagaactgcatagacaccaacgaatgcgtggcacttcccggaagctgttcacctgggacttgccagaacctggaaggctcattccgatgtatatgtcctcctggttacgaagtgaagagtgagaattgcattgatataaatgagtgcgacgaagatcctaacatctgtctgttcggctcttgtacgaacacgcctggaggttttcagtgtctgtgccctcctggatttgtactctccgataacggccgtcgctgtttcgacacacggcagtcattttgctttaccaatttcgaaaatggaaaatgctcggtgcctaaggcattcaacacaaccaaagccaagtgttgctgtagcaaaatgcccggcgaggggtggggcgacccctgtgagctgtgtccaaaggatgatgaggtggcctttcaggatctgtgtccttacgggcacggaactgtgccttctctccacgacactagagaagatgtcaatgagtgcttagagagtcctggtatttgttctaacggacaatgcattaacactgacggcagctttcgctgcgagtgccccatggggtataatcttgattacacaggcgtgaggtgcgtcgacaccgacgaatgttctatcggaaatccatgtggcaacggcacatgcacaaatgttatcggatcgttcgagtgcaattgtaatgagggctttgagccgggccccatgatgaactgtgaagatataaacgagtgtgctcagaaccccctgctgtgcgcatttagatgcatgaacacgttcggtagttacgaatgtacatgcccgatcggctatgcattgcgcgaggaccagaagatgtgcaaggacctggacgaatgcgctgaaggacttcacgattgcgagtcccgggggatgatgtgcaaaaatctgattggcacgtttatgtgcatttgtcctccgggaatggctcgcagaccggacggcgaaggttgcgtcgacgagaacgagtgtagaaccaaaccaggcatctgcgagaacgggagatgcgtaaatatcattggatcctacagatgtgagtgtaacgagggctttcaaagctccagcagcggcacggagtgtttagacaaccggcaaggcttatgttttgctgaggtccttcagacaatctgccaaatggccagctcgagccgcaatcttgtcaccaaatccgagtgctgttgtgacggggggcgtggctggggccaccagtgcgagctgtgcccacttccaggcactgcccaatataagaagatctgccctcacgggccggggtacactaccgacgggagggatatcgacgagtgtaaagtgatgcccaacttgtgtaccaatggtcagtgcatcaacacaatgggctccttcaggtgcttctgcaaggttggttatacaaccgacatctctggcacgtcttgtatagatcttgacgagtgttcccagagccccaagccctgcaattacatctgtaaaaacaccgaagggtcctatcagtgttcttgtccgcgaggatatgtgctgcaagaagacggcaagacatgtaaggacctggacgagtgccagaccaagcagcataactgccagttcctgtgtgtaaacacactaggagggttcacctgcaagtgtccccccggcttcacccagcatcatacagcgtgcatcgacaacaatgaatgtgggtcgcagccatcattgtgtggagccaaagggatatgccagaacacgccagggagcttctcctgtgaatgtcagagggggtttagtctggatgcaactggtttgaattgcgaagacgtcgatgagtgcgatgggaatcacaggtgtcagcatggctgccagaacatcctgggaggctatagatgtggctgtccccagggctacatccagcattatcagtggaatcaatgcgttgacgagaacgagtgcagtaaccccaatgcgtgcggttctgcttcctgttacaataccctcggatcctacaagtgcgcttgcccgtcaggattttcattcgaccaattcagttcagcttgtcatgatgtgaatgagtgtagttcctctaagaacccctgcaactacggatgctctaacacggagggaggttatttgtgcggctgtccacctgggtattatagggtggggcaagggcattgtgtgtccggaatggggtttaataaggggcagtatttgagtctggataccgaggttgatgaagagaacgccctgtctcctgaggcctgttatgagtgcaaaatcaacggatactccaagaaggactcgcgccagaagaggtcaattcacgagccagatcccacagccgtcgagcaaattagtctggaaagtgtggacatggactccccggtgaatatgaagtttaatctctctcatttaggatctaaagagcacattttggagttgagaccagcgatccagcctctgaataatcacatccgatacgtgatatcccaaggcaatgacgatagcgtgtttcgcatacaccagagaaatggcctctcgtatctgcatacggcgaagaagaaactgatgccagggacatacacgctcgagataaccagcatccccctttataagaaaaaggagcttaaaaaactcgaggaaagcaatgaagacgactatcttttgggagaattaggggaagccctgagaatgcgtctccagatccagctgtattag

SEQ ID NO: 122961 - DNA, 8739 bp, Artificial Sequence
  derived and/or modified sequence
atgggcagaagaagaaggctgtgcctgcagctgtacttcctgtggctgggctgtgtggtgctgtgggcccagggcacagctggccagccccagcccccaccacccaagccaccccggccccagcccccaccccagcaggtgcgcagcgccacagctggcagcgagggcggcttcctggcccctgagtaccgggaggagggcgctgctgtggccagccgggtgagaagaagaggccagcaggatgtgctgcggggccccaacgtgtgtggcagccgcttccacagctactgctgccccggctggaagaccctgcccggcggcaaccagtgcatcgtgcccatctgcaggaacagctgtggagatggcttctgcagccggcccaacatgtgcacctgcagcagcggccagatcagcagcacctgtggcagcaagagcatccagcagtgcagcgtgcgctgcatgaatggaggcacctgtgctgatgaccactgccagtgccagaagggctacatcggcacctactgcggccagcctgtgtgtgaaaatggctgccagaatggaggccgctgcatcggccccaacagatgtgcctgtgtgtatggcttcaccggcccccagtgtgagcgggactacagaacaggcccctgcttcacccaggtgaacaaccagatgtgccagggccagctgaccggcatcgtgtgcaccaagaccctgtgctgtgccaccatcggccgggcctggggccacccctgtgagatgtgcccagcccagccccagccctgccggcggggcttcatccccaacatcagaactggagcctgccaggatgtggatgagtgccaggccatccctggcatctgccagggcggcaactgcatcaacacagtgggcagctttgagtgccgctgcccagctggccacaagcagagcgagaccacccagaagtgtgaagatattgatgaatgttccatcatccctggcatctgtgaaacaggagaatgtagcaacacagtgggcagctacttctgtgtgtgcccccggggctacgtgaccagcacagatggcagccgctgcatcgaccagaggacaggcatgtgcttcagcggcctggtgaatggccgctgtgcccaggagctgcccggccgcatgaccaagatgcagtgctgctgtgagcccggccgctgctggggcatcggcaccatccctgaggcctgccctgtgcggggcagcgaggagtaccgccgcctgtgcatggatggcctgcccatgggcggcatccctggcagcgctggcagcaggcctgggggcactggaggaaatggatttgcccccagcggaaatggaaatggctacggccctgggggcaccggcttcatccccatccctggaggaaatggcttcagccctggggtgggcggggccggcgtgggcgctgggggccagggccccatcatcaccggcctgaccatcctgaaccagaccatcgacatctgcaagcaccacgccaacctgtgcctgaatggccgctgcatccccaccgtgagcagctaccgctgtgagtgcaacatgggctacaagcaggatgccaacggggactgcattgatgtggatgagtgcaccagcaacccctgcaccaacggggactgtgtgaacaccccaggcagctactactgcaagtgccacgccggcttccagaggacccccaccaagcaggcctgcatcgacattgatgagtgcatccagaatggagtgctgtgcaagaatggccgctgtgtgaacacagatggcagcttccagtgcatctgcaatgccggctttgagctgaccacagatggcaagaactgtgtggaccatgatgagtgcaccaccaccaacatgtgcctgaatggcatgtgcatcaatgaagatggcagcttcaagtgcatctgcaagccaggctttgtgctggcccccaacggccgctactgcacagatgtggatgagtgccagaccccaggcatctgcatgaatggccactgcatcaacagcgagggcagcttccgctgtgactgccccccaggcctggccgtgggcatggatggccgggtgtgtgtggacacccacatgaggagcacctgctatggaggcatcaagaagggcgtgtgtgtgcggcccttccctggagctgtgaccaagtctgagtgctgctgtgccaacccagactatggctttggagagccctgccagccctgcccagccaagaacagcgctgagttccacggcctgtgcagcagcggcgtgggcatcaccgtggatggccgggacatcaatgaatgtgccctggaccctgacatctgtgccaacggcatctgtgagaacctgcggggcagctaccgctgcaactgcaacagcggctatgagccagatgccagcggcaggaactgcattgatattgatgaatgtctggtgaaccggctgctgtgtgacaatggcctgtgcaggaacaccccaggcagctacagctgcacctgccccccaggctacgtgttcagaacagaaacagagacctgtgaggacatcaatgaatgtgagagcaacccctgtgtgaatggagcctgcaggaacaacctgggcagcttcaactgtgagtgcagccctggcagcaagctgagcagcacaggcctcatctgcatcgacagcctgaagggcacctgctggctgaacatccaggacagccgctgtgaggtgaacatcaacggggccaccctgaagtctgagtgctgtgccaccctgggcgccgcctggggcagcccctgtgagcgctgtgagctggacacagcctgcccccggggcctggcccgcatcaagggcgtgacctgtgaagatgtgaatgaatgtgaggtgtttcctggggtgtgccccaacggccgctgtgtgaacagcaagggcagcttccactgtgaatgtcctgagggcctgaccctggatggcaccggccgggtgtgcctggacatccgcatggagcagtgctacctgaagtgggatgaagatgagtgcatccaccctgtgcctgggaagttcaggatggatgcctgctgctgtgctgtgggcgccgcctggggcacagaatgtgaagaatgtcccaagccaggcaccaaggagtatgagaccctgtgccccaggggggccggctttgccaacagaggagatgtgctgaccggccggcccttctacaaggacatcaatgaatgcaaggccttccctggcatgtgcacctacggcaagtgcaggaacaccatcggcagcttcaagtgccgctgcaacagcggctttgccctggacatggaggagaggaactgcacagacattgatgagtgccgcatcagcccagacctgtgtggcagcggcatctgtgtgaacaccccaggcagctttgaatgtgaatgttttgagggctatgagagcggcttcatgatgatgaagaactgcatggacattgatgaatgtgagaggaaccccctgctgtgccggggcggcacctgtgtgaacacagagggcagcttccagtgtgactgccccctgggccacgagctgagccccagccgggaggactgtgtggacatcaatgaatgttccctgagtgacaacctgtgcagaaatggaaaatgtgtgaacatgattggcacctaccagtgcagctgcaaccctggctaccaggccaccccagaccggcagggctgcacagacattgatgagtgcatgatcatgaatggaggctgtgacacccagtgcaccaacagcgagggcagctatgaatgtagctgcagcgagggctacgccctgatgccagatggccgcagctgtgccgacattgatgaatgtgagaacaacccagacatctgtgatggcggccagtgcaccaacatccctggagagtaccgctgcctgtgctatgatggcttcatggcctccatggacatgaagacctgcattgatgtgaatgaatgtgacctgaacagcaacatctgcatgtttggagaatgtgagaacaccaagggcagcttcatctgccactgccagctgggctacagcgtgaagaagggcaccaccggctgcacagatgtggatgaatgtgaaattggagcccacaactgtgacatgcacgccagctgcctgaacatccctggcagcttcaagtgcagctgccgggagggctggattggaaatggcatcaagtgcatcgacctggatgaatgtagcaatggcacccaccagtgcagcatcaatgcccagtgtgtgaacaccccaggcagctaccgctgtgcctgcagcgagggcttcaccggagatggcttcacctgcagtgatgtggatgaatgtgccgagaacatcaacctgtgtgaaaatggccagtgcctgaatgtgcctggggcctaccgctgtgaatgtgagatgggcttcaccccagccagtgacagccgcagctgccaggacattgatgagtgcagcttccagaacatctgtgtgtttggcacctgcaacaacctgcccggcatgttccactgcatctgtgatgatggctatgagctggacagaactggaggcaactgcacagacattgatgaatgtgccgaccccatcaactgtgtgaatggcctgtgtgtgaacaccccaggccgctatgagtgcaactgccccccagacttccagctgaaccccactggagtgggctgtgtggacaacagagtgggcaactgctacctgaagtttggccccagaggagatggcagcctgagctgcaacacagaaattggagtgggcgtgagccgcagcagctgctgctgcagcctgggcaaggcctggggcaacccctgtgagacctgcccccctgtgaacagcacagagtactacaccctgtgccctggaggagagggcttccggcccaaccccatcaccatcatcctggaggacattgatgagtgccaggagctgcccggcctgtgccagggcggcaactgcatcaacaccttcggcagcttccagtgtgagtgcccccagggctactacctgtctgaggacacccgcatctgtgaagatattgatgaatgttttgcccaccctggggtgtgtggccctggcacctgctacaacaccctgggcaactacacctgcatctgccccccagagtacatgcaggtgaatggaggccacaactgcatggacatgaggaagagcttctgctaccgcagctacaacggcaccacctgtgaaaatgagctgcccttcaacgtgaccaagaggatgtgctgctgcacctacaacgtgggcaaggcctggaacaagccctgtgagccctgccccaccccaggcacagctgacttcaagaccatctgtggcaacatccctggcttcacctttgacatccacacaggcaaggctgtggacattgatgagtgcaaggagatccctggcatctgtgccaatggagtgtgcatcaaccagatcggcagcttccgctgtgagtgccccaccggcttctcctacaatgacctgctgctggtgtgtgaagatattgatgaatgtagcaatggagacaacctgtgccagagaaatgctgactgcatcaacagccctggcagctaccgctgtgaatgtgccgccggcttcaagctgagccccaatggagcctgtgtggacagaaatgaatgtctggagatccccaacgtgtgcagccacggcctgtgtgtggacctgcagggcagctaccagtgcatctgccacaacggcttcaaggccagccaggaccagaccatgtgcatggatgtggatgaatgtgagcggcacccctgtggaaatggcacctgcaagaacacagtgggcagctacaactgcctgtgctacccaggctttgagctgacccacaacaatgactgcctggacattgatgagtgcagcagcttcttcggccaggtgtgcagaaatggccgctgcttcaatgagatcggcagcttcaagtgcctgtgcaatgaaggctatgagctgaccccagatggcaagaactgcatcgacaccaatgaatgtgtggccctgcccggcagctgcagccctggcacctgccagaacctggagggcagcttccgctgcatctgccccccaggctatgaggtgaagtctgagaactgcatcgacatcaatgaatgtgatgaggaccccaacatctgcctgtttggcagctgcaccaacacccctgggggcttccagtgcctgtgccccccaggctttgtgctgagtgacaatggccgccgctgctttgacacccggcagagcttctgcttcaccaactttgaaaatggcaagtgcagcgtgcccaaggccttcaacaccaccaaggccaagtgctgctgcagcaagatgcctggagagggctggggagacccctgtgagctgtgccccaaggatgatgaggtggccttccaggacctgtgcccctacggccatggaacagtgcccagcctgcatgacacccgggaggatgtgaatgaatgtctggagagccctggcatctgcagcaatggccagtgcatcaacacagatggcagcttccgctgtgaatgtcccatgggctacaacctggactacacaggagtgcgctgtgtggacacagatgagtgcagcatcggcaacccctgtggaaatggcacctgcaccaacgtcatcggcagctttgagtgcaactgcaatgaaggatttgagcccggccccatgatgaactgtgaggacatcaatgaatgtgcccagaaccccctgctgtgtgccttccgctgcatgaacaccttcggcagctatgagtgcacctgccccatcggctacgccctgcgggaggaccagaagatgtgcaaggacctggatgaatgtgccgagggcctgcatgactgtgagagccggggcatgatgtgcaagaacctgattggcaccttcatgtgcatctgccccccaggcatggcccggcggccagatggagagggctgtgtggatgaaaatgaatgtaggaccaagccaggcatctgtgaaaatggccgctgtgtgaacatcatcggcagctaccgctgtgagtgcaatgaaggcttccagagcagcagcagcggcacagaatgtctggacaaccggcagggcctgtgctttgctgaggtgctgcagaccatctgccagatggccagcagcagcaggaacctggtgaccaagtctgagtgctgctgtgatggcggccggggctggggccaccagtgtgagctgtgccccctgcccggcacagcccagtacaagaagatctgcccccacggccctggctacaccacagatggccgggacattgatgagtgcaaggtgatgcccaacctgtgcaccaacggccagtgcatcaacaccatgggcagcttccgctgcttctgcaaggtgggctacaccacagacatcagcggcaccagctgcatcgacctggatgagtgcagccagagccccaagccctgcaactacatctgcaagaacacagagggcagctaccagtgcagctgcccccggggctacgtgctgcaggaggatggcaagacctgcaaggacctggatgagtgccagaccaagcagcacaactgccagttcctgtgtgtgaacaccctgggcggcttcacctgcaagtgccccccaggcttcacccagcaccacacagcctgcatcgacaacaatgaatgtggcagccagcccagcctgtgtggggccaagggcatctgccagaacaccccaggcagcttcagctgtgagtgccagaggggcttcagcctggatgccaccggcctgaactgtgaagatgtggatgaatgtgatggcaaccaccgctgccagcacggctgccagaacatcctgggcggctaccgctgtggctgcccccagggctacatccagcactaccagtggaaccagtgtgtggatgaaaatgaatgtagcaaccccaatgcctgtggcagcgccagctgctacaacaccctgggcagctacaagtgtgcctgccccagcggcttctcctttgaccagttcagcagcgcctgccatgatgtgaatgaatgtagcagcagcaagaacccctgcaactacggctgcagcaacacagaaggaggctacctgtgtggctgccccccaggctactacagagtgggccagggccactgtgtgtctggcatgggcttcaacaagggccagtacctgagcctggacacagaggtggatgaggagaatgccctgagccctgaggcctgctatgagtgcaagatcaatggctacagcaagaaggacagccggcagaagaggagcatccacgagccagaccccacagctgtggagcagatcagcctggagagcgtggacatggacagccctgtgaacatgaagttcaacctgagccacctgggcagcaaggagcacatcctggagctgcggcctgccatccagcccctgaacaaccacatccgctacgtgatcagccagggcaatgatgattctgtgttccgcatccaccagagaaatggcctgagctacctgcacacagccaagaagaagctgatgcctggcacctacaccctggagatcaccagcatccccctgtacaagaagaaggagctgaagaagctggaggagagcaatgaagatgactacctgctgggggagctgggggaggccctgaggatgaggctgcagatccagctgtactag

SEQ ID NO: 122962 - DNA, 8739 bp, Artificial Sequence
  derived and/or modified sequence
atgggccggcggcggcggctgtgcctgcagctgtacttcctgtggttaggatgcgtggtgttgtgggcccaggggaccgccggtcagccccagccccctccccccaagccgcccaggcctcaaccaccaccccagcaggtccgtagcgcgaccgcaggctccgagggcggttttctggctccggagtacagggaagagggcgcagctgtggccagccgggtcagaagacgcggccaacaagatgtgttgcgcgggcctaacgtttgcgggtctcgttttcacagttactgctgccctgggtggaagacgctccctggcggaaaccagtgtatcgtgcctatatgcagaaattcttgcggagacggattctgttctagacctaacatgtgcacttgctcaagtggacaaatctcttcaacttgtggtagtaagagcattcaacagtgttccgttcggtgcatgaatggtggaacctgcgcagatgatcattgtcagtgtcaaaaagggtacattggaacctattgtggccaaccggtgtgtgagaacggatgccagaacggcgggcgttgtattggcccaaaccggtgcgcctgtgtttatggattcacggggccccagtgcgagcgtgactatcgcactggaccctgcttcacccaggtcaacaatcagatgtgccaggggcagctgaccggcatcgtgtgtacaaagactctgtgttgtgctacaatcggaagggcctggggacacccatgtgagatgtgccccgcgcaacctcagccctgcaggcggggatttatccccaacattaggacaggtgcatgccaggatgttgatgagtgccaggccattcctggtatatgccaggggggcaactgtattaataccgtgggcagcttcgaatgtcgttgccccgcaggacacaaacagagtgaaacgacacagaagtgcgaagacatcgacgagtgttccataataccaggcatctgtgaaaccggcgagtgcagcaatacagtgggaagttacttctgtgtctgcccaaggggatacgtgacaagtaccgacggatcacgttgtattgaccagaggactgggatgtgcttctcgggtctagtcaatggaaggtgtgcacaggagctgcccggacgaatgacgaaaatgcagtgctgttgcgaacccggtaggtgctgggggatcggcactatccctgaggcctgccctgtacggggttccgaagagtacaggagattgtgtatggatgggctccctatgggtggaatccctggtagcgctggctcccgccctggaggcacaggaggaaatggcttcgccccatccggaaacggcaacgggtacggaccaggcgggaccggcttcataccaattcccggagggaatggctttagcccgggcgtgggtggcgccggagtgggggctggtggccagggaccaattataaccgggctcactatattaaaccagacaattgacatctgcaagcatcacgctaacctctgtttgaacggacgctgtatccccactgttagttcttacaggtgtgagtgcaacatggggtataagcaggatgctaacggtgactgcatagatgtcgacgaatgcacgtccaatccctgcactaatggagactgcgtcaatacccctggctcatattactgtaagtgtcatgccggcttccagagaactccgaccaagcaggcttgcatcgacattgacgagtgtattcagaatggtgtcctgtgcaaaaacggaagatgtgttaatacggacggttccttccaatgcatttgcaacgcagggttcgagcttacgaccgacggcaagaattgtgtcgatcacgacgagtgtacaacgacaaacatgtgtcttaacggaatgtgtatcaatgaggatggcagcttcaaatgcatttgtaagccaggcttcgtgctagcacctaacggacgttattgtacggacgtggacgaatgtcagaccccagggatctgtatgaatggacattgcattaactcagagggctcgtttagatgtgattgtcctcccggcttggctgtggggatggacggccgagtatgcgtcgatacccacatgaggtccacttgctatggggggattaagaaaggcgtctgcgtgagacctttcccgggcgcagtgacaaaaagtgagtgctgctgtgctaacccagactatggcttcggcgagccctgtcagccatgccccgctaagaactcagcggagttccacgggctttgcagttccggggtcgggatcactgtggatgggagggatatcaacgagtgcgccctggatccagacatttgtgctaacgggatatgtgaaaatctgcggggctcataccgctgcaactgtaacagtggctatgagccagatgcaagcggacggaactgtattgatatcgacgaatgcctcgtcaacaggctgttatgtgataacggactctgccgcaacacacccggttcttacagttgtacctgcccgccaggatatgtgttcaggaccgagaccgagacctgtgaggacatcaatgaatgcgagtccaacccctgtgttaacggagcgtgccggaacaacttgggtagctttaattgtgagtgcagtcccgggtcaaagctgagttcaacaggtttgatttgcatcgacagcttgaaagggacatgttggctcaacattcaggacagtcgatgtgaggtcaacatcaatggggccaccctcaagtccgaatgctgcgcaacacttggcgcggcctggggctccccttgcgaacgatgcgagctggatacagcatgcccccggggactggccaggatcaagggggtgacctgcgaggacgtcaacgagtgtgaggtcttccccggggtttgcccgaacgggcggtgcgtgaatagcaagggttcttttcactgcgaatgccccgagggcctcactcttgacggcaccggccgggtttgcctcgatatcaggatggaacaatgttacctgaaatgggatgaagatgagtgtatccatcccgtgccagggaaattccgaatggacgcttgctgttgtgccgtaggagccgcatgggggaccgagtgcgaggagtgtcccaagccaggtactaaggagtatgaaacactgtgcccccggggcgcaggttttgccaatagaggagatgtactaactggacgccctttttacaaggacatcaatgagtgcaaagccttccccggcatgtgtacatacggaaagtgtcgaaataccattggaagcttcaagtgtcgatgtaatagtggctttgcccttgacatggaagagagaaactgtaccgatattgatgaatgtcgtatctctcccgacctgtgtggctcggggatttgtgttaatactccgggctcgtttgaatgtgaatgttttgaaggctacgaatcaggcttcatgatgatgaaaaactgtatggacatagacgagtgtgaacgcaacccactgctctgtagagggggtacatgtgtgaacactgaggggtcgttccaatgtgactgccctctgggtcacgagctttcccccagtagagaagactgcgtcgatatcaatgaatgtagcctttcggacaatctctgtaggaatgggaaatgtgttaacatgatcggcacctaccaatgcagctgtaaccccggataccaggcgacaccagaccgtcagggctgtactgacattgacgagtgtatgattatgaacggtggatgtgacacacagtgcaccaatagcgaagggtcctacgaatgttcttgcagcgaggggtacgcactgatgcctgatggacgctcatgcgctgatatcgatgaatgtgagaacaaccccgatatctgtgatggaggacagtgcaccaacatcccaggcgagtatcggtgcctctgctatgatggctttatggcatctatggatatgaagacctgtattgacgtgaacgaatgcgatcttaactcaaatatttgcatgtttggtgaatgcgaaaatacaaagggatctttcatctgccactgccagctggggtactcagtgaagaaggggacaaccggttgcacggacgtggacgagtgcgagatcggcgcacacaactgtgacatgcacgcatcttgtctgaatatccccgggtctttcaagtgctcttgccgtgaaggatggattgggaatggcataaaatgtatagacctcgacgagtgctcaaacggtacacatcaatgcagtattaacgcccagtgcgtaaacacacccggctcttatcggtgcgcatgctccgaaggttttaccggcgacggattcacatgctctgacgtagacgaatgcgctgagaatataaacttgtgtgaaaacggacagtgtctgaacgtgcctggagcgtatagatgtgagtgcgagatgggcttcaccccagcgtccgattcccgatcttgccaggatatcgatgagtgctcattccagaatatttgcgtatttgggacttgtaacaacctgcctggaatgttccactgcatctgtgatgatgggtatgaactggatcgcaccgggggaaactgtaccgatattgatgaatgcgccgaccctatcaattgtgtgaacggactgtgcgtaaatactcctggccgatacgaatgcaactgccctcccgattttcagctgaatcccactggagttggttgcgtagacaaccgtgttggcaactgttatctcaagtttggtcccaggggagacggttccctgagctgtaacactgagattggcgtgggcgtgagtcgaagctcctgttgttgcagcttgggcaaggcatggggtaatccctgtgagacctgccctcccgtgaattcaacagagtattacacactgtgcccggggggcgagggcttccgtccgaatccaatcacaattatccttgaggacatagacgagtgtcaggaacttccaggtctttgtcagggcggtaactgtataaataccttcggtagcttccagtgcgaatgtccacaggggtattacctgtctgaagacactcgtatctgtgaggacatagacgaatgctttgctcatccaggtgtttgtggccctggaacttgttacaataccttagggaattatacctgtatctgccctcccgagtacatgcaggtgaacggcggacacaactgtatggacatgcgcaaatctttttgctataggtcctacaacggcacaacatgtgagaatgaactcccgtttaatgtgacgaagcgcatgtgttgctgtacctacaatgtcggtaaagcttggaataagccctgtgaaccttgccccacacccgggacagctgatttcaagacaatttgtgggaatatacccggcttcacgttcgatattcatacgggaaaggcagtggacatagacgagtgcaaggagatccccggcatatgcgctaacggcgtgtgtatcaatcaaatcggttcctttaggtgcgagtgtccaacgggtttctcctacaatgatcttctgctcgtgtgtgaggatattgacgaatgcagcaatggggacaatctgtgccagaggaatgctgattgcattaacagccccgggtcttatcggtgcgagtgtgcggccgggttcaaactgagtcctaacggtgcatgtgtcgacaggaacgagtgtcttgagattccgaatgtgtgcagccacggcctgtgtgtagacctccaagggagctaccagtgtatttgccacaacgggtttaaggccagccaggaccagactatgtgtatggacgttgatgaatgtgagcggcacccttgtggaaatggaacttgcaaaaatacagttgggtcgtataactgcctatgctacccagggttcgaactgacccataacaacgattgtttggatatagacgaatgctcctcgttttttgggcaggtgtgtaggaacggacggtgtttcaatgaaattggctccttcaagtgtttatgcaacgaagggtatgaactgactcccgacggtaaaaactgcatagacacgaatgagtgtgtggcgctgcctggatcttgttctcccgggacttgtcagaacctggagggtagctttaggtgtatctgccccccagggtatgaggtgaagtctgaaaattgcattgacatcaacgagtgcgatgaggacccaaacatttgtctgtttgggtcctgtactaacacgccaggaggttttcagtgcttgtgccctcctggttttgttttgtctgacaacgggaggaggtgcttcgacactcggcaaagtttttgcttcacaaacttcgagaacggaaagtgtagcgtccctaaggcttttaacacaaccaaggctaagtgttgttgcagtaagatgcccggcgaggggtggggcgacccctgcgagctatgtccaaaggacgatgaagtcgcattccaggacctgtgcccatacggacatgggacagttccaagtctgcacgatacaagggaagatgttaatgagtgcctcgaatccccaggtatctgttcaaatggccagtgcatcaacacagatggatctttccgctgtgaatgccctatgggttataacctggattataccggggtgcgttgtgtggacactgatgagtgcagtattgggaacccctgtgggaatggaacctgcaccaacgtgataggttctttcgaatgcaactgcaacgaaggctttgaaccagggccaatgatgaattgcgaagatataaacgaatgcgcacaaaaccccctcctgtgtgcatttcgctgcatgaacacattcggctcttacgaatgcacttgtccgattggctatgctctgcgggaggatcaaaaaatgtgtaaagacctggacgagtgtgccgaagggctgcatgactgcgagtctcgtggcatgatgtgtaagaacctcattggcacctttatgtgtatttgtccccctggaatggctaggcggcctgacggtgaaggctgcgtggatgagaatgaatgcaggacaaaacctggcatatgtgagaacggccggtgtgttaacataatcgggtcttacagatgtgagtgtaatgagggattccaatcatccagcagcggcactgaatgcctggacaaccgccaggggctgtgtttcgctgaggtgcttcagacaatctgtcagatggccagctcaagccggaatcttgtcacaaaatcagagtgctgctgtgacgggggccgcggctggggacaccaatgtgagttgtgccctctgccagggaccgcccagtacaagaaaatctgtccacacggacccggatacaccaccgatggcagagacattgacgaatgtaaagtgatgcccaatctttgcacaaatggccagtgtatcaataccatggggagtttccggtgcttctgtaaggtaggatataccaccgatatttcagggactagctgcattgatctggacgaatgttctcagtctccgaagccttgcaactatatctgcaaaaacaccgaaggctcctaccagtgttcttgccctagaggctatgtgcttcaggaggacggaaagacttgcaaggacctggatgagtgtcagactaagcaacacaactgccagtttctgtgtgtgaatactttagggggttttacttgcaagtgcccccccggctttacgcagcaccacacagcgtgcatcgacaataatgagtgcggctctcagccatctctatgcggagcaaagggtatatgtcagaacacccctggaagcttctcctgtgaatgtcagagggggttttccctcgacgctaccggtctgaattgtgaggatgtggacgagtgcgatggcaaccatcgttgccagcatggatgccagaacatactgggcgggtacagatgtggctgccctcagggctacatccagcactaccagtggaatcaatgcgttgatgagaatgagtgttcgaatcctaatgcatgcggctctgcttcgtgctacaatacgctggggagttataagtgtgcctgtccttctggtttttctttcgaccagttctccagtgcatgccatgatgttaacgagtgctcctcatccaagaatccgtgcaattacggatgttctaacacggagggcgggtacctctgtggatgtccacccggctactatagggtcgggcagggacactgcgtcagcggaatgggctttaacaaagggcaatacctctccctggacacagaggtggacgaggagaatgccttgtcccccgaggcatgctatgagtgtaaaattaatggatacagtaagaaggacagtcggcaaaaaaggtccattcacgagcccgacccaacagctgtggagcagatttctctggagtctgtagacatggacagtccagtgaacatgaaattcaaccttagccacctggggagcaaagagcacatactggaattgagacctgccatccagccacttaataaccacattcggtatgtgatcagccagggtaacgacgacagtgtcttcagaatccaccagcgcaacgggctctcttatctgcacacggcaaaaaagaagctgatgcctgggacttacactctggagatcacttccattcccctgtacaaaaaaaaagagctgaagaagcttgaggaaagtaacgaggatgattatctcctgggtgaacttggcgaggcactgagaatgcggctccaaattcagttatactag

SEQ ID NO: 122963 - DNA, 8739 bp, Artificial Sequence
  derived and/or modified sequence
atgggccggcggcggcggctgtgcctgcagctgtacttcctgtggcttggctgtgtcgtgctctgggcgcaaggaacagccggacagcctcagccaccaccacctaaaccccccagaccccagccgcccccacagcaggtaagatcagcaactgccggcagcgagggtggattcctagcgccagagtacagagaagagggcgctgccgtggcatcaagagttcgccggcggggccaacaggacgtgctcagaggccccaatgtgtgcggttcccgatttcatagctattgttgtccaggatggaagacccttccaggaggcaaccagtgcatcgtcccaatttgtcggaatagctgcggagatggattttgttcaagaccaaacatgtgcacatgtagcagtggtcagatctcctcaacctgcggctctaagagcatccagcagtgctcggttcggtgcatgaacggaggcacatgtgcagacgaccactgccagtgccagaaaggttatatcgggacatattgcggccaacccgtctgcgagaacggatgtcagaacggagggcggtgtattggccctaaccgatgcgcctgtgtgtacgggttcacggggccccagtgcgagagagactatcggacagggccttgcttcacacaggttaacaaccagatgtgccagggacaattgacaggtattgtatgtacaaaaaccctgtgctgcgcaactataggacgagcctgggggcacccatgcgaaatgtgtcctgcccagccgcagccatgtcgccgcggcttcatccccaatattaggacaggcgcatgtcaggatgttgatgagtgccaagcaattcctgggatttgccaggggggcaattgtatcaataccgtcggctctttcgaatgccggtgccctgcaggccataaacagtctgaaactacccagaagtgtgaagacatcgacgagtgtagtatcattcccggaatctgtgagaccggtgagtgttctaataccgttgggtcatacttttgtgtatgcccccgaggatacgtcaccagtacggacggtagtaggtgtatcgaccaaaggactggcatgtgcttcagtggcctggtcaacggacgttgtgcccaagaacttccaggcaggatgacaaaaatgcagtgctgttgtgaacctggacggtgctgggggataggaactatccctgaggcgtgccctgtgagaggaagcgaggaatatcgcaggctctgcatggatggactgccaatgggggggattcccgggagtgctgggtcccggccaggcgggactggcggcaatgggttcgccccctccggcaatggcaacggatacggacccggaggcactggcttcatcccaattcccgggggaaatggcttttctccgggagtgggtggggccggagtcggcgccggcgggcaggggcctatcatcactgggttgaccatcctaaaccagacaattgatatatgtaagcaccacgccaacctgtgccttaatgggcgttgcatcccgaccgtcagcagctatagatgtgaatgcaacatgggatacaagcaggacgccaacggggactgtatcgacgtggatgaatgtacctctaatccgtgtaccaatggggattgtgtcaacactcccgggagctattactgcaagtgtcacgcaggtttccaaaggacaccgactaagcaggcttgtattgatatcgacgaatgcatacaaaacggggtgctatgcaaaaacggcaggtgtgtgaacaccgacggctcttttcaatgcatttgtaacgccggttttgagctgaccacagacggaaagaactgcgttgaccacgacgagtgtaccacaactaacatgtgtctaaatggcatgtgcattaatgaagatgggagctttaagtgtatctgtaagcctgggtttgtcctagcgccaaatggccgatactgcaccgacgtggatgagtgccaaacaccagggatatgtatgaatggtcattgcatcaattctgaggggtcctttcgctgcgattgtcctcctggtctggccgtcggcatggacgggagggtgtgcgtggatacccacatgcgctccacttgctatggtggaatcaaaaaaggagtgtgcgttaggccctttcccggagcggtgacaaagagtgagtgctgctgcgctaatcccgactacggattcggtgagccatgccagccatgccccgctaagaattcagctgagtttcatgggctgtgttcttcaggagtgggcatcactgtggacggcagggacatcaacgagtgcgctctggacccagacatctgtgccaatggcatctgcgagaacctccggggctcttatcggtgtaattgtaacagcggctatgagcccgatgccagcggccgcaactgcattgacatcgatgagtgtttggtcaataggctcttatgtgacaacggcctgtgccgaaacacgcctggctcttattcatgcacttgcccgccaggatatgtgtttaggaccgaaaccgaaacctgtgaagacatcaatgagtgcgaatccaacccatgcgttaacggtgcctgtagaaacaacctgggcagcttcaattgtgagtgctccccaggaagcaagttgtctagtaccggcctcatatgtatcgatagcctcaaagggacatgttggcttaacatacaagatagccggtgcgaagtgaacatcaatggcgccactcttaagagtgagtgctgcgccacattgggcgccgcctggggatccccttgtgaacggtgcgagttggatacggcctgcccccggggactagcaagaatcaagggagtgacatgcgaggacgtcaatgagtgcgaagtcttccccggcgtgtgccctaacggtcgctgtgtgaattctaagggtagctttcactgtgaatgccctgagggcctcactctcgatggcaccggaagagtgtgcctagacatcaggatggagcagtgttatttgaaatgggacgaggacgaatgcatccatcccgtgcctggcaagtttaggatggacgcctgttgctgcgctgtgggcgcagcctggggaacagagtgtgaggaatgccctaaacctggcactaaggaatacgagacactttgcccgagaggcgccggatttgctaatcgcggagatgtgctcaccggaagacctttctataaagatatcaatgagtgcaaggcttttccaggaatgtgcacgtatggtaaatgtaggaacacgattggtagcttcaaatgtcgctgcaactcaggttttgccttggatatggaggagaggaactgcacagatatagatgagtgccggattagcccagatctttgcggatcaggcatttgtgtaaatacgcctggcagcttcgagtgcgagtgctttgaggggtacgagagtggcttcatgatgatgaaaaactgtatggacatcgacgaatgtgaaagaaacccactcctgtgtagaggcgggacctgcgttaacaccgagggatccttccagtgcgattgccctctcgggcacgagctcagccctagcagagaagactgtgttgacattaacgagtgctccctctccgacaacctatgtcgcaacggaaagtgtgtgaatatgatagggacatatcagtgttcatgcaatcccggctaccaggccacccctgacaggcaaggatgtaccgatatcgatgaatgcatgattatgaatgggggttgcgacacacagtgtaccaatagtgaaggttcctacgagtgttcttgctctgaaggctatgcactgatgccagacggccgaagttgcgcagacatcgatgagtgtgaaaacaacccagatatctgcgacggggggcagtgtacaaacatacccggggagtacagatgcctgtgctatgacggcttcatggccagcatggacatgaaaacctgtatagatgttaacgaatgtgacctcaacagtaacatctgtatgttcggggagtgtgagaatactaaaggttcattcatttgtcactgccagctaggatattccgtcaaaaagggaacgaccgggtgcactgatgttgatgagtgcgagattggtgctcacaactgcgacatgcacgcttcctgcctgaatattcctggctcattcaagtgctcctgtagggaaggttggattggaaacggaattaagtgtatagacctagatgaatgctctaacggaacgcatcaatgtagtataaacgctcagtgcgtgaatactcctggcagctatcgctgtgcgtgtagcgaagggttcacaggcgacggattcacttgttcagacgttgacgagtgcgccgagaatattaacctctgtgaaaacgggcagtgtctaaatgtgccaggtgcttatagatgtgaatgcgaaatggggttcactccagcttccgattcacgatcatgccaggacattgacgagtgcagttttcagaacatttgcgtatttggcacatgtaataatttgcctggcatgttccactgcatctgcgacgatggttatgagcttgataggaccggagggaattgtacagatattgatgagtgtgctgatcctatcaactgcgtgaatggactgtgcgtaaacacccccggtcgctatgagtgtaactgtcccccggacttccagctcaaccctactggagttggctgtgtggataatcgcgttggtaactgctatctgaagtttgggcccagaggcgatggatcccttagctgcaacacggagatcggcgtgggggttagcaggtcctcatgctgctgtagccttggtaaggcctggggaaacccttgcgaaacctgccccccggtaaatagtacagagtattacacgctgtgcccaggcggcgaggggttccgacctaatccgatcactatcattctcgaagacatcgacgagtgtcaggaacttcctgggttgtgccaagggggcaattgtatcaatacatttggcagctttcagtgtgaatgtcctcagggatattacctctcagaagatacgcgcatctgcgaggatatcgacgaatgcttcgcccatccaggcgtctgtggaccaggtacgtgttacaacacactgggtaattacacttgcatttgcccccctgagtacatgcaagtgaatgggggccacaattgtatggatatgaggaaaagcttctgctatagaagctacaacggaaccacgtgcgagaacgagctccctttcaacgtaacaaagcgaatgtgttgttgtacatacaatgtcgggaaggcatggaacaaaccatgcgagccatgccccaccccaggaaccgcagatttcaaaactatctgcggtaatattcccggattcacattcgacatccacaccggaaaggcagtggatattgatgaatgcaaagagattccaggcatttgtgcaaacggagtctgcataaatcaaatagggagctttcggtgcgaatgcccaactggtttctcctataacgaccttctactcgtgtgcgaagacatagatgagtgttccaacggggataatctgtgccagagaaacgccgattgcattaatagtcctgggagctaccgatgcgagtgcgccgccggattcaagctgagcccaaatggagcctgcgtggatcggaatgagtgtctggagattcccaacgtgtgcagtcatggactgtgcgtggatctgcagggttcttatcaatgcatttgccataacgggttcaaagcaagtcaggaccagactatgtgtatggacgtggacgagtgcgaaagacacccatgtggtaatgggacttgtaagaacacggtcggctcctataactgcctttgctatcctggcttcgagctcactcataacaacgattgcctggatattgacgagtgttctagcttcttcggtcaggtttgccggaatggacgctgcttcaacgaaataggcagctttaaatgtctctgcaacgagggctacgaactgactccggatggcaaaaattgtattgatacgaacgaatgtgttgccctgcccggctcctgcagccccggtacatgccagaaccttgaggggagcttccggtgcatctgtcctccaggctatgaagtcaagtctgagaactgtatcgacattaatgagtgcgatgaagaccctaacatttgtctgttcggctcatgtactaacacaccgggggggttccagtgcctttgcccccctggcttcgtgctgagtgataacgggaggaggtgttttgacacaagacaaagcttctgtttcactaactttgaaaacgggaagtgttcggttccaaaagctttcaacactactaaggccaagtgttgttgctccaagatgccaggcgaaggatggggcgatccctgtgaactgtgtcctaaagacgacgaggttgcttttcaagatctttgtccgtatggtcacggcactgtcccatcgctacacgatacccgggaggatgtgaatgagtgtctcgagtcgccgggtatttgctcaaacgggcagtgcatcaacacagacggttccttcaggtgcgagtgtcctatgggatacaacctggactataccggggttcgttgcgttgatactgacgagtgcagtattggaaatccttgcggaaacgggacatgcaccaatgtcataggaagcttcgagtgtaactgcaacgaggggtttgaacctgggccaatgatgaactgtgaggatattaatgagtgtgcgcaaaatccactactctgtgcatttcgatgcatgaatactttcggatcgtacgagtgcacatgtccgatcggctatgccctgagagaggatcagaagatgtgtaaggatctggatgagtgcgccgaggggttgcacgattgtgagtcccgaggcatgatgtgtaaaaatctgattgggacttttatgtgtatatgtccacctggaatggcccggcgtcctgatggggagggttgcgtcgacgagaatgagtgtagaaccaaacccggaatctgtgaaaacgggcgctgtgtgaatataattgggtcataccgatgcgagtgtaacgagggtttccagagttctagctccggaacagaatgtcttgacaatagacagggcctgtgttttgctgaagtgcttcagacaatctgccagatggccagctctagccgaaacctagtcactaagtcagaatgctgctgcgatggcggacggggctggggccaccaatgtgaactttgtccactcccggggaccgcgcagtacaagaagatatgccctcacggccctggatacacaaccgacggcagagatatcgacgagtgtaaagtgatgcctaacttatgtacaaacggccagtgtattaataccatggggagctttcgatgcttttgtaaagtcggatataccacagatatctcagggaccagttgcatcgacctggacgagtgttctcagagtcctaagccgtgtaattacatctgcaagaacaccgagggatcatatcagtgctcttgccccagaggctatgttctacaggaagacggcaagacctgtaaagatttggatgagtgtcaaactaagcagcataactgtcagtttttgtgcgtgaacactttgggcggcttcacctgtaaatgtccgcctggtttcacccagcaccatactgcttgcattgacaacaatgagtgcgggagccagccctcgctctgcggggctaaaggaatttgccaaaatacccccgggagcttcagttgcgagtgtcagagggggttctcactggatgccacggggttaaactgtgaggacgtcgacgaatgcgacggaaaccataggtgtcagcatggatgtcagaatattcttggcggatatagatgtggctgtcctcaaggatatatccaacactatcagtggaaccaatgcgtagatgagaacgaatgttcaaaccccaacgcgtgcggctctgcttcttgttacaacacactagggtcttacaagtgtgcctgtccttcaggcttcagtttcgatcagttctctagtgcatgccacgatgtaaacgaatgttcaagcagcaagaacccttgcaactacggttgcagtaatacagaaggaggttacctgtgtggctgccccccaggatattaccgggtggggcaggggcactgcgtgtccggtatgggcttcaataaggggcagtatctgagtctcgatactgaagtggatgaggaaaacgccttgtccccagaagcgtgctacgaatgcaagatcaatggctacagcaagaaggatagcagacagaagcgcagcattcatgagccggacccaaccgcggtagaacagatttctctagagtctgtagacatggatagccctgtaaacatgaagttcaatctgtcccacttgggaagtaaagagcatatcctggagttacgcccagcaatacagcctctgaacaaccatatccggtatgtcattagccaaggcaacgacgactcggtcttccgcattcaccagagaaatgggctgagctatttgcacacagctaagaagaaactgatgcccggcacctatacacttgagattacgtcaatacctttatataagaaaaaggaactgaaaaagctggaagaaagtaatgaggacgactacttgctcggtgagctcggcgaagccctgaggatgagactgcagatccagttgtactag

SEQ ID NO: 122964 - DNA, 8739 bp, Artificial Sequence
  derived and/or modified sequence
atgggaagacggcgacgactgtgtctccagctctattttctgtggttggggtgcgttgtgctgtgggctcagggcacagccggtcagccacaaccaccacctcctaagccccctaggccacagccaccccctcagcaggtgagatctgcgacggcgggtagcgaggggggttttctcgccccagaatacagagaagagggcgcagctgtggcttcccgggttagacgcagaggtcagcaggacgttcttcggggtcctaacgtgtgtggctctcgtttccatagttactgctgtcctggctggaagacacttccgggaggcaatcagtgtatcgtgccaatctgccgcaactcatgcggtgacggcttttgctcaaggccaaacatgtgtacctgctcttctgggcagattagctcaacatgcggttccaaaagtatccagcagtgttcagttcgctgtatgaatggaggtacctgtgcagacgatcactgccagtgtcagaaggggtatattggaacctactgtggccagccggtgtgtgagaacggctgccagaatggcggacggtgcatcggcccaaatcggtgcgcatgcgtgtacggctttacaggtccgcagtgtgagagggattacagaactggcccttgttttacacaagtaaataatcagatgtgtcagggccagctgaccggcatcgtgtgtacgaagactttatgctgtgccacaatcggacgggcatggggtcatccatgtgaaatgtgccccgctcagccgcagccctgcagacggggattcataccaaacatcagaacgggtgcctgtcaggacgtcgacgaatgtcaagctatccccggtatttgccagggtggcaattgtatcaataccgtagggagtttcgagtgccgatgcccagcaggacacaaacagtcagagacaacccagaaatgcgaagatatagacgagtgttccattattccgggaatttgcgagactggtgagtgctccaacactgttgggtcctatttttgtgtttgcccacgcggatacgtgaccagtacagacgggtctcgctgtatcgatcagagaaccggcatgtgtttctccgggctggtcaatgggagatgtgcacaggaacttcctggacgaatgaccaaaatgcaatgttgctgcgaacccggacgatgttgggggataggcacaatccccgaggcatgccccgtgcgaggatccgaagagtacaggaggctgtgcatggatggcctgccgatgggaggaatacctggtagtgccggaagccgcccaggcggaacagggggaaatggcttcgctcccagcggcaacggtaatgggtatgggcctggtggaaccggatttatccccattcctggagggaacgggttcagccccggtgtgggcggagctggcgtgggggcaggtggccaaggccctatcattacggggcttaccattctcaaccagaccatcgacatctgcaagcatcatgccaatctgtgcctcaacggccgatgtattcccaccgttagtagctatcgctgtgaatgtaacatgggctacaagcaggacgctaacggcgattgtattgatgttgacgaatgtacgtcaaacccttgcactaacggtgactgcgtgaacactcctggcagttattactgcaaatgtcacgccggattccagagaacccctacaaaacaggcttgcatagatatcgacgagtgcatccagaatggggtgctgtgcaagaatggccgttgcgtcaataccgatggaagcttccagtgtatttgcaatgccggtttcgaactgaccacggacgggaagaactgtgtggatcatgacgagtgtacaaccacaaacatgtgccttaacggcatgtgcattaacgaggatggttcgtttaaatgtatttgtaagccgggattcgtgctggcgcctaacgggaggtactgcaccgatgtcgacgaatgccagacgcctggaatctgcatgaatggacattgtatcaacagcgagggctcctttaggtgtgactgccctcctgggctggccgtggggatggatggaagggtgtgtgtggatacccacatgcgctccacctgttatggtgggattaagaaaggagtatgcgtgaggccctttccaggggctgtcacgaagtctgaatgctgttgcgctaatcccgactatgggtttggagagccttgccagccctgtcccgctaagaactccgcggaattccacggtctatgctcctcaggagtcggaataaccgtcgacggtcgagacattaacgagtgcgcacttgatcccgacatctgtgcgaacgggatatgtgaaaatcttagggggtcctaccgatgcaactgcaactctgggtacgagcccgatgcttcagggcgaaactgcatcgatatcgatgagtgcttggtaaatcgattgctctgcgacaacggcttgtgcagaaacacccctggcagctatagctgcacgtgcccccctggctatgtgtttcggacagagacggagacctgtgaagacatcaacgagtgcgagtccaatccgtgcgtgaatggtgcctgcaggaataatctgggctctttcaactgcgagtgttcacccggaagtaaattgtcctccaccgggctgatttgcatagactctctgaaagggacttgttggcttaatatccaggactcccgttgcgaagtcaacatcaacggtgcaacactcaaatcagagtgttgcgcgaccctaggtgctgcctggggctcaccttgtgagcggtgcgagcttgatacggcatgcccaagaggcctggccaggattaaaggggtgacttgcgaggatgtgaacgagtgtgaggtattccctggggtgtgccccaacggaaggtgtgtgaattccaaaggatcatttcattgtgagtgccctgaaggcctgactctggatggtaccggacgagtctgtctcgatatcaggatggagcaatgttacctgaaatgggatgaagacgagtgcattcatcctgtccccggaaagtttcgaatggatgcctgttgctgtgccgtgggcgcagcatggggaacagagtgtgaagagtgtccaaaacccggtacgaaggaatacgagactctctgccctcgcggagccggttttgccaatcggggagacgtgcttaccggacggccattctacaaggatattaatgaatgtaaggcctttcccggtatgtgtacgtacggcaaatgccgaaacactatcggctcattcaaatgtaggtgtaattccggcttcgcactggacatggaagaaaggaattgcaccgatatcgatgagtgtcggatttctcctgatctgtgtgggtcaggcatatgtgtgaacacgcctgggtccttcgagtgtgagtgctttgagggatatgagtccggattcatgatgatgaagaattgtatggatatcgatgagtgcgagcgtaatccactcctttgcaggggaggtacatgtgtgaacacagaagggagcttccagtgcgattgccctttaggacatgaacttagcccaagccgagaggactgtgttgatattaacgagtgctccctgagcgataacctatgtcgcaacggaaaatgtgtgaacatgatcggtacctatcagtgctcttgcaatccgggttatcaggcaacgcctgaccgccaaggatgcactgatatcgacgaatgtatgatcatgaacggcggatgcgatacccagtgcactaactcagagggttcgtatgagtgcagctgctccgagggctacgctttgatgcccgatgggagatcttgcgcggacatagacgaatgtgagaataaccctgacatttgcgatggcggtcagtgcacaaacatcccaggggagtatcgttgcctgtgctatgacggctttatggccagtatggatatgaaaacttgcatcgatgtcaacgaatgcgacttgaattcgaacatatgtatgttcggagagtgtgaaaatacaaagggatccttcatctgccattgtcaattgggctatagcgtgaagaaggggacaaccggctgcactgacgtggacgagtgcgagatcggcgcacataattgtgacatgcatgcatcatgcctgaatatccctggcagctttaaatgcagttgccgagagggctggattggcaatgggatcaagtgcatcgatctggatgagtgcagtaacggtacgcaccagtgctccatcaacgctcaatgcgttaatacccccggttcttatcggtgtgcttgctccgagggcttcaccggcgatggtttcacatgctctgacgtggatgagtgtgcagaaaacatcaatctttgcgaaaacggccagtgcttaaatgtacctggagcatatagatgcgagtgcgaaatgggtttcacccccgcatcggactcccgatcatgccaggacatcgacgaatgttcattccagaacatctgcgtcttcggcacctgcaataatcttcctggcatgttccactgtatttgcgatgatggctacgagttagatagaacaggtggtaactgtactgatatcgacgaatgtgctgatcccattaattgcgtgaatgggctgtgcgttaataccccgggacgttatgagtgtaattgcccccctgactttcagctcaaccccaccggtgtggggtgcgtggataatagggtagggaactgttatctgaaatttgggccaagaggggatggttccctcagctgcaacactgagatcggagtgggagtgtcccgaagctcttgttgttgttccctgggaaaagcttgggggaacccctgtgagacctgcccccctgtgaattccacggagtattatacgctgtgccccggaggtgaagggttccgcccaaacccaatcaccatcatactggaggatattgacgaatgccaagagctgcccggtctgtgtcagggtggcaattgtataaacacttttggctcgttccagtgtgaatgtcctcagggatactatctgtctgaagatacccggatttgtgaggacatagacgagtgttttgcacatccaggtgtttgtggaccaggtacgtgctacaacacactcggcaattacacctgcatctgtcccccagagtacatgcaggtcaatgggggtcataattgtatggatatgcggaaaagtttttgctaccgtagttacaacggcactacatgcgagaacgagcttccatttaacgtgactaagcgcatgtgctgctgtacctacaacgtgggaaaagcatggaacaaaccctgcgagccctgcccgactccaggaaccgcggacttcaaaactatttgtgggaatattcctgggttcacgtttgatatacacacggggaaagccgtggatattgacgagtgtaaggaaatccccggaatctgtgctaacggcgtgtgtataaatcagattgggtccttcaggtgcgagtgcccaacgggattctcctacaatgacctgctactggtgtgtgaggacatagatgaatgctccaacggcgataacctttgccagcggaacgctgactgcatcaattcaccaggatcataccggtgtgaatgcgccgcaggcttcaagctctcccctaacggcgcttgtgtcgaccgcaacgagtgcctggaaatcccaaacgtctgcagtcacggcctgtgtgtggacttacagggatcctatcaatgtatatgccacaacggctttaaggcttctcaggaccagaccatgtgtatggacgtcgacgaatgcgagcgccacccatgcgggaacgggacatgtaagaacaccgtcggatcctacaattgcctgtgttacccaggttttgagctaacccacaataatgattgtctcgatatagatgagtgctctagcttctttggccaggtgtgtcggaacggacggtgttttaatgaaatcggtagttttaaatgcctttgcaacgagggttatgagctgacaccggatggaaagaattgtatcgataccaatgagtgcgtggccctgccgggaagttgctcaccaggcacctgccaaaatctagaaggaagcttccgttgcatttgtcctcccggttacgaagtgaagagtgaaaactgtattgatatcaacgaatgcgatgaagaccccaatatttgcctgtttgggtcatgcacgaacaccccaggcggttttcagtgcctgtgtccaccaggcttcgtcctgtctgacaacgggaggcgttgcttcgatacacgacagagcttctgttttaccaacttcgaaaacgggaaatgctcagttcctaaagcattcaacactaccaaggctaagtgttgctgtagcaagatgcctggcgagggctggggcgatccatgtgagctatgcccaaaggatgacgaggtggcattccaggatctctgtccatatgggcacggtaccgttccatctctccacgatactcgcgaagatgtaaacgagtgcctggagagccccggtatctgttcaaatggccagtgcattaatacagacggaagcttccggtgcgaatgccccatgggctataacttggattataccggcgtgcgctgcgtcgataccgatgagtgctccattgggaacccatgcggcaacggcacgtgcaccaatgtgatcggttcctttgagtgtaactgcaacgagggattcgagcccggaccgatgatgaattgcgaggacattaatgagtgcgcacagaatccgcttctgtgtgcctttcgctgcatgaatacctttggcagttatgagtgtacttgccctatcggttacgccctgagagaagaccaaaagatgtgtaaagacctggatgaatgcgctgagggactgcacgattgtgagtctagggggatgatgtgcaagaaccttatcgggaccttcatgtgtatatgccccccaggtatggccaggagacctgatggggaaggatgcgtcgatgagaacgagtgcaggactaaaccaggtatttgtgaaaacggccgatgtgtaaacattataggatcctacaggtgtgagtgtaatgagggtttccagtcgagtagcagtggcaccgagtgccttgacaatagacaggggctctgcttcgctgaggtcctccaaacgatctgtcaaatggcatcatctagccgcaatctcgtcacaaaaagcgaatgctgttgcgacggtggacggggttgggggcatcagtgcgaactgtgtccgctgccaggtacagcccagtataagaaaatatgtcctcacgggcctggatataccaccgatggacgcgacatcgacgagtgtaaggttatgcctaacttgtgtaccaatggccagtgcattaataccatgggctctttccgatgtttctgtaaggtcggatacaccaccgatatttcaggaacatcttgcatcgatctcgatgaatgttcacagagtcccaaaccttgcaattatatttgcaaaaataccgagggaagttaccagtgctcctgcccacgaggctacgtgctgcaagaagacggtaaaacgtgtaaagatcttgacgagtgtcagactaaacaacacaactgccagtttctttgcgtgaacacactggggggtttcacatgtaagtgccctcccggattcactcagcatcacaccgcctgcatagataataatgagtgtgggtcccaaccttccctctgcggggctaaaggaatttgccaaaacactcccggaagcttcagctgtgagtgtcagagaggctttagcctcgatgcaacagggttaaactgcgaagacgttgacgaatgtgatggcaaccaccgctgtcagcatggttgtcagaacatcctggggggataccgctgcggatgcccacaaggatacatacagcattaccagtggaatcagtgtgtagacgagaatgagtgcagcaatccaaatgcatgtgggtccgcctcctgttataatactctcgggtcctataagtgtgcgtgtccttccggtttctcttttgaccagttctcttccgcgtgccacgatgttaacgagtgttcttcgagcaaaaatccctgcaattacggctgtagcaacacagagggcggttatctgtgcggatgtccacctgggtattaccgagtcgggcagggacactgcgtcagcgggatgggattcaataaaggtcagtacctgagtctagatacagaggttgatgaagagaatgctctgtcaccagaagcgtgctacgagtgcaagatcaatggttatagcaagaaagactcccgacagaaaaggagtattcacgaaccagatcccaccgccgtcgaacagatttcccttgagagcgtggacatggattcacccgtaaacatgaaatttaacctgtctcatcttggttccaaggagcatatcctcgagctccggccagccatacagcccctgaataaccacataagatacgtgataagccagggcaacgacgattcagtgtttcggattcaccagcgaaatgggctgagttacctccacactgcaaagaaaaaactaatgcccggtacatacacactggagataacctccatccccctgtacaagaaaaaggagctgaagaaattggaggagagcaatgaggatgattatctcctcggagagctgggggaggccctacgcatgcgtctgcagattcagctttactat

SEQ ID NO: 122965 - DNA, 8738 bp, Artificial Sequence
  derived and/or modified sequence
atgggcaggaggcgacgtctgtgcctccagctctattttctatggctgggttgcgtggtcttgtgggcccagggcactgcaggccagcctcagcctccccctcctaaacccccaagacctcaaccgcctccccagcaggtccggagcgcaacagctggttcagagggtgggtttctggcgcctgaatatcgggaagaaggcgcagctgtggctagccgtgtacgacggagaggtcagcaggacgtgttgaggggcccaaacgtgtgtggaagcagattccatagctactgctgccccggatggaagaccctcccaggcggaaaccaatgcattgtgcctatttgcaggaatagttgtggagatggattttgttcccggcctaatatgtgcacatgctcatctggccagatcagttccacttgcggtagtaagtccatccagcaatgcagtgtccggtgcatgaacgggggaacatgcgccgacgaccactgtcagtgccagaaaggctacatcggaacttactgtggccagcccgtatgtgagaatggctgccagaacggcggacggtgtatcgggcctaaccggtgcgcctgtgtctatggttttaccggccctcagtgtgagagagactaccgcacgggtccctgcttcacgcaggtgaataatcagatgtgccaggggcagttgacgggcatcgtttgtaccaaaaccttatgttgtgccacgattggcagagcctggggacacccttgcgaaatgtgccccgctcagccccagccatgccggaggggattcatcccaaacatccgcactggcgcatgtcaggatgtggacgaatgtcaggctatcccgggtatttgtcagggaggcaattgtatcaatactgtggggtcttttgaatgtcgatgccctgcagggcataagcaaagcgaaaccacccaaaaatgcgaggacatcgatgagtgctcaataatcccaggcatctgtgaaaccggggaatgcagcaataccgtagggtcttatttttgcgtctgccccaggggatatgttaccagcactgatggcagcaggtgtattgatcagcgtactggaatgtgcttttctggactggttaacgggcgatgtgcgcaagaactccctggaagaatgacaaaaatgcagtgttgttgcgaaccagggaggtgttgggggatcggtacgattcctgaagcctgtccagtgaggggcagcgaggaatacagaagattgtgtatggatggcctccctatgggcggtattcccggttccgcaggttcaaggccgggtgggacagggggtaacggatttgccccatccggcaacggcaacggttatggacccggaggcacgggctttatcccgatcccgggtggcaacgggttcagccccggagtcggcggtgctggcgtcggtgccggagggcagggtccgatcattaccgggctgactattctgaaccagaccatagacatctgtaaacaccacgctaatttatgtctgaatggacgctgcataccgactgtgtcatcataccggtgtgaatgtaacatggggtataagcaagacgcaaacggtgactgcattgatgtagacgagtgtactagtaacccctgtacaaacggtgattgcgtgaacacacccggatcctactactgtaagtgtcacgcgggatttcagaggacacctacgaagcaggcatgcatcgacattgatgagtgcattcaaaatggcgtgctctgcaaaaatggcaggtgcgtgaacaccgatggatcatttcagtgtatatgtaacgctggtttcgagttaacaaccgatggaaagaactgtgtggaccacgacgagtgcacaactacaaacatgtgtctaaatggcatgtgcattaatgaggacggtagctttaaatgcatctgtaagccaggatttgtgctggccccaaatggccgatattgcaccgacgtggacgagtgccagactccagggatttgcatgaacggtcactgcataaacagcgagggctcctttagatgtgactgcccgccaggcttggcagtcggaatggatggacgtgtctgcgtggacactcacatgcgctccacttgctatggcggaattaagaaaggcgtttgtgtaagaccttttcctggagccgttactaaaagcgagtgctgctgcgcgaatcctgactacgggttcggggaaccgtgccagccgtgccctgcgaagaacagtgccgaatttcacggcttatgtagctccggcgtggggatcactgtcgacggaagggacataaatgaatgtgccctcgacccagatatatgcgccaatggaatctgcgaaaacctgcggggatcttatcgttgcaattgtaacagcggatatgaacccgacgcctccggaagaaattgcatcgacatcgatgaatgtcttgtcaaccgcctattatgtgacaatggactgtgccggaacacacctggctcttactcctgtacttgccctcctggttacgtgtttcgcactgagaccgaaacatgtgaggacattaatgagtgcgagtctaatccctgcgttaatggagcctgcagaaacaaccttggaagtttcaattgtgaatgttctccagggagcaaactctctagcacaggcctcatctgcatcgatagcctgaaaggtacatgttggctgaatatccaagactcgcggtgtgaggtgaacatcaacggggctacactgaagagcgagtgctgtgctactttaggcgctgcctggggatctccctgtgaacgatgtgaactggataccgcatgtccacgaggccttgcacgtatcaaaggcgtcacatgcgaggacgtgaacgaatgtgaggtcttcccgggagtgtgtcccaacggaagatgtgtgaactcaaaaggatcattccattgtgagtgcccagagggcctgaccctcgacggaactggcagggtctgcctggatatccggatggaacagtgctaccttaaatgggacgaggatgagtgcatccatcccgtccctggcaaattcagaatggatgcctgttgctgcgccgtcggcgcagcatgggggacagaatgcgaggaatgtccgaagcctgggacgaaggagtatgagaccttgtgcccccgtggcgctggatttgctaaccgcggagatgtgctcactggacgcccattttacaaggatatcaacgagtgcaaagcttttccagggatgtgtacgtatgggaagtgtcgaaatacaattggcagctttaaatgccggtgtaactcgggattcgcgctagacatggaagagagaaactgtacagacattgatgagtgccgcatttctccggatctgtgcgggtcagggatttgcgttaacacacctggctcttttgaatgcgaatgctttgagggctacgagtctggctttatgatgatgaagaactgcatggacatcgatgagtgtgagagaaacccacttttatgtcgcggaggtacttgcgtgaacactgaagggtccttccagtgcgactgcccattaggccatgagctatcccctagcagggaagactgcgtggacataaacgagtgttcgctctctgataacttgtgcagaaatgggaaatgcgtgaacatgatcggtacctaccagtgctcatgtaaccccggataccaggccactcccgaccgacaagggtgcaccgatattgatgagtgcatgattatgaatggcggttgtgacacacagtgcactaatagcgaaggctcttacgagtgcagctgttctgagggctacgctttgatgccggatggcaggagctgcgctgacatcgacgagtgcgagaacaacccggacatttgtgacggcggtcagtgtaccaatatccctggggagtacagatgtctgtgttacgatggcttcatggcctcgatggatatgaagacttgcatcgatgtgaacgagtgcgatctcaactctaacatttgtatgtttggggaatgcgagaacaccaagggctcattcatctgtcactgccaactcggctattccgtgaagaagggaacgactgggtgcaccgatgtggatgaatgtgagattggcgcacataattgtgacatgcacgcatcttgcctcaacattccaggcagctttaagtgcagttgtagagagggatggataggcaatgggatcaagtgtatcgaccttgacgagtgtagcaacggcacccaccagtgttctatcaatgcacaatgtgttaacacgcctgggagctacaggtgcgcgtgctctgaaggctttacaggcgatggcttcacctgtagtgatgttgacgaatgcgccgagaacattaatctgtgtgagaatgggcagtgcctgaatgtacccggtgcgtatcggtgtgaatgcgaaatgggttttacaccagcctctgactcacggtcatgtcaagatattgatgagtgcagctttcagaacatttgcgtgttcggcacctgtaacaatcttcccggaatgttccactgcatatgcgacgacggatacgaattggaccgcacaggagggaactgcaccgacatcgacgaatgcgccgatccaattaactgtgtgaatggcctgtgcgtgaatactccagggcgatacgagtgcaattgtcctcccgacttccaactgaatcccactggcgtgggttgtgtcgataatagagtggggaattgttatctgaaatttggtccgcgtggagacgggtcactgagttgcaacactgagattggagtgggtgtgtctagatcttcttgttgttgtagcctcgggaaagcatgggggaacccttgtgaaacgtgtccccctgttaacagtacggagtactacaccttgtgtcctggtggcgaaggattccgccctaacccgattaccatcatcttggaggatattgatgaatgccaggaactgcctgggctctgccaaggcggaaattgtatcaacaccttcggctcattccaatgtgagtgcccacagggctattatctgagtgaagatacaagaatttgcgaagatattgacgagtgtttcgcccatcctggtgtctgtggaccgggaacatgctacaatacccttggcaattacacatgcatttgccctcccgaatacatgcaagtgaatgggggtcacaactgtatggacatgcggaagtcattttgctatcgttcctacaatgggactacctgtgaaaacgaactgccctttaacgtgaccaagcgaatgtgctgctgtacttacaatgtcggaaaggcatggaacaagccctgcgaaccatgtcctacccccggaaccgcggatttcaaaaccatttgcggaaatattccagggtttacattcgacattcacacggggaaggctgtcgacattgatgaatgtaaggaaatcccaggaatttgtgctaatggcgtgtgtattaaccagattggtagtttccgttgtgagtgtccaacaggcttctcatacaacgatctgttgctcgtatgcgaggatatagacgagtgctcaaatggcgacaatctttgtcagagaaacgccgattgcattaattctcctgggtcctatcggtgcgagtgtgctgctggttttaagcttagccccaatggtgcctgcgttgatcgaaacgagtgcctggaaataccgaacgtttgttcccatggattatgtgttgatctccagggctcataccagtgcatttgccataacggcttcaaagctagtcaggaccagaccatgtgtatggacgtggacgaatgtgagcgccatccctgtgggaacgggacctgtaaaaacacggtgggcagttacaattgcctgtgttacccaggtttcgaactgacacacaacaatgactgtctagatatcgacgagtgttcatctttctttgggcaggtttgtagaaatgggaggtgtttcaacgagatcggctcctttaagtgtctgtgtaatgaggggtacgaacttactcctgacggcaaaaattgcatcgataccaacgagtgcgtagcactgccaggctcctgtagtcccggtacttgtcaaaacctggaaggcagcttccgttgcatttgtccccctggctatgaagtgaagagtgaaaattgtatcgatataaacgagtgtgacgaagatccaaacatctgtctcttcggttcctgtactaacacccctgggggatttcagtgcctctgccccccaggctttgtgctaagtgacaatggcagaagatgtttcgatacaagacaatcattttgctttacaaacttcgaaaatggtaagtgctcagtgcctaaggcatttaacactaccaaggctaagtgctgttgtagcaagatgcccggagaaggatggggggatccatgcgaactgtgtccgaaagacgatgaagtcgcctttcaggacttgtgcccatatggacacggaaccgttccatccctgcacgatactcgggaggacgttaacgagtgcctagaatctcctgggatatgtagcaacgggcagtgcattaacaccgatggctccttccgctgcgagtgccctatgggttacaacctggactacaccggagtgcgctgcgtggacaccgacgagtgctccatcgggaacccctgtggcaatggtacttgtaccaatgtgataggctcttttgagtgcaactgcaatgaggggtttgagccaggtccaatgatgaactgtgaagacattaatgagtgtgctcagaaccctctactctgtgcctttcgatgtatgaacaccttcggctcctatgagtgcacttgtccaattggctatgcattgagagaagatcagaagatgtgtaaagaccttgacgaatgcgctgaaggcttacatgactgcgaatcccgcggaatgatgtgtaagaatctgataggtaccttcatgtgcatctgccccccaggaatggcccgaaggccggatggcgaaggttgtgtggacgagaacgaatgccggaccaaacccggtatctgtgaaaatggtcggtgtgtgaatatcatcggctcctacagatgcgaatgtaacgaagggtttcaaagtagctccagtggaacagaatgcctcgacaaccgtcagggcctgtgctttgccgaagtccttcagaccatctgccagatggcatcctcaagcaggaatctggtgacgaagtctgaatgttgctgtgatggtgggaggggatggggacatcaatgcgagctgtgtcctctgccaggcacagctcagtacaaaaagatttgccctcatggacccggatatactaccgatggaagagatattgatgagtgcaaagtgatgccaaatctgtgtaccaacggccaatgtatcaacaccatggggagcttcaggtgcttttgtaaggtcgggtacaccaccgacatttccggcacgtcatgcattgacctggacgaatgttcacagtcccccaagccatgtaattatatttgcaaaaataccgagggctcttaccagtgtagctgtcctcgtggctatgtcctgcaagaagatggcaagacctgcaaagacctggacgagtgtcaaaccaagcaacataattgccaattcctatgcgtcaacaccctgggaggctttacatgcaagtgcccccctggctttacccagcaccataccgcgtgtatcgataacaatgagtgtgggagccaaccgagcctttgcggcgcaaagggcatatgtcagaatacccccggatcattctcctgtgagtgtcaacgcggattcagtctggatgccacaggcctgaactgtgaagacgtggatgaatgtgatgggaatcacaggtgccagcatggttgccagaacatcttaggcggatatcggtgcggttgtccccagggatatattcagcactatcaatggaatcagtgcgtggacgagaatgaatgttcaaatccgaacgcttgcggaagcgctagctgttacaataccttaggctcatacaagtgcgcctgtccatcggggttctctttcgatcaattttccagtgcctgccatgacgtgaacgaatgcagttcttcgaaaaatccatgtaattacggctgctcgaacactgaaggtggctacctgtgtggttgtcctccaggctattatagggtgggtcagggccactgcgtctcaggaatgggcttcaacaagggacagtacctttccctggatactgaagttgacgaagaaaacgccctgtccccagaagcatgctacgaatgtaaaatcaatggctattctaaaaaggatagcagacaaaaaaggtcaatccacgaaccggacccaactgctgtggagcagatttctcttgagagtgtggacatggatagcccagtgaacatgaagtttaacctaagccacttgggcagcaaggaacacatactagaactgcgccctgcaattcagccactcaacaaccacatcaggtacgtcatcagccaggggaatgatgattcagtgtttcgcattcaccagcgcaatggcctcagctacctgcatacggctaagaaaaaattgatgccgggaacctacacccttgagatcacttccatcccactgtataagaaaaaggaacttaagaagttggaagagtcaaacgaagacgactacctgctgggagagctgggagaggccctaaggatgaggctgcagatacagctatatta

SEQ ID NO: 122966 - DNA, 8739 bp, Artificial Sequence
  derived and/or modified sequence
atgggcagaagaagaagactgtgcctgcagctgtacttcctgtggctgggctgcgtggtgctgtgggcccagggcaccgccggccagccccagccccccccccccaagccccccagaccccagccccccccccagcaggtgagaagcgccaccgccggcagcgagggcggcttcctggcccccgagtacagagaggagggcgccgccgtggccagcagagtgagaagaagaggccagcaggacgtgctgagaggccccaacgtgtgcggcagcagattccacagctactgctgccccggctggaagaccctgcccggcggcaaccagtgcatcgtgcccatctgcagaaacagctgcggcgacggcttctgcagcagacccaacatgtgcacctgcagcagcggccagatcagcagcacctgcggcagcaagagcatccagcagtgcagcgtgagatgcatgaacggcggcacctgcgccgacgaccactgccagtgccagaagggctacatcggcacctactgcggccagcccgtgtgcgagaacggctgccagaacggcggcagatgcatcggccccaacagatgcgcctgcgtgtacggcttcaccggcccccagtgcgagagagactacagaaccggcccctgcttcacccaggtgaacaaccagatgtgccagggccagctgaccggcatcgtgtgcaccaagaccctgtgctgcgccaccatcggcagagcctggggccacccctgcgagatgtgccccgcccagccccagccctgcagaagaggcttcatccccaacatcagaaccggcgcctgccaggacgtggacgagtgccaggccatccccggcatctgccagggcggcaactgcatcaacaccgtgggcagcttcgagtgcagatgccccgccggccacaagcagagcgagaccacccagaagtgcgaggacatcgacgagtgcagcatcatccccggcatctgcgagaccggcgagtgcagcaacaccgtgggcagctacttctgcgtgtgccccagaggctacgtgaccagcaccgacggcagcagatgcatcgaccagagaaccggcatgtgcttcagcggcctggtgaacggcagatgcgcccaggagctgcccggcagaatgaccaagatgcagtgctgctgcgagcccggcagatgctggggcatcggcaccatccccgaggcctgccccgtgagaggcagcgaggagtacagaagactgtgcatggacggcctgcccatgggcggcatccccggcagcgccggcagcagacccggcggcaccggcggcaacggcttcgcccccagcggcaacggcaacggctacggccccggcggcaccggcttcatccccatccccggcggcaacggcttcagccccggcgtgggcggcgccggcgtgggcgccggcggccagggccccatcatcaccggcctgaccatcctgaaccagaccatcgacatctgcaagcaccacgccaacctgtgcctgaacggcagatgcatccccaccgtgagcagctacagatgcgagtgcaacatgggctacaagcaggacgccaacggcgactgcatcgacgtggacgagtgcaccagcaacccctgcaccaacggcgactgcgtgaacacccccggcagctactactgcaagtgccacgccggcttccagagaacccccaccaagcaggcctgcatcgacatcgacgagtgcatccagaacggcgtgctgtgcaagaacggcagatgcgtgaacaccgacggcagcttccagtgcatctgcaacgccggcttcgagctgaccaccgacggcaagaactgcgtggaccacgacgagtgcaccaccaccaacatgtgcctgaacggcatgtgcatcaacgaggacggcagcttcaagtgcatctgcaagcccggcttcgtgctggcccccaacggcagatactgcaccgacgtggacgagtgccagacccccggcatctgcatgaacggccactgcatcaacagcgagggcagcttcagatgcgactgcccccccggcctggccgtgggcatggacggcagagtgtgcgtggacacccacatgagaagcacctgctacggcggcatcaagaagggcgtgtgcgtgagacccttccccggcgccgtgaccaagagcgagtgctgctgcgccaaccccgactacggcttcggcgagccctgccagccctgccccgccaagaacagcgccgagttccacggcctgtgcagcagcggcgtgggcatcaccgtggacggcagagacatcaacgagtgcgccctggaccccgacatctgcgccaacggcatctgcgagaacctgagaggcagctacagatgcaactgcaacagcggctacgagcccgacgccagcggcagaaactgcatcgacatcgacgagtgcctggtgaacagactgctgtgcgacaacggcctgtgcagaaacacccccggcagctacagctgcacctgcccccccggctacgtgttcagaaccgagaccgagacctgcgaggacatcaacgagtgcgagagcaacccctgcgtgaacggcgcctgcagaaacaacctgggcagcttcaactgcgagtgcagccccggcagcaagctgagcagcaccggcctgatctgcatcgacagcctgaagggcacctgctggctgaacatccaggacagcagatgcgaggtgaacatcaacggcgccaccctgaagagcgagtgctgcgccaccctgggcgccgcctggggcagcccctgcgagagatgcgagctggacaccgcctgccccagaggcctggccagaatcaagggcgtgacctgcgaggacgtgaacgagtgcgaggtgttccccggcgtgtgccccaacggcagatgcgtgaacagcaagggcagcttccactgcgagtgccccgagggcctgaccctggacggcaccggcagagtgtgcctggacatcagaatggagcagtgctacctgaagtgggacgaggacgagtgcatccaccccgtgcccggcaagttcagaatggacgcctgctgctgcgccgtgggcgccgcctggggcaccgagtgcgaggagtgccccaagcccggcaccaaggagtacgagaccctgtgccccagaggcgccggcttcgccaacagaggcgacgtgctgaccggcagacccttctacaaggacatcaacgagtgcaaggccttccccggcatgtgcacctacggcaagtgcagaaacaccatcggcagcttcaagtgcagatgcaacagcggcttcgccctggacatggaggagagaaactgcaccgacatcgacgagtgcagaatcagccccgacctgtgcggcagcggcatctgcgtgaacacccccggcagcttcgagtgcgagtgcttcgagggctacgagagcggcttcatgatgatgaagaactgcatggacatcgacgagtgcgagagaaaccccctgctgtgcagaggcggcacctgcgtgaacaccgagggcagcttccagtgcgactgccccctgggccacgagctgagccccagcagagaggactgcgtggacatcaacgagtgcagcctgagcgacaacctgtgcagaaacggcaagtgcgtgaacatgatcggcacctaccagtgcagctgcaaccccggctaccaggccacccccgacagacagggctgcaccgacatcgacgagtgcatgatcatgaacggcggctgcgacacccagtgcaccaacagcgagggcagctacgagtgcagctgcagcgagggctacgccctgatgcccgacggcagaagctgcgccgacatcgacgagtgcgagaacaaccccgacatctgcgacggcggccagtgcaccaacatccccggcgagtacagatgcctgtgctacgacggcttcatggccagcatggacatgaagacctgcatcgacgtgaacgagtgcgacctgaacagcaacatctgcatgttcggcgagtgcgagaacaccaagggcagcttcatctgccactgccagctgggctacagcgtgaagaagggcaccaccggctgcaccgacgtggacgagtgcgagatcggcgcccacaactgcgacatgcacgccagctgcctgaacatccccggcagcttcaagtgcagctgcagagagggctggatcggcaacggcatcaagtgcatcgacctggacgagtgcagcaacggcacccaccagtgcagcatcaacgcccagtgcgtgaacacccccggcagctacagatgcgcctgcagcgagggcttcaccggcgacggcttcacctgcagcgacgtggacgagtgcgccgagaacatcaacctgtgcgagaacggccagtgcctgaacgtgcccggcgcctacagatgcgagtgcgagatgggcttcacccccgccagcgacagcagaagctgccaggacatcgacgagtgcagcttccagaacatctgcgtgttcggcacctgcaacaacctgcccggcatgttccactgcatctgcgacgacggctacgagctggacagaaccggcggcaactgcaccgacatcgacgagtgcgccgaccccatcaactgcgtgaacggcctgtgcgtgaacacccccggcagatacgagtgcaactgcccccccgacttccagctgaaccccaccggcgtgggctgcgtggacaacagagtgggcaactgctacctgaagttcggccccagaggcgacggcagcctgagctgcaacaccgagatcggcgtgggcgtgagcagaagcagctgctgctgcagcctgggcaaggcctggggcaacccctgcgagacctgcccccccgtgaacagcaccgagtactacaccctgtgccccggcggcgagggcttcagacccaaccccatcaccatcatcctggaggacatcgacgagtgccaggagctgcccggcctgtgccagggcggcaactgcatcaacaccttcggcagcttccagtgcgagtgcccccagggctactacctgagcgaggacaccagaatctgcgaggacatcgacgagtgcttcgcccaccccggcgtgtgcggccccggcacctgctacaacaccctgggcaactacacctgcatctgcccccccgagtacatgcaggtgaacggcggccacaactgcatggacatgagaaagagcttctgctacagaagctacaacggcaccacctgcgagaacgagctgcccttcaacgtgaccaagagaatgtgctgctgcacctacaacgtgggcaaggcctggaacaagccctgcgagccctgccccacccccggcaccgccgacttcaagaccatctgcggcaacatccccggcttcaccttcgacatccacaccggcaaggccgtggacatcgacgagtgcaaggagatccccggcatctgcgccaacggcgtgtgcatcaaccagatcggcagcttcagatgcgagtgccccaccggcttcagctacaacgacctgctgctggtgtgcgaggacatcgacgagtgcagcaacggcgacaacctgtgccagagaaacgccgactgcatcaacagccccggcagctacagatgcgagtgcgccgccggcttcaagctgagccccaacggcgcctgcgtggacagaaacgagtgcctggagatccccaacgtgtgcagccacggcctgtgcgtggacctgcagggcagctaccagtgcatctgccacaacggcttcaaggccagccaggaccagaccatgtgcatggacgtggacgagtgcgagagacacccctgcggcaacggcacctgcaagaacaccgtgggcagctacaactgcctgtgctaccccggcttcgagctgacccacaacaacgactgcctggacatcgacgagtgcagcagcttcttcggccaggtgtgcagaaacggcagatgcttcaacgagatcggcagcttcaagtgcctgtgcaacgagggctacgagctgacccccgacggcaagaactgcatcgacaccaacgagtgcgtggccctgcccggcagctgcagccccggcacctgccagaacctggagggcagcttcagatgcatctgcccccccggctacgaggtgaagagcgagaactgcatcgacatcaacgagtgcgacgaggaccccaacatctgcctgttcggcagctgcaccaacacccccggcggcttccagtgcctgtgcccccccggcttcgtgctgagcgacaacggcagaagatgcttcgacaccagacagagcttctgcttcaccaacttcgagaacggcaagtgcagcgtgcccaaggccttcaacaccaccaaggccaagtgctgctgcagcaagatgcccggcgagggctggggcgacccctgcgagctgtgccccaaggacgacgaggtggccttccaggacctgtgcccctacggccacggcaccgtgcccagcctgcacgacaccagagaggacgtgaacgagtgcctggagagccccggcatctgcagcaacggccagtgcatcaacaccgacggcagcttcagatgcgagtgccccatgggctacaacctggactacaccggcgtgagatgcgtggacaccgacgagtgcagcatcggcaacccctgcggcaacggcacctgcaccaacgtgatcggcagcttcgagtgcaactgcaacgagggcttcgagcccggccccatgatgaactgcgaggacatcaacgagtgcgcccagaaccccctgctgtgcgccttcagatgcatgaacaccttcggcagctacgagtgcacctgccccatcggctacgccctgagagaggaccagaagatgtgcaaggacctggacgagtgcgccgagggcctgcacgactgcgagagcagaggcatgatgtgcaagaacctgatcggcaccttcatgtgcatctgcccccccggcatggccagaagacccgacggcgagggctgcgtggacgagaacgagtgcagaaccaagcccggcatctgcgagaacggcagatgcgtgaacatcatcggcagctacagatgcgagtgcaacgagggcttccagagcagcagcagcggcaccgagtgcctggacaacagacagggcctgtgcttcgccgaggtgctgcagaccatctgccagatggccagcagcagcagaaacctggtgaccaagagcgagtgctgctgcgacggcggcagaggctggggccaccagtgcgagctgtgccccctgcccggcaccgcccagtacaagaagatctgcccccacggccccggctacaccaccgacggcagagacatcgacgagtgcaaggtgatgcccaacctgtgcaccaacggccagtgcatcaacaccatgggcagcttcagatgcttctgcaaggtgggctacaccaccgacatcagcggcaccagctgcatcgacctggacgagtgcagccagagccccaagccctgcaactacatctgcaagaacaccgagggcagctaccagtgcagctgccccagaggctacgtgctgcaggaggacggcaagacctgcaaggacctggacgagtgccagaccaagcagcacaactgccagttcctgtgcgtgaacaccctgggcggcttcacctgcaagtgcccccccggcttcacccagcaccacaccgcctgcatcgacaacaacgagtgcggcagccagcccagcctgtgcggcgccaagggcatctgccagaacacccccggcagcttcagctgcgagtgccagagaggcttcagcctggacgccaccggcctgaactgcgaggacgtggacgagtgcgacggcaaccacagatgccagcacggctgccagaacatcctgggcggctacagatgcggctgcccccagggctacatccagcactaccagtggaaccagtgcgtggacgagaacgagtgcagcaaccccaacgcctgcggcagcgccagctgctacaacaccctgggcagctacaagtgcgcctgccccagcggcttcagcttcgaccagttcagcagcgcctgccacgacgtgaacgagtgcagcagcagcaagaacccctgcaactacggctgcagcaacaccgagggcggctacctgtgcggctgcccccccggctactacagagtgggccagggccactgcgtgagcggcatgggcttcaacaagggccagtacctgagcctggacaccgaggtggacgaggagaacgccctgagccccgaggcctgctacgagtgcaagatcaacggctacagcaagaaggacagcagacagaagagaagcatccacgagcccgaccccaccgccgtggagcagatcagcctggagagcgtggacatggacagccccgtgaacatgaagttcaacctgagccacctgggcagcaaggagcacatcctggagctgagacccgccatccagcccctgaacaaccacatcagatacgtgatcagccagggcaacgacgacagcgtgttcagaatccaccagagaaacggcctgagctacctgcacaccgccaagaagaagctgatgcccggcacctacaccctggagatcaccagcatccccctgtacaagaagaaggagctgaagaagctggaggagagcaacgaggacgactacctgctgggcgagctgggcgaggccctgagaatgagactgcagatccagctgtactag

SEQ ID NO: 122967 - protein, 287 aa, Artificial Sequence
  derived and/or modified sequence
MDPKQTTLLCLVLCLGQRIQAQEGDFPMPFISAKSSPVIPLDGSVKIQCQAIREAYLTQLMIIKNSTYREIGRRLKFWNETDPEFVIDHMDANKAGRYQCQYRIGHYRFRYSDTLELVVTGLYGKPFLSADRGLVLMPGENISLTCSSAHIPFDRFSLAKEGELSLPQHQSGEHPANFSLGPVDLNVSGIYRCYGWYNRSPYLWSFPSNALELVVTDSIHQDYTTQNLIRMAVAGLVLVALLAILVENWHSHTALNKEASADVAEPSWSQQMCQPGLTFARTPSVCK

SEQ ID NO: 122968 - protein, 239 aa, Artificial Sequence
  derived and/or modified sequence
MDPKQTTLLCLVLCLGQRIQAQEGDFPMPFISAKSSPVIPLDGSVKIQCQAIREAYLTQLMIIKNSTYREIGRRLKFWNETDPEFVIDHMDANKAGRYQCQYRIGHYRFRYSDTLELVVTGLYGKPFLSADRGLVLMPGENISLTCSSAHIPFDRFSLAKEGELSLPQHQSGEHPANFSLGPVDLNVSGIYRCYGWYNRSPYLWSFPSNALELVVTGRYRPVQPCVWVGCPGPCHRAGI

SEQ ID NO: 122969 - DNA, 1483 bp, Artificial Sequence
  derived and/or modified sequence
tgtcagcacgatggaccccaaacagaccaccctcctgtgtcttgtgctctgtctgggccagaggattcaggcacaggaaggggactttcccatgcctttcatatctgccaaatcgagtcctgtgattcccttggatggatctgtgaaaatccagtgccaggccattcgtgaagcttacctgacccagctgatgatcataaaaaactccacgtaccgagagataggcagaagactgaagttttggaatgagactgatcctgagttcgtcattgaccacatggacgcaaacaaggcagggcgctatcagtgccaatataggatagggcactacagattccggtacagtgacaccctggagctggtagtgacaggcttgtatggcaaacccttcctctctgcagatcggggtctggtgttgatgccaggagagaatatttccctcacgtgcagctcagcacacatcccatttgatagattttcactggccaaggagggagaactttctctgccacagcaccaaagtggggaacacccggccaacttctctttgggtcctgtggacctcaatgtctcagggatctacaggtgctacggttggtacaacaggagcccctacctgtggtccttccccagtaatgccttggagcttgtggtcacagactccatccaccaagattacacgacgcagaacttgatccgcatggccgtggcaggactggtcctcgtggctctcttggccatactggttgaaaattggcacagccatacggcactgaacaaggaagcctcggcagatgtggctgaaccgagctggagccaacagatgtgtcagccaggattgacctttgcacgaacaccaagtgtctgcaagtaaacacctggaggtgaaggcagagaggagccaggactgtggagtccgacaaagctacttgaaggacacaagagagaaaagctcactaagaagcttgaatctacttttttttttttttgagacagagtctggctctgtcacccaggctggagtgcagtggagcaatctcggctcattgaacctcttgggttcaagtgattcttgtgcctcagcctcccaagtagctggaattacaggcacataccactgcacccagctaatttttgtatttttagtagagatggggtttcactgtgttggccaggctggtctcgaactcctgacctcaggtgatccacccaccttggcctcccaaagtgctgagattataggcatgagccaccacgcctggccagatgcatgttcaaaccaatcaaatggtgttttcttatgcaggactgatcgatttgcacccacctttctgcacataagttatggttttccatcttatctgtcttctgattttttatatcctgtttaatttcttccttcattgttcttctctttttttatttattttatttatttttatttttatttttatttgagacagagtctcactctgttgcccag

SEQ ID NO: 122970 - DNA, 1619 bp, Artificial Sequence
  derived and/or modified sequence
tccacccaagagcaacctggaactaagttattcggcaacgaactgttccactttgttgtgaggcaatagatgtggaaattccctgacgaggggctctgtcctcatacttcctgcggagcttattgtcgtaagaatatctgtcatcctgctaatgtgcattgaaaggagagcaacggggctgaggccgtgtcagcacgatggaccccaaacagaccaccctcctgtgtcttgtgctctgtctgggccagaggattcaggcacaggaaggggactttcccatgcctttcatatctgccaaatcgagtcctgtgattcccttggatggatctgtgaaaatccagtgccaggccattcgtgaagcttacctgacccagctgatgatcataaaaaactccacgtaccgagagataggcagaagactgaagttttggaatgagactgatcctgagttcgtcattgaccacatggacgcaaacaaggcagggcgctatcagtgccaatataggatagggcactacagattccggtacagtgacaccctggagctggtagtgacaggcttgtatggcaaacccttcctctctgcagatcggggtctggtgttgatgccaggagagaatatttccctcacgtgcagctcagcacacatcccatttgatagattttcactggccaaggagggagaactttctctgccacagcaccaaagtggggaacacccggccaacttctctttgggtcctgtggacctcaatgtctcagggatctacaggtgctacggttggtacaacaggagcccctacctgtggtccttccccagtaatgccttggagcttgtggtcacaggtaggtaccgcccagtccagccctgtgtctgggttggctgtccagggccttgccaccgggcaggaatatgaagacgtgcactgagagtgaagtgaagagaggcaaaggctctcactccaggacagtggagagagaaaggcttccccaccacactttccgctttcacttcctcgctagagttctccagacagggttcattgaaaacttagtctgtggagaacagaagggctaactcagtttgtttcattttatttatttcattttattttccgggatagagtcttgctctttcgccaaggctggagtgcagtggcacgatctcgactcactgcaaccttcgcctcccaggttcaagcaattctcctgcctcagcctcctgagtagctgggaccacacagacagggtttcaccatgttggccaggctggtctcgaactcccgacctcaggtgatccacctgcctcggcctcccaaagtgctgggattacaggcgtgagccaccgcgcctggccaggctgcacacattcttattaggattccaccttgttctggtgttgtagagatgtgattaggtatttagtgaattcaccaagtgaggagagaatgaaaagaaaacacaacctgcctggccgggcgtggtggcgtgagcctgtcgtcccagctactcaggaggctgaggcaggagaatcacttgaacccaggaggcagctgttgcagtgagccaagatcacgccattgcactccagcctgggtgacagaacgagactccacctc

SEQ ID NO: 122971 - DNA, 864 bp, Artificial Sequence
  derived and/or modified sequence
atggaccctaagcagaccactctcctgtgtctcgttctgtgccttggacagaggatacaggctcaggagggggatttcccaatgcctttcatctctgctaagagttcacccgtcattccactggacggcagcgtgaagatacagtgccaggcgattcgagaggcctatcttacacagctaatgatcatcaagaattctacgtatcgggagattggacggcgcctcaagttctggaacgagaccgaccctgaatttgtgattgatcacatggatgccaacaaggctggacggtatcagtgccaatacaggattgggcattatcggtttcgttactcagacaccctcgaactcgtggtcactggactatacggaaagccctttctaagcgctgacaggggtctagtacttatgccaggtgaaaacattagcttgacttgctcctctgcgcatatcccgttcgatcgcttttcgctagcaaaagaaggggaactcagtctgcctcaacatcagagcggcgagcatcccgctaacttctcactggggcccgtggacctgaacgtgtccgggatctacaggtgttatggatggtacaaccggtctccctacctctggagctttccttccaatgccttggaactcgtagtgaccgacagtattcaccaagactacaccactcaaaacttgataaggatggcagtggccgggctggtcttggtcgccttgctggcgattctggtggagaattggcattcacacacggcattgaataaggaagcttccgctgacgtggctgagccgagttggagtcagcagatgtgccagccaggcctgacattcgcacggaccccaagtgtatgtaagtag

SEQ ID NO: 122972 - DNA, 720 bp, Artificial Sequence
  derived and/or modified sequence
atggacccaaaacaaaccacgctgctttgtcttgtcctgtgcttgggccagcggattcaggctcaagaaggcgattttcccatgccttttatcagtgcaaagagctcccccgtcatccccttggacggaagtgtcaagattcagtgtcaggctatccgtgaagcttacttaacacagcttatgattattaaaaatagcacatatcgcgagatcggacggaggttgaagttctggaacgaaaccgaccccgaattcgtgattgaccacatggacgcaaacaaggcagggcgataccagtgtcagtacagaattggacactaccgctttagatactccgacacattggagctcgtcgtaactggcctctacggcaaacccttcctgtcagccgacagagggctagtcctgatgccgggtgagaacatcagcctgacctgtagcagcgcccacatcccattcgataggttctcactggcgaaagaaggcgagctgagtttaccacagcaccaaagtggagagcaccctgccaatttcagcctgggacctgtcgatctcaatgtttccggtatttacaggtgctatgggtggtacaatcggtccccctatctgtggagcttccccagtaatgcgctggagttggtggtcacagggaggtacagacccgtgcagccttgcgtgtgggtgggctgcccaggaccgtgtcaccgcgccgggatttag

SEQ ID NO: 122973 - DNA, 864 bp, Artificial Sequence
  derived and/or modified sequence
atggaccccaagcagaccaccctgctgtgcctggtgctgtgcctgggccagaggatccaggcccaggagggggacttccccatgcccttcatcagcgccaagagcagccctgtgatccccctggatggctctgtgaagatccagtgccaggccatccgggaggcctacctgacccagctgatgatcatcaagaacagcacctaccgggagattggaagaaggctgaagttctggaatgaaacagatcctgagtttgtgattgaccacatggatgccaacaaggccggccgctaccagtgccagtaccgcatcggccactaccgcttccgctacagcgacaccctggagctggtggtgacaggcctgtatggcaagcccttcctgtctgctgaccggggcctggtgctgatgcctggagagaacatcagcctgacctgcagcagcgcccacatcccctttgaccgcttcagcctggccaaggagggggagctgagcctgccccagcaccagagcggggagcacccagccaacttcagcctgggccctgtggacctgaatgtgtctggcatctaccgctgctacggctggtacaacagaagcccctacctgtggagcttccccagcaatgccctggagctggtggtgacagacagcatccaccaggactacaccacccagaacctgatccgcatggctgtggccggcctggtgctggtggccctgctggccatcctggtggagaactggcacagccacacagccctgaacaaggaggccagcgcagatgtggccgagcccagctggagccagcagatgtgccagcccggcctgacctttgcccggacccccagcgtgtgcaagtag

SEQ ID NO: 122974 - DNA, 720 bp, Artificial Sequence
  derived and/or modified sequence
atggaccccaagcagaccaccctgctgtgcctggtgctgtgcctgggccagaggatccaggcccaggagggggacttccccatgcccttcatcagcgccaagagcagccctgtgatccccctggatggctctgtgaagatccagtgccaggccatccgggaggcctacctgacccagctgatgatcatcaagaacagcacctaccgggagattggaagaaggctgaagttctggaatgaaacagatcctgagtttgtgattgaccacatggatgccaacaaggccggccgctaccagtgccagtaccgcatcggccactaccgcttccgctacagcgacaccctggagctggtggtgacaggcctgtatggcaagcccttcctgtctgctgaccggggcctggtgctgatgcctggagagaacatcagcctgacctgcagcagcgcccacatcccctttgaccgcttcagcctggccaaggagggggagctgagcctgccccagcaccagagcggggagcacccagccaacttcagcctgggccctgtggacctgaatgtgtctggcatctaccgctgctacggctggtacaacagaagcccctacctgtggagcttccccagcaatgccctggagctggtggtgacaggccgctacagacctgtgcagccctgtgtgtgggtgggctgccccggcccctgccacagagctggcatctag

SEQ ID NO: 122975 - DNA, 864 bp, Artificial Sequence
  derived and/or modified sequence
atggaccccaagcagaccaccctgctgtgcctggtgctgtgcctgggtcaacgcattcaggcccaagaaggggactttccgatgccctttatctcagccaaatccagcccagttatcccgttagacggctctgtcaaaattcaatgccaggcaatccgggaagcttacttaacacagctcatgatcatcaagaactctacctatcgggaaattgggcggcgattaaagttctggaatgagacggatcctgaatttgtcatcgaccacatggatgcaaacaaggccggcaggtaccagtgccagtaccgcatcggccattatcgtttcaggtatagcgacacactggaattggtggtcacaggtttgtacggcaaacctttcctttctgcggatagagggttggtgctaatgcccggcgaaaacatctctcttacctgctcgagcgctcatatcccctttgatcggttcagtctggccaaggaaggcgaactcagcctgccccagcaccagtccggcgagcatcccgcaaatttcagcttgggacctgtagaccttaacgtaagtgggatctaccggtgctatgggtggtacaataggagcccttatctgtggtctttcccaagtaacgccctggagcttgtcgtgaccgacagcatacaccaagactatactacacaaaacctgatcagaatggctgtggcaggactggtcctggtggcactgctcgccatacttgtagaaaattggcatagtcacacagccctgaataaagaagcttccgccgatgtcgctgagccctcttggagccagcaaatgtgccagcctggactgacttttgcacgcaccccttcagtgtgtaaatag

SEQ ID NO: 122976 - DNA, 720 bp, Artificial Sequence
  derived and/or modified sequence
atggaccccaagcagaccaccctgctgtgcctggtgctgtgcctgggtcaacgcattcaggcacaggagggggacttccctatgcctttcatttcagctaagtcttctcccgttattcctctggacggaagcgtgaagatacagtgccaggctattagagaagcctacctaacgcagctgatgattattaagaacagtacataccgcgagataggaaggcgcctgaaattctggaacgagactgatccagagtttgtcattgaccacatggacgccaacaaggctggaaggtaccagtgccaatatcggatcggtcattataggtttcgctattctgataccctggagttggtcgtgacaggactgtatggaaagccattcctatctgccgaccgggggttggtactgatgccaggcgagaacatcagcctaacttgcagtagcgctcacatcccttttgatcgattttccctggccaaagagggagaattatccttgccccagcaccaaagcggcgaacacccagccaacttctctttaggacctgtagacctgaatgtgtccggcatctaccggtgctatggctggtacaaccggtctccatacctgtggtcttttcctagtaacgcgctcgaactggtcgtgacaggtagatatagaccagtgcagccgtgcgtgtgggtgggatgtccaggcccctgtcaccgagccggaatctag

SEQ ID NO: 122977 - DNA, 864 bp, Artificial Sequence
  derived and/or modified sequence
atggacccaaaacagactacactgctctgcctggtcctctgtttagggcagaggatacaagctcaggagggcgatttccccatgccttttattagcgctaaaagctcccctgtgattcctcttgatggaagtgtgaaaatccagtgccaggctatccgcgaggcgtatctgacacagctgatgatcattaaaaactccacttaccgcgagatcggaaggcgactgaagttttggaacgagaccgaccccgagtttgtgatcgaccacatggatgccaacaaggcaggacgatatcagtgccagtacaggattggccactaccggttccggtactcagacacactggaactggtggtgacggggttgtacgggaagccattccttagcgccgatcgcggtctggtgctgatgcccggagaaaatattagtctcacatgttcctcagcccacatcccatttgacagattctcgctggctaaggaaggagagttgagtttgcctcagcatcaaagcggtgaacacccagcaaacttttccctgggacctgtcgatctgaatgttagcggaatttaccgttgctatgggtggtataaccgctctccatatctatggtcatttccaagtaatgcacttgagttagtcgtgaccgattccatccatcaggattacaccacacagaacctgataaggatggctgtcgccggactggttttggtcgctctactggccatcctcgtagaaaattggcactcccacactgccttaaataaggaggcaagtgcggacgtggctgaaccttcctggtcacagcagatgtgccagccagggctgacgttcgcccgtacacccagtgtatgcaaatag

SEQ ID NO: 122978 - DNA, 720 bp, Artificial Sequence
  derived and/or modified sequence
atggaccctaaacagaccactcttctatgcctggtgctctgtcttggccaaagaatccaggcccaagagggcgattttcctatgccctttatatccgccaagagcagtccagttatcccactggacggatcagtcaaaattcagtgtcaggccatcagggaggcatacttgactcagttgatgattataaagaactcaacatacagggaaattggcagacggctgaagttctggaacgagaccgaccctgagtttgttattgatcacatggacgccaataaagcgggtcgttaccagtgtcagtaccggattgggcactaccgattccggtactcggacactttagagctggttgtgaccggcctttatggaaaaccatttctgagtgccgatagagggctggtgcttatgcctggggagaacatctccctgacttgttcgagcgcccatatcccattcgacagatttagcctggcgaaggagggcgagctttccctgccccagcatcagtccggagagcatccagccaactttagcctcgggcctgtggatctgaacgtgtcaggaatttaccggtgttacggttggtataaccgcagtccgtacctgtggagtttcccaagcaatgccctggagctcgtggtaactggcaggtataggcctgtccagccatgtgtgtgggtcggctgccccggtccttgtcaccgggcaggaatatag

SEQ ID NO: 122979 - DNA, 864 bp, Artificial Sequence
  derived and/or modified sequence
atggaccccaagcagaccaccctgctgtgcctggtgctgtgcctgggccagagaatccaggcccaggagggcgacttccccatgcccttcatcagcgccaagagcagccccgtgatccccctggacggcagcgtgaagatccagtgccaggccatcagagaggcctacctgacccagctgatgatcatcaagaacagcacctacagagagatcggcagaagactgaagttctggaacgagaccgaccccgagttcgtgatcgaccacatggacgccaacaaggccggcagataccagtgccagtacagaatcggccactacagattcagatacagcgacaccctggagctggtggtgaccggcctgtacggcaagcccttcctgagcgccgacagaggcctggtgctgatgcccggcgagaacatcagcctgacctgcagcagcgcccacatccccttcgacagattcagcctggccaaggagggcgagctgagcctgccccagcaccagagcggcgagcaccccgccaacttcagcctgggccccgtggacctgaacgtgagcggcatctacagatgctacggctggtacaacagaagcccctacctgtggagcttccccagcaacgccctggagctggtggtgaccgacagcatccaccaggactacaccacccagaacctgatcagaatggccgtggccggcctggtgctggtggccctgctggccatcctggtggagaactggcacagccacaccgccctgaacaaggaggccagcgccgacgtggccgagcccagctggagccagcagatgtgccagcccggcctgaccttcgccagaacccccagcgtgtgcaagtag

SEQ ID NO: 122980 - DNA, 720 bp, Artificial Sequence
  derived and/or modified sequence
atggaccccaagcagaccaccctgctgtgcctggtgctgtgcctgggccagagaatccaggcccaggagggcgacttccccatgcccttcatcagcgccaagagcagccccgtgatccccctggacggcagcgtgaagatccagtgccaggccatcagagaggcctacctgacccagctgatgatcatcaagaacagcacctacagagagatcggcagaagactgaagttctggaacgagaccgaccccgagttcgtgatcgaccacatggacgccaacaaggccggcagataccagtgccagtacagaatcggccactacagattcagatacagcgacaccctggagctggtggtgaccggcctgtacggcaagcccttcctgagcgccgacagaggcctggtgctgatgcccggcgagaacatcagcctgacctgcagcagcgcccacatccccttcgacagattcagcctggccaaggagggcgagctgagcctgccccagcaccagagcggcgagcaccccgccaacttcagcctgggccccgtggacctgaacgtgagcggcatctacagatgctacggctggtacaacagaagcccctacctgtggagcttccccagcaacgccctggagctggtggtgaccggcagatacagacccgtgcagccctgcgtgtgggtgggctgccccggcccctgccacagagccggcatctag

SEQ ID NO: 122981 - protein, 257 aa, Artificial Sequence
  derived and/or modified sequence
MAPAMESPTLLCVALLFFAPDGVLAVPQKPKVSLNPPWNRIFKGENVTLTCNGNNFFEVSSTKWFHNGSLSEETNSSLNIVNAKFEDSGEYKCQHQQVNESEPVYLEVFSDWLLLQASAEVVMEGQPLFLRCHGWRNWDVYKVIYYKDGEALKYWYENHNISITNATVEDSGTYYCTGKVWQLDYESEPLNITVIKAPREKYWLQFFIPLLVVILFAVDTGLFISTQQQVTFLLKIKRTRKGFRLLNPHPKPNPKNN

SEQ ID NO: 122982 - DNA, 1165 bp, Artificial Sequence
  derived and/or modified sequence
agtctccagcatcctccacctgtctaccaccgagcatgggcctatatttgaagccttagatctctccagcacagtaagcaccaggagtccatgaagaagatggctcctgccatggaatcccctactctactgtgtgtagccttactgttcttcgctccagatggcgtgttagcagtccctcagaaacctaaggtctccttgaaccctccatggaatagaatatttaaaggagagaatgtgactcttacatgtaatgggaacaatttctttgaagtcagttccaccaaatggttccacaatggcagcctttcagaagagacaaattcaagtttgaatattgtgaatgccaaatttgaagacagtggagaatacaaatgtcagcaccaacaagttaatgagagtgaacctgtgtacctggaagtcttcagtgactggctgctccttcaggcctctgctgaggtggtgatggagggccagcccctcttcctcaggtgccatggttggaggaactgggatgtgtacaaggtgatctattataaggatggtgaagctctcaagtactggtatgagaaccacaacatctccattacaaatgccacagttgaagacagtggaacctactactgtacgggcaaagtgtggcagctggactatgagtctgagcccctcaacattactgtaataaaagctccgcgtgagaagtactggctacaattttttatcccattgttggtggtgattctgtttgctgtggacacaggattatttatctcaactcagcagcaggtcacatttctcttgaagattaagagaaccaggaaaggcttcagacttctgaacccacatcctaagccaaaccccaaaaacaactgatataattactcaagaaatatttgcaacattagtttttttccagcatcagcaattgctactcaattgtcaaacacagcttgcaatatacatagaaacgtctgtgctcaaggatttatagaaatgcttcattaaactgagtgaaactggttaagtggcatgtaatagtaagtgctcaattaacattggttgaataaatgagagaatgaatagattcatttattagcatttgtaaaagagatgttcaatttcaataaaataaatataaaaccatgtaacagaatgcttctgagta

SEQ ID NO: 122983 - DNA, 774 bp, Artificial Sequence
  derived and/or modified sequence
atggcacctgccatggagtctccgacactgctttgcgtcgctctcctgttctttgcccctgacggtgtcttggccgtcccccagaagcctaaagtgtccttgaaccccccgtggaatcgtatttttaaaggcgagaatgttactttgacttgtaatggtaacaacttttttgaggtgtcttccactaagtggtttcataatggatctctgtctgaggaaacaaattctagcttgaatatagttaatgcaaagtttgaagatagcggtgagtacaaatgtcagcaccaacaggtgaacgaaagtgagcccgtttatctcgaggttttctctgactggctgctgttacaggccagtgccgaagtggtaatggagggacaacctctctttctaagatgccatggctggcggaattgggacgtgtacaaggtcatctattacaaagatggcgaggctttgaaatactggtatgagaatcacaatatttctattacgaacgccacagttgaggactcggggacctattattgtaccggtaaagtttggcagctggactatgaatccgaacctttgaatattacggtcattaaagcccctagagagaaatactggttgcaattctttatccctctcctggtggtgatcctgtttgcggtcgatacaggattattcatctctactcagcagcaggtcacttttctgctcaaaatcaagcgaacgcgcaaggggtttagactgctgaatcctcacccgaaacccaaccccaaaaataattag

SEQ ID NO: 122984 - DNA, 774 bp, Artificial Sequence
  derived and/or modified sequence
atggccccagccatggagagccccaccctgctgtgtgtggccctgctcttctttgccccagatggagtgctggccgtgccccagaagcccaaggtgtccctgaaccccccctggaaccgcatcttcaagggagaaaatgtgaccctgacctgcaatggaaacaacttctttgaggtgagcagcaccaagtggttccacaacggcagcctgtctgaggagaccaacagcagcctgaacatcgtgaatgccaagtttgaggacagcggggagtacaagtgccagcaccagcaggtgaatgaaagtgagcctgtgtacctggaggtgttcagtgactggctgctgctgcaggccagcgctgaggtggtgatggagggccagcccctcttcctgcgctgccacggctggaggaactgggatgtgtacaaggtgatctactacaaggatggagaggccctgaagtactggtatgagaaccacaacatcagcatcaccaatgccaccgtggaggacagcggcacctactactgcaccgggaaggtgtggcagctggactatgaaagtgagcccctgaacatcaccgtcatcaaggccccccgggagaagtactggctgcagttcttcatccccctgctggtggtgatcctgtttgctgtggacaccggcctcttcatcagcacccagcagcaggtgaccttcctgctgaagatcaagaggaccaggaagggcttccggctgctgaacccccaccccaagcccaaccccaagaacaactag

SEQ ID NO: 122985 - DNA, 774 bp, Artificial Sequence
  derived and/or modified sequence
atggcccccgccatggagagccccaccctgctgtgcgtggccctgctgttttttgctcctgacggcgtactcgcagtgcctcagaaaccaaaggtgtcacttaaccctccctggaatagaatatttaagggcgagaacgtgacactgacttgtaacgggaataacttcttcgaggtgagctcaacaaagtggttccacaatggatctcttagcgaggagacgaacagtagcctgaatatcgtgaatgccaaattcgaggactccggcgagtacaaatgccagcatcagcaggtgaacgagtctgaaccagtctacctggaggtgttttccgactggctgttgctgcaggcttctgccgaagtggtcatggagggccagcccctgtttctgcggtgtcacggttggaggaactgggacgtgtataaagttatatattacaaggacggcgaggcccttaaatattggtacgaaaatcacaatattagtattaccaatgccacagtggaggacagcggaacctattactgcaccggaaaggtatggcaactggattatgagagtgagccactcaacataaccgtcatcaaggccccaagggagaagtattggcttcaattttttatccccttattggtcgtcatactgtttgccgtggatactggcctgttcatttcgactcaacagcaggtgacatttctgttaaagattaagaggaccagaaagggattccgcttgctaaatcctcatcccaaacctaatccaaaaaataattag

SEQ ID NO: 122986 - DNA, 774 bp, Artificial Sequence
  derived and/or modified sequence
atggcgccagctatggagtctcctaccctgctgtgtgtggccctgctatttttcgcccctgatggggtgctggccgttccacagaaacctaaagtcagtctcaaccctccatggaacagaattttcaagggagaaaatgtgacactaacttgtaatggcaacaacttcttcgaagtgtcatcgacaaaatggtttcacaacggcagcctttccgaagaaaccaacagcagcctgaacattgtgaatgctaagttcgaggacagtggggagtacaagtgccagcaccagcaggtgaatgaaagcgagccagtgtatctggaagtttttagcgattggctactgttgcaggcgtccgccgaagtggtcatggagggacaaccattatttctcagatgtcatggctggcgaaattgggacgtctacaaagtcatttattacaaggatggtgaagcattgaaatattggtacgagaaccataacatttcaataactaacgcaaccgtggaggactcgggcacatactactgcacaggcaaagtgtggcagctggactatgaaagcgaaccactgaacatcactgtcatcaaggccccacgcgagaaatattggctgcagtttttcatccccctcctggtcgttatcctctttgccgtggatacaggactctttatttctactcagcagcaagtaacttttctgttgaagatcaaacggacccgaaaggggttcaggttattgaaccctcaccccaagcccaaccccaaaaataactag

SEQ ID NO: 122987 - DNA, 774 bp, Artificial Sequence
  derived and/or modified sequence
atggcccccgccatggagagccccaccctgctgtgcgtggccctgctgttcttcgcccccgacggcgtgctggccgtgccccagaagcccaaggtgagcctgaaccccccctggaacagaatcttcaagggcgagaacgtgaccctgacctgcaacggcaacaacttcttcgaggtgagcagcaccaagtggttccacaacggcagcctgagcgaggagaccaacagcagcctgaacatcgtgaacgccaagttcgaggacagcggcgagtacaagtgccagcaccagcaggtgaacgagagcgagcccgtgtacctggaggtgttcagcgactggctgctgctgcaggccagcgccgaggtggtgatggagggccagcccctgttcctgagatgccacggctggagaaactgggacgtgtacaaggtgatctactacaaggacggcgaggccctgaagtactggtacgagaaccacaacatcagcatcaccaacgccaccgtggaggacagcggcacctactactgcaccggcaaggtgtggcagctggactacgagagcgagcccctgaacatcaccgtgatcaaggcccccagagagaagtactggctgcagttcttcatccccctgctggtggtgatcctgttcgccgtggacaccggcctgttcatcagcacccagcagcaggtgaccttcctgctgaagatcaagagaaccagaaagggcttcagactgctgaacccccaccccaagcccaaccccaagaacaactag

SEQ ID NO: 122988 - protein, 187 aa, Artificial Sequence
  derived and/or modified sequence
MELSGATMARGLAVLLVLFLHIKNLPAQAADTCPEVKVVGLEGSDKLTILRGCPGLPGAPGPKGEAGVIGERGERGLPGAPGKAGPVGPKGDAGQSQSCATGPRNCKDLLDRGYFLSGWHTIYLPDCRPLTVLCDMDTDGGGWTVFQRRMDGSVDFYRDWAAYKQGFGSQLGEFWLGNDNIHALTAQ

SEQ ID NO: 122989 - protein, 326 aa, Artificial Sequence
  derived and/or modified sequence
MELSGATMARGLAVLLVLFLHIKNLPAQAADTCPEVKVVGLEGSDKLTILRGCPGLPGAPGPKGEAGVIGERGERGLPGAPGKAGPVGPKGDRGEKGMRGEKGDAGQSQSCATGPRNCKDLLDRGYFLSGWHTIYLPDCRPLTVLCDMDTDGGGWTVFQRRMDGSVDFYRDWAAYKQGFGSQLGEFWLGNDNIHALTAQGSSELRVDLVDFEGNHQFAKYKSFKVADEAEKYKLVLGAFVGGSAGNSLTGHNNNFFSTKDQDNDVSSSNCAEKFQGAWWYADCHASNLNGLYLMGPHESYANGINWSAAKGYKYSYKVSEMKVRPA

SEQ ID NO: 122990 - protein, 360 aa, Artificial Sequence
  derived and/or modified sequence
MELSGATMARGLAVLLVLFLHIKNLPAQAADTCPEVKVVGLEGSDKLTILRGCPGLPGAPGPKGEAGVIGERGERGLPGAPGKAGPVGPKGDRGEKGMRGEKGDAGQSQSCATGPRNCKDLLDRGYFLSGWHTIYLPDCRPLTVLCDMDTDGGGWTVFQRRMDGSVDFYRDWAAYKQGFGSQTHSHDAHSCPFAPSSVKPPHAHNLTRGRIMFLNMFTLGQKSFTSFNVCFLNTSGFDHFPVSVARQVFPWNLVSREESGPLFSRWHYRCSGRLSDFCEDFPPPVIDTGRSSPPPPSLPHPPMPHSQHFTLLEKGHFGVQKTLTKKGESLVGTFLLPTTAEFMLWAGWLLGRDKHLALTK

SEQ ID NO: 122991 - DNA, 1240 bp, Artificial Sequence
  derived and/or modified sequence
ggagttgagaaactgtggcacaaggcgagagctggtttcctctgccctgttagagctgggggactcttcagagtcaaaggccagagagcatggagctgagtggagccaccatggcccgggggctcgctgtcctgctagtcttgttcctgcatatcaagaacctgcctgcccaggctgcggacacatgtccagaggtgaaggtggtgggcctggagggctctgacaagctcaccattctccgaggctgcccggggctgcccggggccccagggccaaagggagaggcaggtgtcattggagagagaggagaacgcggtctccctggagcccctggaaaggcaggaccagtggggcccaaaggagacgctgggcagtctcagtcgtgtgcgacaggcccacgcaactgcaaggacctgctagaccgggggtatttcctgagcggctggcacaccatctacctgcccgactgccggcccctgactgtgctctgtgacatggacacggacggagggggctggaccgttttccagcggaggatggatggctctgtggacttctatcgggactgggccgcatacaagcagggcttcggcagtcagctgggggagttctggctggggaatgacaacatccacgccctgactgcccagggaagcagcgagctccgtgtagacctggtggactttgagggcaaccaccagtttgctaagtacaaatcattcaaggtggctgacgaggcagagaagtacaagctggtactgggagcctttgtcgggggcagtgcgggtaattctctaacgggccacaacaacaacttcttctccaccaaagaccaagacaatgatgtgagttcttcgaattgtgctgagaagttccaaggagcctggtggtacgccgactgtcatgcttcaaacctcaatggtctctacctcatgggaccccatgagagctatgccaatggtatcaactggagtgcggcgaaggggtacaaatatagctacaaggtgtcagagatgaaggtgcggcccgcctagacgggccaggacccctccacatgcacctgctagtggggaggccacacccacaagcgctgcgtcgtggaagtcaccccatttccccagccagacacactcccatgacgcccacagctgcccctttgcccccagctcagtcaagccgccacatgcccacaacctcaccagagggagaattatgtttctaaatatgtttactttgggac

SEQ ID NO: 122992 - DNA, 1286 bp, Artificial Sequence
  derived and/or modified sequence
cagggagttgagaaactgtggcacaaggcgagagctggtttcctctgccctgttagagctgggggactcttcagagtcaaaggccagagagcatggagctgagtggagccaccatggcccgggggctcgctgtcctgctagtcttgttcctgcatatcaagaacctgcctgcccaggctgcggacacatgtccagaggtgaaggtggtgggcctggagggctctgacaagctcaccattctccgaggctgcccggggctgcccggggccccagggccaaagggagaggcaggtgtcattggagagagaggagaacgcggtctccctggagcccctggaaaggcaggaccagtggggcccaaaggagaccgaggagagaaggggatgcgtggagagaaaggagacgctgggcagtctcagtcgtgtgcgacaggcccacgcaactgcaaggacctgctagaccgggggtatttcctgagcggctggcacaccatctacctgcccgactgccggcccctgactgtgctctgtgacatggacacggacggagggggctggaccgttttccagcggaggatggatggctctgtggacttctatcgggactgggccgcatacaagcagggcttcggcagtcagctgggggagttctggctggggaatgacaacatccacgccctgactgcccagggaagcagcgagctccgtgtagacctggtggactttgagggcaaccaccagtttgctaagtacaaatcattcaaggtggctgacgaggcagagaagtacaagctggtactgggagcctttgtcgggggcagtgcgggtaattctctaacgggccacaacaacaacttcttctccaccaaagaccaagacaatgatgtgagttcttcgaattgtgctgagaagttccaaggagcctggtggtacgccgactgtcatgcttcaaacctcaatggtctctacctcatgggaccccatgagagctatgccaatggtatcaactggagtgcggcgaaggggtacaaatatagctacaaggtgtcagagatgaaggtgcggcccgcctagacgggccaggacccctccacatgcacctgctagtggggaggccacacccacaagcgctgcgtcgtggaagtcaccccatttccccagccagacacactcccatgacgcccacagctgcccctttgcccccagctcagtcaagccgccacatgcccacaacctcaccagagggagaattatgtttctaaatatgtttactttgggacagaaaag

SEQ ID NO: 122993 - DNA, 4369 bp, Artificial Sequence
  derived and/or modified sequence
gagagcatggagctgagtggagccaccatggcccgggggctcgctgtcctgctagtcttgttcctgcatatcaagaacctgcctgcccaggctgcggacacatgtccagaggtgaaggtggtgggcctggagggctctgacaagctcaccattctccgaggctgcccggggctgcccggggccccagggccaaagggagaggcaggtgtcattggagagagaggagaacgcggtctccctggagcccctggaaaggcaggaccagtggggcccaaaggagaccgaggagagaaggggatgcgtggagagaaaggagacgctgggcagtctcagtcgtgtgcgacaggcccacgcaactgcaaggacctgctagaccgggggtatttcctgagcggctggcacaccatctacctgcccgactgccggcccctgactgtgctctgtgacatggacacggacggagggggctggaccgttttccagcggaggatggatggctctgtggacttctatcgggactgggccgcatacaagcagggcttcggcagccagacacactcccatgacgcccacagctgcccctttgcccccagctcagtcaagccgccacatgcccacaacctcaccagagggagaattatgtttctaaatatgtttactttgggacagaaaagttttaccagtttcaatgtgtgtttcttgaacaccagtggttttgatcactttcctgtgtctgttgcacggcaggtctttccctggaatttggtaagtcgggaagagtcaggacccttatttagcagatggcactaccgatgttcagggaggttgagtgacttttgcgaggattttccacctccagtaattgacacagggcgatcctcacctccacccccaagcctcccccatccccccatgcctcactcacaacacttcacacttcttgaaaaaggtcactttggggtccagaaaacacttactaaaaagggggaaagtttagtaggaacttttctgcttcccaccacggcagagttcatgctttgggctggctggctgctgggaagagataaacacttagcactcactaagtgagcgcctggtcagccacctgcacagagaagattccgaagaggccttcctcccacacacagacctcagctagaggggaccgcggacctcagtgggaaaagctgcacaaggcttctaggagatgatggagaaggggcttctccagctcccaggccaggggagatttctcaaccacgacctaagaagcatcaaagggaatgtggcaagtgtgactccattcaaatcaagagctcccacttaccgaaggacactaagggaaccaaaggaaggccagaggggcagaatcaacgtgcggcacacaaatctttagttttctactattgccgcaaccagtcaccacaaatggagtggcttgaaacaacaagaactcgccacctcctggctcagtagatctggagtccctgggccttactgggccagcaggcaggactcagcagtggtggctccttccagggttctaggggagaacctgcttccttgccttttccagccccaggggtcactggcattcattggcccggactccttcccccaaccccaaagccagcagcaccacatctctctgacccttcatccgttgtcccctctccccccaagccccatgggacagggtctccactcctgagactcatgggattagactaggcctacctggatgatctgggatcctctcccatgtccaggtctctatccctaaccacatcagcaaagtctcttttgccatggaaggtatttgcaggctctgactttgtgtgtattagggcaggacatttttggcggggcagtggtgggggcagggaattattctgcctaccatgccttatacaaaaataaataaatcacaggcttatacctgaaagaattcctgcaaataataaaagaattagagcagctcagttaaataaaaaaaggtatgagatgtgaacagacacttcacagaagatgacatgcaggggagcaaggtatttatcaaaaagtgctccacttttcacttaccagagaaatgcaaatcagcacccaaaggagtcactgcggcaccctcatctgagcctcagaagttagaaagatggatagcaccagtgtcaaaggtgactgtgggagggagatttgcatacactgctagtaacaatgcgaattgatggaaccaacctggaaaatggcttggcatcaactgttggagaagaagacacacagtcctctaacctgccagtcccacatcagggcctggatatggccgtcatgtgtaccagggagcatggccaggaatctttacagccaaatactcaccatagcaccaaactggaatcagccgacatacccatcaggaagagaatggatgttaaaaaatgcaaggatagccattgggtagaacgccatacagccatgacaattacacagtgacacctacacacaaggagcatgagtctcacaaacatggcagcaaaaggagcctgttcaagagggtatgtgctatggattccattgtagataaagtttttcaaaagcaaaagtagccaatggtattttggatgcatatttaggtggtaaatgtatacaggaaaaataagaaagtgattgtatttgagggtgggaccacatggtgactgggaagggacagggacaagcctctggggttctggcaatgctctgtttcttgacccaggtggtgattgtaaggatgtttgttaactagtgatgaaaataattaagctgtacttttgctttatacacttttgagtacatgttatgttccacaatttaaaaactacttataaagaaactgcacatgcttggatccaggaacatgagctacaggcacatcctccactgatgcccagtgttcttgactcaatacctgtaaggagaggtccttgtagcccattgggggctgaccagaccctactacgcccctgccacaatctctagtccatcacaaaatccactattgggatagtactttcgtccctcagtaggtaagcatttttacaacctaggaagacttagctttaagtctagaaatgattagtataaatataaaatataaatatgattaatataaatataaaatagccatagaaatatgccttttagtttgttttttgagacagagttttactctgccacccaggctggagtgcagtggcgtgatctcagctcactgcaatctccacctcccaggttcaagagattctcatgcttcagcctcccaagtagctgggatcacaggcacacacaaccatgcccagcaatttttttgtatttttagtagagatggggtttcgccgtgttggccaggctggtcttgaactcccgacctcaagtgatccacccgcctctgcctcccaaattgctgagattacaggcgtgagacactgtgcctggccaaaatatgccttttgtattaaggaatctggacaggtttgatttttcacagtcttgtaatgtttaaataatttggcctattatgaagaatctcacaaatccaatataaaatgtggaactaactaatcaaaatcatcttgtaatattacatggaaatcttagtgcgtttatacacggtattggcatatttaagagactttgagctcattgcatttctaagttaaattattagatttcttaagatttaagttaaattattagatttttaaagattaattagtgctaaggagggttttctcattagacagctgaaatgccgcaggagaaatttgagtgtattccacttcttattgcaattttaaatgtttgaagttatttaaagaactaaatttatggtatccaaaagctctaaaaaggtgactcttaagatttgcaggtcttataaatagaaaaacaagaactgtaagccaaacttaaaatattcaggatgaattgagtttttgaatttgtagctttcagaaactgaacattaattttaagaagcaaagcaggctgggcacagtggctcacgcctgtaatcctagcactttaggaggctgaagtgggtggatcacttgagatcaggagttcaagaccagcctggccaacatgatgaaacctcctctctactaaaaatacaaaactccgccagaaatcgcttgatcccgggaggtggaggttgcagtgagctgagatcgtgccactgcactccagcctggggaacagagcgagattccgcctcaaaaaaaaaataaaaataaaaagaagaagaagaagaaggagaaagagggagagggagagggagagggagagggagagggagagggagaagaagaagaagaagaagaagaagaagaagaag

SEQ ID NO: 122994 - DNA, 564 bp, Artificial Sequence
  derived and/or modified sequence
atggagttgtctggagcgaccatggccaggggcctggccgtactcctggtgctgtttcttcacattaaaaacctccccgcccaggctgccgacacttgtccggaagtgaaggttgtcgggcttgagggctccgataagctgacaattctgaggggttgtcctggccttcctggggcccccggacccaagggagaggcgggtgtgatcggcgagcgtggcgagcggggtctccctggagcccctggcaaagcaggaccagtggggccgaagggggatgccggacagtcccaatcttgcgctaccggtcctcggaactgtaaagatttactggaccgagggtactttctctctgggtggcacacaatctatctgccagactgccggcccctgaccgtgctctgcgatatggataccgatggaggcggctggactgtgtttcagcgacggatggatggcagtgtggacttttaccgggactgggccgcttacaagcagggattcggtagtcagctcggcgagttctggctgggcaatgacaatattcacgcgctgaccgcacagtag

SEQ ID NO: 122995 - DNA, 981 bp, Artificial Sequence
  derived and/or modified sequence
atggagcttagcggagccaccatggctagaggactggcagtgcttttagtgctcttcctccatatcaagaacctacccgctcaggccgctgacacttgcccagaagttaaagtcgtcggcctggagggcagcgataagctcacaatcctccgtgggtgtcctggtctgccaggcgcccccggcccgaaaggtgaggctggggtgatcggagagcgaggcgaacgcggacttccaggcgctccagggaaggcgggcccggtgggtcctaaaggtgatagaggagaaaaaggcatgcggggcgagaagggggacgctggccaatctcagagctgcgcgaccggaccacgcaactgcaaggacctcctggacagaggctacttcctctccggatggcataccatttacctgcctgattgccggccgctgaccgttctttgcgacatggatacggacggagggggttggactgtgtttcagcgccgaatggatggcagcgtcgatttctatagggattgggctgcttataagcagggattcggctctcaactcggggaattctggttgggaaacgataatatccacgcccttactgcacaggggtcttccgagctgcgcgtggatctggtggactttgaggggaatcatcagtttgcaaaatacaaatcatttaaggtggctgacgaggcggaaaaatataagctcgttctgggtgcctttgttgggggctcagcgggcaactcattgactggacataataataactttttctccactaaagaccaggacaatgacgttagctcaagcaactgtgctgagaagttccagggagcctggtggtacgctgactgccatgcctccaacttaaacggattatatctgatgggcccccatgagtcgtacgccaatgggataaattggtcggctgcaaaaggctacaaatacagttacaaggtttccgaaatgaaggttcggccagcatag

SEQ ID NO: 122996 - DNA, 1083 bp, Artificial Sequence
  derived and/or modified sequence
atggagctgagtggtgcaaccatggctcgcggcctggctgtactgctggtactctttctgcacataaagaacctgccggcccaggcagccgatacatgcccagaagtcaaagtggtgggcctggaaggctctgataagttaaccatcctgaggggctgcccagggcttccaggagcaccgggacctaaaggcgaggctggcgtcataggcgagcgcggcgagcgaggactacctggcgccccggggaaggctggccctgtgggacccaaaggcgatcggggggagaaggggatgcgtggtgagaaaggagacgcaggacagtcccagagttgtgctactggaccgaggaattgcaaagacttactggatcgtgggtatttcctgtctgggtggcatacgatctacttgcccgactgtagacccctgacagtattgtgcgacatggatacagatggaggcggctggactgtcttccaacgccgaatggacgggtctgtagacttctatcgggattgggccgcatataagcagggctttggatcgcagactcattcccacgatgcacacagctgtccttttgccccctcctctgtgaaaccaccccatgcgcacaatcttacccgggggcgaatcatgttcctgaacatgttcactcttggacagaaaagctttacctctttcaacgtgtgttttcttaatacaagcggctttgatcatttcccagtgtcggttgctagacaggtctttccttggaacctcgtatcacgcgaagagagtggaccacttttttctcgctggcattatcggtgctctggaaggctctcagacttttgcgaggattttccacctccagttattgataccggcaggagcagtccgcctcccccatccctgccacatccaccaatgccacattcacaacactttaccctgttggaaaagggccactttggtgtacaaaagacgctgacaaaaaagggagaatccttagtgggaacgttcctgcttcccacaacagccgagtttatgctgtgggcaggctggctgttgggaagagacaagcacctggccctgactaagtag

SEQ ID NO: 122997 - DNA, 564 bp, Artificial Sequence
  derived and/or modified sequence
atggagctgagcggggccaccatggcccggggcctggccgtgctgctggtgctcttcctgcacatcaagaacctgcctgcccaggccgctgacacctgcccagaggtgaaggtggtgggcctggagggcagtgacaagctgaccatcctgcggggctgccccggcctgcccggggcccctggccccaagggggaggccggcgtgattggagagcggggggagcggggcctgcccggggcccctgggaaggccggccctgtgggccccaagggagatgctggccagagccagagctgtgccaccggccccaggaactgcaaggacctgctggaccggggctacttcctgagcggctggcacaccatctacctgcctgactgccggcccctgactgtgctgtgtgacatggacacagatggcggcggctggacagtgttccagaggaggatggatggctctgtggacttctacagagactgggccgcctacaagcagggcttcggcagccagctgggggagttctggctgggcaatgacaacatccacgccctgacagcccagtag

SEQ ID NO: 122998 - DNA, 981 bp, Artificial Sequence
  derived and/or modified sequence
atggagctgagcggggccaccatggcccggggcctggccgtgctgctggtgctcttcctgcacatcaagaacctgcctgcccaggccgctgacacctgcccagaggtgaaggtggtgggcctggagggcagtgacaagctgaccatcctgcggggctgccccggcctgcccggggcccctggccccaagggggaggccggcgtgattggagagcggggggagcggggcctgcccggggcccctgggaaggccggccctgtgggccccaagggggacagaggagagaagggcatgagaggagagaagggagatgctggccagagccagagctgtgccaccggccccaggaactgcaaggacctgctggaccggggctacttcctgagcggctggcacaccatctacctgcctgactgccggcccctgactgtgctgtgtgacatggacacagatggcggcggctggacagtgttccagaggaggatggatggctctgtggacttctacagagactgggccgcctacaagcagggcttcggcagccagctgggggagttctggctgggcaatgacaacatccacgccctgacagcccagggcagcagcgagctgcgggtggacctggtggactttgagggcaaccaccagtttgccaagtacaagagcttcaaggtggctgatgaagctgagaagtacaagctggtgctgggcgcctttgtgggcggcagcgctggcaacagcctgaccggccacaacaacaacttcttcagcaccaaggaccaggacaatgatgtgagcagcagcaactgtgccgagaagttccagggcgcctggtggtatgctgactgccacgccagcaacctgaatggcctgtacctgatgggcccccatgagagctatgccaacggcatcaactggagcgctgccaagggctacaagtacagctacaaggtgtctgagatgaaggtgcggcctgcctag

SEQ ID NO: 122999 - DNA, 1083 bp, Artificial Sequence
  derived and/or modified sequence
atggagctgagcggggccaccatggcccggggcctggccgtgctgctggtgctcttcctgcacatcaagaacctgcctgcccaggccgctgacacctgcccagaggtgaaggtggtgggcctggagggcagtgacaagctgaccatcctgcggggctgccccggcctgcccggggcccctggccccaagggggaggccggcgtgattggagagcggggggagcggggcctgcccggggcccctgggaaggccggccctgtgggccccaagggggacagaggagagaagggcatgagaggagagaagggagatgctggccagagccagagctgtgccaccggccccaggaactgcaaggacctgctggaccggggctacttcctgagcggctggcacaccatctacctgcctgactgccggcccctgactgtgctgtgtgacatggacacagatggcggcggctggacagtgttccagaggaggatggatggctctgtggacttctacagagactgggccgcctacaagcagggcttcggcagccagacccacagccatgatgcccacagctgcccctttgcccccagctctgtgaagccaccccacgcccacaacctgacccggggccgcatcatgttcctgaacatgttcaccctgggccagaagagcttcaccagcttcaacgtgtgcttcctgaacaccagcggctttgaccacttccctgtgtctgtggcccggcaggtgttcccctggaacctggtgtcccgggaggagagcggccccctcttcagccgctggcactaccgctgcagcggccgcctgagtgacttctgtgaggacttccccccacctgtgattgacaccggccgcagcagccccccaccacccagcctgccccacccccccatgccccacagccagcacttcaccctgctggagaagggccactttggagtgcagaagaccctgaccaagaagggggagagcctggtgggcaccttcctgctgcccaccacagctgagttcatgctgtgggccggctggctgctgggccgggacaagcacctggccctgaccaagtag

SEQ ID NO: 123000 - DNA, 564 bp, Artificial Sequence
  derived and/or modified sequence
atggagctgagcggcgccaccatggcccggggcctggccgtgctgctagtgctatttcttcacattaaaaatctgccggcccaggctgctgacacatgtccagaggtgaaggtcgtcgggctcgaaggatctgacaagttaacaattctgcgggggtgtccgggattgccaggtgcaccagggcccaagggggaagcaggggtgattggtgagcgcggagagcggggcctaccaggggcacccggaaaggcaggtcccgtagggcctaagggcgacgcgggccaatcccaatcctgcgccaccggcccacgcaactgtaaggatcttctagacagaggctatttcctgagcgggtggcataccatttatctgcccgactgccgtccactgactgttctgtgtgatatggacactgatggcggcggctggaccgttttccaaaggcgcatggatggatcagtcgatttctaccgggattgggctgcttataagcagggctttggaagtcaattgggagagttctggctgggtaacgacaatatccatgctcttacagcccaatag

SEQ ID NO: 123001 - DNA, 981 bp, Artificial Sequence
  derived and/or modified sequence
atggagctgagcggcgccaccatggcccggggcctggccgtgctgcttgtgctttttttacatatcaagaacctccctgcccaggctgctgacacctgtcctgaggtgaaagtggtcgggttggaaggaagcgataaactaacaattttgaggggctgtcctggtctgccaggcgcacccggtcccaagggggaggctggggtgattggagaaagaggcgaacggggactgcccggggcccccggcaaagcaggccctgtggggcccaagggtgatcgaggggagaagggcatgaggggcgagaagggagacgctggacagtcacagagctgcgcaacaggcccaaggaactgcaaggatctacttgatagaggctactttctgtcgggatggcatacaatctacctgcctgactgtcgccctctaaccgtgctgtgcgacatggacaccgatggaggcgggtggactgtgttccagcggagaatggatggaagcgttgatttttacagggactgggcggcttacaagcaaggatttggaagtcagctgggcgagttttggttagggaacgacaatatacacgcactgaccgcccaggggtccagcgaactgcgcgttgatctcgtggatttcgaagggaaccaccaatttgccaagtacaaatccttcaaggtggccgacgaagctgagaaatacaaactagtgctgggcgctttcgttggaggttccgccgggaacagtttgaccgggcataacaacaacttctttagtaccaaggaccaggacaatgacgtctcctctagcaattgtgctgagaaattccaaggggcctggtggtatgctgactgccacgcgagcaaccttaacggcctgtacctaatgggtccccacgaatcatatgccaacggcattaactggagcgctgctaaaggatataagtacagctacaaggtaagtgagatgaaagtccgccctgcctag

SEQ ID NO: 123002 - DNA, 1083 bp, Artificial Sequence
  derived and/or modified sequence
atggagctgagcggcgccaccatggcccggggcctggccgtgctgctggtgttgttccttcacattaagaatctccccgcccaggcagccgatacctgccccgaagttaaggtagtgggcctcgaaggatctgataagctgaccattctgcggggatgtcctggcctgcccggcgctcccggcccaaaaggtgaggccggtgttataggtgagcgaggggagagaggcctccctggggctcctggcaaggctggcccagtgggtccgaaaggagaccggggtgagaaaggaatgcgcggcgagaagggagatgcgggtcagagtcagagttgcgccacaggccctcgcaactgtaaagatttgttggatcgcggttacttcttgtctgggtggcacaccatttatctgcccgactgtagaccactgactgtactgtgcgacatggacaccgatgggggcggctggacagttttccagcggcggatggacggctctgtggacttttaccgcgactgggccgcctacaaacaggggttcggttctcagactcactcgcacgacgcacactcatgcccgtttgctccctcttctgtgaagcccccccacgcccacaatttaacccgcggaagaattatgtttctcaacatgttcacattgggtcagaaaagctttacctcattcaatgtttgcttcctaaatacgtcaggttttgaccattttccggtgtcagtggctcgtcaggtttttccctggaatttggtctcgcgtgaagagagcggtcccctgttttctagatggcattataggtgttccggacgtttatctgacttctgcgaggactttccccctccggtcattgataccggccggtctagccccccacctccaagcctgccacatccacctatgccccattcgcagcactttacacttctggagaaaggtcactttggtgtgcagaagacactcaccaagaagggggagagtttggtgggaaccttcctgcttccgacaacagctgagttcatgctgtgggctggttggctcctgggaagagataagcatctcgctttgactaaatag

SEQ ID NO: 123003 - DNA, 564 bp, Artificial Sequence
  derived and/or modified sequence
atggaactgagcggcgcaactatggcgagggggctcgccgtattactggttctgtttctccatatcaaaaatctcccagcgcaggccgctgatacgtgtccagaagtaaaggtggtagggctggaaggcagcgacaaattgacaatccttaggggctgtccgggtctgccaggggctccaggccctaagggcgaggccggagtgattggggaacgaggcgagagaggtctgccaggtgcgccaggcaaggctgggcctgttggaccaaaaggcgacgcgggacagagccagtcttgtgccacagggccaaggaactgtaaagacctcttggaccgcggatacttcctcagtggctggcacaccatttatcttcccgactgtcggcctcttaccgttctatgcgatatggatactgatggtggtggctggactgtgttccagaggaggatggacgggtcagtggatttctacagggactgggcggcttataaacaaggatttggaagccagttaggtgaattctggttaggcaatgataatatccacgcccttacggcacagtag

SEQ ID NO: 123004 - DNA, 981 bp, Artificial Sequence
  derived and/or modified sequence
atggaacttagcggtgccacaatggcccgtggacttgccgtgctgctggtgctgttcctccacatcaaaaaccttccagcccaagccgctgatacatgccccgaggttaaggtggtggggcttgaagggtctgacaaacttacaatccttagggggtgccccggtctgcccggtgccccaggacctaagggagaggccggtgtcattggggagcgcggtgaacgaggcctgccaggagcccctggaaaggcaggcccagtcggacctaagggagatcgtggagagaaaggtatgcgcggagagaagggcgatgcaggacagtctcagagctgtgccactggcccacgaaattgcaaagatttgctggatcgtggctacttcctgagtggctggcacacaatctatctgccagattgccgcccactgactgtgctgtgtgatatggacactgacggaggcggttggaccgtatttcagcgcaggatggacggttcagtggatttttacagagattgggcagcatacaagcaagggttcggatctcaattgggagaattttggctgggcaacgacaatatacatgccttaacagcccagggtagttccgagctgagggtggatctagtcgatttcgaagggaaccatcaattcgccaagtacaaatcttttaaagtggcagacgaggctgaaaagtataaattggtactcggggcttttgttgggggttcggcgggtaactcccttacaggtcataataataattttttcagtacaaaagaccaggacaatgacgtgtcgtcttccaactgcgccgaaaagttccagggcgcttggtggtatgctgattgtcacgcctctaacttgaacggcctatatttgatggggccacacgaatcctacgctaatggcattaattggagtgcagccaaggggtataagtattcttacaaggtgagcgagatgaaagtacggcctgcctag

SEQ ID NO: 123005 - DNA, 1083 bp, Artificial Sequence
  derived and/or modified sequence
atggagctgtctggggctacaatggcccgtggactcgcagtactcctggtgctctttctccacataaagaacctgcccgcacaggccgcagatacttgccccgaggtaaaagtggtgggtctggagggttccgacaagttaacaatcctcagaggctgccccggtttgcccggagcacccggacccaagggggaagccggtgtgatcggcgagaggggggagcggggtctccctggtgctccaggcaaagccggtccagttgggcctaagggcgacaggggtgaaaagggtatgaggggagagaagggagatgctggacaaagtcagagttgcgctaccgggccacggaattgtaaagatttgctcgacagaggttactttttgagtggatggcataccatatacctcccagattgccgaccacttaccgtcctatgtgacatggataccgacgggggagggtggaccgtgtttcagcgtcgcatggacggttcagtcgacttttacagggactgggctgcctacaagcaagggttcggaagccagacccactcacacgacgctcacagctgtcctttcgccccatccagcgtcaagccccctcacgcccacaacctgacacgaggcagaatcatgtttctgaacatgtttacactggggcagaagagtttcacttcatttaatgtgtgttttctcaataccagcggttttgaccattttccagtatccgtggcacggcaggtttttccgtggaatctggtgagcagggaggaaagtggaccactgttctcgagatggcattaccgctgcagtggtcggctgtccgacttctgcgaggactttcctccccctgtgatcgacacagggcgatctagtccgcctccaccatcattaccacacccacccatgccccattcccagcattttacactgctggagaagggacatttcggtgtacaaaaaactctgacaaagaaaggggaatcccttgtcgggacttttctgctgcctaccacggctgaattcatgttgtgggctggatggctcctgggccgagacaaacacttggccctgactaaatag

SEQ ID NO: 123006 - DNA, 564 bp, Artificial Sequence
  derived and/or modified sequence
atggagctgagcggcgccaccatggccagaggcctggccgtgctgctggtgctgttcctgcacatcaagaacctgcccgcccaggccgccgacacctgccccgaggtgaaggtggtgggcctggagggcagcgacaagctgaccatcctgagaggctgccccggcctgcccggcgcccccggccccaagggcgaggccggcgtgatcggcgagagaggcgagagaggcctgcccggcgcccccggcaaggccggccccgtgggccccaagggcgacgccggccagagccagagctgcgccaccggccccagaaactgcaaggacctgctggacagaggctacttcctgagcggctggcacaccatctacctgcccgactgcagacccctgaccgtgctgtgcgacatggacaccgacggcggcggctggaccgtgttccagagaagaatggacggcagcgtggacttctacagagactgggccgcctacaagcagggcttcggcagccagctgggcgagttctggctgggcaacgacaacatccacgccctgaccgcccagtag

SEQ ID NO: 123007 - DNA, 981 bp, Artificial Sequence
  derived and/or modified sequence
atggagctgagcggcgccaccatggccagaggcctggccgtgctgctggtgctgttcctgcacatcaagaacctgcccgcccaggccgccgacacctgccccgaggtgaaggtggtgggcctggagggcagcgacaagctgaccatcctgagaggctgccccggcctgcccggcgcccccggccccaagggcgaggccggcgtgatcggcgagagaggcgagagaggcctgcccggcgcccccggcaaggccggccccgtgggccccaagggcgacagaggcgagaagggcatgagaggcgagaagggcgacgccggccagagccagagctgcgccaccggccccagaaactgcaaggacctgctggacagaggctacttcctgagcggctggcacaccatctacctgcccgactgcagacccctgaccgtgctgtgcgacatggacaccgacggcggcggctggaccgtgttccagagaagaatggacggcagcgtggacttctacagagactgggccgcctacaagcagggcttcggcagccagctgggcgagttctggctgggcaacgacaacatccacgccctgaccgcccagggcagcagcgagctgagagtggacctggtggacttcgagggcaaccaccagttcgccaagtacaagagcttcaaggtggccgacgaggccgagaagtacaagctggtgctgggcgccttcgtgggcggcagcgccggcaacagcctgaccggccacaacaacaacttcttcagcaccaaggaccaggacaacgacgtgagcagcagcaactgcgccgagaagttccagggcgcctggtggtacgccgactgccacgccagcaacctgaacggcctgtacctgatgggcccccacgagagctacgccaacggcatcaactggagcgccgccaagggctacaagtacagctacaaggtgagcgagatgaaggtgagacccgcctag

SEQ ID NO: 123008 - DNA, 1083 bp, Artificial Sequence
  derived and/or modified sequence
atggagctgagcggcgccaccatggccagaggcctggccgtgctgctggtgctgttcctgcacatcaagaacctgcccgcccaggccgccgacacctgccccgaggtgaaggtggtgggcctggagggcagcgacaagctgaccatcctgagaggctgccccggcctgcccggcgcccccggccccaagggcgaggccggcgtgatcggcgagagaggcgagagaggcctgcccggcgcccccggcaaggccggccccgtgggccccaagggcgacagaggcgagaagggcatgagaggcgagaagggcgacgccggccagagccagagctgcgccaccggccccagaaactgcaaggacctgctggacagaggctacttcctgagcggctggcacaccatctacctgcccgactgcagacccctgaccgtgctgtgcgacatggacaccgacggcggcggctggaccgtgttccagagaagaatggacggcagcgtggacttctacagagactgggccgcctacaagcagggcttcggcagccagacccacagccacgacgcccacagctgccccttcgcccccagcagcgtgaagcccccccacgcccacaacctgaccagaggcagaatcatgttcctgaacatgttcaccctgggccagaagagcttcaccagcttcaacgtgtgcttcctgaacaccagcggcttcgaccacttccccgtgagcgtggccagacaggtgttcccctggaacctggtgagcagagaggagagcggccccctgttcagcagatggcactacagatgcagcggcagactgagcgacttctgcgaggacttccccccccccgtgatcgacaccggcagaagcagcccccccccccccagcctgccccacccccccatgccccacagccagcacttcaccctgctggagaagggccacttcggcgtgcagaagaccctgaccaagaagggcgagagcctggtgggcaccttcctgctgcccaccaccgccgagttcatgctgtgggccggctggctgctgggcagagacaagcacctggccctgaccaagtag

SEQ ID NO: 123009 - protein, 822 aa, Artificial Sequence
  derived and/or modified sequence
MGFSSELCSPQGHGVLQQMQEAELRLLEGMRKWMAQRVKSDREYAGLLHHMSLQDSGGQSRAISPDSPISQSWAEITSQTEGLSRLLRQHAEDLNSGPLSKLSLLIRERQQLRKTYSEQWQQLQQELTKTHSQDIEKLKSQYRALARDSAQAKRKYQEASKDKDRDKAKDKYVRSLWKLFAHHNRYVLGVRAAQLHHQHHHQLLLPGLLRSLQDLHEEMACILKEILQEYLEISSLVQDEVVAIHREMAAAAARIQPEAEYQGFLRQYGSAPDVPPCVTFDESLLEEGEPLEPGELQLNELTVESVQHTLTSVTDELAVATEMVFRRQEMVTQLQQELRNEEENTHPRERVQLLGKRQVLQEALQGLQVALCSQAKLQAQQELLQTKLEHLGPGEPPPVLLLQDDRHSTSSSEQEREGGRTPTLEILKSHISGIFRPKFSLPPPLQLIPEVQKPLHEQLWYHGAIPRAEVAELLVHSGDFLVRESQGKQEYVLSVLWDGLPRHFIIQSLDNLYRLEGEGFPSIPLLIDHLLSTQQPLTKKSGVVLHRAVPKDKWVLNHEDLVLGEQIGRGNFGEVFSGRLRADNTLVAVKSCRETLPPDLKAKFLQEARILKQYSHPNIVRLIGVCTQKQPIYIVMELVQGGDFLTFLRTEGARLRVKTLLQMVGDAAAGMEYLESKCCIHRDLAARNCLVTEKNVLKISDFGMSREEADGVYAASGGLRQVPVKWTAPEALNYGRYSSESDVWSFGILLWETFSLGASPYPNLSNQQTREFVEKGGRLPCPELCPDAVFRLMEQCWAYEPGQRPSFSTIYQELQSIRKRHR

SEQ ID NO: 123010 - DNA, 2469 bp, Artificial Sequence
  derived and/or modified sequence
atgggcttcagcagcgagctgtgcagcccccagggccacggcgtgctgcagcagatgcaggaggccgagctgagactgctggagggcatgagaaagtggatggcccagagagtgaagagcgacagagagtacgccggcctgctgcaccacatgagcctgcaggacagcggcggccagagcagagccatcagccccgacagccccatcagccagagctgggccgagatcaccagccagaccgagggcctgagcagactgctgagacagcacgccgaggacctgaacagcggccccctgagcaagctgagcctgctgatcagagagagacagcagctgagaaagacctacagcgagcagtggcagcagctgcagcaggagctgaccaagacccacagccaggacatcgagaagctgaagagccagtacagagccctggccagagacagcgcccaggccaagagaaagtaccaggaggccagcaaggacaaggacagagacaaggccaaggacaagtacgtgagaagcctgtggaagctgttcgcccaccacaacagatacgtgctgggcgtgagagccgcccagctgcaccaccagcaccaccaccagctgctgctgcccggcctgctgagaagcctgcaggacctgcacgaggagatggcctgcatcctgaaggagatcctgcaggagtacctggagatcagcagcctggtgcaggacgaggtggtggccatccacagagagatggccgccgccgccgccagaatccagcccgaggccgagtaccagggcttcctgagacagtacggcagcgcccccgacgtgcccccctgcgtgaccttcgacgagagcctgctggaggagggcgagcccctggagcccggcgagctgcagctgaacgagctgaccgtggagagcgtgcagcacaccctgaccagcgtgaccgacgagctggccgtggccaccgagatggtgttcagaagacaggagatggtgacccagctgcagcaggagctgagaaacgaggaggagaacacccaccccagagagagagtgcagctgctgggcaagagacaggtgctgcaggaggccctgcagggcctgcaggtggccctgtgcagccaggccaagctgcaggcccagcaggagctgctgcagaccaagctggagcacctgggccccggcgagcccccccccgtgctgctgctgcaggacgacagacacagcaccagcagcagcgagcaggagagagagggcggcagaacccccaccctggagatcctgaagagccacatcagcggcatcttcagacccaagttcagcctgcccccccccctgcagctgatccccgaggtgcagaagcccctgcacgagcagctgtggtaccacggcgccatccccagagccgaggtggccgagctgctggtgcacagcggcgacttcctggtgagagagagccagggcaagcaggagtacgtgctgagcgtgctgtgggacggcctgcccagacacttcatcatccagagcctggacaacctgtacagactggagggcgagggcttccccagcatccccctgctgatcgaccacctgctgagcacccagcagcccctgaccaagaagagcggcgtggtgctgcacagagccgtgcccaaggacaagtgggtgctgaaccacgaggacctggtgctgggcgagcagatcggcagaggcaacttcggcgaggtgttcagcggcagactgagagccgacaacaccctggtggccgtgaagagctgcagagagaccctgccccccgacctgaaggccaagttcctgcaggaggccagaatcctgaagcagtacagccaccccaacatcgtgagactgatcggcgtgtgcacccagaagcagcccatctacatcgtgatggagctggtgcagggcggcgacttcctgaccttcctgagaaccgagggcgccagactgagagtgaagaccctgctgcagatggtgggcgacgccgccgccggcatggagtacctggagagcaagtgctgcatccacagagacctggccgccagaaactgcctggtgaccgagaagaacgtgctgaagatcagcgacttcggcatgagcagagaggaggccgacggcgtgtacgccgccagcggcggcctgagacaggtgcccgtgaagtggaccgcccccgaggccctgaactacggcagatacagcagcgagagcgacgtgtggagcttcggcatcctgctgtgggagaccttcagcctgggcgccagcccctaccccaacctgagcaaccagcagaccagagagttcgtggagaagggcggcagactgccctgccccgagctgtgccccgacgccgtgttcagactgatggagcagtgctgggcctacgagcccggccagagacccagcttcagcaccatctaccaggagctgcagagcatcagaaagagacacagatag

SEQ ID NO: 123011 - DNA, 1638 bp, Artificial Sequence
  derived and/or modified sequence
atgggcttcagcagcgagctgtgcagcccccagggccacggcgtgctgcagcagatgcaggaggccgagctgagactgctggagggcatgagaaagtggatggcccagagagtgaagagcgacagagagtacgccggcctgctgcaccacatgagcctgcaggacagcggcggccagagcagagccatcagccccgacagccccatcagccagagctgggccgagatcaccagccagaccgagggcctgagcagactgctgagacagcacgccgaggacctgaacagcggccccctgagcaagctgagcctgctgatcagagagagacagcagctgagaaagacctacagcgagcagtggcagcagctgcagcaggagctgaccaagacccacagccaggacatcgagaagctgaagagccagtacagagccctggccagagacagcgcccaggccaagagaaagtaccaggaggccagcaaggacaaggacagagacaaggccaaggacaagtacgtgagaagcctgtggaagctgttcgcccaccacaacagatacgtgctgggcgtgagagccgcccagctgcaccaccagcaccaccaccagctgctgctgcccggcctgctgagaagcctgcaggacctgcacgaggagatggcctgcatcctgaaggagatcctgcaggagtacctggagatcagcagcctggtgcaggacgaggtggtggccatccacagagagatggccgccgccgccgccagaatccagcccgaggccgagtaccagggcttcctgagacagtacggcagcgcccccgacgtgcccccctgcgtgaccttcgacgagagcctgctggaggagggcgagcccctggagcccggcgagctgcagctgaacgagctgaccgtggagagcgtgcagcacaccctgaccagcgtgaccgacgagctggccgtggccaccgagatggtgttcagaagacaggagatggtgacccagctgcagcaggagctgagaaacgaggaggagaacacccaccccagagagagagtgcagctgctgggcaagagacaggtgctgcaggaggccctgcagggcctgcaggtggccctgtgcagccaggccaagctgcaggcccagcaggagctgctgcagaccaagctggagcacctgggccccggcgagcccccccccgtgctgctgctgcaggacgacagacacagcaccagcagcagcgagcaggagagagagggcggcagaacccccaccctggagatcctgaagagccacatcagcggcatcttcagacccaagttcagcctgcccccccccctgcagctgatccccgaggtgcagaagcccctgcacgagcagctgtggtaccacggcgccatccccagagccgaggtggccgagctgctggtgcacagcggcgacttcctggtgagagagagccagggcaagcaggagtacgtgctgagcgtgctgtgggacggcctgcccagacacttcatcatccaggcccacgcccccagcgagtggagactgctgacccccggccccctgccctgcagaacctgcaccgactggaagggcaaggccttcctggccttcctgtgcagcagcaccacctactag

SEQ ID NO: 123012 - DNA, 2469 bp, Artificial Sequence
  derived and/or modified sequence
atgggcttctctagtgagctttgctcccctcagggccatggcgttctgcagcagatgcaagaggcggaactgaggttgctagagggcatgcgaaagtggatggcccagagggtgaaatctgaccgggagtatgccggattgctgcatcacatgagtctgcaggatagcggcgggcaaagcagagcaatctctccggatagcccaattagtcaatcctgggcggaaatcacgtcccagaccgagggactgtcacggctactgcggcagcatgctgaagatctgaacagcggcccactctccaagctttcattactcattcgggaaagacagcaactgcgcaaaacatacagcgaacaatggcaacagcttcagcaggaacttacaaaaacacattcacaagatatcgaaaagctaaaatcccagtaccgcgcactcgccagagatagtgcccaggcaaaacgcaaatatcaagaggcctctaaggataaggacagggacaaagccaaggacaagtatgtgcgaagcctgtggaaattgtttgcccaccacaatagatatgtcttgggcgttagggctgctcagttacaccatcagcatcaccaccagttgctgctcccaggcctccttagaagcttgcaggacttgcacgaggagatggcttgtattcttaaagaaatcttgcaggagtatctggagatttcttctctcgtccaggacgaggtcgtggcaatccatcgggagatggcagccgcagcggctagaatccaacctgaggccgagtaccagggattccttcggcaatatggaagtgcacccgacgtaccaccttgcgttactttcgacgagtcccttctcgaagagggggagcctctagagcccggcgagctacagcttaacgagcttaccgtcgaatctgtccaacacacgctgacaagtgtgaccgatgagttggcggtggctacagagatggtcttcaggcggcaggagatggtgactcagttgcagcaggagcttaggaatgaagaggagaacacacacccacgggaacgggttcagctcctgggaaagcggcaggtgcttcaggaggccctacaggggctgcaggtggcgctctgcagccaggcaaaactgcaggcccagcaggaactgttgcaaaccaagctcgagcatctcggtccaggagaacctccccccgtcctacttctgcaggacgatcgacactccacctcttcttctgaacaggagcgtgaagggggaagaacgcccacattggaaattctgaaatcccatatctctgggatttttcgaccgaaattctcactgccaccccccctacagctcattccagaggttcaaaaacctctccatgaacagttgtggtaccacggcgcaatacctagagccgaagtagcggaactgctggtccacagtggcgacttcttggtccgggaaagtcagggcaaacaagaatacgtgctcagcgtcttgtgggacggactcccgaggcattttatcatacagagcctggataacctgtacaggctagagggcgaaggatttccctctatcccactgttgatcgaccatctgctgtccactcagcaaccgctgaccaagaagtcaggcgttgttcttcacagagcggtgcctaaggataagtgggtcctgaatcacgaggacctggtgttgggggagcagataggccgcggtaactttggtgaggtattcagcggacgtctgcgcgccgacaacacgctggtagctgtgaaatcttgcagagagaccctgccaccagatctgaaagctaagttcctgcaagaggcacgcatccttaaacaatactcacatccgaatatcgttaggctcattggggtctgtactcaaaagcagcccatatatatagtcatggagttggtgcagggaggtgatttccttacatttctccgaacagaaggagctcggctccgagtcaagacgttgctccaaatggtaggcgatgcagcagctgggatggagtatctggagagtaaatgctgtatccatcgcgacctagccgcccgaaattgcttggtgacagagaaaaatgtgttgaaaatctctgactttgggatgtctcgcgaggaggcagacggagtctatgccgcaagcggcggactgcggcaggtgccagtgaaatggacagccccagaagctcttaattatggccggtactctagcgagtccgacgtttggagctttgggattttgctatgggaaacctttagtcttggggcctctccttaccccaatctatctaatcagcagactcgggaatttgtggagaaaggaggcaggctaccctgcccagaattatgtccagatgcagtgtttcgactcatggagcagtgctgggcttatgagcctggccagcggccctccttctctacgatctatcaagaactgcaatccataagaaagagacacaggtag

SEQ ID NO: 123013 - DNA, 1638 bp, Artificial Sequence
  derived and/or modified sequence
atgggtttttcttcagaactctgttcgccacaggggcatggcgttcttcaacagatgcaagaggccgaactaagactcctggagggaatgcgaaagtggatggcccagcgggtgaaatctgaccgggaatatgccggattactgcatcatatgagtctgcaggatagcgggggccagtctagagcaatttccccagattcaccaatcagccagagctgggctgaaatcacgagccaaaccgagggactttcacgactactcaggcagcacgccgaagacctcaactctggacctctgtctaagctaagtcttctcatccgggaaagacagcagctgcgcaagacttattccgagcagtggcagcagctgcagcaggagctcaccaaaacccattctcaggacatagaaaagttgaaatcccagtatcgggctctggcgcgggattccgcccaggccaaacgaaagtatcaagaagcatcgaaggataaagatcgggataaagccaaagacaaatatgtgagatcgctgtggaagctgtttgctcaccacaaccgatatgtgctgggcgttcgggctgcacagctgcatcaccagcatcatcaccaactcctcctgcctgggctactacggtcactgcaggacctccacgaggagatggcatgtatcctcaaagagatcttacaggagtatctggaaataagttcactggtgcaggacgaagtcgtggccatacatcgagagatggccgcagccgccgctaggattcagccggaggcagagtaccagggcttcttgcggcagtatgggtccgctccagacgtgccaccgtgcgtgaccttcgatgagtccctcttggaggagggtgagcctctggagcccggcgagctgcagttgaacgagctgaccgtggaaagtgtgcagcacacattaacaagcgtgaccgacgagctggctgtggccacagagatggtgtttcgacgccaggagatggtaacacagctgcagcaggaattaaggaacgaggaggagaacacacaccctagggagagggtacagctattgggtaaacgtcaggtgttgcaggaagccctgcagggcctccaggtcgccctttgttcccaggccaaattgcaagcccaacaggaattgttgcagaccaaactcgaacacctaggaccaggcgagccacctcccgtacttctgctccaggacgaccgacattctacctcctcctcggaacaagagcgtgagggtgggcgcaccccaactttagagattctgaaatctcacatttccgggatcttccgcccaaagttctcccttcccccacctctgcagctgattcccgaggttcagaagcctctgcatgagcagctgtggtaccacggagcaattccaagggccgaagtagccgaactgctggtgcatagcggcgacttcctggtccgggaaagtcaaggcaaacaggagtacgtgctgtcagtgctctgggatgggctgccgagacacttcatcatccaggctcacgcaccttcagaatggaggctgctgacccccggacccctgccctgcaggacctgtaccgactggaagggcaaagcattcttagccttcctctgctcatctaccacctactag

SEQ ID NO: 123014 - DNA, 2829 bp, Artificial Sequence
  derived and/or modified sequence
cctccacaggcccgccccggggcctgggccaactgaaaccgcgggaggaggaagcgcggaatcaggaactggccggggtccgcaccgggcctgagtcggtccgaggccgtcccaggagcagctgcccgtgcggaacagcactatgggcttctcttccgagctgtgcagcccccagggccacggggtcctgcagcaaatgcaggaggccgagcttcgtctactggagggcatgagaaagtggatggcccagcgggtcaagagtgacagggagtatgcaggactgcttcaccacatgtccctgcaggacagtgggggccagagccgggccatcagccctgacagccccatcagtcagtcctgggctgagatcaccagccaaactgagggcctgagccgcttgctgcggcagcacgcagaggatctgaactcagggcccctgagcaagctgagcctgctcatccgggaacggcagcagcttcgcaagacctacagcgagcagtggcagcagctgcagcaggagctcaccaagacccacagccaggacattgagaagctgaagagccagtaccgagctctggcacgggacagtgcccaagccaagcgcaagtaccaggaggccagcaaagacaaggaccgtgacaaggctaaggacaagtatgtgcgcagcctgtggaagctctttgctcaccacaaccgctatgtgctgggcgtgcgggctgcgcagctacaccaccagcaccaccaccagctcctgctgcccggcctgctgcggtcactgcaggacctgcacgaggagatggcttgcatcctgaaggagatcctgcaggaatacctggagattagcagcctggtgcaggatgaggtggtggccattcaccgggagatggctgcagctgctgcccgcatccagcctgaggctgagtaccaaggcttcctgcgacagtatgggtccgcacctgacgtcccaccctgtgtcacgttcgatgagtcactgcttgaggagggtgaaccgctggagcctggggagctccagctgaacgagctgactgtggagagcgtgcagcacacgctgacctcagtgacagatgagctggctgtggccaccgagatggtgttcaggcggcaggagatggttacgcagctgcaacaggagctccggaatgaagaggagaacacccacccccgggagcgggtgcagctgctgggcaagaggcaagtgctgcaagaagcactgcaggggctgcaggtagcgctgtgcagccaggccaagctgcaggcccagcaggagttgctgcagaccaagctggagcacctgggccccggcgagcccccgcctgtgctgctcctgcaggatgaccgccactccacgtcgtcctcggagcaggagcgagaggggggaaggacacccacgctggagatccttaagagccacatctcaggaatcttccgccccaagttctcgctccctccaccgctgcagctcattccggaggtgcagaagcccctgcatgagcagctgtggtaccacggggccatcccgagggcagaggtggctgagctgctggtgcactctggggacttcctggtgcgggagagccagggcaagcaggagtacgtgctgtcggtgctgtgggatggtctgccccggcacttcatcatccagtccttggataacctgtaccgactggaaggggaaggctttcctagcattcctttgctcatcgaccacctactgagcacccagcagcccctcaccaagaagagtggtgttgtcctgcacagggctgtgcccaaggacaagtgggtgctgaaccatgaggacctggtgttgggtgagcagattggacgggggaactttggcgaagtgttcagcggacgcctgcgagccgacaacaccctggtggcggtgaagtcttgtcgagagacgctcccacctgacctcaaggccaagtttctacaggaagcgaggatcctgaagcagtacagccaccccaacatcgtgcgtctcattggtgtctgcacccagaagcagcccatctacatcgtcatggagcttgtgcaggggggcgacttcctgaccttcctccgcacggagggggcccgcctgcgggtgaagactctgctgcagatggtgggggatgcagctgctggcatggagtacctggagagcaagtgctgcatccaccgggacctggctgctcggaactgcctggtgacagagaagaatgtcctgaagatcagtgactttgggatgtcccgagaggaagccgatggggtctatgcagcctcagggggcctcagacaagtccccgtgaagtggaccgcacctgaggcccttaactacggccgctactcctccgaaagcgacgtgtggagctttggcatcttgctctgggagaccttcagcctgggggcctccccctatcccaacctcagcaatcagcagacacgggagtttgtggagaaggggggccgtctgccctgcccagagctgtgtcctgatgccgtgttcaggctcatggagcagtgctgggcctatgagcctgggcagcggcccagcttcagcaccatctaccaggagctgcagagcatccgaaagcggcatcggtgaggctgggacccccttctcaagctggtggcctctgcaggcctaggtgcagctcctcagcggctccagctcatatgctgacagctcttcacagtcctggactcctgccaccagcatccacactgccggcaggatgcagcgccgtgtcctctctgtgtccctgctgctgccagggcttcctcttccgggcagaaacaataaaaccacttgtgcccactgaa

SEQ ID NO: 123015 - DNA, 2469 bp, Artificial Sequence
  derived and/or modified sequence
atgggcttcagcagcgagctgtgcagcccccagggccatggagtgctgcagcagatgcaggaggccgagctgcggctgctggagggcatgaggaagtggatggcccagagggtgaagagtgaccgggagtatgccggcctgctgcaccacatgagcctgcaggacagcggcggccagagccgggccatcagcccagacagccccatcagccagagctgggccgagatcaccagccagacagagggcctgagccggctgctgcggcagcacgccgaggacctgaacagcggccccctgagcaagctgagcctgctgatccgggagcggcagcagctgaggaagacctacagcgagcagtggcagcagctgcagcaggagctgaccaagacccacagccaggacatcgagaagctgaagagccagtaccgggccctggcccgggacagcgcccaggccaagaggaagtaccaggaggccagcaaggacaaggaccgggacaaggccaaggacaagtatgtgcgcagcctgtggaagctgtttgcccaccacaaccgctacgtgctgggcgtgcgggccgcccagctgcaccaccagcaccaccaccagctgctgctgcccggcctgctgcggagcctgcaggacctgcacgaggagatggcctgcatcctgaaggagatcctgcaggagtacctggagatcagcagcctggtgcaggatgaggtggtggccatccaccgggagatggctgctgctgctgcccgcatccagcctgaggccgagtaccagggcttcctgcggcagtatggcagcgccccagatgtgcccccctgtgtgacctttgatgagagcctgctggaggagggggagcccctggagcctggagagctgcagctgaatgagctgactgtggagagcgtgcagcacaccctgacctctgtgacagatgagctggccgtggccacagagatggtgttccggcggcaggagatggtgacccagctgcagcaggagctgagaaatgaggaggagaacacccacccccgggagcgggtgcagctgctgggcaagaggcaggtgctgcaggaggccctgcagggcctgcaggtggccctgtgcagccaggccaagctgcaggcccagcaggagctgctgcagaccaagctggagcacctgggccctggagagcccccacctgtgctgctgctgcaggatgacagacacagcaccagcagcagcgagcaggagcgggagggcggccgcacccccaccctggagatcctgaagagccacatcagcggcatcttccggcccaagttcagcctgcccccacccctgcagctgatccctgaggtgcagaagcccctgcacgagcagctgtggtaccacggggccatccccagggctgaggtggccgagctgctggtgcacagcggggacttcctggtgcgggagagccagggcaagcaggagtatgtgctgtctgtgctgtgggatggcctgcccaggcacttcatcatccagagcctggacaacctgtaccgcctggagggggagggcttccccagcatccccctgctgattgaccacctgctgagcacccagcagcccctgaccaagaagtctggagtggtgctgcacagagctgtgcccaaggacaagtgggtgctgaaccacgaggacctggtgctgggggagcagatcggccggggcaactttggagaggtgttttctggccgcctgcgggctgacaacaccctggtggccgtgaagagctgccgggagaccctgcccccagacctgaaggccaagttcctgcaggaggcccgcatcctgaagcagtacagccaccccaacatcgtgcggctgattggagtgtgcacccagaagcagcccatctacatcgtgatggagctggtgcagggcggggacttcctgaccttcctgaggacagagggcgcccggctgcgggtgaagaccctgctgcagatggtgggagatgctgctgctggcatggagtacctggagagcaagtgctgcatccaccgggacctggccgccaggaactgcctggtgacagagaagaatgtgctgaagatcagtgactttggcatgagccgggaggaggctgatggagtgtatgctgccagcggcggcctgcggcaggtgcctgtgaagtggacagcccctgaggccctgaactacggccgctacagcagcgagagtgatgtgtggagctttggcatcctgctgtgggagaccttcagcctgggcgccagcccctaccccaacctgagcaaccagcagacccgggagtttgtggagaagggcggccgcctgccctgcccagagctgtgcccagatgctgtgttccggctgatggagcagtgctgggcctatgagcccggccagaggcccagcttcagcaccatctaccaggagctgcagagcatcaggaagaggcacaggtag

SEQ ID NO: 123016 - DNA, 1638 bp, Artificial Sequence
  derived and/or modified sequence
atgggcttcagcagcgagctgtgcagcccccagggccatggagtgctgcagcagatgcaggaggccgagctgcggctgctggagggcatgaggaagtggatggcccagagggtgaagagtgaccgggagtatgccggcctgctgcaccacatgagcctgcaggacagcggcggccagagccgggccatcagcccagacagccccatcagccagagctgggccgagatcaccagccagacagagggcctgagccggctgctgcggcagcacgccgaggacctgaacagcggccccctgagcaagctgagcctgctgatccgggagcggcagcagctgaggaagacctacagcgagcagtggcagcagctgcagcaggagctgaccaagacccacagccaggacatcgagaagctgaagagccagtaccgggccctggcccgggacagcgcccaggccaagaggaagtaccaggaggccagcaaggacaaggaccgggacaaggccaaggacaagtatgtgcgcagcctgtggaagctgtttgcccaccacaaccgctacgtgctgggcgtgcgggccgcccagctgcaccaccagcaccaccaccagctgctgctgcccggcctgctgcggagcctgcaggacctgcacgaggagatggcctgcatcctgaaggagatcctgcaggagtacctggagatcagcagcctggtgcaggatgaggtggtggccatccaccgggagatggctgctgctgctgcccgcatccagcctgaggccgagtaccagggcttcctgcggcagtatggcagcgccccagatgtgcccccctgtgtgacctttgatgagagcctgctggaggagggggagcccctggagcctggagagctgcagctgaatgagctgactgtggagagcgtgcagcacaccctgacctctgtgacagatgagctggccgtggccacagagatggtgttccggcggcaggagatggtgacccagctgcagcaggagctgagaaatgaggaggagaacacccacccccgggagcgggtgcagctgctgggcaagaggcaggtgctgcaggaggccctgcagggcctgcaggtggccctgtgcagccaggccaagctgcaggcccagcaggagctgctgcagaccaagctggagcacctgggccctggagagcccccacctgtgctgctgctgcaggatgacagacacagcaccagcagcagcgagcaggagcgggagggcggccgcacccccaccctggagatcctgaagagccacatcagcggcatcttccggcccaagttcagcctgcccccacccctgcagctgatccctgaggtgcagaagcccctgcacgagcagctgtggtaccacggggccatccccagggctgaggtggccgagctgctggtgcacagcggggacttcctggtgcgggagagccagggcaagcaggagtatgtgctgtctgtgctgtgggatggcctgcccaggcacttcatcatccaggcccacgcccccagcgagtggaggctgctgaccccaggccccctgccctgcaggacctgcacagactggaagggcaaggccttcctggccttcctgtgcagcagcaccacctactag

SEQ ID NO: 123017 - DNA, 2469 bp, Artificial Sequence
  derived and/or modified sequence
atgggcttcagcagcgagctgtgcagcccccagggccacggcgtgctgcagcagatgcaggaggccgagttacgtctgctagaggggatgcggaaatggatggcgcaacgggtgaagtcagatcgcgagtatgctggactgctgcatcacatgtccttacaggatagcggcggccagtcacgcgccatcagtcctgatagtccaatctcccagtcttgggcagaaattactagccaaaccgagggtctttcacgattactgaggcaacatgctgaagacttgaattcaggaccactcagtaaactgtccctgctgattagggagagacagcagcttcgaaagacatattcagagcaatggcagcagcttcagcaggaactcacaaagactcactcgcaggatatcgaaaagctcaagtcacagtaccgcgcactggccagggacagcgcccaggctaagagaaagtaccaggaagcatccaaggacaaagaccgcgacaaagcaaaggataagtacgtgaggagcttgtggaaactgttcgctcaccataacagatatgtgctaggcgtcagggctgcccagctccaccatcagcatcatcatcagctgctattgcctggcctgttaagaagtcttcaggatctgcacgaggaaatggcctgcattctcaaggagattctgcaggagtacctggaaatttcatctctggtacaagacgaggtcgtcgcaatccatagagaaatggcagctgcggccgcacgaattcaacccgaggcagaataccaaggcttcttacgccagtatggaagtgctcccgatgttccaccatgtgttacctttgacgaatctcttttggaggagggcgagccactggaaccaggcgaactgcagctgaacgaattgactgtggagtcggtccagcacaccctgacaagcgttactgacgagctggcagtggctacagaaatggtgtttcgccggcaagagatggtgactcagctgcagcaggaattgcgcaatgaggaggaaaatactcacccaagggagcgagtccagctgttaggcaaacggcaggtgctacaggaggcactgcaaggcctgcaggtagcactgtgctcccaggctaaactgcaagctcagcaagagctcctgcaaacaaaattggagcacttgggtccaggtgaaccacctcccgtgctcctcctacaggacgatcgccactctacatcttcaagtgagcaggagcgcgaggggggaagaacacctacgcttgagattttgaagtcgcatatctcgggcatctttcgtcctaaattcagcctgcctccgcccctacagcttatccccgaagtgcagaagccccttcacgagcagctgtggtaccatggagctatcccaagagccgaggttgccgagttgctggttcactccggggatttcctggtccgggagtctcaggggaaacaggagtacgttttgagcgtcctttgggatgggctcccacggcattttatcatccagtccctggataacttgtaccgccttgaaggggaggggttcccttccatccccctgctgatcgatcatctgctgtccacgcaacaacccctgacgaagaagtccggagtggtactgcatagggctgtgccaaaagacaaatgggtgctaaatcacgaggatctggtcctgggggagcagatcggcaggggaaactttggagaggtcttctctgggcgcctccgcgcggacaacacactagtggctgttaaatcctgccgcgaaacactgccgcccgacctcaaggccaaatttctccaggaagctaggatcctgaaacagtattcgcatcccaatatcgtgcgcttgatcggtgtctgcacccagaagcagcctatttatattgtgatggagttagtgcaaggcggcgactttctaacattcctgaggactgagggggctagactccgagtcaaaacactcctccagatggtcggggacgccgccgcaggtatggaatacttggagtcaaagtgctgcattcaccgtgatctggccgcccggaattgcctggtgacagaaaaaaatgttctgaagatcagcgacttcggcatgtcaagggaagaggcggacggggtgtatgccgcttctggcggcctgagacaggtccccgttaaatggacagccccggaagccttgaactatgggcgctattcttcagagtcggatgtctggagtttcggaatcctgttgtgggagaccttctctttgggcgcaagtccatacccaaacctgtcgaatcaacagacacgggaatttgtggagaagggagggagactcccatgtcccgaactgtgtccagacgctgtgttcagactgatggagcagtgttgggcttatgagcccggtcagcgcccttccttttccacaatctatcaagagttgcaatccatccgaaaacgccacaggtag

SEQ ID NO: 123018 - DNA, 1638 bp, Artificial Sequence
  derived and/or modified sequence
atgggcttcagcagcgagctgtgcagcccccagggccacggcgtgctccagcaaatgcaagaagcagagctgcgtcttctggaaggcatgcgcaaatggatggctcagcgagttaaaagcgatagggaatatgcggggctcttgcaccatatgtctctgcaggacagtggcggacaatctagggcaattagtcctgatagcccgatctcgcaatcatgggcagaaataaccagtcagacagaaggtctatccagactcctcaggcagcatgctgaggatctgaactctggaccacttagcaaactgtcgcttctgattcgggagaggcagcaacttaggaagacttactccgagcagtggcaacagctgcaacaggagctcactaagacccatagccaggacatcgaaaaactcaagtcacaatatcgagcccttgcaagggacagtgcccaggccaaacgcaaataccaggaggccagtaaggacaaagaccgcgataaggcgaaagataagtacgtccgtagcctgtggaagcttttcgcacaccataataggtatgttcttggggtaagggctgcccagctgcaccatcaacaccatcaccagctcctattgccgggactactccgctccttgcaggacttgcatgaggaaatggcgtgtatccttaaggaaattctccaggaatatctggaaataagctctctagttcaggacgaggtggtcgctattcacagagaaatggctgccgccgccgcccgcatccagcccgaggccgagtaccagggctttttacggcagtacggcagtgcccctgatgtacccccttgtgtgacgttcgacgaatctctgcttgaggagggcgagccccttgaacctggtgaattgcaacttaacgaacttactgttgagtcagtgcaacatactctgacctccgtgaccgatgagctcgccgtggctaccgaaatggtgttcaggcgacaggagatggtcacacagctacaacaggagcttagaaatgaggaggaaaacactcatccgcgagagcgcgtgcagctgctgggaaaaaggcaggtgttacaagaagcactgcagggtctccaagtcgcgctgtgttcccaggccaagctccaagcccagcaggagctgctccagaccaagttggagcatctgggaccgggcgaacccccccccgtgctgcttctgcaagatgacaggcacagcacctcctccagcgagcaagaaagggaaggcggccgcacacctactctagagatactcaagtcccacatcagcggtatcttccgaccaaaattctccttgcccccaccactgcagttaataccagaggtgcaaaaacctttgcacgagcagctgtggtatcatggagccatcccacgggcagaagtggccgagctgctggtccatagcggcgattttctggtgcgcgaatcccaaggaaagcaggaatacgtgcttagcgtgctgtgggacgggttaccgaggcacttcattatccaagcccatgcgcctagtgaatggcgtcttttgacacccgggccactaccctgccggacatgcaccgattggaagggcaaggctttcctggcttttctgtgctcgagcaccacttactag

SEQ ID NO: 123019 - DNA, 2469 bp, Artificial Sequence
  derived and/or modified sequence
atgggattttcgagcgaactgtgcagccctcagggtcacggggtgctccagcagatgcaggaagccgaactgaggttgctagaagggatgcggaaatggatggcccaacgagtcaagtccgatcgcgagtacgcaggcctgctgcaccatatgtccctgcaagactcaggtggccaaagcagggccatatcgccagatagccctatcagtcagagctgggcggagatcacctcacagacagaggggttgtcgaggctactccggcagcacgccgaggatctcaattctggacccctgagtaagctgagcctgctgattcgagaaagacagcagctgcggaagacctattctgagcaatggcagcagctgcagcaagaattaacaaagactcattcacaggacattgagaaactgaaatcgcagtacagggcacttgcgcgtgactccgcgcaggcaaagcggaaatatcaggaggcgtctaaggacaaagaccgcgataaagccaaggataaatacgtccgttcgctctggaagctatttgcccaccataaccgctacgtgcttggagtgcgcgcagcacaattgcatcaccagcatcaccatcagctcttactgccagggctgctacgttccctccaggatcttcatgaggagatggcatgcatattgaaagaaattctacaggagtacctggagattagttctctcgtgcaggacgaggtcgtcgctatacatagagagatggctgccgcagcagccaggattcagcccgaagctgaataccaggggttcctgcgtcaatacggctccgcacctgatgtcccaccttgtgtcacgtttgatgagtcccttcttgaggagggagaaccgttagaacctggagagttacagctcaacgaacttactgtggaatcagttcaacataccttgacctcagtgaccgatgaactggccgtggcaaccgaaatggtattcagacgtcaagaaatggtgactcagctccaacaagagctgcgcaacgaggaggagaatacccaccccagagaaagagttcagctgctggggaaacggcaggtcctgcaggaggcactgcagggactccaagtagctttatgctcccaggctaagctacaggcccagcaagaactgctgcagactaaactggagcacctggggcctggggagcccccacctgtattgttattacaggacgacagacacagtacgagttctagcgagcaagaacgggaaggaggacgcacgcccacactggagatcctcaagtcgcacatttctgggatcttccggcctaagttcagcctgccgccaccactgcaactgattccagaggtgcagaagcctctccatgagcagctctggtatcacggcgcaattccgagggcagaagtggccgagctgcttgtgcacagcggtgactttttggtgcgcgaatcgcagggcaaacaggaatatgtgttatcagtgctgtgggacggcctgcctagacacttcattattcagtcactggacaatctctaccggttggaaggcgaggggttccctagcatcccactcctcatcgaccatctgctaagtacccagcaacccctgactaaaaagtctggcgtagtgctacaccgggctgtgcctaaagataagtgggtgctaaaccatgaggatcttgtattaggggaacagatagggaggggcaacttcggcgaggtttttagcggtagattgcgtgccgataataccctcgtggctgtgaagtcatgccgcgagactctgccccctgacctgaaggcgaaattcctacaggaggcccgaatattgaagcagtatagccatccaaacatcgtccgcctcatcggcgtatgcacgcaaaagcagcctatatacatagttatggagttagtccaaggcggagactttctaacttttcttcggacggagggggcacgcctgcgagtgaagactctactccaaatggtgggggatgccgctgcgggaatggagtatttggagagcaagtgctgtattcaccgggacctggctgctagaaattgcctggttactgagaagaacgtgttgaagatttctgattttgggatgtctagagaagaggccgacggggtgtacgccgcaagtggcggattgaggcaggtaccagtaaaatggaccgccccagaggccctcaattacggtcgctatagctcggagtccgacgtgtggagttttggaatccttctgtgggagactttctccctcggcgcatcaccctaccccaatctgtctaatcaacagactcgcgagtttgtggaaaaaggcggaaggctaccctgccctgagctgtgcccagatgcagtgtttcgactgatggagcaatgttgggcttatgaacctgggcagcgcccttcatttagtaccatttatcaagaattgcagtccatacggaagcgtcaccggtag

SEQ ID NO: 123020 - DNA, 1638 bp, Artificial Sequence
  derived and/or modified sequence
atgggtttttcctccgaactctgctccccacaggggcatggcgtgctgcagcaaatgcaggaggccgaactccgcctactggaagggatgaggaaatggatggcacagcgcgtgaagtcagatagggagtatgccggattactccatcatatgtccctacaagactctggaggccagtcgcgcgctatcagccccgacagccctatcagtcaaagctgggccgagatcacctctcagactgagggcctgagcaggcttcttcgccaacacgcagaggacttgaactcaggacccctctccaaactcagtctgttgatccgggagcggcagcaactgcgcaagacgtattcagagcagtggcaacagttgcagcaggagctaacaaagacccacagccaggacatagagaagctgaagtctcagtaccgggcactggctcgggactccgctcaggctaagagaaaatatcaagaggcttccaaagataaagacagggacaaagctaaagacaagtacgtgcggtctctttggaaattgtttgcgcatcataaccgctatgtactaggggtaagggccgctcaactgcatcatcagcatcatcatcagctgctgctccccggtctgctgagatccctgcaggacctccacgaagaaatggcctgtatcctgaaagagattctgcaggagtaccttgagatttcaagtctggtccaagatgaggtggtagccattcaccgagaaatggcggcagccgctgccagaatccagccagaagcagagtatcaaggcttcctacggcaatacggctctgctcctgacgtgcctccttgcgtgaccttcgatgagagtcttctggaggaaggtgaacccctcgagcctggggagctgcaacttaatgaactgacagtcgaaagcgtgcagcacacgcttaccagcgtaacagatgagttggccgtagctaccgaaatggtattcaggagacaggagatggtgacacagctgcagcaggaactgcgtaacgaggaagagaacacccatcccagagagagagtgcaactgctggggaagagacaggttctccaagaagctctgcagggactacaagtagctttgtgttcacaggcaaagttgcaggcccagcaagagctgctccagacaaagctggagcacttggggccaggagaacctccccctgtactgctgctccaggatgaccggcattccaccagctcgtcagaacaggaacgcgaagggggaaggacccccacactagaaatactcaaatctcacatcagtggcatttttagacctaagttttctctaccacctcctctgcaactgattcctgaagttcagaagccactgcatgaacagctttggtaccatggcgcaatacctcgcgcagaggtggcggaacttctcgtgcactccggtgattttctggtcagggagagccaaggcaaacaggaatacgtcctgtccgtgctatgggacgggctgcccaggcactttattattcaggcccacgccccttctgaatggagattgttgactcccggtccgcttccctgccgaacatgcaccgattggaaaggcaaagcctttctcgctttcctgtgctcctccacaacatattag

SEQ ID NO: 123021 - protein, 288 aa, Artificial Sequence
  derived and/or modified sequence
LVGVGGGDVEDVTPRPGGCQISGRGARGCNGIPGAAAWEAALPRRRPRRHPSVNPRSRAAGSPRTRGRRTEERPSGSRLGDRGRGRALPGGRLGGRGRGRAPERVGGRGRGRGTAAPRAAPAARGSRPGPAGTMAAGSITTLPALPEDGGSGAFPPGHFKDPKRLYCKNGGFFLRIHPDGRVDGVREKSDPHIKLQLQAEERGVVSIKGVCANRYLAMKEDGRLLASKCVTDECFFFERLESNNYNTYRSRKYTSWYVALKRTGQYKLGSKTGPGQKAILFLPMSAKS

SEQ ID NO: 123022 - protein, 288 aa, Artificial Sequence
  derived and/or modified sequence
MVGVGGGDVEDVTPRPGGCQISGRGARGCNGIPGAAAWEAALPRRRPRRHPSVNPRSRAAGSPRTRGRRTEERPSGSRLGDRGRGRALPGGRLGGRGRGRAPERVGGRGRGRGTAAPRAAPAARGSRPGPAGTMAAGSITTLPALPEDGGSGAFPPGHFKDPKRLYCKNGGFFLRIHPDGRVDGVREKSDPHIKLQLQAEERGVVSIKGVCANRYLAMKEDGRLLASKCVTDECFFFERLESNNYNTYRSRKYTSWYVALKRTGQYKLGSKTGPGQKAILFLPMSAKS

SEQ ID NO: 123023 - DNA, 6774 bp, Artificial Sequence
  derived and/or modified sequence
cggccccagaaaacccgagcgagtagggggcggcgcgcaggagggaggagaactgggggcgcgggaggctggtgggtgtggggggtggagatgtagaagatgtgacgccgcggcccggcgggtgccagattagcggacgcggtgcccgcggttgcaacgggatcccgggcgctgcagcttgggaggcggctctccccaggcggcgtccgcggagacacccatccgtgaaccccaggtcccgggccgccggctcgccgcgcaccaggggccggcggacagaagagcggccgagcggctcgaggctgggggaccgcgggcgcggccgcgcgctgccgggcgggaggctggggggccggggccggggccgtgccccggagcgggtcggaggccggggccggggccgggggacggcggctccccgcgcggctccagcggctcggggatcccggccgggccccgcagggaccatggcagccgggagcatcaccacgctgcccgccttgcccgaggatggcggcagcggcgccttcccgcccggccacttcaaggaccccaagcggctgtactgcaaaaacgggggcttcttcctgcgcatccaccccgacggccgagttgacggggtccgggagaagagcgaccctcacatcaagctacaacttcaagcagaagagagaggagttgtgtctatcaaaggagtgtgtgctaaccgttacctggctatgaaggaagatggaagattactggcttctaaatgtgttacggatgagtgtttcttttttgaacgattggaatctaataactacaatacttaccggtcaaggaaatacaccagttggtatgtggcactgaaacgaactgggcagtataaacttggatccaaaacaggacctgggcagaaagctatactttttcttccaatgtctgctaagagctgattttaatggccacatctaatctcatttcacatgaaagaagaagtatattttagaaatttgttaatgagagtaaaagaaaataaatgtgtatagctcagtttggataattggtcaaacaattttttatccagtagtaaaatatgtaaccattgtcccagtaaagaaaaataacaaaagttgtaaaatgtatattctcccttttatattgcatctgctgttacccagtgaagcttacctagagcaatgatctttttcacgcatttgctttattcgaaaagaggcttttaaaatgtgcatgtttagaaacaaaatttcttcatggaaatcatatacattagaaaatcacagtcagatgtttaatcaatccaaaatgtccactatttcttatgtcattcgttagtctacatgtttctaaacatataaatgtgaatttaatcaattcctttcatagttttataattctctggcagttccttatgatagagtttataaaacagtcctgtgtaaactgctggaagttcttccacagtcaggtcaattttgtcaaacccttctctgtacccatacagcagcagcctagcaactctgctggtgatgggagttgtattttcagtcttcgccaggtcattgagatccatccactcacatcttaagcattcttcctggcaaaaatttatggtgaatgaatatggctttaggcggcagatgatatacatatctgacttcccaaaagctccaggatttgtgtgctgttgccgaatactcaggacggacctgaattctgattttataccagtctcttcaaaaacttctcgaaccgctgtgtctcctacgtaaaaaaagagatgtacaaatcaataataattacacttttagaaactgtatcatcaaagattttcagttaaagtagcattatgtaaaggctcaaaacattaccctaacaaagtaaagttttcaatacaaattctttgccttgtggatatcaagaaatcccaaaatattttcttaccactgtaaattcaagaagcttttgaaatgctgaatatttctttggctgctacttggaggcttatctacctgtacatttttggggtcagctctttttaacttcttgctgctctttttcccaaaaggtaaaaatatagattgaaaagttaaaacattttgcatggctgcagttcctttgtttcttgagataagattccaaagaacttagattcatttcttcaacaccgaaatgctggaggtgtttgatcagttttcaagaaacttggaatataaataattttataattcaacaaaggttttcacattttataaggttgatttttcaattaaatgcaaatttgtgtggcaggatttttattgccattaacatatttttgtggctgctttttctacacatccagatggtccctctaactgggctttctctaattttgtgatgttctgtcattgtctcccaaagtatttaggagaagccctttaaaaagctgccttcctctaccactttgctggaaagcttcacaattgtcacagacaaagatttttgttccaatactcgttttgcctctatttttcttgtttgtcaaatagtaaatgatatttgcccttgcagtaattctactggtgaaaaacatgcaaagaagaggaagtcacagaaacatgtctcaattcccatgtgctgtgactgtagactgtcttaccatagactgtcttacccatcccctggatatgctcttgttttttccctctaatagctatggaaagatgcatagaaagagtataatgttttaaaacataaggcattcgtctgccatttttcaattacatgctgacttcccttacaattgagatttgcccataggttaaacatggttagaaacaactgaaagcataaaagaaaaatctaggccgggtgcagtggctcatgcctatattccctgcactttgggaggccaaagcaggaggatcgcttgagcccaggagttcaagaccaacctggtgaaaccccgtctctacaaaaaaacacaaaaaatagccaggcatggtggcgtgtacatgtggtctcagatacttgggaggctgaggtgggagggttgatcacttgaggctgagaggtcaaggttgcagtgagccataatcgtgccactgcagtccagcctaggcaacagagtgagactttgtctcaaaaaaagagaaattttccttaataagaaaagtaatttttactctgatgtgcaatacatttgttattaaatttattatttaagatggtagcactagtcttaaattgtataaaatatcccctaacatgtttaaatgtccatttttattcattatgctttgaaaaataattatggggaaatacatgtttgttattaaatttattattaaagatagtagcactagtcttaaatttgatataacatctcctaacttgtttaaatgtccatttttattctttatgtttgaaaataaattatggggatcctatttagctcttagtaccactaatcaaaagttcggcatgtagctcatgatctatgctgtttctatgtcgtggaagcaccggatgggggtagtgagcaaatctgccctgctcagcagtcaccatagcagctgactgaaaatcagcactgcctgagtagttttgatcagtttaacttgaatcactaactgactgaaaattgaatgggcaaataagtgcttttgtctccagagtatgcgggagacccttccacctcaagatggatatttcttccccaaggatttcaagatgaattgaaatttttaatcaagatagtgtgctttattctgttgtattttttattattttaatatactgtaagccaaactgaaataacatttgctgttttataggtttgaagaacataggaaaaactaagaggttttgtttttatttttgctgatgaagagatatgtttaaatatgttgtattgttttgtttagttacaggacaataatgaaatggagtttatatttgttatttctattttgttatatttaataatagaattagattgaaataaaatataatgggaaataatctgcagaatgtgggttttcctggtgtttccctctgactctagtgcactgatgatctctgataaggctcagctgctttatagttctctggctaatgcagcagatactcttcctgccagtggtaatacgattttttaagaaggcagtttgtcaattttaatcttgtggatacctttatactcttagggtattattttatacaaaagccttgaggattgcattctattttctatatgaccctcttgatatttaaaaaacactatggataacaattcttcatttacctagtattatgaaagaatgaaggagttcaaacaaatgtgtttcccagttaactagggtttactgtttgagccaatataaatgtttaactgtttgtgatggcagtattcctaaagtacattgcatgttttcctaaatacagagtttaaataatttcagtaattcttagatgattcagcttcatcattaagaatatcttttgttttatgttgagttagaaatgccttcatatagacatagtctttcagacctctactgtcagttttcatttctagctgctttcagggttttatgaattttcaggcaaagctttaatttatactaagcttaggaagtatggctaatgccaacggcagtttttttcttcttaattccacatgactgaggcatatatgatctctgggtaggtgagttgttgtgacaaccacaagcactttttttttttttaaagaaaaaaaggtagtgaatttttaatcatctggactttaagaaggattctggagtatacttaggcctgaaattatatatatttggcttggaaatgtgtttttcttcaattacatctacaagtaagtacagctgaaattcagaggacccataagagttcacatgaaaaaaatcaatttatttgaaaaggcaagatgcaggagagaggaagccttgcaaacctgcagactgctttttgcccaatatagattgggtaaggctgcaaaacataagcttaattagctcacatgctctgctctcacgtggcaccagtggatagtgtgagagaattaggctgtagaacaaatggccttctctttcagcattcacaccactacaaaatcatcttttatatcaacagaagaataagcataaactaagcaaaaggtcaataagtacctgaaaccaagattggctagagatatatcttaatgcaatccattttctgatggattgttacgagttggctatataatgtatgtatggtattttgatttgtgtaaaagttttaaaaatcaagctttaagtacatggacatttttaaataaaatatttaaagacaatttagaaaattgccttaatatcattgttggctaaatagaataggggacatgcatattaaggaaaaggtcatggagaaataatattggtatcaaacaaatacattgatttgtcatgatacacattgaatttgatccaatagtttaaggaataggtaggaaaatttggtttctatttttcgatttcctgtaaatcagtgacataaataattcttagcttattttatatttccttgtcttaaatactgagctcagtaagttgtgttaggggattatttctcagttgagactttcttatatgacattttactatgttttgacttcctgactattaaaaataaatagtagatacaattttcataaagtgaagaattatataatcactgctttataactgactttattatatttatttcaaagttcatttaaaggctactattcatcctctgtgatggaatggtcaggaatttgttttctcatagtttaattccaacaacaatattagtcgtatccaaaataacctttaatgctaaactttactgatgtatatccaaagcttctcattttcagacagattaatccagaagcagtcataaacagaagaataggtggtatgttcctaatgatattatttctactaatggaataaactgtaatattagaaattatgctgctaattatatcagctctgaggtaatttctgaaatgttcagactcagtcggaacaaattggaaaatttaaatttttattcttagctataaagcaagaaagtaaacacattaatttcctcaacatttttaagccaattaaaaatataaaagatacacaccaatatcttcttcaggctctgacaggcctcctggaaacttccacatatttttcaactgcagtataaagtcagaaaataaagttaacataactttcactaacacacacatatgtagatttcacaaaatccacctataattggtcaaagtggttgagaatatattttttagtaattgcatgcaaaatttttctagcttccatcctttctccctcgtttcttctttttttgggggagctggtaactgatgaaatcttttcccaccttttctcttcaggaaatataagtggttttgtttggttaacgtgatacattctgtatgaatgaaacattggagggaaacatctactgaatttctgtaatttaaaatattttgctgctagttaactatgaacagatagaagaatcttacagatgctgctataaataagtagaaaatataaatttcatcactaaaatatgctattttaaaatctatttcctatattgtatttctaatcagatgtattactcttattatttctattgtatgtgttaatgattttatgtaaaaatgtaattgcttttcatgagtagtatgaataaaattgattagtttgtgttttcttgtctccc

SEQ ID NO: 123024 - DNA, 867 bp, Artificial Sequence
  derived and/or modified sequence
ctggtgggcgtgggcggcggcgacgtggaggacgtgacccccagacccggcggctgccagatcagcggcagaggcgccagaggctgcaacggcatccccggcgccgccgcctgggaggccgccctgcccagaagaagacccagaagacaccccagcgtgaaccccagaagcagagccgccggcagccccagaaccagaggcagaagaaccgaggagagacccagcggcagcagactgggcgacagaggcagaggcagagccctgcccggcggcagactgggcggcagaggcagaggcagagcccccgagagagtgggcggcagaggcagaggcagaggcaccgccgcccccagagccgcccccgccgccagaggcagcagacccggccccgccggcaccatggccgccggcagcatcaccaccctgcccgccctgcccgaggacggcggcagcggcgccttcccccccggccacttcaaggaccccaagagactgtactgcaagaacggcggcttcttcctgagaatccaccccgacggcagagtggacggcgtgagagagaagagcgacccccacatcaagctgcagctgcaggccgaggagagaggcgtggtgagcatcaagggcgtgtgcgccaacagatacctggccatgaaggaggacggcagactgctggccagcaagtgcgtgaccgacgagtgcttcttcttcgagagactggagagcaacaactacaacacctacagaagcagaaagtacaccagctggtacgtggccctgaagagaaccggccagtacaagctgggcagcaagaccggccccggccagaaggccatcctgttcctgcccatgagcgccaagagctag

SEQ ID NO: 123025 - DNA, 867 bp, Artificial Sequence
  derived and/or modified sequence
ctggttggtgttgggggcggtgacgttgaggatgttaccccccggcctggtgggtgtcaaatctcaggccggggcgcacgagggtgcaacggcattcctggagccgctgcttgggaggccgcattgccgaggaggcgaccaagaagacacccaagtgttaaccccagaagccgggccgctggaagtcctcgcaccaggggaagacgcacggaagagagaccatccggctcccggctgggggatcggggccgcggcagggcactgccgggcggccgcctgggaggccggggcagaggacgcgcccccgagcgagtcggcgggcgcggccgcggccggggcactgctgccccaagggcggcgccagctgcaagaggatcacgccccggacccgctggaacaatggccgcgggaagcatcaccaccttgcctgcattgcctgaagacggcgggtcaggtgcatttccccccggccacttcaaggatccgaagagattatactgcaaaaacggcggattctttctgaggatccaccctgatggtagagtggatggagtgagggagaaaagcgatcctcatatcaagctgcagttgcaggctgaagaaagaggtgttgtgtccattaaaggtgtatgtgcaaatcgctacctcgccatgaaagaggacgggcgcctactggctagcaaatgtgtgacagacgaatgtttcttcttcgaaagattggagtccaacaactacaacacataccggagccgaaaatatacctcttggtacgtggcactaaaacggacgggacagtataaattgggatcaaaaaccgggcctggccagaaggccatccttttcctgccaatgagtgccaaatcctag

SEQ ID NO: 123026 - DNA, 6775 bp, Artificial Sequence
  derived and/or modified sequence
cggccccagaaaacccgagcgagtagggggcggcgcgcaggagggaggagaactgggggcgcgggaggctggtgggtgtggggggtggagatgtagaagatgtgacgccgcggcccggcgggtgccagattagcggacgcggtgcccgcggttgcaacgggatcccgggcgctgcagcttgggaggcggctctccccaggcggcgtccgcggagacacccatccgtgaaccccaggtcccgggccgccggctcgccgcgcaccaggggccggcggacagaagagcggccgagcggctcgaggctgggggaccgcgggcgcggccgcgcgctgccgggcgggaggctggggggccggggccggggccgtgccccggagcgggtcggaggccggggccggggccgggggacggcggctccccgcgcggctccagcggctcggggatcccggccgggccccgcagggaccatggcagccgggagcatcaccacgctgcccgccttgcccgaggatggcggcagcggcgccttcccgcccggccacttcaaggaccccaagcggctgtactgcaaaaacgggggcttcttcctgcgcatccaccccgacggccgagttgacggggtccgggagaagagcgaccctcacatcaagctacaacttcaagcagaagagagaggagttgtgtctatcaaaggagtgtgtgctaaccgttacctggctatgaaggaagatggaagattactggcttctaaatgtgttacggatgagtgtttcttttttgaacgattggaatctaataactacaatacttaccggtcaaggaaatacaccagttggtatgtggcactgaaacgaactgggcagtataaacttggatccaaaacaggacctgggcagaaagctatactttttcttccaatgtctgctaagagctgattttaatggccacatctaatctcatttcacatgaaagaagaagtatattttagaaatttgttaatgagagtaaaagaaaataaatgtgtatagctcagtttggataattggtcaaacaattttttatccagtagtaaaatatgtaaccattgtcccagtaaagaaaaataacaaaagttgtaaaatgtatattctcccttttatattgcatctgctgttacccagtgaagcttacctagagcaatgatctttttcacgcatttgctttattcgaaaagaggcttttaaaatgtgcatgtttagaaacaaaatttcttcatggaaatcatatacattagaaaatcacagtcagatgtttaatcaatccaaaatgtccactatttcttatgtcattcgttagtctacatgtttctaaacatataaatgtgaatttaatcaattcctttcatagttttataattctctggcagttccttatgatagagtttataaaacagtcctgtgtaaactgctggaagttcttccacagtcaggtcaattttgtcaaacccttctctgtacccatacagcagcagcctagcaactctgctggtgatgggagttgtattttcagtcttcgccaggtcattgagatccatccactcacatcttaagcattcttcctggcaaaaatttatggtgaatgaatatggctttaggcggcagatgatatacatatctgacttcccaaaagctccaggatttgtgtgctgttgccgaatactcaggacggacctgaattctgattttataccagtctcttcaaaaacttctcgaaccgctgtgtctcctacgtaaaaaaagagatgtacaaatcaataataattacacttttagaaactgtatcatcaaagattttcagttaaagtagcattatgtaaaggctcaaaacattaccctaacaaagtaaagttttcaatacaaattctttgccttgtggatatcaagaaatcccaaaatattttcttaccactgtaaattcaagaagcttttgaaatgctgaatatttctttggctgctacttggaggcttatctacctgtacatttttggggtcagctctttttaacttcttgctgctctttttcccaaaaggtaaaaatatagattgaaaagttaaaacattttgcatggctgcagttcctttgtttcttgagataagattccaaagaacttagattcatttcttcaacaccgaaatgctggaggtgtttgatcagttttcaagaaacttggaatataaataattttataattcaacaaaggttttcacattttataaggttgatttttcaattaaatgcaaatttgtgtggcaggatttttattgccattaacatatttttgtggctgctttttctacacatccagatggtccctctaactgggctttctctaattttgtgatgttctgtcattgtctcccaaagtatttaggagaagccctttaaaaagctgccttcctctaccactttgctggaaagcttcacaattgtcacagacaaagatttttgttccaatactcgttttgcctctatttttcttgtttgtcaaatagtaaatgatatttgcccttgcagtaattctactggtgaaaaacatgcaaagaagaggaagtcacagaaacatgtctcaattcccatgtgctgtgactgtagactgtcttaccatagactgtcttacccatcccctggatatgctcttgttttttccctctaatagctatggaaagatgcatagaaagagtataatgttttaaaacataaggcatttgtctgccatttttcaattacatgctgacttcccttacaattgagatttgcccataggttaaacatggttagaaacaactgaaagcataaaagaaaaatctaggccgggtgcagtggctcatgcctatattccctgcactttgggaggccaaagcaggaggatcgcttgagcccaggagttcaagaccaacctggtgaaaccccgtctctacaaaaaaacacaaaaaatagccaggcatggtggcgtgtacatgtggtctcagatacttgggaggctgaggtgggagggttgatcacttgaggctgagaggtcaaggttgcagtgagccataatcgtgccactgcagtccagcctaggcaacagagtgagactttgtctcaaaaaaagagaaattttccttaataagaaaagtaatttttactctgatgtgcaatacatttgttattaaatttattatttaagatggtagcactagtcttaaattgtataaaatatcccctaacatgtttaaatgtccatttttattcattatgctttgaaaaataattatggggaaatacatgtttgttattaaatttattattaaagatagtagcactagtcttaaatttgatataacatctcctaacttgtttaaatgtccatttttattctttatgtttgaaaataaattatggggatcctatttagctcttagtaccactaatcaaaagttcggcatgtagctcatgatctatgctgtttctatgtcgtggaagcactggatgggggtagtgagcaaatctgccctgctcagcagtcaccatagcagctgactgaaaatcagcactgcctgagtagttttgatcagtttaacttgaatcactaactgactgaaaattgaatgggcaaataagtgcttttgtctccagagtatgcgggagacccttccacctcaagatggatatttcttccccaaggatttcaagatgaattgaaatttttaatcaagatagtgtgctttattctgttgtattttttattattttaatatactgtaagccaaactgaaataacatttgctgttttataggtttgaagaacataggaaaaactaagaggttttgtttttatttttgctgatgaagagatatgtttaaatatgttgtattgttttgtttagttacaggacaataatgaaatggagtttatatttgttatttctattttgttatatttaataatagaattagattgaaataaaatataatgggaaataatctgcagaatgtgggttttcctggtgtttccctctgactctagtgcactgatgatctctgataaggctcagctgctttatagttctctggctaatgcagcagatactcttcctgccagtggtaatacgattttttaagaaggcagtttgtcaattttaatcttgtggatacctttatactcttagggtattattttatacaaaagccttgaggattgcattctattttctatatgaccctcttgatatttaaaaaacactatggataacaattcttcatttacctagtattatgaaagaatgaaggagttcaaacaaatgtgtttcccagttaactagggtttactgtttgagccaatataaatgtttaactgtttgtgatggcagtattcctaaagtacattgcatgttttcctaaatacagagtttaaataatttcagtaattcttagatgattcagcttcatcattaagaatatcttttgttttatgttgagttagaaatgccttcatatagacatagtctttcagacctctactgtcagttttcatttctagctgctttcagggttttatgaattttcaggcaaagctttaatttacactaagcttaggaagtatggctaatgccaacggcagtttttttcttcttaattccacatgactgaggcatatatgatctctgggtaggtgagttgttgtgacaaccacaagcactttttttttttttaaagaaaaaaaggtagtgaatttttaatcatctggactttaagaaggattctggagtatacttaggcctgaaattatatatatttggcttggaaatgtgtttttcttcaattacatctacaagtaagtacagctgaaattcagaggacccataagagttcacatgaaaaaaatcaatttatttgaaaaggcaagatgcaggagagaggaagccttgcaaacctgcagactgctttttgcccaatatagattgggtaaggctgcaaaacataagcttaattagctcacatgctctgctctcacgtggcaccagtggatagtgtgagagaattaggctgtagaacaaatggccttctctttcagcattcacaccactacaaaatcatcttttatatcaacagaagaataagcataaactaagcaaaaggtcaataagtacctgaaaccaagattggctagagatatatcttaatgcaatccattttctgatggattgttacgagttggctatataatgtatgtatggtattttgatttgtgtaaaagttttaaaaatcaagctttaagtacatggacatttttaaataaaatatttaaagacaatttagaaaattgccttaatatcattgttggctaaatagaataggggacatgcatattaaggaaaaggtcatggagaaataatattggtatcaaacaaatacattgatttgtcatgatacacattgaatttgatccaatagtttaaggaataggtaggaaaatttggtttctatttttcgatttcctgtaaatcagtgacataaataattcttagcttattttatatttccttgtcttaaatactgagctcagtaagttgtgttaggggattatttctcagttgagactttcttatatgacattttactatgttttgactacctgactattaaaaataaatagtagatacaattttcataaagtgaagaattatataatcactgctttataactgactttattatatttatttcaaagttcatttaaaggctactattcatcctctgtgatggaatggtcaggaatttgttttctcatagtttaattccaacaacaatattagtcgtatccaaaataacctttaatgctaaactttactgatgtatatccaaagcttctcattttcagacagattaatccagaagcagtcataaacagaagaataggtggtatgttcctaatgatattatttctactaatggaataaactgtaatattagaaattatgctgctaattatatcagctctgaggtaatttctgaaatgttcagactcagtcggaacaaattggaaaatttaaatttttattcttagctataaagcaagaaagtaaacacattaatttcctcaacatttttaagccaattaaaaatataaaagatacacaccaatatcttcttcaggctctgacaggcctcctggaaacttccacatatttttcaactgcagtataaagtcagaaaataaagttaacataactttcactaacacacacatatgtagatttcacaaaatccacctataattggtcaaagtggttgagaatatattttttagtaattgcatgcaaaatttttctagcttccatcctttctccctcgtttcttctttttttgggggagctggtaactgatgaaatcttttcccaccttttctcttcaggaaatataagtggttttgtttggttaacgtgatacattctgtatgaatgaaacattggagggaaacatctactgaatttctgtaatttaaaatattttgctgctagttaactatgaacagatagaagaatcttacagatgctgctataaataagtagaaaatataaatttcatcactaaaatatgctattttaaaatctatttcctatattgtatttctaatcagatgtattactcttattatttctattgtatgtgttaatgattttatgtaaaaatgtaattgcttttcatgagtagtatgaataaaattgattagtttgtgttttcttgtctccca

SEQ ID NO: 123027 - DNA, 867 bp, Artificial Sequence
  derived and/or modified sequence
ctggtgggcgtgggcggcggagatgtggaggatgtgacccccaggcctgggggctgccagatcagcggccgcggggcccggggctgcaatggcatccctggagctgctgcctgggaggccgccctgcccaggagaagaccccggcggcaccccagcgtgaaccccaggagcagagctgctggcagccccaggacccggggccgcaggacagaggagcggcccagcggcagccggctgggggaccggggccggggccgggccctgcccggcggccgcctgggcggccggggccggggccgggcccctgagcgggtgggcggccggggccggggccggggcacagctgcccccagggctgccccagctgcccggggcagccggcccggccctgctggcaccatggccgccggcagcatcaccaccctgcctgccctgcctgaagatggcggcagcggggccttccccccaggccacttcaaggaccccaagaggctgtactgcaagaatggaggcttcttcctgcgcatccacccagatggccgggtggatggagtgcgggagaagagtgacccccacatcaagctgcagctgcaggccgaggagcggggcgtggtgtccatcaagggcgtgtgtgccaaccgctacctggccatgaaggaggatggccgcctgctggccagcaaatgtgtgacagatgagtgcttcttctttgagcggctggagagcaacaactacaacacctaccgcagcaggaagtacacctcctggtacgtggccctgaagaggacaggccagtacaagctgggcagcaagacaggccctggccagaaggccatcctcttcctgcccatgtctgccaagagctag

SEQ ID NO: 123028 - DNA, 867 bp, Artificial Sequence
  derived and/or modified sequence
ctggtgggcgtgggcggcggcgacgtggaggacgtgaccccccggcccggcggctgccagatttcaggtaggggagcaagggggtgtaacggcatccctggcgcagccgcatgggaagccgctctgccgagacgcaggcccaggagacacccatccgtcaatcctagaagtcgcgcagccggctccccacggacaaggggccgacgaacggaggagaggccctccgggtcaaggctcggcgatagagggagaggaagggccctaccaggcggcagattgggagggcggggcagagggagggctcccgaacgcgtgggcggtagaggcagaggaagggggacggccgcgcctcgcgccgcacctgcagcaaggggctctcggcctggaccagcagggactatggccgctggctctatcacaactctaccagctctcccggaggacggtggatcaggggcatttccacctggccattttaaggaccctaaaagactttattgtaagaacggcggtttctttctccggatccatcctgatggccgcgttgacggtgtgagagaaaagagtgaccctcatattaaactgcaattgcaagccgaggaacggggcgtggtcagcatcaaaggtgtgtgtgccaatcgctacttggctatgaaagaagatggtcggcttcttgcgagcaaatgcgtgaccgatgagtgtttttttttcgagaggctggaaagcaacaattacaacacgtatcggtcacgcaaatacacatcttggtatgtggcccttaaacgcacaggtcaatacaaattggggtctaagacaggccctggccagaaggcaattctttttttgcctatgtcagccaagtcctag

SEQ ID NO: 123029 - DNA, 867 bp, Artificial Sequence
  derived and/or modified sequence
ctggtgggagtcgggggaggcgatgtagaagatgtgactcctcgcccaggcggatgccagatatcaggtcgtggggctagaggctgcaacgggatccccggtgcagcagcctgggaggcagcactcccacgtagacggccaagaaggcaccctagcgtcaacccccgatccagggctgcgggatcaccacgaacaaggggcaggagaaccgaggagaggccgtccggtagtcgcctgggtgaccgcggacgcggaagggctctgcccggaggcagactggggggaagaggaagaggcagagcgccagagcgcgtagggggtcgaggcagagggcgtggcactgcagccccacgtgccgcacccgcagcaagaggctcccggcctggcccagcaggtacaatggcggctgggagcatcacgacgctcccagcgctgcccgaggacggcggttccggcgcttttccaccaggtcattttaaagaccctaagcgcctgtactgtaaaaacggaggttttttcttgcggattcaccctgatggacgcgtagatggcgttcgcgagaagagcgatcctcacattaagctgcagcttcaggcagaggaaaggggagtcgtttccattaagggcgtatgcgccaatcgataccttgccatgaaggaggatgggaggctgttggcgtcaaaatgcgtaacagacgaatgcttcttctttgaacgcctggaatccaataattacaacacctacaggtctcggaagtatactagctggtatgtggccttgaagcgcactgggcagtacaagctggggtctaaaacagggcctggtcagaaagcaatcctctttctgcctatgtctgctaaaagctag

SEQ ID NO: 123030 - protein, 194 aa, Artificial Sequence
  derived and/or modified sequence
MHKWILTWILPTLLYRSCFHIICLVGTISLACNDMTPEQMATNVNCSSPERHTRSYDYMEGGDIRVRRLFCRTQWYLRIDKRGKVKGTQEMKNNYNIMEIRTVAVGIVAIKGVESEFYLAMNKEGKLYAKKECNEDCNFKELILENHYNTYASAKWTHNGGEMFVALNQKGIPVRGKKTKKEQKTAHFLPMAIT

SEQ ID NO: 123031 - DNA, 585 bp, Artificial Sequence
  derived and/or modified sequence
atgcacaagtggatcctgacctggatcctgcccaccctgctgtacagaagctgcttccacatcatctgcctggtgggcaccatcagcctggcctgcaacgacatgacccccgagcagatggccaccaacgtgaactgcagcagccccgagagacacaccagaagctacgactacatggagggcggcgacatcagagtgagaagactgttctgcagaacccagtggtacctgagaatcgacaagagaggcaaggtgaagggcacccaggagatgaagaacaactacaacatcatggagatcagaaccgtggccgtgggcatcgtggccatcaagggcgtggagagcgagttctacctggccatgaacaaggagggcaagctgtacgccaagaaggagtgcaacgaggactgcaacttcaaggagctgatcctggagaaccactacaacacctacgccagcgccaagtggacccacaacggcggcgagatgttcgtggccctgaaccagaagggcatccccgtgagaggcaagaagaccaagaaggagcagaagaccgcccacttcctgcccatggccatcacctag

SEQ ID NO: 123032 - DNA, 585 bp, Artificial Sequence
  derived and/or modified sequence
atgcacaaatggattcttacttggatactgcctaccttgctgtacagatcatgtttccatatcatatgtctcgtaggaaccattagcctggcatgtaatgatatgactcctgagcagatggcaactaacgtgaactgttcatcacctgagcggcatacacgcagctacgattatatggaaggcggcgacatccgggtccgccgcctgttttgtcgtactcagtggtacctccgcatagacaagcgaggtaaggtcaagggcacccaggagatgaaaaacaattacaacattatggagataaggactgttgcagtgggcatcgttgcaatcaaaggagtggagagcgagttttatcttgctatgaacaaggaaggcaagctttatgcaaaaaaagaatgcaacgaggactgtaattttaaggagttgatcctggaaaatcactataacacctacgcgagtgcaaaatggacacataacggcggagaaatgttcgtggccctgaatcagaagggcatccccgtccgcggcaaaaaaactaaaaaagaacagaaaaccgcccactttctgcccatggcaattacatag

SEQ ID NO: 123033 - DNA, 585 bp, Artificial Sequence
  derived and/or modified sequence
atgcacaagtggatattgacctggatccttcccacccttctttatcggtcatgttttcatattatttgcttagtgggcacgattagtctcgcttgtaacgacatgacccccgagcaaatggctaccaacgttaactgctcatccccagagcgccatactagatcctacgactatatggagggtggggacattagagtgagacggcttttttgccggacccagtggtatttaaggattgacaagcgaggcaaagtgaaaggcacacaagagatgaagaacaactataatattatggagatccgaactgtcgccgtcggcatcgtggccataaaaggggtggagagcgagttttacctggctatgaataaagaagggaagctgtatgcgaagaaggaatgtaacgaggattgcaacttcaaagagttaatattggagaatcattataacacttatgccagtgccaaatggactcataacgggggagagatgttcgtcgctctgaaccaaaaggggatccccgtccggggtaaaaagacaaaaaaggagcagaaaacagcccatttcttacccatggccattacctag

SEQ ID NO: 123034 - DNA, 5467 bp, Artificial Sequence
  derived and/or modified sequence
tagctccctctcatgaccattgaatactatacaagcctccttttattctcgctgttgtattcaactaacagctcactggctaagttttaattgcttccaatgaggtcagcaaaggtatttatcgaaaagccctgaataaaaggctcacacacacacacaagcacacacgcgctcacacacagagagaaaatccttctgcctgttgatttatggaaacaattatgattctgctggagaacttttcagctgagaaatagtttgtagctacagtagaaaggctcaagttgcaccaggcagacaacagacatggaattcttatatatccagctgttagcaacaaaacaaaagtcaaatagcaaacagcgtcacagcaactgaacttactacgaactgtttttatgaggatttatcaacagagttatttaaggaggaatcctgtgttgttatcaggaactaaaaggataaggctaacaatttggaaagagcaactactctttcttaaatcaatctacaattcacagataggaagaggtcaatgacctaggagtaacaatcaactcaagattcattttcattatgttattcatgaacacccggagcactacactataatgcacaaatggatactgacatggatcctgccaactttgctctacagatcatgctttcacattatctgtctagtgggtactatatctttagcttgcaatgacatgactccagagcaaatggctacaaatgtgaactgttccagccctgagcgacacacaagaagttatgattacatggaaggaggggatataagagtgagaagactcttctgtcgaacacagtggtacctgaggatcgataaaagaggcaaagtaaaagggacccaagagatgaagaataattacaatatcatggaaatcaggacagtggcagttggaattgtggcaatcaaaggggtggaaagtgaattctatcttgcaatgaacaaggaaggaaaactctatgcaaagaaagaatgcaatgaagattgtaacttcaaagaactaattctggaaaaccattacaacacatatgcatcagctaaatggacacacaacggaggggaaatgtttgttgccttaaatcaaaaggggattcctgtaagaggaaaaaaaacgaagaaagaacaaaaaacagcccactttcttcctatggcaataacttaattgcatatggtatataaagaaccagttccagcagggagatttctttaagtggactgttttctttcttctcaaaattttctttccttttattttttagtaatcaagaaaggctggaaaactactgaaaaactgatcaagctggacttgtgcatttatgtttgttttaagacactgcattaaagaaagatttgaaaagtatacacaaaaatcagatttagtaactaaaggttgtaaaaaattgtaaaactggttgtacaatcatgatgttagtaacagtaatttttttcttaaattaatttacccttaagagtatgttagatttgattatctgataatgattatttaaatattcctatctgcttataaaatggctgctataataataataatacagatgttgttatataaggtatatcagacctacaggcttctggcaggatttgtcagataatcaagccacactaactatggaaaatgagcagcattttaaatgctttctagtgaaaaattataatctacttaaactctaatcagaaaaaaaattctcaaaaaaactattatgaaagtcaataaaatagataatttaacaaaagtacaggattagaacatgcttatacctataaataagaacaaaatttctaatgctgctcaagtggaaagggtattgctaaaaggatgtttccaaaaatcttgtatataagatagcaacagtgattgatgataatactgtacttcatcttacttgccacaaaataacattttataaatcctcaaagtaaaattgagaaatctttaagtttttttcaagtaacataatctatctttgtataattcatatttgggaatatggcttttaataatgttcttcccacaaataatcatgcttttttcctatggttacagcattaaactctattttaagttgtttttgaactttattgttttgttatttaagtttatgttatttataaaaaaaaaaccttaataagctgtatctgtttcatatgcttttaattttaaaggaataacaaaactgtctggctcaacggcaagtttccctcccttttctgactgacactaagtctagcacacagcacttgggccagcaaatcctggaaggcagacaaaaataagagcctgaagcaatgcttacaatagatgtctcacacagaacaatacaaatatgtaaaaaatctttcaccacatattcttgccaattaattggatcatataagtaaaatcattacaaatataagtatttacaggattttaaagttagaatatatttgaatgcatgggtagaaaatatcatattttaaaactatgtatatttaaatttagtaattttctaatctctagaaatctctgctgttcaaaaggtggcagcactgaaagttgttttcctgttagatggcaagagcacaatgcccaaaatagaagatgcagttaagaataaggggccctgaatgtcatgaaggcttgaggtcagcctacagataacaggattattacaaggatgaatttccacttcaaaagtctttcattggcagatcttggtagcactttatatgttcaccaatgggaggtcaatatttatctaatttaaaaggtatgctaaccactgtggttttaatttcaaaatatttgtcattcaagtccctttacataaatagtatttggtaatacatttatagatgagagttatatgaaaaggctaggtcaacaaaaacaatagattcatttaattttcctgtggttgacctatacgaccaggatgtagaaaactagaaagaactgcccttcctcagatatactcttgggagagagcatgaatggtattctgaactatcacctgattcaaggactttgctagctaggttttgaggtcaggcttcagtaactgtagtcttgtgagcatattgagggcagaggaggacttagtttttcatatgtgtttccttagtgcctagcagactatctgttcataatcagttttcagtgtgaattcactgaatgtttatagacaaaagaaaatacacactaaaactaatcttcattttaaaagggtaaaacatgactatacagaaatttaaatagaaatagtgtatatacatataaaatacaagctatgttaggaccaaatgctctttgtctatggagttatacttccatcaaattacatagcaatgctgaattaggcaaaaccaacatttagtggtaaatccattcctggtagtataagtcacctaaaaaagacttctagaaatatgtactttaattatttgtttttctcctatttttaaatttattatgcaaattttagaaaataaaatttgctctagttacacacctttagaattctagaatattaaaactgtaaggggcctccatccctcttactcatttgtagtctaggaaattgagattttgatacacctaaggtcacgcagctgggtagatatacagctgtcacaagagtctagatcagttagcacatgctttctactcttcgattattagtattattagctaatggtctttggcatgtttttgttttttatttctgttgagatatagcctttacatttgtacacaaatgtgactatgtcttggcaatgcacttcatacacaatgactaatctatactgtgatgatttgactcaaaaggagaaaagaaattatgtagttttcaattctgattcctattcaccttttgtttatgaatggaaagctttgtgcaaaatatacatataagcagagtaagccttttaaaaatgttctttgaaagataaaattaaatacatgagtttctaacaattagaaaagaaaaaattaaaacatgaaatgataacaaaagtaaacaaaagatactttcaaagcagtgaacaaaacattttgacataagccataatataaattataatataaaaaataaaaaccatagtataaattgtcagcctttgagttggctacaaattcaatttaatgacagaagagaagggatgctggaggtaaattcttagggtttctatctcatagagtttgctcttctggttctctagactgccaaagaacataaagatgtgcgaggggacctagctgtagtaaaagcaatcctataacaagaaaaactctaaaacagtgccccttacgattttctactgaaatttctctaatagtagaggtgtaaaataagaagttagagaataatgcaaagggggcccaccacagacggaacatttcttttctcttaagactcatgtgatttttgcatcttactccataatatatttgtggttgcgttaatatgacaatgtctgcaattaaacaccagtaagcaaaattgatacatcagaatgacttgcagggcttatcatgcagtttggtttacatccctactccactgccatttacttgagcgtgaatgagacacaaaagattatttgcctcccataatccaactttacacataaataacacaaggctaaagaaaaccagaactcaaattcaccacgcataggagtgataacaaaaatatttaacagtcagtatgggtgattactggccaatcagaatacatcactgatacatcgaaatggatgcaggccactatgactaacttgtgggtatcatttctatgatcaccctaaaacagagttgggaaaatatctattaactggtctctctggtttgaattctcaatatgtatcttaatatgaaatagctcattaaaacttcatgtgtaactatttcagcattgttgtcagctactctttattccacttctgtacagtatttattcaaccaagctgctgctttcaatgaaggtcacttgttccttcagggacacatatactcccacctatcctttaattttgaatggtttgtcaggaaaatttactttctcttgagttgaaaaacttgacaggaagcaagaaataatacagtcctagcctctttccaataacatctgatttctccattctcaaactacacttctcaaggaaccagatatttactctcatctgggaagatgcctcttatgttttccttttacttcctggttatcatgtggttgcattttccaagttcttatcattgaatttatgagagcctatcaaaatttattttctttcatttatattctaataattgaaatgtgagatgaaaataacatttcacttatgaaaaacccttctcttgatgaatccttccatgtgttagttatctattgctgtgtaacaaattaaaacttaatggcttgaaacaaa

SEQ ID NO: 123035 - DNA, 1123 bp, Artificial Sequence
  derived and/or modified sequence
acacacgcgctcacacacagagagaaaatccttctgcctgttgatttatggaaacaattatgattctgctggagaacttttcagctgagaaatagtttgtagctacagtagaaaggctcaagttgcaccaggcagacaacagacatggaattcttatatatccagctgttagcaacaaaacaaaagtcaaatagcaaacagcgtcacagcaactgaacttactacgaactgtttttatgaggatttatcaacagagttatttaaggaggaatcctgtgttgttatcaggaactaaaaggataaggctaacaatttggaaagagcaactactctttcttaaatcaatctacaattcacagataggaagaggtcaatgacctaggagtaacaatcaactcaagattcattttcattatgttattcatgaacacccggagcactacactataatgcacaaatggatactgacatggatcctgccaactttgctctacagatcatgctttcacattatctgtctagtgggtactatatctttagcttgcaatgacatgactccagagcaaatggctacaaatgtgaactgttccagccctgagcgacacacaagaagttatgattacatggaaggaggggatataagagtgagaagactcttctgtcgaacacagtggtacctgaggatcgataaaagaggcaaagtaaaagggacccaagagatgaagaataattacaatatcatggaaatcaggacagtggcagttggaattgtggcaatcaaaggggtggaaagtgaattctatcttgcaatgaacaaggaaggaaaactctatgcaaagaaagaatgcaatgaagattgtaacttcaaagaactaattctggaaaaccattacaacacatatgcatcagctaaatggacacacaacggaggggaaatgtttgttgccttaaatcaaaaggggattcctgtaagaggaaaaaaaacgaagaaagaacaaaaaacagcccactttcttcctatggcaataacttaattgcatatggtatataaagaaccagttccagcagggagatttctttaagtggacttttcttctctctctctctctctctctctctatat

SEQ ID NO: 123036 - DNA, 585 bp, Artificial Sequence
  derived and/or modified sequence
atgcacaagtggatcctgacctggatcctgcccaccctgctgtaccgcagctgcttccacatcatctgcctggtgggcaccatcagcctggcctgcaatgacatgaccccagagcagatggccaccaacgtgaactgcagcagccctgagcggcacaccaggagctatgactacatggagggcggggacatccgggtgagaagactcttctgcaggacccagtggtacctgagaattgacaagaggggcaaggtgaagggcacccaggagatgaagaacaactacaacatcatggagatcagaacagtggccgtgggcatcgtggccatcaagggcgtggagagcgagttctacctggccatgaacaaggagggcaagctgtatgccaagaaggagtgcaatgaagactgcaacttcaaggagctgatcctggagaaccactacaacacctacgccagcgccaagtggacccacaatggaggagagatgtttgtggccctgaaccagaagggcatccctgtgcggggcaagaagaccaagaaggagcagaagacagcccacttcctgcccatggccatcacctag

SEQ ID NO: 123037 - DNA, 585 bp, Artificial Sequence
  derived and/or modified sequence
atgcacaagtggatcctgacctggatcctgcccaccctgctgtacaggtcatgcttccacataatatgcttagtcggaaccatttctcttgcctgcaacgatatgacaccagaacagatggccactaacgttaactgtagcagtccagaaagacacacccggagttatgattatatggaaggaggtgatatcagagtacgccggctcttttgtcgaacccagtggtatctacggatcgacaaacggggcaaggtgaagggtacccaggaaatgaagaacaactacaacataatggaaattaggacggtggcggtaggcatcgtggcaatcaagggggtggagagtgaattttatcttgccatgaacaaggaaggtaaattgtacgccaaaaaggagtgtaacgaagactgcaactttaaagagctcatcctagaaaaccattataacacgtatgcctcagcgaaatggactcataacggcggcgagatgttcgttgctctgaaccagaaaggtattcccgtccggggaaagaaaaccaagaaggagcagaaaaccgctcactttctgccaatggctatcacatag

SEQ ID NO: 123038 - DNA, 585 bp, Artificial Sequence
  derived and/or modified sequence
atgcacaagtggatcctgacctggatcctgcccaccctgctgtaccgcagctgctttcatatcatctgcctagtggggactatctctttggcctgcaacgatatgacccccgagcaaatggctactaacgtcaactgttccagcccagaacgtcatactaggagctacgactacatggaagggggagacatccgggtcagaaggttattctgccggactcagtggtacctgaggatagataaacgggggaaggtcaaaggcactcaagaaatgaagaataactacaatatcatggagatcaggactgtggctgttggcatcgtagccatcaaaggggttgaatccgaattctacttggcgatgaacaaagaaggcaagctatacgcaaaaaaagagtgcaatgaagattgcaacttcaaggaactcattctcgaaaatcattacaacacatatgcgtctgcaaaatggacccacaacggcggggagatgtttgtggccctgaaccagaaaggaattccagtgaggggcaagaaaacgaagaaagaacagaaaaccgctcactttctccccatggcaataacatag

SEQ ID NO: 123039 - DNA, 585 bp, Artificial Sequence
  derived and/or modified sequence
atgcacaaatggattttgacgtggatattacccaccctcctttatcggagttgttttcatatcatctgtctggtcgggacaattagtctagcctgcaacgatatgacccctgagcagatggctaccaacgtgaactgctcatcgcctgagaggcatacacggtcctatgattacatggagggcggagatattagggtgcgtcggctgttttgtcggacacagtggtacctgcggattgataagcggggtaaggtaaaaggcacacaagagatgaagaacaactacaatattatggagattagaactgtagctgtgggcatcgtggctataaagggcgtggaatccgagttctatctggccatgaacaaagagggaaagttatatgccaagaaggaatgcaacgaggactgcaattttaaagagctaatcctcgagaatcattacaacacatacgcctcagccaagtggactcacaacggcggagagatgttcgtggccctgaatcagaaagggatccctgtgagggggaagaagacgaagaaagaacagaagactgctcactttttgccgatggccatcacctag

SEQ ID NO: 123040 - DNA, 585 bp, Artificial Sequence
  derived and/or modified sequence
atgcacaagtggatcctaacatggatcctccccacactgctttaccggtcttgctttcatatcatttgcctggtgggaactatcagtttggcctgtaatgacatgacccctgaacagatggctacaaatgttaattgttcaagccctgagcggcatactcgctcatacgactacatggaaggcggagatatacgtgtgcgcaggttgttttgcaggacccaatggtacttgaggattgacaagcgcggtaaggtcaaaggaacccaggagatgaagaataattacaacataatggagataaggacggtggccgttgggatcgtcgctatcaagggcgtcgaatccgaattttacttagcaatgaataaagaagggaagctgtatgcaaaaaaggaatgtaatgaggattgtaattttaaggagctgatcctggaaaaccactacaacacgtacgccagtgccaagtggacacacaatggaggtgagatgtttgtggcgctaaatcagaagggaatccctgtccgcggaaagaaaaccaagaaggagcagaagactgcccattttttaccaatggccattacctag

SEQ ID NO: 123041 - DNA, 585 bp, Artificial Sequence
  derived and/or modified sequence
atgcacaagtggatcctgacttggatccttcccactttgttatatcggagctgcttccacattatttgtctggtcggtaccatctcccttgcatgcaacgacatgacccctgaacagatggcaaccaacgtgaactgctctagccccgagagacataccagatcatatgattacatggaggggggcgatatccgcgtgcgacgcctgttttgcagaacccagtggtacctgagaatcgacaaacggggaaaagtaaaaggtactcaagagatgaagaataattacaatatcatggagatacgaacagtggcagtcggcatagtcgctataaagggagtggagtccgaattctatttagccatgaacaaggagggcaagttgtatgccaaaaaggagtgtaatgaagactgtaactttaaggagctaattctcgaaaaccactacaatacctacgctagcgcaaaatggactcataatggaggggaaatgttcgttgccttaaatcaaaaaggcattcctgtcaggggtaaaaaaacaaagaaggaacagaaaactgctcacttcctgcctatggcaataacttag

SEQ ID NO: 123042 - DNA, 585 bp, Artificial Sequence
  derived and/or modified sequence
atgcataaatggatcctcacttggattcttccgactctcctctatagatcttgcttccacattatctgtctagtggggacaatcagtcttgcctgcaacgacatgacccccgagcaaatggcaaccaacgtgaattgttcttcacctgaaaggcacacccgtagttacgactacatggagggaggagatataagagtacgccggctgttttgtagaactcagtggtatttgcgcattgataagagaggaaaggtgaagggaactcaggagatgaaaaataactataatattatggagatacggactgttgccgtgggaatcgtcgcgataaagggagtagagagcgaattttaccttgcaatgaataaagagggaaagctgtatgccaagaaggagtgtaacgaagactgtaattttaaggaacttattttggagaaccactacaacacatacgcctctgccaagtggacacataacgggggagaaatgtttgtggctcttaatcagaagggtatccctgtcagagggaagaaaacaaaaaaggaacagaaaacggcccacttcctcccgatggctattacttag

SEQ ID NO: 123043 - DNA, 585 bp, Artificial Sequence
  derived and/or modified sequence
atgcacaagtggatcctgacatggattctacccaccctactgtatcgaagttgctttcatattatttgtctcgtcggcacaatcagcctcgcctgtaacgatatgactcctgagcagatggccacaaatgttaattgtagctctcccgaaagacacacgcgatcctacgactacatggaggggggtgatattcgggtacgaagactcttttgcagaacacagtggtatttgcgtatcgacaaacggggaaaggtcaagggcacccaggaaatgaaaaataattacaatatcatggaaattcgaacagtggcagtcggcatagtcgctataaagggagtggagtccgaattctatttagccatgaacaaggagggcaagttgtatgccaaaaaggagtgtaatgaagactgtaactttaaggagctaattctcgaaaaccactacaatacctacgctagcgcaaaatggactcataatggaggggaaatgttcgttgccttaaatcaaaaaggcattcctgtcaggggtaaaaaaacaaagaaggaacagaaaactgctcacttcctgcctatggcaataacttag

SEQ ID NO: 123044 - DNA, 585 bp, Artificial Sequence
  derived and/or modified sequence
atgcataaatggatattaacttggattctgcctacccttctgtatagaagctgttttcacatcatctgcctcgttggcactatttctctggcttgtaacgatatgacacctgaacaaatggctaccaacgttaattgcagttcacctgaacgtcacacacgatcctacgattacatggagggcggagacatcagggtgagacgtctgttctgtagaacccagtggtacctgagaattgacaagcgcgggaaagtgaagggcacccaagaaatgaagaataattataacattatggagattaggactgtcgctgtgggaattgtggctatcaaaggggtggagagcgaattttatctggccatgaataaagaaggcaaactatacgcaaaaaaagagtgtaatgaggattgcaattttaaggagcttattctggagaatcattacaacacctacgcttccgcaaaatggacccacaacggaggggagatgttcgttgccttaaatcagaagggtatacctgttcgggggaaaaagacgaagaaagagcagaagacagctcatttcctgccaatggctataacttag

SEQ ID NO: 123045 - DNA, 582 bp, Artificial Sequence
  derived and/or modified sequence
atgcacaagtggatcctcacatggattctgccaacactgctctatcgatcttgtttccacatcatctgcttagtaggcacgatttctctggcctgtaatgatatgacccccgagcagatggcgacgaatgtgaactgttcttccccagaacgccacactcggagctatgattacatggaaggaggggatatacgagtccgcaggcttttctgtcggacccagtggtatctgcgtatcgacaaacggggcaaggttaagggaacccaggagatgaagaacaactataatataatggaaatccgaactgtggcggttggcattgtggccattaaaggtgtagaatctgaattttatctggctatgaacaaagaggggaaactgtatgcgaaaaaggaatgtaatgaagattgtaattttaaggagcttattctcgaaaaccactataatacttatgcaagcgctaagtggactcacaacggaggagagatgttcgtagcattaaatcagaagggcatacccgtgagggggaaaaagacaaagaaggaacagaagactgcacattttctccccatggctataaca

SEQ ID NO: 123046 - DNA, 582 bp, Artificial Sequence
  derived and/or modified sequence
atgcacaagtggatcttgacctggatcctgcccactctgctctaccgctcatgtttccacatcatatgccttgtgggtaccatctcactggcctgcaatgatatgactcccgaacaaatggctactaatgtcaactgcagctcgccagaaaggcataccaggagctacgactacatggaaggaggggatattagagtgcgccggctcttctgtagaacccagtggtaccttcgcattgataagcgtggaaaagtcaagggcacccaggagatgaaaaacaactacaatatcatggaaattcgcaccgtggctgtgggaatcgtcgcaatcaaaggagtggagtcagagttctacctcgcgatgaacaaggagggtaagctgtacgccaagaaggaatgcaatgaggactgtaacttcaaggagttgatcttggaaaatcactacaacacttatgcaagcgccaagtggactcataatggtggagagatgtttgtggcacttaaccagaaggggatccctgtgcggggaaagaaaactaagaaagaacaaaagactgctcacttcctgccaatggctattact

SEQ ID NO: 123047 - DNA, 582 bp, Artificial Sequence
  derived and/or modified sequence
atgcacaagtggatattgacttggattcttccaacacttctgtacagatcctgctttcacattatttgcctcgttggcaccatttctcttgcctgcaatgatatgacacccgagcagatggccactaacgtgaattgttcatctccagaacgacataccagatcttacgactacatggaaggaggcgacatccgtgttcgacgcttgttttgtcgtacacaatggtaccttagaatagataagcgtggcaaggtcaagggcacacaggaaatgaagaacaattacaatatcatggagatccgaaccgtggcggtcggaattgtggccatcaaaggagttgaaagcgaattttaccttgccatgaacaaagaggggaagctgtacgccaagaaggagtgtaatgaagactgcaacttcaaagaactcattctggaaaaccactataatacatacgcctctgcgaagtggactcataacggtggcgagatgtttgttgcattaaatcagaaaggcattccagtgaggggcaaaaaaaccaagaaggaacagaaaacagcgcactttctgcccatggctattacg

SEQ ID NO: 123048 - DNA, 582 bp, Artificial Sequence
  derived and/or modified sequence
atgcacaagtggatcctgacctggatccttccaaccctgctctacagatcgtgctttcatatcatctgcctggtcggaactatttccctggcctgcaacgacatgacgccagaacagatggcaactaatgtcaactgctcgtcgccggaacgtcacacccggtcatacgattacatggaaggaggtgatatccgcgtccggcgcctgttttgcagaactcagtggtacctccggatcgataagcggggaaaggtgaaaggcacgcaggaaatgaagaacaactacaacatcatggaaatccggactgtggcggtgggtatcgtggccatcaagggagtggagtccgaattctacctggcaatgaacaaggaaggcaagctgtacgccaagaaggaatgcaacgaagattgtaacttcaaggagctgatccttgagaaccactacaacacctacgcgtccgcaaaatggacccacaacgggggtgagatgttcgtcgccctgaatcagaagggaattccggtgcggggcaagaaaaccaagaaggaacaaaagactgctcacttcctcccgatggccatcacg

SEQ ID NO: 123049 - DNA, 582 bp, Artificial Sequence
  derived and/or modified sequence
atgcataaatggattttaacatggattcttcccacactcctgtatcggagttgcttccacattatctgcctcgtgggtacgataagccttgcatgcaacgacatgacacccgaacagatggctacaaacgtgaactgctccagtcccgagcgccatacacgtagctacgattatatggaaggaggcgatatacgcgttaggagattgttttgtagaacacagtggtacttacgcatcgacaagaggggaaaggtaaaaggaacacaggagatgaaaaacaattataacatcatggagattcggaccgtggcagtcggtatagtggctataaagggcgtggagtccgagttttatttggcaatgaataaagagggcaaattgtacgccaagaaggaatgcaacgaagactgtaattttaaggagctaattctcgagaatcattataatacatacgctagcgcaaagtggacacataacggaggagaaatgttcgtggcactaaaccagaaagggattcctgtccgcggcaaaaaaactaaaaaagaacagaagaccgcacattttctccccatggcaattact

SEQ ID NO: 123050 - DNA, 582 bp, Artificial Sequence
  derived and/or modified sequence
atgcacaagtggatcctgacatggatacttccgactctgctgtaccggagctgcttccacattatctgcctggttgggaccatctccttggcctgcaatgatatgacacctgaacaaatggccacgaatgttaactgcagttccccagagcgccatactcgcagttatgactacatggagggtggagatatccgggtgagaagactattttgccgcacccaatggtatctgcgcatcgacaagcgtggcaaggtgaaaggcactcaagaaatgaagaacaattacaacatcatggagattcgtactgttgccgtgggtatcgttgcgattaaaggcgtcgaatccgagttttatcttgcaatgaataaggaaggtaagctctatgccaagaaggagtgcaatgaagactgcaatttcaaagagctaatcctcgaaaaccattacaatacctacgctagcgccaaatggactcataatgggggggagatgttcgtagccctcaaccagaaaggtatccctgtaagaggaaagaaaaccaaaaaggaacagaaaactgcacactttctccccatggccatcacc

SEQ ID NO: 123051 - DNA, 582 bp, Artificial Sequence
  derived and/or modified sequence
atgcataagtggatacttacatggattctgcccacactcctgtaccgaagctgcttccatataatttgtctggttggaaccatttcactcgcctgcaatgacatgacacctgaacagatggctacaaatgtgaattgcagcagcccggaaaggcatacccgttcttacgactacatggaaggcggagacattagggtgcgtcggcttttctgccgaacgcaatggtacctccggatcgacaaaagagggaaagtaaaaggaacacaggaaatgaaaaacaactacaatattatggaaatccgcacagttgccgtcggcatagttgcgataaagggcgtggagagcgaattctacttggctatgaacaaagaggggaaactgtacgctaagaaagagtgtaacgaggattgcaattttaaggagttgatcctcgagaatcactacaacacatatgccagcgcaaagtggacacacaacggcggcgagatgtttgtcgctcttaaccaaaagggcattccggtccgcgggaaaaagaccaagaaggaacagaagaccgcccattttctccctatggccataacc

SEQ ID NO: 123052 - DNA, 582 bp, Artificial Sequence
  derived and/or modified sequence
atgcacaagtggatattaacgtggattttgccaacactgttatatcgttcctgttttcacataatttgcctcgtaggtacaatttctctagcctgcaatgacatgaccccagagcagatggctacaaatgtgaattgctcatctccagaaagacatacccgtagctatgactacatggagggcggcgatatacgcgtaaggcggctgttttgtcgcacacagtggtacctcagaatcgacaagaggggaaaggtgaagggaacacaggaaatgaaaaataactacaacataatggaaattcgcaccgtcgctgttggtatcgtggctataaaaggagtggaaagcgagttttacctcgcaatgaataaagaggggaagctgtatgctaaaaaggagtgcaacgaggattgcaacttcaaggaactgattctggagaaccattataacacgtatgcgagcgcgaaatggacacacaatggcggagagatgttcgtagccttgaaccagaagggcatcccagtgcgcggtaaaaaaacgaagaaagagcagaaaacagcgcacttcctgccaatggctattaca

SEQ ID NO: 123053 - DNA, 582 bp, Artificial Sequence
  derived and/or modified sequence
atgcacaaatggatcctgacatggattctgccaacccttttgtatcgcagttgtttccatattatctgtttggtgggaactatcagtctggcctgtaacgacatgacacctgagcagatggccacaaacgtgaactgttcctcgccagaacgtcacacacgttcctacgactacatggagggcggtgatattcgcgtgaggcgcctgttttgcagaactcagtggtaccttcggatcgacaaacgcggaaaggtgaaggggacccaggagatgaagaataactacaacattatggaaattcgcactgtcgccgtcgggattgtcgcaatcaaaggagtggagtccgaattttaccttgcgatgaacaaagaaggcaaattatatgcaaaaaaagagtgtaatgaagactgcaactttaaagagcttattctggaaaaccactacaacacctacgcatctgcaaaatggacccacaatggcggcgagatgtttgtggcactcaatcagaaaggaatacccgtgagaggcaaaaaaactaaaaaggagcaaaagacagcacacttcctgccaatggccattacc

SEQ ID NO: 123054 - DNA, 582 bp, Artificial Sequence
  derived and/or modified sequence
atgcataaatggatactcacatggatcttacccaccctcctgtataggtcctgctttcatatcatatgtctggttggcaccatatcattggcctgcaatgatatgacgcccgagcagatggccactaacgttaactgcagttcaccggagcggcatacacgatcctacgactacatggagggtggcgacattcgcgtcaggcgactcttctgcagaacccagtggtatctgcgcatagacaagcggggaaaggttaagggaacccaggagatgaaaaataactataatattatggaaataagaaccgttgcagtcggcattgtagcaattaaaggcgtggaaagcgaattttacttagccatgaataaggaggggaaactgtacgccaaaaaggagtgcaacgaggattgtaactttaaagagctgattctagagaatcactacaatacatacgcaagtgcgaagtggacgcataacggcggcgagatgtttgtggcgttgaaccagaaaggtatcccagtgcggggtaaaaagactaaaaaggaacagaaaacagcacacttccttcctatggcaattact

SEQ ID NO: 123055 - DNA, 582 bp, Artificial Sequence
  derived and/or modified sequence
atgcataagtggatcttgacttggatattgcccacactgttgtatagatcttgctttcacatcatttgtctggttgggactatttcactcgcttgtaatgatatgaccccggagcagatggcaactaatgtgaactgttcttcgccagagcgacacacgcggagctacgattacatggaaggtggagacattcgtgtgaggcgcctgttctgtcggacccaatggtatcttagaattgacaaacgcgggaaggtgaagggaacgcaggaaatgaagaataactacaacatcatggaaatccggacggttgccgtgggcatcgtagccattaagggagtcgagtcagaattttacctggccatgaacaaggaaggcaaactctatgctaaaaaggaatgtaacgaggactgtaactttaaagagctcatcctggagaaccattacaatacctatgccagcgctaagtggacccacaacgggggggagatgttcgtggcccttaatcagaaagggatcccagtgcgaggtaagaagaccaaaaaggaacagaagactgcccacttcctcccaatggcaatcacg

SEQ ID NO: 123056 - DNA, 582 bp, Artificial Sequence
  derived and/or modified sequence
atgcacaagtggatcctcacctggatactgccgacactgctgtatcggtcgtgctttcatataatctgcctggtgggcacgatttcgttagcatgcaacgatatgaccccagagcagatggccaccaacgtaaactgctcaagcccggagaggcacactaggtcttacgattacatggagggcggtgacatccgggttcgacgcttgttctgccgtacccaatggtacctaagaatcgataaacgcggcaaggtgaagggtacccaagaaatgaagaacaattataatatcatggagattcgtacagtggctgtgggaatcgtggccattaagggggtggaatccgaattttacctggcgatgaacaaagaaggtaaattgtacgccaagaaagaatgcaacgaggactgcaatttcaaggagttgattctggagaatcactacaatacgtatgcaagtgcgaagtggactcacaacggaggcgaaatgttcgtggcacttaaccagaagggcatacctgtgcgagggaagaagacaaaaaaggagcagaagacagcgcatttcctgccgatggccataacg

SEQ ID NO: 123057 - DNA, 582 bp, Artificial Sequence
  derived and/or modified sequence
atgcacaagtggatcctaacctggattttacccactctcttgtatagatcatgcttccatattatttgtctggtgggtaccatctcgctagcttgtaacgatatgacacccgagcaaatggctacgaacgtaaactgtagttctcccgaacgccacacacgctcctacgattatatggagggcggcgatattagggtgaggaggctcttctgccggactcagtggtatctgaggatcgacaaacgcggaaaggtaaagggaactcaggaaatgaaaaacaattacaatatcatggaaatccgaactgtggccgttggcattgtggccattaagggagtggagtccgagttctacctggctatgaacaaggaagggaaactgtatgccaagaaagagtgcaacgaagactgcaactttaaggagctcattcttgagaaccactataacacatacgcatcagccaaatggactcataatgggggcgaaatgttcgtagccctcaaccaaaaggggatccccgttagaggaaagaaaaccaaaaaggagcagaagacagctcacttcttgcccatggctattaca

SEQ ID NO: 123058 - DNA, 582 bp, Artificial Sequence
  derived and/or modified sequence
atgcacaagtggatccttacctggatactgcctactcttctgtacaggtcgtgctttcacatcatttgccttgtcggaaccattagcctcgcgtgtaatgacatgaccccagagcagatggcaactaacgtcaactgtagctcccccgaaagacatactaggtcctatgattacatggaaggaggagacattcgagtcagacgacttttctgtcgaacccaatggtacctcagaatcgataaaagaggcaaggtgaagggaacgcaagagatgaagaacaattacaacataatggagattcgcaccgtggcagtggggatcgtggccataaagggtgtcgaatcggaattctacttggcaatgaacaaggaaggaaagctgtacgcaaaaaaggaatgtaatgaagattgtaactttaaggagcttattcttgaaaaccattacaatacgtacgcctccgccaaatggacccataacggaggtgagatgttcgtggcactcaaccaaaagggaattccagtgagaggtaagaaaactaagaaagaacaaaagactgcccactttcttcctatggccattacc

SEQ ID NO: 123059 - DNA, 582 bp, Artificial Sequence
  derived and/or modified sequence
atgcataaatggatccttacttggatcttgcctaccctgctgtaccgatcgtgttttcatatcatctgcttggttggtaccatctccttggcatgtaacgatatgactccagaacaaatggccactaatgtgaattgcagctcacccgaacgccacactagatcctacgattacatggagggaggggatattagagtgcggcgtttgttttgcagaactcagtggtacctgcgaatcgataaacggggtaaggtgaagggaacccaagagatgaagaacaattacaacattatggaaattcggactgtcgcagtgggcattgtggccattaaaggggtcgaatcggaattctaccttgcaatgaacaaggagggcaaactgtacgccaagaaggaatgtaatgaagattgtaactttaaagaactcatactggaaaaccactacaatacctacgcatcggcgaaatggacgcacaatggtggagagatgttcgtggcgcttaatcaaaagggtattccagttcgaggaaagaaaactaagaaagaacaaaagaccgcacattttcttccaatggcaataacc

SEQ ID NO: 123060 - DNA, 582 bp, Artificial Sequence
  derived and/or modified sequence
atgcacaaatggatcctcacctggattcttcccactctcctatataggtcgtgttttcatatcatctgcctggtcggtaccatcagtctggcttgtaatgatatgactccagaacagatggctacaaatgtgaactgttcgtctccagagcgccacacacggtcctacgattacatggagggcggtgatatcagagtcagacggcttttctgcagaacgcagtggtaccttaggatagacaagcgcggaaaagttaaaggcacacaagagatgaaaaacaattataatataatggagattcggactgtcgccgtaggcatcgtagcaatcaagggcgtggaatcagagttctacctggccatgaataaggagggtaaactctatgctaagaaagagtgcaacgaagactgcaactttaaggagctgatccttgagaaccattacaacacctatgcttctgccaagtggacacataatgggggggagatgtttgtcgccctcaaccagaaaggcatacctgtcaggggaaaaaagactaaaaaggagcagaagacagcacacttcctgccaatggcaatcact

SEQ ID NO: 123061 - DNA, 582 bp, Artificial Sequence
  derived and/or modified sequence
atgcataagtggatactgacttggattcttcctaccctgttgtaccgatcgtgtttccatatcatctgccttgtcggtaccatctccctggcatgtaatgatatgactccagagcaaatggccaccaacgtgaactgttcgtctccagagagacataccagatcatacgattacatggaaggcggtgacattcgtgtcagaaggctgttttgcaggacccagtggtaccttagaatcgataagagggggaaggtgaagggcactcaagagatgaagaacaactacaatatcatggaaattagaactgtggcggtgggcatcgtcgcaattaagggcgtggaatcggagttttaccttgcaatgaataaggaaggaaagctctacgccaagaaggaatgcaacgaagattgcaactttaaagaactgattcttgaaaaccattacaatacgtacgcctcggccaaatggacccacaatgggggagaaatgtttgtggccctcaatcagaaaggcatccccgtccgggggaagaaaactaagaaggaacaaaaaacggcacactttcttccaatggcaatcact

SEQ ID NO: 123062 - DNA, 582 bp, Artificial Sequence
  derived and/or modified sequence
atgcataagtggatcctcacttggatattgccgaccctgctttatcggtcgtgttttcatataatctgcctcgtcggtacgatcagccttgcttgtaacgatatgacccctgaacagatggcgacaaacgtaaactgctcctcacccgaaaggcacacacggtcatatgattatatggaaggtggggacatccgggtcaggagactcttctgcagaacacagtggtacctgaggatcgacaagaggggtaaggtgaaagggactcaggagatgaagaataactacaatatcatggagatcagaacagtcgctgttggaattgtcgcaattaaaggagtggagtctgagttttatctggctatgaataaagaaggcaagctgtacgccaagaaagaatgcaatgaggattgcaactttaaggagctgatcctagaaaaccattataatacttatgcttccgcaaagtggactcataatggtggagagatgttcgtggctcttaaccagaaggggattccagtcaggggcaagaagaccaagaaggagcaaaagacagcacactttctgcctatggcaattact

SEQ ID NO: 123063 - DNA, 582 bp, Artificial Sequence
  derived and/or modified sequence
atgcataaatggatcctgacctggatactgcccaccttgttatacaggagctgctttcacatcatctgcctggtgggcacaatttcacttgcctgcaatgatatgacaccagaacagatggcaacaaacgtgaattgcagcagtcccgagcggcacacaagatcgtacgactatatggaaggtggagacattagagtacgtcgcctgttctgtaggactcaatggtatctaaggatcgataagcgcggtaaagtaaagggcactcaggaaatgaagaacaattataacatcatggagatccggaccgtcgctgtcggcatcgtggcaattaaaggtgttgagagcgaattctacctggcaatgaacaaggaagggaaactctatgcaaagaaggagtgcaacgaggactgcaacttcaaagagctaatcctcgaaaaccactataacacctacgcgagcgccaagtggacccacaacggaggagaaatgttcgtcgctctgaatcagaagggcattcccgttagaggcaagaaaaccaaaaaggagcagaaaactgcacattttctgccaatggctatcaca

SEQ ID NO: 123064 - DNA, 582 bp, Artificial Sequence
  derived and/or modified sequence
atgcacaaatggatcctgacctggattctgcctaccctgctctatagatcgtgctttcatatcatctgtctggtggggaccattagcctcgcctgcaacgacatgacccctgagcagatggccaccaacgttaactgctcgagccccgaacgccacactcgcagctacgactacatggagggaggagatatccgggtgagacggctcttctgccggacccagtggtacctcagaatcgacaagagaggaaaggtcaagggaactcaggagatgaagaacaactacaatatcatggagatccgcaccgtggccgtcggaatcgtggccatcaagggagtagaatccgagttctacctcgccatgaacaaggagggtaagctgtacgccaaaaaggaatgcaatgaagattgtaatttcaaggaattgattcttgaaaatcactacaacacctatgcatcggctaagtggactcacaacggcggagaaatgtttgtggcgctcaaccaaaagggaatcccggtgagaggtaagaaaactaagaaagaacaaaaaaccgctcatttcctgccaatggctatcacc

SEQ ID NO: 123065 - DNA, 582 bp, Artificial Sequence
  derived and/or modified sequence
atgcacaagtggatcctgacctggattctgcccaccctcctctacaggtcttgtttccatattatctgccttgttgggaccatctccctggcctgtaatgatatgaccccagaacaaatggctaccaacgttaactgcagttcccctgagaggcatacccggtcctacgactatatggagggaggtgatatcagggtccgccgcctcttctgcaggacccaatggtatctgagaatagataagagaggcaaggtgaaaggaacgcaggagatgaagaataattataatattatggaaattagaacagttgcagtcgggatcgtggctattaaaggcgttgaaagtgagttttaccttgcgatgaacaaggagggaaagctgtacgccaaaaaagagtgtaatgaagattgtaacttcaaagaactgattttggagaatcactataatacttatgcctccgcaaagtggacccacaatggaggggagatgttcgtggcccttaaccagaagggcatacccgtgagaggcaagaagacaaaaaaagagcagaagactgcccatttcctccccatggccatcact

SEQ ID NO: 123066 - DNA, 582 bp, Artificial Sequence
  derived and/or modified sequence
atgcataagtggattttaacttggattttaccaacacttttatatagatcatgttttcatataatatgtttggtaggaacaatttcattagcatgtaatgatatgacgccagaacaaatggctacaaatgttaattgtagttcaccagaaagacacacaagatcatatgattatatggaaggtggagatattagggttcgtagattgttttgtagaacacaatggtatttaagaattgataaaagaggaaaagttaaaggaacacaagaaatgaaaaacaattataatattatggaaattaggacagtggcagtaggaatcgttgctattaagggagttgaatcagaattttatcttgctatgaataaggaaggaaaactttacgcaaaaaaggaatgtaatgaagactgtaattttaaagaattaattttagaaaatcattataatacttatgctagtgcaaaatggacacacaatggaggagaaatgtttgttgctcttaatcaaaaaggaattccagttagaggtaaaaagacaaagaaagaacaaaaaactgcacatttccttcctatggctataaca

SEQ ID NO: 123067 - DNA, 582 bp, Artificial Sequence
  derived and/or modified sequence
atgcacaaatggattctcacgtggattctgcccactcttctgtatcgctcgtgtttccatatcatctgcttggttggaacgatcagtctcgcctgtaatgatatgaccccggaacagatggctactaatgttaattgttccagccccgagagacacactcgcagttatgactatatggagggtggtgacatacgagtgcggagactgttttgtaggactcagtggtaccttaggattgataaacgcgggaaggtaaagggtacccaggaaatgaagaacaattacaacatcatggagatcaggaccgtcgcagtcggcattgtcgcaattaagggggttgagtctgagttctatctggccatgaataaggaaggcaagctctatgccaagaaggagtgcaatgaagattgcaattttaaagaactaattttagagaatcattataatacctacgcctcagcaaagtggacacataacggcggagaaatgtttgtcgccctcaatcagaaagggatccccgtgcgcgggaagaaaaccaagaaagaacagaagacagctcactttttacccatggccatcaca

SEQ ID NO: 123068 - DNA, 582 bp, Artificial Sequence
  derived and/or modified sequence
atgcacaaatggatcctgacctggatcttgccaactctgctgtaccggagctgctttcacatcatctgtttagtgggcaccatcagtctcgcttgtaacgatatgacgccagaacagatggcgaccaatgttaattgtagcagcccagaacgccatacccgcagctatgactacatggagggtggcgacattagagttcgccggcttttttgtcgtacacagtggtatctgagaattgacaaacgaggtaaagtgaaaggtacccaagagatgaagaataattataacatcatggaaattcgcacggtcgctgtggggatcgttgcaattaagggcgtggagagtgagttttacctagcgatgaataaggagggtaaactatacgcaaagaaagaatgcaatgaagattgcaactttaaggagctgatcctggagaaccactacaatacttacgcctccgctaagtggacgcataatggtggcgaaatgttcgtcgccctgaaccaaaagggtatccctgtgcgtggtaagaagaccaagaaggaacagaagaccgctcatttcttgccaatggccattacg

SEQ ID NO: 123069 - DNA, 582 bp, Artificial Sequence
  derived and/or modified sequence
atgcataaatggatcttgacctggattctgcctaccctgctgtacaggtcctgttttcatatcatatgcctcgtcggcactatttcactggcatgcaacgacatgacccccgaacaaatggccactaatgttaactgttccagtccagaaagacatacgcgctcgtacgattacatggagggtggagacatcagagtgcgtagactcttttgtaggactcaatggtatctgcgtatcgataagcggggaaaagtcaaggggactcaagagatgaagaataactacaacattatggaaattcggactgtggctgtcgggatcgtggccataaaaggcgttgaaagcgaattctacttggccatgaacaaggaaggcaaactttacgcaaagaaggaatgtaacgaagattgcaacttcaaggaactgattcttgagaatcattacaacacctacgcgtcggcaaagtggacccacaatgggggagagatgtttgtagcactcaaccagaagggtataccagtcagagggaagaaaactaagaaggagcagaaaacggcacacttccttcctatggctatcacc

SEQ ID NO: 123070 - DNA, 582 bp, Artificial Sequence
  derived and/or modified sequence
atgcacaagtggatcttgacttggatcttacccaccctcttatatcgatcatgtttccatatcatttgtttggtaggtaccatctctttagcctgcaacgatatgactccggaacaaatggcaactaatgttaattgtagttctccagaacgccatactcgatcatacgactatatggaaggaggagacattcgtgtccgtcgattgttctgcaggactcaatggtacctcagaattgataaacgtggcaaagtcaaaggaacccaagaaatgaaaaataattacaatattatggaaatccgtaccgttgccgtcggtatagtggcaatcaagggcgtcgagtcggagttctacttggcaatgaacaaagagggaaaactttacgctaagaaggaatgtaacgaggattgcaattttaaagagttgattctcgagaatcattataacacatacgccagtgctaagtggacacacaatggaggggagatgttcgtagctcttaatcaaaaagggatccctgtgagaggtaagaagaccaaaaaggagcagaaaacagctcacttcctgccaatggctataacg

SEQ ID NO: 123071 - DNA, 582 bp, Artificial Sequence
  derived and/or modified sequence
atgcacaagtggatcctcacttggatcctgccgactctcctgtaccgctcttgcttccatatcatttgcctcgtgggcactatctcactggcttgcaatgacatgactccagaacagatggcaaccaacgtgaattgttcctcgccagagcggcacacgcgaagctacgactacatggaaggcggagacatccgggtgagacgcctgttctgcaggacccaatggtacttgcgcatcgataaaagaggaaaagtgaaaggcacgcaggagatgaagaacaactacaatatcatggagattcggactgtcgcagtgggtatcgtggccatcaagggtgtggagtcagagttctacctggcaatgaataaggaaggaaaactgtacgccaagaaggagtgcaatgaggattgtaacttcaaagaactgatcttggagaaccactataacacttacgcgtcagcaaagtggactcacaatgggggtgagatgttcgtggccctcaaccagaagggcatcccggtgcggggaaagaaaactaagaaggagcaaaaaaccgcacactttctgcctatggctattacc

SEQ ID NO: 123072 - DNA, 582 bp, Artificial Sequence
  derived and/or modified sequence
atgcataagtggatacttacttggatccttccgaccctgctttaccgtagctgtttccacataatctgtcttgtcggtaccatcagcctcgcttgtaacgatatgacccctgaacagatggcaactaacgtaaactgctcgagcccagaacgacataccagatcgtatgactacatggaaggtggcgatattcgggtgcggaggttgttttgcagaacgcagtggtacctcagaattgataagcgaggaaaggtgaagggaactcaagaaatgaaaaacaactacaacattatggaaatcagaaccgtggcggtgggaatcgtggctattaagggcgtggagtctgagttctacctggctatgaataaggaggggaaactctacgccaagaaagagtgtaatgaggactgtaactttaaggagctgattctggaaaaccattacaatacgtacgccagcgcgaaatggacccacaatggtggagaaatgtttgtcgccctgaaccaaaagggtatacctgtcagaggaaaaaagactaagaaagagcaaaaaactgcacattttctccccatggcaattacg

SEQ ID NO: 123073 - DNA, 582 bp, Artificial Sequence
  derived and/or modified sequence
atgcacaagtggatcctgacttggattctcccaaccttgttgtacaggtcttgtttccacatcatctgcttggtaggcaccatcagccttgcctgcaatgacatgaccccggagcagatggcgacgaacgtgaattgctccagcccggaacgccacacccggtcctacgactacatggagggcggagatatccgcgtgaggcgcctcttctgtagaacccagtggtacctgagaattgataagcgcggaaaggtcaaaggaacgcaagagatgaagaacaactacaacatcatggaaattcgcaccgtggccgttggtatagtcgctatcaagggagtggaatcagagttctatctggcgatgaacaaagagggaaaactgtatgccaaaaaagaatgcaacgaggactgcaactttaaggagctgatcttggagaaccattacaatacttacgcatccgcgaagtggactcacaacggcggtgaaatgttcgtggcactgaatcaaaagggtatccccgtgcggggaaagaaaacgaaaaaggaacagaaaactgcgcatttcctcccgatggctatcact

SEQ ID NO: 123074 - DNA, 582 bp, Artificial Sequence
  derived and/or modified sequence
atgcacaagtggatcctcacttggattctcccaacactcctttaccgtagctgtttccatatcatttgcctcgtgggcaccatttccctcgcttgcaacgacatgacccccgagcagatggccacgaacgtgaactgctcgtcgcctgagcggcacacccgaagctacgactacatggagggaggcgatatccgtgtccgccgcctcttctgccggacgcaatggtacttgcgcattgacaaacgtggaaaggtcaagggcactcaggaaatgaagaataactacaacatcatggaaatccgcactgtggctgtcggcatcgtggcaataaagggcgtcgaatcggagttctacctcgcgatgaacaaagaaggtaagctgtacgctaagaaagagtgcaatgaggattgcaacttcaaggagttgattctggagaaccattataacacttatgcctctgccaagtggacgcacaatggcggcgaaatgttcgtggcccttaatcaaaagggtattcctgtcaggggcaagaagaccaaaaaggagcagaagacggcccacttccttcccatggctatcact

SEQ ID NO: 123075 - DNA, 582 bp, Artificial Sequence
  derived and/or modified sequence
atgcataagtggatcctaacctggatcctcccaacgttattgtatcggtcgtgctttcacatcatctgtttggtgggcaccatatcccttgcatgtaatgacatgacaccagagcagatggcgacaaacgtgaactgttcctctccagaacggcataccaggtcatacgattatatggagggaggagatatcagggtgcggcgtctgttctgtcggacacagtggtacctgaggattgataagcggggcaaggtgaagggcactcaggagatgaagaataactacaacattatggagataaggactgtggccgtgggaattgtggcgatcaagggtgtcgagtcggaattctatctggccatgaacaaggagggtaaactctatgccaagaaggagtgcaatgaggactgcaatttcaaggagttaatactggagaaccactataatacctatgcgagcgctaagtggacgcacaacggaggcgagatgtttgtcgccctgaatcagaaagggatccctgtgaggggaaagaagactaaaaaggaacaaaagaccgctcacttccttccaatggccatcacc

SEQ ID NO: 123076 - DNA, 582 bp, Artificial Sequence
  derived and/or modified sequence
atgcataaatggatactgacctggattcttccaactttgctctacaggtcgtgtttccacataatctgcctggtgggtactatcagtctcgcctgcaacgatatgacccccgaacaaatggccacgaacgtgaactgttcgtcccctgaaagacacacccggtcctacgactacatggagggaggagatattagagttaggcggctgttttgcaggactcagtggtacctgcgcattgataaacgaggtaaggtgaagggcactcaggagatgaagaacaattacaacatcatggaaatcaggacggtcgccgtgggaattgtggcaattaagggagtcgaatctgagttttatcttgctatgaacaaggagggcaaattgtacgcgaaaaaggaatgtaacgaggactgtaacttcaaggaactgatcctggaaaatcattacaacacctacgcatcagcaaagtggacccataatggcggtgaaatgtttgtagcacttaatcaaaagggaatcccagtccgcggcaagaaaaccaagaaagaacaaaagaccgcgcactttctcccgatggcgattacg

SEQ ID NO: 123077 - DNA, 582 bp, Artificial Sequence
  derived and/or modified sequence
atgcataagtggatcctcacctggattttgcccacactcctttaccgtagctgcttccatattatttgtctagtagggaccatctcccttgcgtgtaacgacatgacccctgagcagatggctactaatgttaactgttcttctcccgaacgccatacaaggagctacgactacatggagggaggtgatattagggtccggagattattctgtagaacacagtggtacctgcggattgataaaagaggaaaagtgaaggggacccaagaaatgaaaaataattataatatcatggagatccggactgtcgccgttgggatcgtcgcgattaagggggttgagagtgagttctatctcgccatgaataaggaagggaaactgtacgctaagaaggagtgtaacgaggactgcaattttaaggagctgatattggagaatcactacaatacctatgcctccgccaagtggactcataatggtggggagatgttcgtagctctcaatcagaaggggatccctgtgcgaggcaaaaagactaagaaggagcagaagacagcacattttctcccaatggctataact

SEQ ID NO: 123078 - DNA, 582 bp, Artificial Sequence
  derived and/or modified sequence
atgcataagtggatcctcacctggatcctgccgaccttgctgtaccgctcatgctttcacatcatttgtctcgtcgggaccatcagcttggcttgcaatgatatgactcctgaacagatggcgaccaacgtgaattgctcttcccctgaacggcatactcgctcatacgattacatggaaggaggagatattagagtccgccgcctgttctgtcggacccagtggtacctgagaatcgacaaacggggcaaggtgaagggaacgcaggagatgaagaacaactacaatatcatggagatcagaactgtggcggtggggattgtggccattaagggggtcgagtccgaattctacctcgctatgaataaagagggaaaactgtacgccaaaaaagaatgcaacgaggattgcaacttcaaggagctgatcttggaaaaccattacaatacctacgcttccgcaaagtggacgcataacggaggggaaatgtttgttgcattgaaccaaaagggcatcccggtgcgcgggaaaaagactaagaaagagcaaaagaccgcccactttcttccaatggccatcact

SEQ ID NO: 123079 - DNA, 582 bp, Artificial Sequence
  derived and/or modified sequence
atgcacaagtggattctgacgtggatcctgccaaccctgctgtatcgatcatgctttcacatcatatgcttggtggggaccatctcgttggcctgcaatgacatgaccccagagcaaatggccaccaatgtcaactgttcctcaccagagcgccatactcggtcctacgactacatggaaggaggagatatccgcgtgcggcgcctcttttgcagaactcagtggtacctcagaattgacaagagagggaaggtgaagggcacgcaggaaatgaagaacaactacaacatcatggaaatccggaccgtggccgtcggaatcgtggcaatcaagggtgtggaaagcgagttttacctggcgatgaataaagagggaaaattgtatgccaaaaaggagtgtaatgaggattgtaatttcaaggaactgatcctggaaaatcactacaacacctacgccagcgcgaaatggacccacaatggtggagagatgtttgtggccctgaaccagaaggggatccctgtccggggaaaaaagactaagaaggaacagaaaaccgcccatttcctgccgatggctatcact

SEQ ID NO: 123080 - DNA, 582 bp, Artificial Sequence
  derived and/or modified sequence
atgcacaaatggatactgacctggatacttcctaccctgctctataggagctgttttcatatcatctgtctggtcggcactatctctctcgcttgcaatgacatgacacctgaacaaatggccaccaacgttaactgcagtagtccggagaggcatacaagatcttacgactatatggaaggcggagatattcgagtgaggagactgttctgtaggacccaatggtacctgcgcattgacaaacgcggtaaagtgaaaggcacacaagaaatgaagaataactataacatcatggaaatcagaaccgtggcagttggaatcgtggccatcaagggagtggagagtgagttttatcttgccatgaacaaagagggaaaactttacgctaagaaggaatgtaacgaagactgtaactttaaggaactgatactggagaatcattataatacatacgcatccgctaaatggacacacaacggcggcgaaatgtttgtcgcactcaatcagaaagggatccccgtgcgcggaaagaaaacaaaaaaggagcagaaaacagcccatttcctgcccatggctatcact

SEQ ID NO: 123081 - DNA, 582 bp, Artificial Sequence
  derived and/or modified sequence
atgcataaatggatcctcacatggattctgccgacactgctgtatcgttcttgcttccacataatttgcctcgtggggaccatatccctggcatgtaacgacatgaccccagagcaaatggcaaccaatgtgaattgctcatcccccgagagacacacccgctcctacgattatatggagggcggagatattcgcgttcggcggttgttctgcagaacccagtggtacttaaggatagacaaacggggaaaagttaaaggaacccaggagatgaagaataactacaacattatggagataagaacagtagcagtggggattgtggccatcaaaggcgtggagagcgaattctacctcgccatgaacaaggaaggcaagctttacgccaagaaggagtgtaacgaggactgcaattttaaagagctcattctggagaaccattacaatacttacgcttctgccaagtggacacataacgggggagaaatgtttgtagcgctcaaccagaagggaatccccgtccgcggcaagaaaaccaagaaagagcagaagaccgcccacttccttcccatggccattacc

SEQ ID NO: 123082 - DNA, 582 bp, Artificial Sequence
  derived and/or modified sequence
atgcacaagtggatcctaacttggattctacccaccctgctatacagaagttgtttccacatcatctgcctcgtgggcacaattagtctcgcctgtaatgatatgacaccagagcaaatggctaccaatgttaattgttcaagccctgagcgtcatacgcggtcatatgactacatggaaggtggcgacatccgggtgcggagactgttctgtcggacgcagtggtatctccggatcgacaaaagaggaaaagtgaaggggacacaggaaatgaaaaacaattataacattatggagataagaacagttgcagtgggcattgtcgccatcaaaggtgtggagtcagagttttatctcgcaatgaacaaggaggggaagctctatgccaagaaggagtgtaatgaggattgcaactttaaagaattgattctggagaatcactacaatacatacgccagcgccaaatggactcataacggtggcgaaatgtttgtcgctctgaatcaaaaaggaatccccgtgagagggaagaagacaaaaaaagagcagaagacggcgcatttcttacccatggctataact

SEQ ID NO: 123083 - DNA, 582 bp, Artificial Sequence
  derived and/or modified sequence
atgcataaatggatcctgacttggatactgccgacgctgttgtatagatcctgtttccatattatctgcctggtcggtaccattagtttggcctgcaacgacatgacacctgagcagatggctacgaatgtgaactgctccagccctgagcgccacacccgctcctacgattacatggagggcggtgacattagagtgcgccgcttgttctgtaggacacagtggtacctcagaatagacaaaagaggcaaagtcaagggaacccaagaaatgaagaataactacaacataatggagattagaaccgttgctgtgggtattgtggcgatcaagggcgtggaaagtgagttttacctggcaatgaacaaggagggcaaactgtacgcaaaaaaagagtgtaatgaagattgcaacttcaaggagcttatactggaaaaccattacaacacttatgcaagtgctaagtggacgcacaatggtggtgaaatgtttgtggctctgaatcagaagggaattcccgtcaggggcaagaagacgaagaaggagcagaagaccgctcattttctccctatggccataacc

SEQ ID NO: 123084 - DNA, 582 bp, Artificial Sequence
  derived and/or modified sequence
atgcataagtggattctcacttggatcctcccgactctcctgtatcgctcctgtttccacattatctgccttgtgggcactatctcccttgcctgtaacgacatgaccccagagcaaatggccaccaatgtcaattgctcgtcaccggaaaggcatacgcgctcctacgactacatggagggcggagatatccgcgttcggcgcctcttctgccgcactcaatggtacttgaggattgacaagaggggaaaagtgaagggaacccaggagatgaagaacaactacaatatcatggagatccggaccgtggcggtgggaatcgtcgccattaagggagtcgagtcagaattctaccttgctatgaacaaagaaggcaagttgtacgcgaagaaggaatgcaacgaagattgcaacttcaaagaactgatactggaaaaccactacaacacctacgcttcggcgaagtggacccacaatgggggcgagatgttcgtggctctcaatcagaagggaatcccagtgcgggggaagaaaaccaaaaaggagcaaaaaactgcacactttttgccgatggcaatcacc

SEQ ID NO: 123085 - DNA, 582 bp, Artificial Sequence
  derived and/or modified sequence
atgcataaatggatattaacgtggatattaccgacgctattatatcgttcgtgttttcatataatatgtttagtaggtacgatatcgctagcgtgtaatgatatgacgccggaacaaatggcgacgaatgttaattgttcgtcgccggaacgtcatacgcgatcgtatgattatatggaaggtggtgatatacgtgttcgacgattattttgtcgtacgcaatggtatttacgtatagataaacgaggtaaagttaaaggtacgcaagaaatgaaaaataattataatataatggaaatacgaacggtagcggttggtatagtagcgataaaaggtgtagaatcggaattttatttagcgatgaataaagaaggtaaattatatgcgaaaaaagaatgtaatgaagattgtaattttaaagaactaatattagaaaatcattataatacgtatgcgtcggcgaaatggacgcataatggtggtgaaatgtttgttgcgttaaatcaaaaaggtataccggtacgtggtaaaaaaacgaaaaaagaacaaaaaacggcgcattttctaccgatggcgataacg

SEQ ID NO: 123086 - DNA, 582 bp, Artificial Sequence
  derived and/or modified sequence
atgcacaaatggatcctaacctggatactccccaccctgctgtaccgttcttgctttcatattatttgtctggtgggcaccatatctctggcatgtaacgatatgacacctgaacagatggccactaacgtgaactgtagttcccccgaacggcacacccggtcttacgactacatggaaggcggtgatattcgggtcagaagactgttttgtcgcactcagtggtacctgcggattgataaaagaggaaaggtcaagggcacccaggaaatgaaaaacaactacaacataatggaaattcggaccgtcgcagtgggtatcgtggcaatcaaaggcgtggaatccgaattctatctggccatgaacaaagagggaaaactgtatgccaagaaggagtgcaacgaagattgcaacttcaaagaattaatcctcgagaatcattataacacttatgcctctgcaaaatggacccacaatggtggcgagatgttcgtcgctctgaatcagaaagggattccggttcggggaaagaaaactaaaaaggaacagaagactgcccatttcttacctatggctattacc

SEQ ID NO: 123087 - DNA, 582 bp, Artificial Sequence
  derived and/or modified sequence
atgcataagtggattctcacttggattctgcctaccctgctgtatcggtcgtgttttcacatcatatgtctggtgggcacgataagcctcgcctgtaacgatatgactccagaacagatggcaactaacgtgaactgcagctctcccgagcgccacacgagatcctacgactacatggaaggcggggacattagggttaggagacttttctgccgaacccagtggtatctcagaattgacaaaagagggaaggtgaaaggcactcaggagatgaagaacaattacaacatcatggagattcgtactgtcgccgtgggaatcgtcgcgattaagggtgtagagtcagaattctacctggcaatgaataaggaaggaaagctgtatgcaaaaaaggaatgtaatgaggattgcaatttcaaggaactgattcttgaaaaccattacaacacttatgcatcggctaagtggacccataacggtggagaaatgtttgtggcattgaatcaaaaaggcatcccagtgcgtggcaagaaaactaagaaggaacaaaagaccgcacactttcttccaatggcaattacc

SEQ ID NO: 123088 - DNA, 582 bp, Artificial Sequence
  derived and/or modified sequence
atgcataaatggattcttacctggatcttaccaacgctcctttatcgcagttgctttcacatcatctgcctagtgggaactattagcttggcttgtaacgatatgacccccgaacagatggctaccaacgtaaattgctcctcccctgagaggcacacccgatcctacgattatatggagggtggagatattcgggttaggcggctgttctgccgcacgcagtggtatcttcggattgacaagcgaggcaaagtgaaagggacacaggagatgaaaaataattataacatcatggagatccgaaccgtggcagtgggaattgttgcaataaagggggttgaatcggagttctacctagcgatgaataaggaggggaagttatacgcgaaaaaagagtgcaacgaggactgcaacttcaaagagctcatcctggagaatcactacaacacgtacgcctcagcaaaatggacgcacaatggaggagaaatgtttgtggccctcaaccagaagggcattcctgtgcggggcaaaaaaactaagaaggagcagaaaacagcccattttcttccaatggctatcaca

SEQ ID NO: 123089 - DNA, 582 bp, Artificial Sequence
  derived and/or modified sequence
atgcacaagtggatcctgacatggatcttgcccaccctgctctataggagttgttttcacattatctgtttggtaggcacgatctccctggcctgtaatgatatgacaccagagcagatggccacaaatgtcaattgcagcagtccagagaggcacacaagatcttatgactatatggaagggggcgatataagggtgcgacggctgttctgccggacacagtggtatctgaggattgacaagcgcggcaaagtcaagggaacccaagagatgaaaaataattacaatattatggaaatcaggacagtagccgtggggatagtggcgattaagggtgtggaaagtgagttctacttggctatgaacaaggagggcaaactgtacgctaagaaagagtgcaatgaggactgcaatttcaaagaactgatcctggagaaccactacaacacttatgcgagtgcaaaatggacacacaacggtggagagatgtttgtagctctgaatcagaagggcatcccagtgcgggggaagaagactaagaaggagcagaaaactgcacactttctgcccatggccatcacc

SEQ ID NO: 123090 - DNA, 582 bp, Artificial Sequence
  derived and/or modified sequence
atgcataaatggatcctgacttggatccttcccactctcctatatcggtcttgttttcatataatctgccttgtgggaacaatttctctcgcgtgtaatgatatgactcctgagcagatggctactaatgtcaattgctcctctcccgaacggcatacaaggtcgtacgactatatggaagggggggacatcagagtccggcgactgttctgtaggacacagtggtacctccgaatagataaacgggggaaggttaaaggaactcaggaaatgaaaaataattataacatcatggaaatacgaactgtggccgtgggaatcgtggctatcaaaggggttgaatctgaattctacctagccatgaataaagagggaaaattgtatgcaaaaaaagaatgcaacgaagattgcaatttcaaagagctaatcctagagaatcattataatacttatgcctcagcaaagtggacacataatggaggagaaatgttcgtcgcactgaatcagaaagggataccagtacgggggaaaaaaacaaaaaaagagcaaaaaacagcacactttctgcccatggcaataact

SEQ ID NO: 123091 - DNA, 582 bp, Artificial Sequence
  derived and/or modified sequence
atgcataaatggatcctcacctggattctcccgaccctgctttacaggtcctgttttcacattatctgcctggtgggaactatctccctggcatgcaatgatatgaccccggagcaaatggcaacgaacgtcaattgttcatcgcctgagaggcataccagatcgtacgactacatggaagggggcgatattcgcgtcagacgcttgttttgtcgcactcagtggtacctgcgcattgacaagagaggaaaagtcaagggtacccaggaaatgaagaataactacaacatcatggaaattagaacggtcgcggtgggaatagtggccatcaagggcgtggagagcgaattctacctggcaatgaacaaggagggtaaactttacgcaaagaaagagtgtaatgaggattgcaactttaaggaactgattctggaaaaccattacaatacttacgcaagcgctaaatggacccacaatggaggtgaaatgtttgtcgctttgaaccaaaagggaataccagtccgcggtaagaaaactaagaaggaacaaaagactgcacactttctccctatggccattact

SEQ ID NO: 123092 - DNA, 582 bp, Artificial Sequence
  derived and/or modified sequence
atgcacaagtggatcctgacttggattctcccaaccctgctctacaggagctgttttcatataatctgtcttgttggaacgattagcctggcgtgcaatgatatgacaccggaacaaatggctactaatgtcaactgctcttcccccgagcggcacaccagatcatacgattatatggaagggggagacatccgagtacggcgtctcttttgccggactcagtggtacctgagaattgacaagcgcggcaaggtgaaaggcactcaggagatgaaaaacaactacaacattatggagattcgcaccgttgccgtgggcattgttgcaattaaaggagtggagtccgagttctatctagccatgaataaagagggcaaactgtatgctaaaaaagaatgtaacgaagactgcaacttcaaagaacttattctagagaatcactacaatacgtacgcctccgccaaatggacccacaacggaggtgaaatgttcgttgctctgaatcagaaggggattccggtgcggggaaaaaagactaaaaaggaacagaaaacagctcacttcctgcccatggccatcact

SEQ ID NO: 123093 - DNA, 582 bp, Artificial Sequence
  derived and/or modified sequence
atgcataaatggatccttacatggattctgcctacacttctgtacaggtcatgcttccatattatttgtttggtaggaactatttctctggcctgcaatgatatgaccccagagcaaatggctactaatgtgaattgctcgtcaccagagcggcataccagaagctacgattacatggaggggggggacattcgggtgcgccggctgttctgtagaacccagtggtacctgcggatcgacaagcggggcaaggtgaaaggcacacaagaaatgaaaaacaactataacatcatggaaatccgtacagtcgccgttggtattgtggcgatcaagggtgtcgagtcagagttctatctcgcaatgaataaggagggcaaattgtacgcaaaaaaggagtgtaatgaggattgtaattttaaggaactgatactcgagaatcattataacacctatgcctcagcgaaatggacccacaacggcggcgaaatgtttgttgccctgaaccagaaaggcattccggttcgcgggaagaagacaaaaaaggagcagaaaaccgcccatttcctccctatggcgattaca

SEQ ID NO: 123094 - DNA, 582 bp, Artificial Sequence
  derived and/or modified sequence
atgcataaatggatactgacctggatcctcccaacccttctttacagatcatgttttcacatcatctgccttgttggaactatctccttggcctgtaatgatatgacgccggaacaaatggcaactaacgtgaactgttcatctccagagcgacatactagaagctacgactacatggaagggggtgatattcgggtgcgccgtttgttttgcagaacccaatggtaccttcgcattgataaaaggggaaaagtgaagggtacccaagagatgaagaataactacaacattatggagattaggaccgtggcagtcgggattgtggctatcaagggagtggaatcggagttctacctcgccatgaacaaagaaggtaagctgtacgcgaagaaggaatgtaatgaggactgtaactttaaggagctgattctcgaaaaccactataacacttatgcatccgcaaagtggacgcataatggcggcgaaatgtttgttgcgctgaaccagaagggaataccggtccgtggcaaaaagacgaagaaggaacagaaaacggcacacttccttcctatggcaattact

SEQ ID NO: 123095 - DNA, 582 bp, Artificial Sequence
  derived and/or modified sequence
atgcacaaatggatcctgacctggatcctgcctactctgctctacagatcatgcttccacatcatttgcctcgtcggaactatctccctcgcctgtaatgacatgacccctgagcagatggctactaacgtcaattgctcgtcccccgaacgccataccagatcatacgattacatggaaggaggagatatccgggtgcgccggctcttctgccgaactcaatggtacctgcgcatcgataagagaggaaaggttaagggcactcaggaaatgaagaacaactacaacatcatggaaatccgcactgtggcagtgggtatcgtggcgattaagggcgtggagagcgaattctacctggccatgaacaaggagggaaagctgtacgcaaagaaggaatgcaacgaggactgcaatttcaaggaactgatcctggaaaatcactataacacctacgcaagcgccaaatggacgcataacggaggagagatgtttgtggccctgaaccagaaggggatcccggtgagaggcaagaaaactaagaaagagcagaaaactgcccatttcctgccgatggccatcacg

SEQ ID NO: 123096 - DNA, 582 bp, Artificial Sequence
  derived and/or modified sequence
atgcataagtggatactgacttggatccttccaactcttctctatagatcgtgctttcatattatttgtctggttggcactatttctttggcctgtaacgacatgactccggagcagatggctaccaacgtaaactgcagcagcccagaaaggcacacacggtcttacgactacatggaggggggcgatattcgtgtccgcagattattttgcaggacacagtggtacctgagaattgataaacgcgggaaggtgaagggtactcaggagatgaagaataactacaacataatggaaattagaacggtggcggtcggcatcgtggcaattaaaggagtggaatccgagttttacctggctatgaacaaagagggaaagctttacgccaagaaggagtgtaacgaggattgcaactttaaggaactgatcctcgagaatcactacaatacctatgcatccgcaaaatggacacacaatggtggggagatgtttgtggcactcaaccagaagggtattcctgtgagggggaaaaaaacaaagaaggagcagaagacagctcattttcttcccatggctatcacc

SEQ ID NO: 123097 - DNA, 582 bp, Artificial Sequence
  derived and/or modified sequence
atgcacaaatggattctgacctggatccttccaacgttgctctaccgctcttgttttcacattatctgtctcgtcggcacaatttctctggcatgcaacgacatgactcccgagcagatggctaccaatgtcaactgtagttctcctgagcgacatacccggtcttatgactatatggaaggcggagatataagggtgagaaggctgttttgtagaactcagtggtatctgagaatagataagcggggaaaagtgaaggggactcaggaaatgaaaaataattataacatcatggagatccggactgtcgcagtcgggattgttgcgatcaagggcgtggagagcgaattctatctggccatgaacaaagagggcaagctttacgccaaaaaagaatgtaatgaagattgcaactttaaagaactgattctggaaaatcactacaatacatacgcttccgctaaatggactcataatggtggtgagatgtttgtggcactgaatcagaaaggaatccccgtgagggggaaaaagaccaagaaagagcaaaaaacagctcactttctgcccatggctataacc

SEQ ID NO: 123098 - DNA, 582 bp, Artificial Sequence
  derived and/or modified sequence
atgcataaatggattcttacttggattttgccgactctcctgtaccgttcatgtttccatatcatctgcctggtggggactatcagcctggcgtgcaatgacatgaccccagaacaaatggccaccaacgtgaattgctccagccccgagcgccacaccagatcgtatgactacatggaggggggagacatccgagtgcggcgcctgttctgtcgcacgcagtggtacctccggattgataagcggggaaaggtgaaaggaacccaggagatgaagaataactacaatatcatggaaatccgtactgtcgccgtcggcatcgtggctatcaagggtgtggaaagcgaattctatctggccatgaataaggagggaaagctctacgccaaaaaagagtgcaacgaagattgtaactttaaagagctgatcctcgagaatcactacaacacctacgcctccgcaaagtggacccataacggaggcgaaatgtttgtggcgttgaaccagaagggaatcccagtgaggggcaaaaagactaagaaggaacaaaaaaccgctcacttcctgccgatggctatcact

SEQ ID NO: 123099 - DNA, 582 bp, Artificial Sequence
  derived and/or modified sequence
atgcacaagtggatactcacttggattcttcctacacttctgtatcgctcttgtttccatatcatctgccttgttgggactatctcgcttgcttgcaatgatatgacaccagagcagatggctactaatgtaaattgcagttctccagaaagacacacacgctcatatgattacatggaaggaggagatatccgagttaggagactcttttgcagaactcaatggtatctccgtatagataaacggggaaaagtaaaagggacacaagaaatgaaaaataactataatataatggaaattcgtactgtggctgtaggaatagttgccatcaaaggggttgaatctgagttctatcttgccatgaataaagaagggaaactctatgccaaaaaggaatgcaatgaagattgtaacttcaaagaactgatactggaaaatcactataacacttacgcttctgctaaatggactcataacgggggggaaatgttcgttgcactaaaccagaaaggaatacccgtgcgggggaaaaaaactaaaaaagaacagaaaactgctcacttcctgcctatggccattaca

SEQ ID NO: 123100 - DNA, 582 bp, Artificial Sequence
  derived and/or modified sequence
atgcataagtggattcttacatggattctcccaacccttctgtacaggtcatgttttcacatcatttgtctggtcggcaccatttccttggcctgcaatgatatgactccagagcaaatggccacaaacgtaaattgcagtagtcctgagaggcacacaagatcctatgactacatggagggtggtgatattagagtgaggagactattttgcaggacccagtggtatctgagaatcgataagcgggggaaagtgaagggcacccaggagatgaagaacaattacaacatcatggagattagaactgtagccgtgggcatagtggcaattaagggtgtcgaaagcgagttttatcttgctatgaataaagaaggtaagctctacgctaagaaagaatgcaatgaggactgcaattttaaagagctgatactagaaaaccattacaatacttatgcaagtgcaaagtggacccacaacggcggcgagatgttcgtagccctgaaccagaaagggatcccagtacggggcaagaagactaaaaaagaacagaagacggcccattttcttcctatggccatcacc

SEQ ID NO: 123101 - DNA, 582 bp, Artificial Sequence
  derived and/or modified sequence
atgcataagtggattctgacctggattctgcctactcttctttaccggtcatgttttcatatcatctgtcttgtgggaactatcagcttggcgtgtaacgatatgactccggaacaaatggccaccaacgtcaactgttcttcgccagagcggcatactcggagctacgactacatggagggcggtgatatccgcgtgagacgactgttctgccgtacccagtggtaccttcggatcgataagcggggtaaagtgaaggggacccaagaaatgaagaacaattacaacataatggagatcagaacggtggccgtcgggatcgtggccatcaagggagtggaatcggagttctacctggcaatgaataaagaagggaaactttacgcaaagaaggagtgtaatgaagattgcaactttaaggaactcatccttgaaaatcactacaatacttacgcctccgctaagtggacccataatggtggtgaaatgtttgtcgcactgaaccagaaaggtattcccgtgagaggcaaaaagaccaaaaaggaacagaaaaccgcacactttctgccgatggctattacc

SEQ ID NO: 123102 - DNA, 582 bp, Artificial Sequence
  derived and/or modified sequence
atgcacaaatggatacttacttggattcttccgaccctcctctaccggagctgcttccatatcatttgtttggtggggactatttcgcttgcatgtaacgacatgacccctgagcagatggccactaacgtgaactgttcatccccagaacgacacaccagatcgtacgattacatggaaggcggcgatatccgtgtcagacgacttttctgtagaacccagtggtacctgcgtatagacaagcggggtaaggtcaagggcactcaagagatgaagaacaactacaacattatggaaatcaggactgtcgccgtcggtattgtggcgatcaagggagtggaatcggagttttacctcgcgatgaacaaggagggaaagctgtacgcaaagaaagagtgcaacgaagattgtaactttaaggaactcatacttgagaatcattacaacacgtatgcatcagcaaagtggactcataatggaggtgaaatgtttgtggccctgaatcaaaaaggcatcccagtgcgtggcaaaaagaccaaaaaggagcaaaagaccgcacactttttgcctatggccattact

SEQ ID NO: 123103 - DNA, 582 bp, Artificial Sequence
  derived and/or modified sequence
atgcataaatggattctgacttggatccttccaactctcctgtacagatcgtgctttcacattatctgtctcgtgggtactatcagcctggcttgtaatgatatgaccccagaacaaatggccactaatgtgaattgtagctcgccagaaagacacactcgatcctacgattacatggagggtggagatattagggttcggcgcctgttctgtcgcactcagtggtaccttcgaattgataaacggggaaaggttaagggcacccaagagatgaaaaacaactacaatatcatggaaatacgaacggtcgccgtgggaattgtggcaatcaaaggtgtggagtccgagttctacttggccatgaataaggaaggaaaactttacgccaagaaagagtgtaacgaagattgtaatttcaaggaactgatacttgaaaaccattacaatacttatgcttcggcaaagtggacccataacggcggcgaaatgtttgtcgcgcttaaccagaaagggattccagtgaggggtaaaaagaccaagaaagaacaaaagacggcgcatttcttgcctatggcaattacc

SEQ ID NO: 123104 - DNA, 582 bp, Artificial Sequence
  derived and/or modified sequence
atgcataaatggatcttgacatggattttaccgaccttgctctatagaagttgttttcatatcatctgccttgtgggaacaatctcgttggcatgcaatgacatgacaccagagcaaatggccaccaacgttaactgctccagccctgaacgtcatacgagaagctacgattatatggaaggtggcgatattagagttcggagattattttgtcgtacgcagtggtatttgcgaatcgacaaacgaggtaaagtgaaaggtactcaagaaatgaaaaataattataatattatggaaatccggacagtagcggtaggaatcgtggctattaaaggagtcgaatcagaattttatctcgctatgaataaagaaggtaaattgtacgctaaaaaagagtgtaatgaggattgcaacttcaaagagttgattcttgaaaatcactacaatacatatgccagtgccaagtggacgcataatggaggtgagatgtttgtggcgcttaatcaaaaaggaattcctgtgaggggaaaaaaaacaaaaaaggaacagaaaacagcccatttcttgccgatggcgatcaca

SEQ ID NO: 123105 - DNA, 582 bp, Artificial Sequence
  derived and/or modified sequence
atgcacaagtggattctcacctggatcctgccgacccttctctacaggtcgtgctttcatatcatctgcttggtgggaaccatctcactcgcatgcaacgatatgactccggagcaaatggcgactaacgttaactgttcatccccggagcggcatacccgctcctacgactacatggagggcggagacatcagggtccgccggttgttctgcaggactcagtggtatctgagaattgataagagggggaaggtgaaaggcacccaggaaatgaagaacaattacaatatcatggaaatccggactgtggccgttggaatcgtcgcaatcaagggagtggaatccgaattctacctcgctatgaataaggaaggaaagctgtacgccaagaaggaatgtaatgaggattgtaacttcaaggagctcattttggaaaatcattacaacacctacgcctcggcgaagtggacgcataatggcggcgagatgttcgtggcgctcaaccaaaagggaattccagtgagagggaaaaagaccaagaaagagcagaaaaccgcccacttcctcccgatggccatcact

SEQ ID NO: 123106 - DNA, 582 bp, Artificial Sequence
  derived and/or modified sequence
atgcacaagtggatcctcacctggatcctccccaccctgctctacagatcatgctttcacattatctgtcttgtcggaacgatctcactggcttgtaatgatatgacgcctgaacagatggccactaacgtcaactgctcgtctcccgaaaggcacactaggagctacgattacatggagggaggagacatccgggtccgccgcctgttttgccggactcagtggtaccttcgcatcgacaaacgcggcaaggtgaaggggacccaggagatgaagaacaactacaatatcatggaaatccgtactgtggcagtcggaatcgtggctatcaagggggtggagagcgaattctacctggccatgaacaaggagggcaagctgtacgcaaagaaggagtgcaacgaggattgcaatttcaaagaacttattctcgaaaaccattacaacacctatgcgtctgcaaaatggactcataatggaggcgagatgttcgtggccctgaatcagaagggcatcccggtgagaggcaagaaaacgaaaaaagagcaaaagaccgctcacttcctgccgatggcgatcacc

SEQ ID NO: 123107 - DNA, 582 bp, Artificial Sequence
  derived and/or modified sequence
atgcacaaatggatcctgacgtggatcttgccaacgctcctttaccggagctgttttcacattatctgcctcgtgggcaccatctcactcgcctgcaacgacatgacccccgaacaaatggcgactaatgtgaattgctcgagcccagaaaggcacactcgatcgtacgactacatggagggtggagacattagagtgcggcgcctgttttgtagaacccagtggtatcttcggatcgacaagcgaggaaaggttaagggtacccaggaaatgaagaacaattacaacataatggagattaggacggtggcagtgggtatcgtcgcaatcaagggcgtcgaatccgaattctacctggccatgaataaggaaggaaagctgtacgcaaagaaggaatgtaatgaggactgcaacttcaaagaacttattcttgaaaaccattacaacacttatgcgtcggcaaaatggacccacaacggtggtgagatgttcgtggccttgaaccaaaaaggaattcctgtgcgtggaaagaaaaccaagaaggaacagaaaaccgcacacttccttccaatggcaattacc

SEQ ID NO: 123108 - DNA, 582 bp, Artificial Sequence
  derived and/or modified sequence
atgcacaaatggatcctcacgtggatcctgcctaccctcctgtatcggtcctgctttcacatcatttgccttgtaggcactatctcgcttgcttgtaacgatatgacccctgaacagatggccactaacgtaaactgttcgagccctgagcgccacacccgttcttacgactatatggagggaggtgatatccgagtccgtagacttttctgccgcacccaatggtatctaagaatcgacaagcgtggtaaggtaaagggaacgcaagaaatgaaaaacaattacaacatcatggagatccggactgtggccgtcggcattgttgctatcaagggcgtagaatcggagttctaccttgctatgaataaggaaggtaaactatatgctaagaaggaatgcaacgaggattgcaacttcaaggaacttattttggaaaaccattataacacgtatgcatccgcgaagtggacccacaacgggggagagatgttcgttgctttgaaccaaaagggtatccccgtgcgaggcaagaagacaaaaaaagaacagaaaacggctcactttctacccatggccattacc

SEQ ID NO: 123109 - DNA, 582 bp, Artificial Sequence
  derived and/or modified sequence
atgcataagtggatcctcacctggatcctgcccacattgctctacaggtcatgttttcatatcatctgcctggtggggaccatttccttggcttgcaatgacatgacacccgagcaaatggctacaaatgtgaactgcagcagccccgagcgacatacgcgaagctacgattacatggagggcggagatatcagggttagacggcttttttgtaggactcagtggtacctcaggatcgacaaacgaggcaaggtcaagggaacacaggagatgaaaaacaattataacatcatggaaattcgaaccgttgctgtgggcatagtagctataaagggcgtggagagcgaattttatctggccatgaacaaggaaggtaaactctacgccaagaaggagtgcaacgaggattgcaattttaaagaactgattctggagaaccactataatacctatgcgagtgctaaatggacccacaacggcggagagatgtttgtggcacttaaccaaaaagggatacccgtccgcggcaaaaaaaccaagaaagaacaaaaaacggcccattttttgcccatggccatcact

SEQ ID NO: 123110 - DNA, 582 bp, Artificial Sequence
  derived and/or modified sequence
atgcataaatggattttaacctggattcttcctacattgctctacaggtcgtgtttccatatcatatgcttagtcggtaccatttcattggcctgcaatgacatgacccctgaacagatggctacaaacgttaattgcagttcccctgaacgacataccaggtcctacgactacatggaagggggtgatattagagtgagaaggctcttctgtaggacccaatggtatctcagaatagataagcgaggtaaagtaaaagggacacaggaaatgaagaataactacaacattatggagatcaggacagttgcggtgggaattgtggccataaaaggagtggagtccgaattttatttagctatgaacaaggaaggtaagttgtatgctaagaaagaatgcaatgaggactgtaattttaaggagcttattctagagaatcattacaacacttatgcaagcgctaagtggactcataatgggggagaaatgtttgtggcattgaatcagaagggaattcccgttaggggtaagaaaacaaaaaaggagcagaaaactgcacattttctaccgatggcaattacg

SEQ ID NO: 123111 - DNA, 582 bp, Artificial Sequence
  derived and/or modified sequence
atgcacaagtggatactgacctggatactcccaaccttgttatatcgatcctgctttcatatcatttgtttggttgggactatatcactcgcctgtaatgacatgaccccagagcagatggccaccaatgtaaactgtagttcgcccgagcggcataccagatcttacgattatatggaaggcggagatatcagagtcagacgtttgttctgccggactcaatggtatctgcgtatcgacaagaggggaaaggtaaagggaacccaggagatgaaaaacaactataatattatggagatacgcactgtagcagttggcatcgttgctattaagggagttgaaagcgagttttacttagctatgaacaaggagggaaaactatatgctaaaaaagaatgcaacgaggattgtaattttaaagaactgatacttgagaatcactataatacctacgcatcagccaagtggacacataacggtggagagatgtttgtggccctgaaccagaaggggatccccgtacgcggaaagaaaactaaaaaggagcagaaaacagcacacttcctgcccatggcgattaca

SEQ ID NO: 123112 - DNA, 582 bp, Artificial Sequence
  derived and/or modified sequence
atgcacaagtggattctaacctggatactgcctacgctactgtacagaagctgcttccatatcatatgcttggtgggcactatcagtctagcatgtaatgatatgacccccgagcagatggccactaacgtcaactgcagttcccccgagaggcatacccgatcctacgactatatggaaggcggtgatatcagagtgcgcaggttgttctgcaggacccagtggtatctgcgaatcgacaaacggggaaaggtgaagggtacccaggagatgaagaacaattataacataatggaaatcaggacggttgctgttggtatcgtcgccatcaagggcgtagaaagcgaattctacttggctatgaataaggagggtaagctgtacgcgaagaaagaatgtaacgaggactgcaacttcaaggagctcattctggaaaatcactataacacatatgcttcggccaaatggacccataacggaggtgagatgtttgtagcactaaatcaaaaaggcatccctgtgcggggaaaaaaaaccaagaaggaacagaagacagcacactttcttccaatggcaattacc

SEQ ID NO: 123113 - DNA, 582 bp, Artificial Sequence
  derived and/or modified sequence
atgcacaaatggatactgacatggatactgcccacattgctgtataggagctgcttccatatcatctgtctggtaggtacaatcagcctcgcctgcaacgacatgacacccgaacagatggccactaatgtgaattgcagtagccctgagagacatacccgatcctatgattacatggaaggtggcgacatacgggtgcggcgcctgttttgccgcacccagtggtatctgcgcatcgataaacggggaaaagtaaagggaacgcaggagatgaagaataactacaacataatggaaatccgaacagttgcagtggggattgtggcaatcaagggagtggaatccgagttctatctcgccatgaataaggagggcaagctgtatgcaaaaaaagaatgcaatgaagattgtaattttaaggaattgattcttgagaaccattataacacatacgcaagtgcaaaatggacgcataatggtggagagatgtttgttgccctgaatcagaaggggatccctgtgcgagggaagaagaccaaaaaggaacagaagacagcacactttttgcctatggctattacc

SEQ ID NO: 123114 - DNA, 582 bp, Artificial Sequence
  derived and/or modified sequence
atgcataagtggatccttacttggattcttccgactctgctgtaccggtcgtgttttcatatcatctgtctcgtgggaaccatatccctggcgtgtaacgatatgacccctgaacaaatggcaactaacgtcaactgttcttccccagaacgtcatactagatcgtacgattacatggagggcggcgacatccgagtgcgacggcttttctgtcgaacccagtggtaccttagaattgacaaacgcggtaaggtcaagggaacccaagaaatgaagaacaactacaatatcatggaaattagaacggtggccgtgggcattgtggcgatcaaaggtgtcgagtccgaattctacctggcgatgaataaagagggtaaactgtacgctaagaaggaatgcaatgaggattgcaactttaaagaactcattctggaaaaccactacaacacctacgcctccgcgaagtggactcacaacggaggagagatgtttgtggcacttaaccaaaaaggaattcctgtgcgcggcaaaaagaccaagaaggaacaaaagacggcccacttccttcccatggcaattacc

SEQ ID NO: 123115 - DNA, 582 bp, Artificial Sequence
  derived and/or modified sequence
atgcacaagtggatcctcacctggattctcccaactcttctttaccggtcgtgtttccatatcatctgtcttgtgggaactatttcgctcgcatgtaacgatatgacccctgaacagatggcaaccaacgtcaactgttcctcgccagaaagacatacgagatcgtacgattacatggaaggaggtgacatacgggtgcgcagacttttctgtagaacccaatggtaccttagaattgacaaacggggaaaggttaagggaactcaagaaatgaagaacaactacaatatcatggaaattcgaaccgtggctgtggggattgtggccattaagggagtggagtcagaattctaccttgcaatgaacaaagaaggaaagttgtacgccaaaaaggaatgtaatgaagattgcaactttaaagaacttattctggagaaccactacaacacttacgccagcgccaagtggacccataacggaggtgaaatgttcgtggcactgaatcaaaaagggattcccgtgagggggaagaaaacgaagaaagagcaaaagactgcacatttcctccccatggcaataact

SEQ ID NO: 123116 - DNA, 582 bp, Artificial Sequence
  derived and/or modified sequence
atgcataagtggatccttacttggatcttgccaactctgttgtaccgcagttgttttcacatcatttgccttgtgggtaccattagcctggcttgcaacgatatgacacccgagcagatggccaccaacgtcaactgcagctcccctgagagacataccaggtcctatgattatatggagggaggcgacatccgtgtgcgccgcctgttctgcaggacccaatggtacctcagaattgacaaacgcggtaaagtcaaaggaactcaggagatgaagaataactacaacatcatggagatcaggaccgtagctgtgggcatcgtggctattaaaggtgtggagagtgagttttatctcgccatgaacaaggagggaaagctgtatgcaaagaaagaatgcaacgaagactgtaacttcaaggagctgatcctcgagaaccactacaacacctatgcttctgctaagtggacacataacggtggtgagatgtttgtggccctgaatcagaagggtattcccgtccgcggtaagaagactaagaaagaacagaagactgctcatttcctccccatggccatcacc

SEQ ID NO: 123117 - DNA, 582 bp, Artificial Sequence
  derived and/or modified sequence
atgcataagtggatcctcacctggatcctgcctactctgctctacaggagctgcttccatatcatctgcttggtcggtaccatttccctggcttgtaatgatatgactcctgaacaaatggcaaccaacgtgaactgctcgtcgccggaacgccatactcggtcgtacgactatatggaaggaggagacattcgcgtgcggcgcctcttttgtcgaacccagtggtacctgcggattgataaaagaggaaaggtgaagggaactcaggagatgaagaacaattacaacataatggaaatccggaccgtagcggtgggcatcgtggcgatcaagggagtcgagtccgagttttacttggcgatgaacaaagaaggaaagctctacgccaagaaggagtgcaatgaagattgtaatttcaaggaactgatcctggagaaccactacaatacctacgcctcggcaaagtggactcacaacggcggagagatgttcgtcgcactcaaccagaagggcattccggtgcggggcaaaaagactaaaaaggagcaaaagactgctcacttcctgccgatggcgatcacg

SEQ ID NO: 123118 - DNA, 582 bp, Artificial Sequence
  derived and/or modified sequence
atgcataagtggatcctgacttggatactgccaactctgctttaccgcagctgttttcacatcatatgtcttgtgggtaccatttcgttggcctgtaatgatatgactcccgaacagatggcaaccaatgtcaattgcagctcaccagagaggcacaccagatcttacgactatatggaagggggcgatattcgtgtgaggcgacttttctgccgaacccagtggtaccttagaatcgacaagcgtggaaaggtgaaaggaacccaggaaatgaaaaacaactataacatcatggaaattaggactgttgcagtcggcattgtggctattaagggtgtggaatcagagttctacctcgccatgaataaagaaggaaagctctacgctaagaaagagtgcaatgaggattgtaactttaaggaactgatcctggagaaccactacaatacctatgcatcagcgaagtggacccacaacggaggcgaaatgtttgtcgccctgaaccagaaggggatacctgtgcgtggaaaaaagaccaagaaggaacaaaagacggcacattttctcccgatggccataacc

SEQ ID NO: 123119 - DNA, 582 bp, Artificial Sequence
  derived and/or modified sequence
atgcacaaatggattctcacttggatcctgccgactctgctttacagatcctgctttcacataatctgcctggtgggcacgatcagccttgcctgcaacgacatgaccccagaacagatggccactaacgtcaactgttcgagcccggagagacatacccgatcatacgactacatggaaggcggagacatccgcgtgagacgtctgttctgcaggacgcagtggtacctgcggattgataagaggggcaaggtgaagggaactcaggagatgaagaacaattacaatatcatggaaatccgcaccgtggcagtggggatcgtggcgatcaagggcgtcgaaagcgagttctacctcgctatgaataaggagggtaagttgtacgcgaaaaaagagtgcaacgaggattgcaacttcaaggagctcattctggaaaaccactacaatacctacgccagcgccaaatggactcataatggaggagagatgttcgtggcgctgaaccagaaaggaatcccggtgagaggcaagaaaaccaagaaagagcaaaagaccgcacatttcctccccatggccataact

SEQ ID NO: 123120 - DNA, 582 bp, Artificial Sequence
  derived and/or modified sequence
atgcacaaatggatcttgacttggatcctcccaacccttttgtacagatcatgctttcacataatttgcctggtgggaacgatctcgctggcctgcaacgatatgactccagaacagatggcgaccaacgtcaactgttcctcccctgagagacatacgcgcagctacgactacatggagggcggagacattcgggtgagacgcctgttctgccgcacgcaatggtatctgcgcatcgacaagagaggaaaggtgaaaggcactcaagaaatgaagaacaattacaacatcatggagatacggaccgttgcggtggggatcgtggccatcaagggagtcgagagcgaattctacctcgcgatgaacaaggaggggaaattgtacgccaaaaaggagtgtaatgaagattgcaacttcaaggagctcatcctggagaatcattacaacacctatgcctcggcaaagtggactcacaacggtggcgagatgtttgtcgcactgaatcaaaagggcatccctgtgcgcggaaagaagactaagaaggaacagaagaccgcacacttccttcccatggctatcact

SEQ ID NO: 123121 - DNA, 582 bp, Artificial Sequence
  derived and/or modified sequence
atgcataaatggatcctgacctggatccttccgaccctcctgtaccggagctgttttcatatcatctgtttggtgggaaccatcagcctggcgtgcaatgacatgacgcctgaacaaatggccaccaatgtcaactgttcttcccctgaacggcacactcggagctatgattacatggaggggggtgatatccgggtgagaaggctcttctgtcgcactcagtggtacctgcgcatcgacaaaagagggaaggtgaagggaacccaagaaatgaagaataactacaacattatggagatccgcaccgtggcggtggggattgtcgccatcaagggcgttgaatcagaattctacctcgcaatgaacaaggagggaaagttgtatgcgaaaaaggaatgcaatgaggactgcaatttcaaagagctgatcctggagaatcattacaacacctacgcgtccgctaagtggacccacaacggcggcgaaatgttcgtcgccctcaatcaaaagggaatccctgtgaggggcaagaaaaccaagaaagagcaaaagactgctcattttctgcctatggccatcact

SEQ ID NO: 123122 - DNA, 582 bp, Artificial Sequence
  derived and/or modified sequence
atgcacaagtggatcctcacatggatcctcccgacgttactgtaccgatcttgtttccatatcatttgcctagttggcaccattagcctggcttgtaacgacatgacacctgagcagatggccacaaacgtaaactgctcttcccctgaacgccacactagatcctatgattatatggagggaggggacatccgcgtcaggcggttgttctgtcgcacccagtggtaccttcgaatagacaagcgcggcaaggtaaagggaacgcaggagatgaaaaataactacaatataatggagatcagaaccgtagccgtggggatcgtcgcgattaaaggagtggagagcgagttttatctggccatgaacaaagaggggaagttatacgctaaaaaggagtgcaatgaggattgcaatttcaaggaattaattcttgaaaaccactataacacgtatgccagcgcaaagtggacccataacggcggcgagatgttcgtggccctgaatcaaaaaggtatccctgtgcgggggaaaaagaccaaaaaggagcagaagaccgcccattttcttccaatggccatcaca

SEQ ID NO: 123123 - DNA, 582 bp, Artificial Sequence
  derived and/or modified sequence
atgcataaatggatcctgacctggattctccccaccctgctgtaccgctcatgtttccacattatctgcctggttggcactatctccctggcttgtaatgatatgacgccagaacagatggcgaccaatgtgaactgcagctcgcccgaacgccacactcgctcgtacgactacatggaaggtggagacatacgcgtgaggagactgttctgtaggacccagtggtaccttcgcatcgacaagagaggtaaggtcaaagggacccaagaaatgaagaacaactacaacattatggaaatccgcactgtcgctgtggggatcgtggcgatcaaaggagtggaatccgaattctacctggcgatgaataaggaaggcaagttgtacgcaaagaaggaatgcaatgaggactgcaacttcaaggagctcatcctcgaaaatcactataacacttacgcatcggcgaaatggactcataatggaggagaaatgttcgtggccctgaaccagaagggtattccggtgagggggaagaaaaccaaaaaagagcagaaaaccgcccactttctgccgatggcaatcact

SEQ ID NO: 123124 - DNA, 582 bp, Artificial Sequence
  derived and/or modified sequence
atgcataaatggattctcacttggattctccccaccttgctttataggtcttgttttcatattatatgtctggtgggcactataagtctggcctgcaacgacatgacccccgagcagatggccacaaacgtcaactgttcttcacccgaacgacacacacggtcttatgactatatggagggtggagacatacgcgtccgccgcctgttttgcagaacccagtggtacctccgcattgataagcgaggcaaagtgaaaggaactcaggagatgaagaataattacaatatcatggaaatacggactgtagctgtagggatcgtggcaatcaaaggggtcgagtctgagttctatctcgccatgaataaggaaggtaaactctatgcaaaaaaggaatgcaacgaagactgcaactttaaagagctgatcctggagaaccactacaacacctatgcctccgcaaagtggacacataacgggggcgaaatgtttgtcgcgctcaatcagaaaggtatccccgtgcgcggaaagaaaaccaagaaggaacaaaaaacagctcacttcctccccatggcaataacc

SEQ ID NO: 123125 - DNA, 582 bp, Artificial Sequence
  derived and/or modified sequence
atgcataaatggattctcacctggattctgcccactcttctgtaccggagctgttttcacattatctgtctggtgggcactatttcgctggcctgcaacgacatgacccccgaacagatggcaacgaatgtgaactgctcctcacctgagcgtcacaccagatcgtacgattacatggaaggaggagatatcagagtgagacgcctcttctgtcgtactcaatggtacttgagaatcgataagagagggaaggtcaaaggaactcaggagatgaagaataactataacatcatggaaatcaggactgttgctgtgggaattgtggccatcaagggggtggagtcagagttttacctcgcaatgaataaagaaggcaaactttacgccaagaaagagtgcaatgaagattgtaactttaaggaactgattctggaaaaccactacaacacctacgcttcggcaaagtggacccataacggcggcgaaatgttcgtggcacttaaccaaaagggcattccggtccgcgggaagaaaacgaagaaggaacaaaagacggcccactttctcccaatggctataacc

SEQ ID NO: 123126 - DNA, 582 bp, Artificial Sequence
  derived and/or modified sequence
atgcataagtggatccttacttggatcctgcctacgctcttgtaccgctcctgcttccacatcatttgcctcgtcgggaccatcagcctcgcctgtaatgacatgaccccggagcagatggcaactaatgtgaactgctcgtcgccggagcgccatactcggtcatacgattacatggaaggaggggatatccgcgtcagacggctgttttgccgcacccaatggtacctgcgaatcgacaagagaggtaaggttaagggaactcaggaaatgaaaaataactataacattatggaaatcaggaccgtggctgtcggaattgtggctatcaagggcgtggaatccgagttttacctggcaatgaacaaggaaggcaagctgtacgccaagaaagaatgtaacgaggactgcaacttcaaagagctgatcttggagaatcactacaacacctacgcgagcgccaaatggacccacaatggaggagaaatgttcgtggcgctgaaccagaagggaatccccgtgcggggcaagaaaacgaagaaagaacaaaagactgcccacttcctcccaatggcgatcacc

SEQ ID NO: 123127 - DNA, 582 bp, Artificial Sequence
  derived and/or modified sequence
atgcataagtggatcctaacctggatattgcctaccttattgtataggtcctgttttcatatcatttgcctagtggggaccatctccctagcctgcaatgacatgacccccgagcagatggccacaaatgtgaactgtagctccccggaacggcacacccgatcttacgattacatggagggaggcgacatacgcgttaggagattattctgtcgcacccaatggtatctgaggattgacaaacgagggaaagtgaagggaacacaggaaatgaaaaacaactataacatcatggagattcgcaccgtggcggtgggcatagtggccattaagggagtggagtccgagttctatctggcaatgaataaggagggaaagctgtacgccaagaaggaatgcaacgaggattgtaacttcaaggaactcatcctggagaaccactacaacacttacgcgtctgcaaaatggacccataatggtggtgagatgttcgtggcattgaaccagaaaggtataccggttcgtggtaaaaagactaaaaaggagcagaaaactgcacacttcctgcctatggcgattact

SEQ ID NO: 123128 - DNA, 582 bp, Artificial Sequence
  derived and/or modified sequence
atgcataaatggattctcacatggatactgccaactttattgtaccgaagttgtttccatatcatttgcttggttggcaccatatctctggcgtgcaacgatatgacaccagagcaaatggctacaaacgtcaattgcagttcccctgagcggcacacccgtagctacgactacatggagggcggcgacataagggtgcgacggctcttctgcagaacccagtggtatcttcgcattgacaagaggggaaaggtgaagggcactcaggagatgaagaataactacaacatcatggagatccggaccgtggctgtgggcatagtggccatcaagggggtagagtcagagttctacctcgccatgaataaagagggaaagctgtacgctaagaaagaatgtaacgaggattgtaattttaaggaactgattcttgagaaccattacaatacctacgcaagtgctaaatggacgcataacggaggtgagatgtttgttgcactcaaccaaaaggggatccctgtgcgagggaaaaagaccaagaaagagcagaagaccgcccattttctcccgatggccatcaca

SEQ ID NO: 123129 - DNA, 582 bp, Artificial Sequence
  derived and/or modified sequence
atgcataagtggatcctcacctggatactgcccaccctattatatagatcgtgttttcacataatctgcctggtggggactatctctttggcctgcaacgatatgaccccagagcagatggctaccaacgtgaactgttcctctccggaacgacataccagatcatacgactacatggaggggggagacattcgagttaggagactattctgtcgcacacagtggtatctgcgaattgacaagcgggggaaggttaaaggtactcaggagatgaaaaataattacaacatcatggagattaggactgttgccgtgggcatcgtggccattaagggcgtcgaatccgagttttacctggccatgaacaaagaaggcaagctgtatgcgaagaaggaatgcaacgaagactgtaactttaaagagctcatacttgaaaatcattacaacacgtacgctagcgccaagtggacgcacaacgggggagagatgtttgtggctctaaatcagaaaggtatacctgtgaggggaaaaaaaacaaaaaaggaacagaaaaccgcacacttcttgccgatggcgatcact

SEQ ID NO: 123130 - DNA, 582 bp, Artificial Sequence
  derived and/or modified sequence
atgcacaaatggatccttacttggatcctgcctactttgctgtaccggtcatgcttccacattatctgcctggttggcaccatttcccttgcttgtaatgacatgactccagaacagatggccaccaatgtgaactgctcgtccccggaacgccatacgcgctcatacgactacatggaaggcggggacatccgggtgagacgcctcttctgcagaacccagtggtacttgaggatagacaaacggggaaaagtcaagggaactcaggaaatgaagaacaattacaacatcatggaaattcggaccgtcgcagtggggatcgtggccatcaagggtgtggaatcagaattctacctggctatgaacaaggaggggaaactgtacgccaagaaagagtgtaatgaggactgcaactttaaagaactgatcttggaaaaccactacaacacgtacgcgtcggcgaagtggacccataacggtggcgaaatgttcgtggctctcaaccaaaaggggattcccgtccgaggaaagaaaaccaagaaggaacagaaaactgcgcatttccttccgatggccatcacg

SEQ ID NO: 123131 - DNA, 582 bp, Artificial Sequence
  derived and/or modified sequence
atgcacaagtggatcctgacctggatcctgcccaccctgctgtaccgcagctgcttccacatcatctgcctggtgggcaccatcagcctggcctgcaacgacatgacccccgagcagatggccaccaacgtgaactgcagcagccccgagcgccacacccgcagctacgactacatggagggcggcgacatccgcgtgcgccgcctgttctgccgcacccagtggtacctgcgcatcgacaagcgcggcaaggtgaagggcacccaggagatgaagaacaactacaacatcatggagatccgcaccgtggccgtgggcatcgtggccatcaagggcgtggagagcgagttctacctggccatgaacaaggagggcaagctgtacgccaagaaggagtgcaacgaggactgcaacttcaaggagctgatcctggagaaccactacaacacctacgccagcgccaagtggacccacaacggcggcgagatgttcgtggccctgaaccagaagggcatccccgtgcgcggcaagaagaccaagaaggagcagaagaccgcccacttcctgcccatggccatcacc

SEQ ID NO: 123132 - DNA, 743 bp, Artificial Sequence
  derived and/or modified sequence
gggaaataagagagaaaagaagagtaagaagaaatataagagccaccatgcacaaatggatactgacatggatcctgccaactttgctctacagatcatgctttcacattatctgtctagtgggtactatatctttagcttgcaatgacatgactccagagcaaatggctacaaatgtgaactgttccagccctgagcgacacacaagaagttatgattacatggaaggaggggatataagagtgagaagactcttctgtcgaacacagtggtacctgaggatcgataaaagaggcaaagtaaaagggacccaagagatgaagaataattacaatatcatggaaatcaggacagtggcagttggaattgtggcaatcaaaggggtggaaagtgaattctatcttgcaatgaacaaggaaggaaaactctatgcaaagaaagaatgcaatgaagattgtaacttcaaagaactaattctggaaaaccattacaacacatatgcatcagctaaatggacacacaacggaggggaaatgtttgttgccttaaatcaaaaggggattcctgtaagaggaaaaaaaacgaagaaagaacaaaaaacagcccactttcttcctatggcaataacttgataataggctggagcctcggtggccatgcttcttgccccttgggcctccccccagcccctcctccccttcctgcacccgtacccccgtggtctttgaataaagtctgagtgg

SEQ ID NO: 123133 - DNA, 3936 bp, Artificial Sequence
  derived and/or modified sequence
agttttaattgcttccaatgaggtcagcaaaggtatttatcgaaaagccctgaataaaaggctcacacacacacacaagcacacacgcgctcacacacagagagaaaatccttctgcctgttgatttatggaaacaattatgattctgctggagaacttttcagctgagaaatagtttgtagctacagtagaaaggctcaagttgcaccaggcagacaacagacatggaattcttatatatccagctgttagcaacaaaacaaaagtcaaatagcaaacagcgtcacagcaactgaacttactacgaactgtttttatgaggatttatcaacagagttatttaaggaggaatcctgtgttgttatcaggaactaaaaggataaggctaacaatttggaaagagcaactactctttcttaaatcaatctacaattcacagataggaagaggtcaatgacctaggagtaacaatcaactcaagattcattttcattatgttattcatgaacacccggagcactacactataatgcacaaatggatactgacatggatcctgccaactttgctctacagatcatgctttcacattatctgtctagtgggtactatatctttagcttgcaatgacatgactccagagcaaatggctacaaatgtgaactgttccagccctgagcgacacacaagaagttatgattacatggaaggaggggatataagagtgagaagactcttctgtcgaacacagtggtacctgaggatcgataaaagaggcaaagtaaaagggacccaagagatgaagaataattacaatatcatggaaatcaggacagtggcagttggaattgtggcaatcaaaggggtggaaagtgaattctatcttgcaatgaacaaggaaggaaaactctatgcaaagaaagaatgcaatgaagattgtaacttcaaagaactaattctggaaaaccattacaacacatatgcatcagctaaatggacacacaacggaggggaaatgtttgttgccttaaatcaaaaggggattcctgtaagaggaaaaaaaacgaagaaagaacaaaaaacagcccactttcttcctatggcaataacttaattgcatatggtatataaagaaccagttccagcagggagatttctttaagtggactgttttctttcttctcaaaattttctttccttttattttttagtaatcaagaaaggctggaaaactactgaaaaactgatcaagctggacttgtgcatttatgtttgttttaagacactgcattaaagaaagatttgaaaagtatacacaaaaatcagatttagtaactaaaggttgtaaaaaattgtaaaactggttgtacaatcatgatgttagtaacagtaatttttttcttaaattaatttacccttaagagtatgttagatttgattatctgataatgattatttaaatattcctatctgcttataaaatggctgctataataataataatacagatgttgttatataaggtatatcagacctacaggcttctggcaggatttgtcagataatcaagccacactaactatggaaaatgagcagcattttaaatgctttctagtgaaaaattataatctacttaaactctaatcagaaaaaaaattctcaaaaaaactattatgaaagtcaataaaatagataatttaacaaaagtacaggattagaacatgcttatacctataaataagaacaaaatttctaatgctgctcaagtggaaagggtattgctaaaaggatgtttccaaaaatcttgtatataagatagcaacagtgattgatgataatactgtacttcatcttacttgccacaaaataacattttataaatcctcaaagtaaaattgagaaatctttaagtttttttcaagtaacataatctatctttgtataattcatatttgggaatatggcttttaataatgttcttcccacaaataatcatgcttttttcctatggttacagcattaaactctattttaagttgtttttgaactttattgttttgttatttaagtttatgttatttataaaaaaaaaaccttaataagctgtatctgtttcatatgcttttaattttaaaggaataacaaaactgtctggctcaacggcaagtttccctcccttttctgactgacactaagtctagcacacagcacttgggccagcaaatcctggaaggcagacaaaaataagagcctgaagcaatgcttacaatagatgtctcacacagaacaatacaaatatgtaaaaaatctttcaccacatattcttgccaattaattggatcatataagtaaaatcattacaaatataagtatttacaggattttaaagttagaatatatttgaatgcatgggtagaaaatatcatattttaaaactatgtatatttaaatttagtaattttctaatctctagaaatctctgctgttcaaaaggtggcagcactgaaagttgttttcctgttagatggcaagagcacaatgcccaaaatagaagatgcagttaagaataaggggccctgaatgtcatgaaggcttgaggtcagcctacagataacaggattattacaaggatgaatttccacttcaaaagtctttcattggcagatcttggtagcactttatatgttcaccaatgggaggtcaatatttatctaatttaaaaggtatgctaaccactgtggttttaatttcaaaatatttgtcattcaagtccctttacataaatagtatttggtaatacatttatagatgagagttatatgaaaaggctaggtcaacaaaaacaatagattcatttaattttcctgtggttgacctatacgaccaggatgtagaaaactagaaagaactgcccttcctcagatatactcttgggagagagcatgaatggtattctgaactatcacctgattcaaggactttgctagctaggttttgaggtcaggcttcagtaactgtagtcttgtgagcatattgagggcagaggaggacttagtttttcatatgtgtttccttagtgcctagcagactatctgttcataatcagttttcagtgtgaattcactgaatgtttatagacaaaagaaaatacacactaaaactaatcttcattttaaaagggtaaaacatgactatacagaaatttaaatagaaatagtgtatatacatataaaatacaagctatgttaggaccaaatgctctttgtctatggagttatacttccatcaaattacatagcaatgctgaattaggcaaaaccaacatttagtggtaaatccattcctggtagtataagtcacctaaaaaagacttctagaaatatgtactttaattatttgtttttctcctatttttaaatttattatgcaaattttagaaaataaaatttgctctagttacacacctttagaattctagaatattaaaactgtaaggggcctccatccctcttactcatttgtagtctaggaaattgagattttgatacacctaaggtcacgcagctgggtagatatacagctgtcacaagagtctagatcagttagcacatgctttctactcttcgattattagtattattagctaatggtctttggcatgtttttgttttttatttctgttgagatatagcctttacatttgtacacaaatgtgactatgtcttggcaatgcacttcatacacaatgactaatctatactgtgatgatttgactcaaaaggagaaaagaaattatgtagttttcaattctgattcctattcaccttttgtttatgaatggaaagctttgtgcaaaatatacatataagcagagtaagccttttaaaaatgttctttgaaagataaaattaaatacatgagtttctaacaattaga

SEQ ID NO: 123134 - DNA, 771 bp, Artificial Sequence
  derived and/or modified sequence
taatacgactcactatagggaaataagagagaaaagaagagtaagaagaaatataagagccaccatgcacaaatggatactgacatggatcctgccaactttgctctacagatcatgctttcacattatctgtctagtgggtactatatctttagcttgcaatgacatgactccagagcaaatggctacaaatgtgaactgttccagccctgagcgacacacaagaagttatgattacatggaaggaggggatataagagtgagaagactcttctgtcgaacacagtggtacctgaggatcgataaaagaggcaaagtaaaagggacccaagagatgaagaataattacaatatcatggaaatcaggacagtggcagttggaattgtggcaatcaaaggggtggaaagtgaattctatcttgcaatgaacaaggaaggaaaactctatgcaaagaaagaatgcaatgaagattgtaacttcaaagaactaattctggaaaaccattacaacacatatgcatcagctaaatggacacacaacggaggggaaatgtttgttgccttaaatcaaaaggggattcctgtaagaggaaaaaaaacgaagaaagaacaaaaaacagcccactttcttcctatggcaataacttgataataggctggagcctcggtggccatgcttcttgccccttgggcctccccccagcccctcctccccttcctgcacccgtacccccgtggtctttgaataaagtctgagtgggcggctctaga

SEQ ID NO: 123135 - RNA, 585 nt, Artificial Sequence
  derived and/or modified sequence
augcacaaguggauccugacuuggauccuucccacuuuguuauaucggagcugcuuccacauuauuugucuggucgguaccaucucccuugcaugcaacgacaugaccccugaacagauggcaaccaacgugaacugcucuagccccgagagacauaccagaucauaugauuacauggaggggggcgauauccgcgugcgacgccuguuuugcagaacccagugguaccugagaaucgacaaacggggaaaaguaaaagguacucaagagaugaagaauaauuacaauaucauggagauacgaacaguggcagucggcauagucgcuauaaagggaguggaguccgaauucuauuuagccaugaacaaggagggcaaguuguaugccaaaaaggaguguaaugaagacuguaacuuuaaggagcuaauucucgaaaaccacuacaauaccuacgcuagcgcaaaauggacucauaauggaggggaaauguucguugccuuaaaucaaaaaggcauuccugucagggguaaaaaaacaaagaaggaacagaaaacugcucacuuccugccuauggcaauaacuuag

SEQ ID NO: 123136 - RNA, 585 nt, Artificial Sequence
  derived and/or modified sequence
augcauaaauggauccucacuuggauucuuccgacucuccucuauagaucuugcuuccacauuaucugucuaguggggacaaucagucuugccugcaacgacaugacccccgagcaaauggcaaccaacgugaauuguucuucaccugaaaggcacacccguaguuacgacuacauggagggaggagauauaagaguacgccggcuguuuuguagaacucagugguauuugcgcauugauaagagaggaaaggugaagggaacucaggagaugaaaaauaacuauaauauuauggagauacggacuguugccgugggaaucgucgcgauaaagggaguagagagcgaauuuuaccuugcaaugaauaaagagggaaagcuguaugccaagaaggaguguaacgaagacuguaauuuuaaggaacuuauuuuggagaaccacuacaacacauacgccucugccaaguggacacauaacgggggagaaauguuuguggcucuuaaucagaaggguaucccugucagagggaagaaaacaaaaaaggaacagaaaacggcccacuuccucccgauggcuauuacuuag

SEQ ID NO: 123137 - RNA, 585 nt, Artificial Sequence
  derived and/or modified sequence
augcacaaguggauccugacauggauucuacccacccuacuguaucgaaguugcuuucauauuauuugucucgucggcacaaucagccucgccuguaacgauaugacuccugagcagauggccacaaauguuaauuguagcucucccgaaagacacacgcgauccuacgacuacauggaggggggugauauucggguacgaagacucuuuugcagaacacagugguauuugcguaucgacaaacggggaaaggucaagggcacccaggaaaugaaaaauaauuacaauaucauggaaauucgaacaguggcagucggcauagucgcuauaaagggaguggaguccgaauucuauuuagccaugaacaaggagggcaaguuguaugccaaaaaggaguguaaugaagacuguaacuuuaaggagcuaauucucgaaaaccacuacaauaccuacgcuagcgcaaaauggacucauaauggaggggaaauguucguugccuuaaaucaaaaaggcauuccugucagggguaaaaaaacaaagaaggaacagaaaacugcucacuuccugccuauggcaauaacuuag

SEQ ID NO: 123138 - RNA, 585 nt, Artificial Sequence
  derived and/or modified sequence
augcauaaauggauauuaacuuggauucugccuacccuucuguauagaagcuguuuucacaucaucugccucguuggcacuauuucucuggcuuguaacgauaugacaccugaacaaauggcuaccaacguuaauugcaguucaccugaacgucacacacgauccuacgauuacauggagggcggagacaucagggugagacgucuguucuguagaacccagugguaccugagaauugacaagcgcgggaaagugaagggcacccaagaaaugaagaauaauuauaacauuauggagauuaggacugucgcugugggaauuguggcuaucaaagggguggagagcgaauuuuaucuggccaugaauaaagaaggcaaacuauacgcaaaaaaagaguguaaugaggauugcaauuuuaaggagcuuauucuggagaaucauuacaacaccuacgcuuccgcaaaauggacccacaacggaggggagauguucguugccuuaaaucagaaggguauaccuguucgggggaaaaagacgaagaaagagcagaagacagcucauuuccugccaauggcuauaacuuag

SEQ ID NO: 123139 - RNA, 743 nt, Artificial Sequence
  derived and/or modified sequence
gggaaauaagagagaaaagaagaguaagaagaaauauaagagccaccaugcacaaauggauacugacauggauccugccaacuuugcucuacagaucaugcuuucacauuaucugucuaguggguacuauaucuuuagcuugcaaugacaugacuccagagcaaauggcuacaaaugugaacuguuccagcccugagcgacacacaagaaguuaugauuacauggaaggaggggauauaagagugagaagacucuucugucgaacacagugguaccugaggaucgauaaaagaggcaaaguaaaagggacccaagagaugaagaauaauuacaauaucauggaaaucaggacaguggcaguuggaauuguggcaaucaaagggguggaaagugaauucuaucuugcaaugaacaaggaaggaaaacucuaugcaaagaaagaaugcaaugaagauuguaacuucaaagaacuaauucuggaaaaccauuacaacacauaugcaucagcuaaauggacacacaacggaggggaaauguuuguugccuuaaaucaaaaggggauuccuguaagaggaaaaaaaacgaagaaagaacaaaaaacagcccacuuucuuccuauggcaauaacuugauaauaggcuggagccucgguggccaugcuucuugccccuugggccuccccccagccccuccuccccuuccugcacccguacccccguggucuuugaauaaagucugagugg

SEQ ID NO: 123140 - protein, 208 aa, Artificial Sequence
  derived and/or modified sequence
MAPLGEVGNYFGVQDAVPFGNVPVLPVDSPVLLSDHLGQSEAGGLPRGPAVTDLDHLKGILRRRQLYCRTGFHLEIFPNGTIQGTRKDHSRFGILEFISIAVGLVSIRGVDSGLYLGMNEKGELYGSEKLTQECVFREQFEENWYNTYSSNLYKHVDTGRRYYVALNKDGTPREGTRTKRHQKFTHFLPRPVDPDKVPELYKDILSQS

SEQ ID NO: 123141 - DNA, 627 bp, Artificial Sequence
  derived and/or modified sequence
atggcccccctgggcgaggtgggcaactacttcggcgtgcaggacgccgtgcccttcggcaacgtgcccgtgctgcccgtggacagccccgtgctgctgagcgaccacctgggccagagcgaggccggcggcctgcccagaggccccgccgtgaccgacctggaccacctgaagggcatcctgagaagaagacagctgtactgcagaaccggcttccacctggagatcttccccaacggcaccatccagggcaccagaaaggaccacagcagattcggcatcctggagttcatcagcatcgccgtgggcctggtgagcatcagaggcgtggacagcggcctgtacctgggcatgaacgagaagggcgagctgtacggcagcgagaagctgacccaggagtgcgtgttcagagagcagttcgaggagaactggtacaacacctacagcagcaacctgtacaagcacgtggacaccggcagaagatactacgtggccctgaacaaggacggcacccccagagagggcaccagaaccaagagacaccagaagttcacccacttcctgcccagacccgtggaccccgacaaggtgcccgagctgtacaaggacatcctgagccagagctag

SEQ ID NO: 123142 - DNA, 627 bp, Artificial Sequence
  derived and/or modified sequence
atggcacctctcggagaggtgggtaactatttcggagtccaggatgctgtgccattcggaaacgttccggtgttacccgtggactctccagtcctattgtccgatcacttgggccaaagcgaagcaggaggcctgccaagagggccagcagttaccgatttggatcacttgaaggggatattacgtagacgccaactgtactgccgaactggttttcacctagaaatttttcccaatgggactatccagggcacacgcaaggaccactcgaggttcggtatcctggaattcatctctatcgctgttgggctggtttcaatcagaggagttgatagtgggctgtatctagggatgaatgagaaaggcgaactatacggaagcgaaaagttgacacaagaatgtgtgtttcgcgaacagttcgaagagaattggtacaatacttactcttctaatctgtataaacatgtagataccgggcggcggtattatgtggccctgaacaaggatggaactcctagggaggggacaagaaccaaacgccaccagaagttcacccatttcctgcctagacccgtagaccctgataaagtgcctgaactgtataaggacatccttagccagtcctag

SEQ ID NO: 123143 - DNA, 627 bp, Artificial Sequence
  derived and/or modified sequence
atggcccccctgggggaggtgggcaactactttggagtgcaggatgctgtgccctttggaaatgtgcctgtgctgcctgtggacagccctgtgctgctgagtgaccacctgggccagagcgaggccggcggcctgccccggggccctgctgtgacagacctggaccacctgaagggcatcctgcggcggcggcagctgtactgcaggacaggcttccacctggagatcttccccaacggcaccatccagggcaccaggaaggaccacagccgcttcggcatcctggagttcatcagcattgctgtgggcctggtgtccatccggggcgtggacagcggcctgtacctgggcatgaatgaaaaaggagagctgtatggcagcgagaagctgacccaggagtgtgtgttccgggagcagtttgaggagaactggtacaacacctacagcagcaacctgtacaagcacgtggacaccggccgccgctactacgtggccctgaacaaggatggcaccccccgggagggcaccaggaccaagaggcaccagaagttcacccacttcctgcccaggcctgtggaccctgacaaggtgcctgagctgtacaaggacatcctgagccagagctag

SEQ ID NO: 123144 - DNA, 627 bp, Artificial Sequence
  derived and/or modified sequence
atggcccccctgggcgaggtgggcaactacttcggcgtgcaggacgcggtgcccttcggaaacgtgcccgtgttaccggtggacagccctgtgctattgtccgaccatttgggtcaatctgaagctggagggctccccagaggcccagccgtcactgacttagaccacttaaagggaatcctcagacggcggcagctgtactgccgcactggattccatctagaaatctttccaaacggcaccatccagggcacaagaaaagaccatagcagatttggcattctggagttcatctccatcgctgtggggctcgtgtctatccgtggtgtggatagtggactctacctgggcatgaatgaaaaaggggaactgtatggttccgaaaagttaacccaggagtgcgtgttccgcgagcaattcgaggagaactggtacaacacatattcctcaaacctctacaagcacgttgacacaggccgaagatactatgtcgcccttaacaaagatggaacaccccgggagggtacgcggactaaacggcaccaaaaattcacccattttctcccccgaccagtagatccggacaaagtgcccgagctctacaaagatatcctaagccagtcatag

SEQ ID NO: 123145 - DNA, 627 bp, Artificial Sequence
  derived and/or modified sequence
atggcgcctctgggcgaagtgggaaattacttcggagtacaggacgccgtcccatttggtaacgttcctgtgctgcccgtcgattctcccgtgctcctgagtgatcatttgggtcagtcagaggctggaggcctacctaggggcccagccgtgacagatctggatcacttgaagggcatcctgcgcagacgccaactgtattgtcgcacaggctttcacctagagatctttcctaacggcacaatccagggaacccgaaaggaccactcacggtttggcatcctcgaattcattagtattgccgtaggactggtgtcaatccgaggcgtggattccggcctgtatttgggcatgaatgaaaagggcgagctgtatggttcggagaaattaacacaggaatgcgttttccgagagcagttcgaggaaaactggtataacacatacagttctaatctgtacaagcacgtggacaccggcagacgctattacgtcgccctgaacaaagacgggacgccgcgtgagggtacccgaacaaagcgccaccagaaatttacgcattttctcccaaggcctgtcgaccctgataaggtccctgagctttacaaagatatcctttctcagagctag

SEQ ID NO: 123146 - DNA, 4220 bp, Artificial Sequence
  derived and/or modified sequence
ttccccttgaaggattcatgctgatgtctgcagagtcggttagagagtaaaaacagcgcatgccttcctggagtcaggatccgtaaattctgacgtagcccgtgcatcttaaaaatccctataataacgcctaggcatttaagttgctatggtcattctgatctcaaaccaaatggagaaactacggattttttttccttattacggtcggatgggatgaagaccttcctgcctgctaagagctggggatctatctatagagatacatagatatgtttatcaatatgtcagtgtgtgagtataaagtggtggtttcttagactatcagtggtttgaccttgaacctgtgccagtgaaacagcagattacttttatttatgcatttaatggattgaagaaaagaaccttttttttctctctctctctgcaactgcagtaagggaggggagttggatatacctcgcctaatatctcctgggttgacaccatcattattgtttattcttgtgctccaaaagccgagtcctctgatggctcccttaggtgaagttgggaactatttcggtgtgcaggatgcggtaccgtttgggaatgtgcccgtgttgccggtggacagcccggttttgttaagtgaccacctgggtcagtccgaagcaggggggctccccaggggacccgcagtcacggacttggatcatttaaaggggattctcaggcggaggcagctatactgcaggactggatttcacttagaaatcttccccaatggtactatccagggaaccaggaaagaccacagccgatttggcattctggaatttatcagtatagcagtgggcctggtcagcattcgaggcgtggacagtggactctacctcgggatgaatgagaagggggagctgtatggatcagaaaaactaacccaagagtgtgtattcagagaacagttcgaagaaaactggtataatacgtactcatcaaacctatataagcacgtggacactggaaggcgatactatgttgcattaaataaagatgggaccccgagagaagggactaggactaaacggcaccagaaattcacacattttttacctagaccagtggaccccgacaaagtacctgaactgtataaggatattctaagccaaagttgacaaagacagtttcttcacttgagcccttaaaaaagtaaccactataaaggtttcacgcggtgggttcttattgattcgctgtgtcatcacatcagctccactgttgccaaactttgtcgcatgcataatgtatgatggaggcttggatgggaatatgctgattttgttctgcacttaaaggcttctcctcctggagggctgcctagggccacttgcttgatttatcatgagagaagaggagagagagagagactgagcgctaggagtgtgtgtatgtgtgtgtgtgtgtgtgtgtgtgtgtgtgtatgtgtgtagcgggagatgtgggcggagcgagagcaaaaggactgcggcctgatgcatgctggaaaaagacacgcttttcatttctgatcagttgtacttcatcctatatcagcacagctgccatacttcgacttatcaggattctggctggtggcctgcgcgagggtgcagtcttacttaaaagactttcagttaattctcactggtatcatcgcagtgaacttaaagcaaagacctcttagtaaaaaataaaaaaaaataaaaaataaaaataaaaaaagttaaatttatttatagaaattccaaaggcaacattttatttattttatatatttatttattatatagagtttatttttaatgaaacatgtacaggccagataggcattttggaagctttaggctctgtaagcattaaatggcaaagtccgctatgaacctgtggtaaattcatgcaagtagatataatggtgcatggatataagaaattctaatgaccctaatgtactaaaggcgacaatctcttttgtgcccatattattgtaaacttatgcacatcgctcatgacactgagtattcactcttcagactgcttgtttcatagcttatcccagaggattaaagataaactgggtctcaaactttgattctgtgtctgcaatatttcctctctcataagtgactccactattgtaacttcatggttggaaaatatgagggttgatatatgtcttacttgtttaaatctgtcgcagaatataccaaagctaaataataactatgctttcattttagccgatctccagaatgacagtattaacatcaaacattgtattgatttagaattctcaaaaaaggaaaaaaaagtacatagcacagactattttttttaaagacgtaagaatcagattaacaggatcatacttgtaaactttttttggttcacttggctatcaaatatgaaattatagaagtatcataggggtcattgtaacatcttttagagaaaatggctatcagtgtgaactgtcataattacgtggtaatagcacccttagtaaaacttgcaaaatgaaactaataaatcgttatcaataatgacaatgagggggaaagtattatacttgttgactgtgttttgttttttaaaatggtctccacaagcgctcaatttttttagaggggatattactatatagaatatcttttacaaggcttttataacattttatgctgaaaagcataagaatacgtatttctttagtagcaataattttggaacttgcccttgggcaagcgagactatttcttactatatactaaggagaaaagagccaaattcttaaagcaatatttaagaaaaaaggaatttataacaaattctcatctacatatgacactttctagccagttgtgttgagaagtgcaaagtgacggtttaaacatgtgttgggatttattgaactaattttaaaatttactattcaaactttattttgctctgatgcacattctctatgaaaaataaaagtgtgtcactggtgagtgacagctgttatgagctagaagcgcatgacttattgtgacgatgtcttgcctttctgtggtccaagttggagtacatggcaatgccctcctgctgatgtgcattaaggaaaatctaagtctaatatttggaattaagatatattttagggggaggggacagaagcaatgtaaaatagttgatttatgataaagctcagaatgtcctcttcatttattttcttgttttattttcctttctaaacagaaactgcatttaattccaaaaagtagtattcttatttattatttaaccctttgctgctgctaaaatgtgcacatattcaggctttagtttttccaaaaggcattttttttttggctgaaaaatattaaacatttgaccacagggaagaatcaagtttctaggatgtcataggtatactatgtagcactgaaaaaattgattttaggtgacagccaaaagtagtcttaaagtagcatgagaccttagataatcgacctaaaagaaagaaaattgtgaaaaagacaaaaatcttcatgcattcctataaaacgctactttaaggtctacttttggagttaattttgtttggtactttttttttttttaagacgagcaaattgttatatgcttttggcaattgatacaataaactgtaatggtctgtaaataaataaatattgactcatgcgatttatgtaaatagtggaactgggagagtggatggctcagggtttcggtgtgggcattgtctcttgggcagtagagtgagtcatccccagctcatgggtttgcatccagttcttgtcttaagagacccaaagcccagtgaatggcagccctgagccactgtggaatgggggttctggtttcacaaacagatgcttagatagccaaaccactgtcttgttggtgccaacacttgcactgtggtcaaagacttaccgagcatgggctgaacaaccttcccatctgtcatgtgaatgtccccaagcagtggtgaaggacatgctaggtcagtgttggggaacctgccctgccaggtcctgttttgtagataaacaaatggctgccttctggtgtttttattctatttcatctcattaacactacaaccttgtgttatttacttgataatctgtaattgtatgtaaatacatacaggattatgtaatttgtgtaaatacataattacagagttttgaaaa

SEQ ID NO: 123147 - DNA, 369 bp, Artificial Sequence
  derived and/or modified sequence
atgagtgctacctggtgctccccggaaggacaggggatgggacagggcccaggaagggaagtcggcggcaactcagctgcctccggacccgcatccccgatacgtgatccttgtctgtccgaggccggactgaaaggccccccctctgctcatccacgccgcctgtgtctgttgcacaggctggtgtgtttttccgggggcctgacatccatccagctttcccctagaacttgttgtagccatcagtgggctcagctgttttccccagcctgtttcccccagtggcgcgcaccagggtgctctctagacgactcccggtccctgacacgaatccgacctgtgcacctccctggaccgagtctggactag

SEQ ID NO: 123148 - DNA, 4545 bp, Artificial Sequence
  derived and/or modified sequence
actctgcgcgccggcgggggctgcgcaggaggagcgctccgcccggctacaacgctccgcgagccggcgcggcaacacctgttcgcggcagcctgggcggcacgcgagctcccggacgcggctctcctcgctcgccgctcgccacccgttctaagccaatggacatctgccgagcctctggagaatcctggatactagctttggacgcctaaagtttcttcttctttttgttttattattattatcattttttggaggggggaccgggaggggagatttgtcgccgccaccaacgtgagatttttttttccccttgaaggattcatgctgatgtctgcagagtcggttagagagtaaaaacagcgcatgccttcctggagtcaggatccgtaaattctgacgtagcccgtgcatcttaaaaatccctataataacgcctaggcatttaagttgctatggtcattctgatctcaaaccaaatggagaaactacggattttttttccttattacggtcggatgggatgaagaccttcctgcctgctaagagctggggatctatctatagagatacatagatatgtttatcaatatgtcagtgtgtgagtataaagtggtggtttcttagactatcagtggtttgaccttgaacctgtgccagtgaaacagcagattacttttatttatgcatttaatggattgaagaaaagaaccttttttttctctctctctctgcaactgcagtaagggaggggagttggatatacctcgcctaatatctcctgggttgacaccatcattattgtttattcttgtgctccaaaagccgagtcctctgatggctcccttaggtgaagttgggaactatttcggtgtgcaggatgcggtaccgtttgggaatgtgcccgtgttgccggtggacagcccggttttgttaagtgaccacctgggtcagtccgaagcaggggggctccccaggggacccgcagtcacggacttggatcatttaaaggggattctcaggcggaggcagctatactgcaggactggatttcacttagaaatcttccccaatggtactatccagggaaccaggaaagaccacagccgatttggcattctggaatttatcagtatagcagtgggcctggtcagcattcgaggcgtggacagtggactctacctcgggatgaatgagaagggggagctgtatggatcagaaaaactaacccaagagtgtgtattcagagaacagttcgaagaaaactggtataatacgtactcatcaaacctatataagcacgtggacactggaaggcgatactatgttgcattaaataaagatgggaccccgagagaagggactaggactaaacggcaccagaaattcacacattttttacctagaccagtggaccccgacaaagtacctgaactgtataaggatattctaagccaaagttgacaaagacagtttcttcacttgagcccttaaaaaagtaaccactataaaggtttcacgcggtgggttcttattgattcgctgtgtcatcacatcagctccactgttgccaaactttgtcgcatgcataatgtatgatggaggcttggatgggaatatgctgattttgttctgcacttaaaggcttctcctcctggagggctgcctagggccacttgcttgatttatcatgagagaagaggagagagagagagactgagcgctaggagtgtgtgtatgtgtgtgtgtgtgtgtgtgtgtgtgtgtgtatgtgtgtagcgggagatgtgggcggagcgagagcaaaaggactgcggcctgatgcatgctggaaaaagacacgcttttcatttctgatcagttgtacttcatcctatatcagcacagctgccatacttcgacttatcaggattctggctggtggcctgcgcgagggtgcagtcttacttaaaagactttcagttaattctcactggtatcatcgcagtgaacttaaagcaaagacctcttagtaaaaaataaaaaaaaataaaaaataaaaataaaaaaagttaaatttatttatagaaattccaaaggcaacattttatttattttatatatttatttattatatagagtttatttttaatgaaacatgtacaggccagataggcattttggaagctttaggctctgtaagcattaaatggcaaagtccgctatgaacctgtggtaaattcatgcaagtagatataatggtgcatggatataagaaattctaatgaccctaatgtactaaaggcgacaatctcttttgtgcccatattattgtaaacttatgcacatcgctcatgacactgagtattcactcttcagactgcttgtttcatagcttatcccagaggattaaagataaactgggtctcaaactttgattctgtgtctgcaatatttcctctctcataagtgactccactattgtaacttcatggttggaaaatatgagggttgatatatgtcttacttgtttaaatctgtcgcagaatataccaaagctaaataataactatgctttcattttagccgatctccagaatgacagtattaacatcaaacattgtattgatttagaattctcaaaaaaggaaaaaaaagtacatagcacagactattttttttaaagacgtaagaatcagattaacaggatcatacttgtaaactttttttggttcacttggctatcaaatatgaaattatagaagtatcataggggtcattgtaacatcttttagagaaaatggctatcagtgtgaactgtcataattacgtggtaatagcacccttagtaaaacttgcaaaatgaaactaataaatcgttatcaataatgacaatgagggggaaagtattatacttgttgactgtgttttgttttttaaaatggtctccacaagcgctcaatttttttagaggggatattactatatagaatatcttttacaaggcttttataacattttatgctgaaaagcataagaatacgtatttctttagtagcaataattttggaacttgcccttgggcaagcgagactatttcttactatatactaaggagaaaagagccaaattcttaaagcaatatttaagaaaaaaggaatttataacaaattctcatctacatatgacactttctagccagttgtgttgagaagtgcaaagtgacggtttaaacatgtgttgggatttattgaactaattttaaaatttactattcaaactttattttgctctgatgcacattctctatgaaaaataaaagtgtgtcactggtgagtgacagctgttatgagctagaagcgcatgacttattgtgacgatgtcttgcctttctgtggtccaagttggagtacatggcaatgccctcctgctgatgtgcattaaggaaaatctaagtctaatatttggaattaagatatattttagggggaggggacagaagcaatgtaaaatagttgatttatgataaagctcagaatgtcctcttcatttattttcttgttttattttcctttctaaacagaaactgcatttaattccaaaaagtagtattcttatttattatttaaccctttgctgctgctaaaatgtgcacatattcaggctttagtttttccaaaaggcattttttttttggctgaaaaatattaaacatttgaccacagggaagaatcaagtttctaggatgtcataggtatactatgtagcactgaaaaaattgattttaggtgacagccaaaagtagtcttaaagtagcatgagaccttagataatcgacctaaaagaaagaaaattgtgaaaaagacaaaaatcttcatgcattcctataaaacgctactttaaggtctacttttggagttaattttgtttggtactttttttttttttaagacgagcaaattgttatatgcttttggcaattgatacaataaactgtaatggtctgtaaataaataaatattgactcatgcgatttatgtaaatagtggaactgggagagtggatggctcagggtttcggtgtgggcattgtctcttgggcagtagagtgagtcatccccagctcatgggtttgcatccagttcttgtcttaagagacccaaagcccagtgaatggcagccctgagccactgtggaatgggggttctggtttcacaaacagatgcttagatagccaaaccactgtcttgttggtgccaacacttgcactgtggtcaaagacttaccgagcatgggctgaacaaccttcccatctgtcatgtgaatgtccccaagcagtggtgaaggacatgctaggtcagtgttggggaacctgccctgccaggtcctgttttgtagataaacaaatggctgccttctggtgtttttattctatttcatctcattaacactacaaccttgtgttatttacttgataatctgtaattgtatgtaaatacatacaggattatgtaatttgtgtaaatacataattacagagttttgaaaactgaaaaaaaaaaaaaaa

SEQ ID NO: 123149 - protein, 147 aa, Artificial Sequence
  derived and/or modified sequence
MSFRFGQHLIKPSVVFLKTELSFALVNRKPVVPGHVLVCPLRPVERFHDLRPDEVADLFQTTQRVGTVVEKHFHGTSLTFSMQDGPEAGQTVKHVHVHVLPRKAGDFHRNDSIYEELQKHDKEDFPASWRSEEEMAAEAAALRVYFQ

SEQ ID NO: 123150 - DNA, 444 bp, Artificial Sequence
  derived and/or modified sequence
atgagcttcagattcggccagcacctgatcaagcccagcgtggtgttcctgaagaccgagctgagcttcgccctggtgaacagaaagcccgtggtgcccggccacgtgctggtgtgccccctgagacccgtggagagattccacgacctgagacccgacgaggtggccgacctgttccagaccacccagagagtgggcaccgtggtggagaagcacttccacggcaccagcctgaccttcagcatgcaggacggccccgaggccggccagaccgtgaagcacgtgcacgtgcacgtgctgcccagaaaggccggcgacttccacagaaacgacagcatctacgaggagctgcagaagcacgacaaggaggacttccccgccagctggagaagcgaggaggagatggccgccgaggccgccgccctgagagtgtacttccagtag

SEQ ID NO: 123151 - DNA, 444 bp, Artificial Sequence
  derived and/or modified sequence
atgtccttccgatttggacaacacctgatcaaaccatcagtggtgtttctgaagaccgagctctcattcgcactggtgaataggaaaccggtggtgcccggacacgtcctagtatgtccactccggcccgtcgagagattccatgatctcaggccagatgaggtcgcggacctctttcagaccacacagagagtcggaacagttgtggagaagcatttccacggcaccagtctgaccttcagcatgcaggatggccctgaggctggtcagacagtgaagcacgtgcatgtccatgtcctgcctcggaaggccggcgattttcataggaacgatagcatttacgaagagttgcaaaaacatgacaaagaagattttcccgccagttggcgctccgaggaggaaatggcagccgaggcggccgcactccgcgtttatttccagtag

SEQ ID NO: 123152 - DNA, 444 bp, Artificial Sequence
  derived and/or modified sequence
atgtcctttcgattcggtcaacatttaatcaagccatcagttgttttcttaaagactgagctgtcatttgctctggtaaacaggaagccagtagtccccggacacgtgctggtgtgtcccctgaggcccgtggagagatttcacgatttacggcctgacgaagtagccgacctgttccaaacaacacagagggttggaacagttgtcgaaaagcactttcatggaaccagtctgacattttcaatgcaggacggacccgaagctggacagacagtcaaacacgtccacgttcatgtgctgccccgtaaggctggggacttccacagaaacgacagtatttatgaagagctgcaaaagcatgataaggaggacttccctgctagttggcgcagcgaagaagaaatggcagcagaagctgctgccctccgggtctactttcaatag

SEQ ID NO: 123153 - DNA, 444 bp, Artificial Sequence
  derived and/or modified sequence
atgagcttccgcttcggtcaacaccttataaagccgagtgtcgtctttctcaagaccgagctgtccttcgcattagtcaaccgaaaacccgtcgtccctggacacgtgttagtgtgcccacttcgcccagtggaacgctttcacgatctgaggcctgacgaagttgcggatctgtttcagaccacgcagcgggtgggcacagtggttgagaaacacttccacggtacttcactgacattttcaatgcaggacggtcctgaggccggacagacggtcaaacatgtgcatgttcacgtgctgccacgcaaggccggtgattttcaccggaatgactcaatatatgaagaactgcagaagcatgacaaagaggatttccccgcttcctggaggagcgaagaggagatggccgccgaggccgccgcgcttagagtatattttcagtag

SEQ ID NO: 123154 - DNA, 444 bp, Artificial Sequence
  derived and/or modified sequence
atgtcgtttcgctttggccagcatctgattaagccatcagtggtatttctgaagacagaactttcatttgccttggtcaaccgcaaacccgtggtacctggccacgttctggtgtgtccactcagaccagttgagcgattccacgatctgaggcccgacgaggtcgcggatctctttcagaccactcaaagggttgggacagtcgtggagaagcatttccacggcacctccctcactttcagcatgcaggatggacctgaggcaggacagacagtgaagcatgtgcacgtccacgttctaccgaggaaggccggcgattttcatcggaatgacagcatttatgaggaactgcagaagcatgataaggaagacttccctgcgagctggcgcagtgaagaagagatggccgccgaagccgccgccttgcgcgtatattttcagtag

SEQ ID NO: 123155 - DNA, 444 bp, Artificial Sequence
  derived and/or modified sequence
atgtcgttcagatttggccaacatctcatcaagccctctgtagtgtttctcaaaacagaactgtccttcgctcttgtgaataggaaacctgtggtaccaggacatgtccttgtgtgcccgctgcggccagtggagcgcttccatgacctgcgtcctgatgaagtggccgatttgtttcagacgacccagagagtcgggacagtggtggaaaaacatttccatgggacctctctcaccttttccatgcaggatggccccgaagccggacagactgtgaagcacgttcacgtccatgttcttcccaggaaggctggagactttcacaggaatgacagcatctatgaggagctccagaaacatgacaaggaggactttcctgcctcttggagatcagaggaggaaatggcagcagaagccgcagctctgcgggtctactttcagtga

SEQ ID NO: 123156 - DNA, 1634 bp, Artificial Sequence
  derived and/or modified sequence
gaattgcagtccccgctctgctctgtccggtcacaggactttttgccctctgttcccgggtccctcaggcggccacccagtgggcacactcccaggcggcgctccggccccgcgctccctccctctgcctttcattcccagctgtcaacatcctggaagctttgaagctcaggaaagaagagaaatccactgagaacagtctgtaaaggtccgtagtgctatctacatccagacggtggaagggagagaaagagaaagaaggtatcctaggaatacctgcctgcttagaccctctataaaagctctgtgcatcctgccactgaggactccgaagaggtagcagtcttctgaaagacttcaactgtgaggacatgtcgttcagatttggccaacatctcatcaagccctctgtagtgtttctcaaaacagaactgtccttcgctcttgtgaataggaaacctgtggtaccaggacatgtccttgtgtgcccgctgcggccagtggagcgcttccatgacctgcgtcctgatgaagtggccgatttgtttcagacgacccagagagtcgggacagtggtggaaaaacatttccatgggacctctctcaccttttccatgcaggatggccccgaagccggacagactgtgaagcacgttcacgtccatgttcttcccaggaaggctggagactttcacaggaatgacagcatctatgaggagctccagaaacatgacaaggaggactttcctgcctcttggagatcagaggaggaaatggcagcagaagccgcagctctgcgggtctactttcagtgacacaggtaaagactgcatttcgtcattacccagaccctcccgtgggcctcaggaaagaggctgcactctcagaatggggatgcacaaaaacaccttcaccagcatccttgggtggtggctgcaaaggacaaagagctggaggggagaaaaccctggcccttgagtactgtattcccagcctcccagtctcttccaactctcctgcctcttcactctcttcttccaagccagtgcccccagcccaccaccacctttctccagtctttcctgcggtggtgctcctccagaatccaatgttcacaaagcagaccttctgtcatgcacaacttcttgtttaaaaggtcaaccccaacttaacttaaaggtgtgacatggcccttaggctcaagtctgtctgcaaagccctgtaaaccagctttctctgcctccctaacacgcccccgggcaaactcctctgctttcactgagtggactcttctcttcagttgctatttggtaaattgcccttcatgtttccctttatgttcggctcctaggaagctcaggccacagggaaaagtcaaggcttgatagaattaatctttgtcttaatgatgactaactgttgagagatcataggtttaagactctggtagaaagatagctatagccaatttccttgtcaaaatgcttctactccaaatttttatgcagtgtctaacgagctcatgcctagatctatctggcaatctatattatccctcctagtctcagttcacatagtagactgctggaatgactgagggtgatgtttggcctgtaaacaaaaagtgttaaaga

SEQ ID NO: 123157 - DNA, 1033 bp, Artificial Sequence
  derived and/or modified sequence
cctctgttcccgggtccctcaggcggccacccagtgggcacactcccaggcggcgctccggccccgcgctccctccctctgcctttcattcccagctgtcaacatcctggaagctttgaagctcaggaaagaagagaaatccactgagaacagtctgtaaaggtccgtagtgctatctacatccagacggtggaagggagagaaagagaaagaaggtatcctaggaatacctgcctgcttagaccctctataaaagctctgtgcatcctgccactgaggactccgaagaggtagcagtcttctgaaagacttcaactgtgaggacatgtcgttcagatttggccaacatctcatcaagccctctgtagtgtttctcaaaacagaactgtccttcgctcttgtgaataggaaacctgtggtaccaggacatgtccttgtgtgcccgctgcggccagtggagcgcttccatgacctgcgtcctgatgaagtggccgatttgtttcagacgacccagagagtcgggacagtggtggaaaaacatttccatgggacctctctcaccttttccatgcaggatggccccgaagccggacagactgtgaagcacgttcacgtccatgttcttcccaggaaggctggagactttcacaggaatgacagcatctatgaggagctccagaaacatgacaaggaggactttcctgcctcttggagatcagaggaggaaatggcagcagaagccgcagctctgcgggtctactttcagtgacacagatcctgaattccagcaaaagagctattgccaaccagtttgaagaccgccccccgcctctccccaagaggaactgaatcagcatgaaaatgcagtttcttcatctcaccatcctgtattcttcaaccagtgatcccccacctcggtcactccaactcccttaaaatacctagacctaaacggctcagacaggcagatttgaggtttccccctgtctccttattcggcagccttatgattaaacttccttctctgctgcaa

SEQ ID NO: 123158 - DNA, 1081 bp, Artificial Sequence
  derived and/or modified sequence
tccccgctctgctctgtccggtcacaggactttttgccctctgttcccgggtccctcaggcggccacccagtgggcacactcccaggcggcgctccggccccgcgctccctccctctgcctttcattcccagctgtcaacatcctggaagctttgaagctcaggaaagaagagaaatccactgagaacagtctgtaaaggtccgtagtgctatctacatccagacggtggaagggagagaaagagaaagaaggtatcctaggaatacctgcctgcttagaccctctataaaagctctgtgcatcctgccactgaggactccgaagaggtagcagtcttctgaaagacttcaactgtgaggacatgtcgttcagatttggccaacatctcatcaagccctctgtagtgtttctcaaaacagaactgtccttcgctcttgtgaataggaaacctgtggtaccaggacatgtccttgtgtgcccgctgcggccagtggagcgcttccatgacctgcgtcctgatgaagtggccgatttgtttcagacgacccagagagtcgggacagtggtggaaaaacatttccatgggacctctctcaccttttccatgcaggatggccccgaagccggacagactgtgaagcacgttcacgtccatgttcttcccaggaaggctggagactttcacaggaatgacagcatctatgaggagctccagaaacatgacaaggaggactttcctgcctcttggagatcagaggaggaaatggcagcagaagccgcagctctgcgggtctactttcagtgacacagatgtttttcagatcctgaattccagcaaaagagctattgccaaccagtttgaagaccgccccccgcctctccccaagaggaactgaatcagcatgaaaatgcagtttcttcatctcaccatcctgtattcttcaaccagtgatcccccacctcggtcactccaactcccttaaaatacctagacctaaacggctcagacaggcagatttgaggtttccccctgtctccttattcggcagccttatgattaaacttccttctctgctgcaa

SEQ ID NO: 123159 - DNA, 444 bp, Artificial Sequence
  derived and/or modified sequence
atgtccttccgcttcggccagcacctgatcaagcccagcgtggtgttcctgaagacagagctgagctttgccctggtgaacaggaagcctgtggtgcccggccacgtgctggtgtgccccctgcggcctgtggagcgcttccatgacctgcggccagatgaggtggccgacctcttccagaccacccagagggtgggcaccgtggtggagaagcacttccacggcaccagcctgaccttctccatgcaggacggccctgaggccggccagacagtgaagcacgtgcacgtgcacgtgctgcccaggaaggccggggacttccacagaaatgacagcatctatgaggagctgcagaagcatgacaaggaggacttccctgcctcctggaggtctgaggaggagatggctgctgaggccgccgccctgcgggtgtacttccagtag

SEQ ID NO: 123160 - DNA, 444 bp, Artificial Sequence
  derived and/or modified sequence
atgagcttccggttcggccagcacctgatcaagcccagcgtggtgtttctcaagacagagctttcttttgctttggttaacaggaagcccgtagtgccaggccacgtgttggtttgtccgctccgacctgtcgagcgatttcacgatctccgaccagatgaagtggccgatctctttcaaacgacacagcgagtggggaccgttgtggaaaaacatttccatggaaccagcctcaccttctcaatgcaggacgggcctgaggccggccagaccgtaaagcatgtgcacgtgcacgtgcttccacgcaaagcgggagattttcaccgtaatgactcaatctacgaagaattgcagaagcatgataaggaggatttcccggcctcttggcggagcgaggaggaaatggctgcagaggcagccgccctgagggtttatttccagtag

SEQ ID NO: 123161 - DNA, 444 bp, Artificial Sequence
  derived and/or modified sequence
atgagcttccggttcggccagcacctgatcaagcccagcgtggtgttcctcaagacagaactgtctttcgccctggtgaacaggaagccggtggtgcctggtcatgtgctcgtgtgcccactcagacctgttgaaaggttccatgatctccgaccagatgaggtcgccgacctgttccagactacacagcgggtggggacggttgttgagaagcatttccacggcacctccttgacttttagcatgcaagacgggcccgaagccggtcagacggtgaagcatgtgcacgtgcacgtattgcccagaaaggccggagactttcacagaaacgatagtatctacgaggagctgcagaagcacgacaaggaggattttcccgcgagttggcgctccgaagaggagatggctgccgaggccgccgccttgagagtctacttccaatag

SEQ ID NO: 123162 - DNA, 444 bp, Artificial Sequence
  derived and/or modified sequence
atgagcttccggttcggccagcacctgatcaagcccagcgtggtgttcctaaagactgaattaagcttcgccctcgtaaacaggaaaccagtggttcccggtcatgtgttagtgtgcccgcttaggccagtggaaaggttccatgacctccggcctgacgaggtcgcggaccttttccagaccacccagagagtagggacagtggtcgaaaaacattttcatggcacttctctgaccttcagcatgcaagacggccccgaggcaggacagactgttaagcatgtgcacgttcatgtcctgccgcgtaaagctggtgattttcatcgaaatgacagtatctatgaagaactgcagaagcacgacaaggaggactttcccgcctcctggaggagtgaagaggagatggccgccgaggccgcggcactgagggtgtacttccagtag

SEQ ID NO: 123163 - DNA, 444 bp, Artificial Sequence
  derived and/or modified sequence
atgagcttccggttcggccagcacctgatcaagcccagcgtggtgtttctgaaaacagaactctcatttgctttagttaatcggaagcccgttgtgcctgggcacgtcctcgtttgccccctgagacccgtggagcgatttcacgacctcagacctgacgaggtcgccgacttatttcagacgacccagagagtgggcactgtggtggaaaaacattttcacggcacctcacttacgttttccatgcaagacgggccggaggccgggcagacggtcaagcacgtgcacgttcacgtcctccccagaaaggccggagacttccataggaatgattctatctacgaggagctgcagaaacacgataaggaggacttccctgcctcatggcggagcgaggaggaaatggctgcggaagctgccgctctgagggtatacttccagtag

SEQ ID NO: 123164 - DNA, 444 bp, Artificial Sequence
  derived and/or modified sequence
atgtccttcaggttcggtcagcatctgataaagccttccgtggtcttcttaaaaacagagctatcattcgcattggtgaaccgcaagcccgtggtgcccggacatgtcttggtttgtcccctcaggccagtcgaacggtttcacgatctgagacctgatgaagtggccgatcttttccagacgactcagagagttgggacagtggtggaaaaacactttcacggcacaagtctgacgttctcaatgcaggatggccctgaagccggacagaccgtcaaacatgtacatgtgcatgtgctgccccgtaaagctggagatttccaccgcaatgactctatttacgaagagctgcagaaacatgataaggaggattttcctgcatcttggagatctgaagaggaaatggcagcggaagctgctgccttaagagtgtatttccagtag

SEQ ID NO: 123165 - DNA, 444 bp, Artificial Sequence
  derived and/or modified sequence
atgtccttcaggttcggccagcatctgataaagccgagtgtggtcttccttaaaacggagctgtcgtttgccctggtcaaccggaagccagtagtccctggccatgtgctcgtttgcccacttcgcccagtggaacgctttcacgacctccgccctgacgaggtggctgacctatttcagaccacgcaaagggttggaaccgtggtggagaaacattttcacggcaccagtctcacattttctatgcaggatggacccgaagccggacaaaccgtgaagcacgtgcacgtccacgtcctgccaagaaaagctggcgacttccacaggaatgactccatctacgaggaactgcagaagcatgacaaggaagacttccctgcaagctggaggagtgaagaggagatggcagccgaggcagcagccttgagagtttacttccaatag

SEQ ID NO: 123166 - DNA, 444 bp, Artificial Sequence
  derived and/or modified sequence
atgagtttccgttttggccaacatctgattaagccttcagttgtcttcctgaagactgagctctccttcgccttggttaaccgaaagcctgtcgtgccaggccatgtgctggtctgtcctttgcggcctgtggaaagattccacgacctccgtccagacgaagtggctgacctgttccagacaacccagcgcgtgggtaccgttgtcgagaaacatttccacggaacctccctgacattcagcatgcaagacgggcctgaagccggacagactgtaaagcacgtgcacgtccacgtgttgcctcggaaggctggtgactttcaccgcaatgactctatttatgaggagcttcagaagcatgacaaggaggactttcctgcttcttggagatctgaggaggaaatggcagccgaggctgccgctcttagggtatacttccaatag

SEQ ID NO: 123167 - DNA, 444 bp, Artificial Sequence
  derived and/or modified sequence
atgtcttttcggtttggacagcacctcattaagccaagcgttgtcttcttaaagacggagctaagttttgctctggtgaaccggaagccagtcgtgcctgggcacgtactggtgtgtccactccgcccagtggaacggttccacgatctcaggcccgatgaggtggccgatttatttcagactacccagcgcgttggaacagttgtggaaaagcattttcacggtaccagtctcacattctctatgcaggatggacccgaggcaggccagacagtaaagcatgtgcacgtgcacgtgctcccgagaaaggccggtgacttccatcgcaacgatagcatttatgaggaactgcagaagcacgataaggaggatttcccggcatcttggagatctgaggaagaaatggctgccgaggccgcagctttgcgcgtgtatttccagtag

SEQ ID NO: 123168 - DNA, 444 bp, Artificial Sequence
  derived and/or modified sequence
atgagcttccgttttggccagcacttgatcaaacccagcgtggtgttcctcaagacagaattatcattcgctctggtgaatagaaaacctgttgtccctgggcatgtcctagtgtgtcctctcaggcccgtcgaacggtttcacgacctgcgaccggacgaggtcgccgacttgtttcaaaccacacagcgggtggggaccgttgtcgagaagcacttccacggcacaagcctgacttttagtatgcaggatggcccagaggcagggcagaccgtcaagcacgtgcatgttcatgtgctcccccggaaggctggcgatttccataggaacgactcgatctatgaagaactgcagaagcacgataaagaagacttcccagcttcctggcgtagtgaagaggagatggctgctgaagcagcggccctaagagtgtacttccagtag

SEQ ID NO: 123169 - DNA, 444 bp, Artificial Sequence
  derived and/or modified sequence
atgagcttccggttcggccagcacctgatcaagcccagcgtggtgtttctaaaaacggagttgtctttcgccttggtaaatcgaaaaccagtcgttcctggacacgtgttggtgtgtcccttgagaccagtggaaagattccacgatctgcgtccagatgaggttgcagacctgttccagacaacccagcgggtcggaactgtggtggagaagcactttcacggaactagtctaactttttcaatgcaggatggtcccgaagccggacagaccgttaagcacgtacatgtgcacgtgctgccacggaaggctggcgatttccatagaaatgacagcatctacgaagaactccaaaaacatgataaagaagatttcccagcgtcctggcggtccgaggaagagatggcggcagaagctgccgcattaagagtgtatttccagtag

SEQ ID NO: 123170 - DNA, 444 bp, Artificial Sequence
  derived and/or modified sequence
atgtccttccggtttggtcagcatctgatcaaacccagcgttgtgttcttgaagaccgagttgagtttcgcgctcgtgaatcgaaaacccgtggtccctggacacgtgctggtatgtcccttgcgccctgtggagcgcttccacgacctgagacccgacgaggttgccgatctgtttcaaacaacccagcgggtcgggactgtagtggaaaagcacttccacggcacttcgctgactttctcaatgcaggatggccctgaggccggtcagacagttaagcacgttcacgtacatgtgctccctcgaaaggccggtgactttcataggaatgattccatctacgaagagctccagaaacatgacaaagaggatttccctgcatcctggagatctgaagaagagatggccgctgaggcagctgctcttcgagtctactttcagtag

SEQ ID NO: 123171 - protein, 224 aa, Artificial Sequence
  derived and/or modified sequence
MAAAVPQRAWTVEQLRSEQLPKKDIIKFLQEHGSDSFLAEHKLLGNIKNVAKTANKDHLVTAYNHLFETKRFKGTESISKVSEQVKNVKLNEDKPKETKSEETLDEGPPKYTKSVLKKGDKTNFPKKGDVVHCWYTGTLQDGTVFDTNIQTSAKKKKNAKPLSFKVGVGKVIRGWDEALLTMSKGEKARLEIEPEWAYGKKGQPDAKIPPNAKLTFEVELVDID

SEQ ID NO: 123172 - DNA, 1684 bp, Artificial Sequence
  derived and/or modified sequence
gtcagcctacatttttttaagtaaggagtcctgatgttcaactattaaatctttattataggttatagactggactttaaaggcatagctgccttaaatgtgggtaatggttgataaatgtcgctaccatcagaggtcgcttcacaaggtgtctaattcagaatcgaagatctctagcggtcttctactcagtcgactgcagagacgaccgcggtaggtttttcaacccggactcaacaaagaagccctcatagcacagccttgacgtcactcaaagacaggccccaatcccgactgctagagcagaggcccgcccctcgacctccgtgagtggccccgccccgccctagggggcggggcgatgccgaactgcggcgggctggctcagtaaagcggaggcagcgggggaagatggcggcggccgttccacagcgggcgtggaccgtggagcagctgcgcagtgagcagctgcccaagaaggacattatcaagtttctgcaggaacacggttcagattcgtttcttgcagaacataaattattaggaaacattaaaaatgtggccaagacagctaacaaggaccacttggttacagcctataaccatctttttgaaactaagcgttttaagggtactgaaagtataagtaaagtgtctgagcaagtaaaaaatgtgaagcttaatgaagataaacccaaagaaaccaagtctgaagagaccctggatgagggtccaccaaaatatactaaatctgttctgaaaaagggagataaaaccaactttcccaaaaagggagatgttgttcactgctggtatacaggaacactacaagatgggactgtttttgatactaatattcaaacaagtgcaaagaagaagaaaaatgccaagcctttaagttttaaggtcggagtaggcaaagttatcagaggatgggatgaagctctcttgactatgagtaaaggagaaaaggctcgactggagattgaaccagaatgggcttacggaaagaaaggacagcctgatgccaaaattccaccaaatgcaaaactcacttttgaagtggaattagtggatattgattgaaatagcagtgcttcagctctaaggatattagcaacaatgataaaacttggccttgaagaaatttacacaactagttagaacttgttactattgtaaaggaagagtcaactggaaaattcaaggagttaataaaatttgtttacttggtcccagcttttgagagataaatcccttatgaatccctggtctaaaatactttcctacagctgtgtaaaatactggtcaaggagaactttttccttttacctcatgttgtaaacttaagtggctcaataaaaattgatccactgtcttgatctgactgtgatttgtttggtgttaatatattattgttctgattagggaattggaactaaggacctcatcaaaccagggagtaactcccagtaaaattatctggacagattgcctgtataatgagaaggcaaaagcataaggcttgaggggaaacaaaatgctaaaagcagaaaaatcttggcaggaagatcaagacctgaatttagaaaaggtgtacttcaaaaccaatgagccactaataaaggtgaacataaggttaatattactaattgatccccccaaaataaattcataaacaatt

SEQ ID NO: 123173 - DNA, 1346 bp, Artificial Sequence
  derived and/or modified sequence
gccccgccctagggggcggggcgatgccgaactgcggcgggctggctcagtaaagcggaggcagcgggggaagatggcggcggccgttccacagcgggcgtggaccgtggagcagctgcgcagtgagcagctgcccaagaaggacattatcaagtttctgcaggaacacggttcagattcgtttcttgcagaacataaattattaggaaacattaaaaatgtggccaagacagctaacaaggaccacttggttacagcctataaccatctttttgaaactaagcgttttaagggtactgaaagtataagtaaagtgtctgagcaagtaaaaaatgtgaagcttaatgaagataaacccaaagaaaccaagtctgaagagaccctggatgagggtccaccaaaatatactaaatctgttctgaaaaagggagataaaaccaactttcccaaaaagggagatgttgttcactgctggtatacaggaacactacaagatgggactgtttttgatactaatattcaaacaagtgcaaagaagaagaaaaatgccaagcctttaagttttaaggtcggagtaggcaaagttatcagaggatgggatgaagctctcttgactatgagtaaaggagaaaaggctcgactggagattgaaccagaatgggcttacggaaagaaaggacagcctgatgccaaaattccaccaaatgcaaaactcacttttgaagtggaattagtggatattgattgaaatagcagtgcttcagctctaaggatattagcaacaatgataaaacttggccttgaagaaatttacacaactagttagaacttgttactattgtaaaggaagagtcaactggaaaattcaaggagttaataaaatttgtttacttggtcccagcttttgagagataaatcccttatgaatccctggtctaaaatactttcctacagctgtgtaaaatactggtcaaggagaactttttccttttacctcatgttgtaaacttaagtggctcaataaaaattgatccactgtcttgatctgactgtgatttgtttggtgttaatatattattgttctgattagggaattggaactaaggacctcatcaaaccagggagtaactcccagtaaaattatctggacagattgcctgtataatgagaaggcaaaagcataaggcttgaggggaaacaaaatgctaaaagcagaaaaatcttggcaggaagatcaagacctgaatttagaaaaggtgtacttcaaaaccaatgagccactaataaaggtgaacataaggttaatattactaattgatccccccaaaataaattcataaacaatt

SEQ ID NO: 123174 - DNA, 675 bp, Artificial Sequence
  derived and/or modified sequence
atggcagctgccgtgccacagagagcctggactgttgaacagttgcggagtgagcaactccctaaaaaagacatcattaaatttttgcaggagcacggttccgacagctttctggcagagcataagctgctaggaaacatcaaaaacgtcgcaaagacagcaaataaagaccacctggtgacggcctacaatcacttattcgaaaccaaacgtttcaagggaaccgagtccatctccaaagtttccgagcaggtaaagaatgttaaattaaacgaggataagcccaaggagaccaagtccgaagagaccctcgacgaaggtcccccaaagtacaccaaatccgtcctgaagaagggcgacaagacaaactttcccaaaaagggtgacgtggtgcactgttggtacacagggacattacaggacggcacggtatttgacaccaacattcagacttctgctaaaaaaaagaaaaatgctaaacccctctcctttaaggttggcgtcgggaaggtaatacgcgggtgggacgaagccctcttgacaatgtcaaagggggagaaggcgagactggaaatcgaaccggaatgggcctacggaaaaaaaggtcaaccggacgctaagatccctcccaacgccaagctgacgttcgaagtcgaactggtcgacatcgactag

SEQ ID NO: 123175 - DNA, 675 bp, Artificial Sequence
  derived and/or modified sequence
atggctgcagcagtcccccagagggcttggactgtcgaacagctaaggagcgagcagcttccaaagaaagatataatcaaatttctacaggagcacggcagcgattccttcctggctgagcacaaactgctcggcaatataaaaaacgtcgcaaagactgctaataaggaccacctggtgacagcatataatcatttatttgaaactaagagattcaagggcacagagagtatctcaaaggtctctgaacaggtaaaaaacgtgaaactgaatgaggataagccgaaggagaccaaatcagaagagactctggatgaaggacctccaaagtatacaaaaagtgtcttaaaaaagggtgacaagactaatttcccaaaaaaaggtgacgttgtacactgctggtacacagggaccctgcaagatgggaccgtctttgatacgaacattcaaacctcggctaagaaaaagaagaacgccaaacctcttagttttaaggtgggcgtcggaaaggtgatccgggggtgggatgaagccttacttaccatgagcaagggggagaaggcacggctcgaaatcgaaccggagtgggcatatgggaaaaaaggacagcccgatgcaaaaattcccccaaatgctaagctgacatttgaggtggaactggtggacattgactag

SEQ ID NO: 123176 - DNA, 675 bp, Artificial Sequence
  derived and/or modified sequence
atggctgctgctgtgccccagagggcctggacagtggagcagctgcggtctgagcagctgcccaagaaggacatcatcaagttcctgcaggagcacggcagtgacagcttcctggccgagcacaagctgctgggcaacatcaagaatgtggccaagacagccaacaaggaccacctggtgacagcctacaaccacctgtttgagaccaagcgcttcaagggcacagagagcatcagcaaggtgtctgagcaggtgaagaatgtgaagctgaatgaagacaagcccaaggagaccaagtctgaggagaccctggatgagggcccccccaagtacaccaagtctgtgctgaagaagggggacaagaccaacttccccaagaagggagatgtggtgcactgctggtacacaggcaccctgcaggacggcaccgtgtttgacaccaacatccagaccagcgccaagaagaagaagaatgccaagcccctgtccttcaaggtgggcgtgggcaaggtgatccggggctgggatgaggccctgctgaccatgagcaagggggagaaggcccggctggagattgagcctgagtgggcctacggcaagaagggccagccagatgccaagatccccccaaatgccaagctgacctttgaggtggagctggtggacattgattag

SEQ ID NO: 123177 - DNA, 675 bp, Artificial Sequence
  derived and/or modified sequence
atggccgccgccgtgccccagcgggcctggaccgtggagcagctgagatccgagcaattacccaagaaggatatcataaagttcctgcaggagcatggatccgacagtttcctggcagagcacaaactgctcgggaatataaagaacgtggcgaagactgccaataaggaccatctggtaaccgcttataaccacctcttcgagaccaagagatttaagggtaccgagagcattagtaaggtgagtgagcaggtgaagaatgtcaagttaaatgaggacaagccgaaagaaacgaaatccgaggagaccctggatgagggcccgcccaagtacactaagtccgtgttgaagaagggcgataaaacaaacttccccaagaagggagatgtggtgcattgctggtatacaggcacgctccaggacggcacagtattcgacaccaacatccaaaccagcgccaagaaaaagaagaacgctaaacccctgtccttcaaggtgggagtgggaaaggttatccggggctgggacgaagctttgctgacgatgtccaaaggcgaaaaggcccgattagaaatcgaaccggagtgggcatatgggaaaaaagggcagcctgatgccaaaattcctccgaacgccaagctcacatttgaggtggaattggtggacatcgattag

SEQ ID NO: 123178 - DNA, 675 bp, Artificial Sequence
  derived and/or modified sequence
atggccgccgccgtgccccagcgggcctggaccgtggagcagctgcgctctgaacagcttcctaagaaagatattatcaaatttctgcaagagcatggatccgacagtttcttagcagagcacaagctgctgggaaacatcaagaacgtcgccaagacggctaataaagatcacctggtgactgcctataatcacctgtttgaaaccaagcggtttaagggcaccgagagcatctctaaagtgtcagagcaggttaagaatgttaaactgaatgaggataagccgaaggagactaagagcgaggagacgctcgacgaggggccacccaaatacaccaaatcagtcctgaaaaaaggcgacaagactaacttccctaagaagggcgacgtggtgcattgttggtacacaggcactcttcaggatggaaccgtttttgacactaacatccagacttctgcaaaaaagaaaaagaacgcgaaacctctttcctttaaggtcggtgtggggaaggttattcggggatgggatgaagcgctgctgactatgtctaagggggaaaaagcccggctggaaatcgaacctgagtgggcctatggcaagaagggccagccagatgcaaaaataccccccaacgctaaattgacatttgaagtggaattggtggatatcgactag

SEQ ID NO: 123179 - DNA, 675 bp, Artificial Sequence
  derived and/or modified sequence
atggccgcagccgtgccacagcgcgcatggaccgtggagcagctgcggagtgagcagttacccaaaaaggatataattaagttcctgcaggagcatggaagcgacagctttcttgctgaacacaaactcttggggaacattaagaacgtggccaaaactgcgaacaaagaccaccttgtaacagcatacaaccacctgttcgagacaaagaggtttaaggggactgagtccatctccaaggtatctgaacaggtcaagaacgtcaagctgaatgaggataaacctaaagaaacgaaaagtgaggagaccttggatgaaggacccccaaagtatacaaaaagtgtgctgaaaaaaggtgataagactaacttcccaaagaaaggggatgtcgtccattgctggtataccggaacattacaggacggcactgtgtttgatacgaacattcagacttctgcaaaaaaaaagaagaatgctaaacctttgagttttaaggtgggggtaggaaaggtgattcgaggatgggatgaagcactcctcaccatgtccaagggcgaaaaggccaggcttgagattgaacctgaatgggcctatggcaagaaagggcagcccgacgctaaaatcccacctaatgcaaaacttactttcgaagttgaactagtcgatatcgactag

SEQ ID NO: 123180 - DNA, 675 bp, Artificial Sequence
  derived and/or modified sequence
atggccgctgcagtgccgcaacgcgcttggacagtcgagcagctccgatccgaacagctccccaagaaagatattattaagtttctgcaggagcacggctcagacagcttcctagctgagcataagctgctggggaatatcaagaacgtcgcgaaaacagctaataaggatcacctagtcaccgcatacaatcacctcttcgaaactaaaaggtttaaaggcactgaatcaatctcaaaggtctcagagcaggtaaaaaacgtgaagcttaatgaggacaagcccaaggaaaccaagagtgaggagactctcgacgagggacctcccaagtacaccaagtcagttctcaaaaagggagataagacaaactttcctaagaagggagatgttgtgcactgctggtatactggaacactgcaggacgggacagtgtttgacacaaacatacagacaagtgccaagaagaagaaaaacgccaaacctctttcttttaaggtcggtgtagggaaggtgatccgcggatgggacgaggccttgttgaccatgtccaagggtgaaaaggcaaggctcgagatcgagcccgaatgggcatacggcaagaaagggcagcctgacgctaaaatcccaccaaacgccaaactgacgtttgaggtggagctggtcgatattgattag

SEQ ID NO: 123181 - DNA, 675 bp, Artificial Sequence
  derived and/or modified sequence
atggccgccgccgtgccccagagagcctggaccgtggagcagctgagaagcgagcagctgcccaagaaggacatcatcaagttcctgcaggagcacggcagcgacagcttcctggccgagcacaagctgctgggcaacatcaagaacgtggccaagaccgccaacaaggaccacctggtgaccgcctacaaccacctgttcgagaccaagagattcaagggcaccgagagcatcagcaaggtgagcgagcaggtgaagaacgtgaagctgaacgaggacaagcccaaggagaccaagagcgaggagaccctggacgagggcccccccaagtacaccaagagcgtgctgaagaagggcgacaagaccaacttccccaagaagggcgacgtggtgcactgctggtacaccggcaccctgcaggacggcaccgtgttcgacaccaacatccagaccagcgccaagaagaagaagaacgccaagcccctgagcttcaaggtgggcgtgggcaaggtgatcagaggctgggacgaggccctgctgaccatgagcaagggcgagaaggccagactggagatcgagcccgagtgggcctacggcaagaagggccagcccgacgccaagatcccccccaacgccaagctgaccttcgaggtggagctggtggacatcgactag

SEQ ID NO: 123182 - protein, 459 aa, Artificial Sequence
  derived and/or modified sequence
MTAEEMKATESGAQSAPLPMEGVDISPKQDEGVLKVIKREGTGTEMPMIGDRVFVHYTGWLLDGTKFDSSLDRKDKFSFDLGKGEVIKAWDIAIATMKVGEVCHITCKPEYAYGSAGSPPKIPPNATLVFEVELFEFKGEDLTEEEDGGIIRRIQTRGEGYAKPNEGAIVEVALEGYYKDKLFDQRELRFEIGEGENLDLPYGLERAIQRMEKGEHSIVYLKPSYAFGSVGKEKFQIPPNAELKYELHLKSFEKAKESWEMNSEEKLEQSTIVKERGTVYFKEGKYKQALLQYKKIVSWLEYESSFSNEEAQKAQALRLASHLNLAMCHLKLQAFSAAIESCNKALELDSNNEKGLFRRGEAHLAVNDFELARADFQKVLQLYPNNKAAKTQLAVCQQRIRRQLAREKKLYANMFERLAEEENKAKAEASSGDHPTDTEMKEEQKSNTAGSQSQVETEA

SEQ ID NO: 123183 - DNA, 1380 bp, Artificial Sequence
  derived and/or modified sequence
atgacggccgaggagatgaaggcgacggaatctggtgcccagagtgcaccacttccaatggaaggagtcgatatatctccaaaacaggacgaaggcgtacttaaagtcatcaaacgagaaggcacaggtacagaaatgcctatgatcggagatagggtttttgtgcattacaccgggtggttactggatggcaccaaatttgacagtagcctcgaccggaaagacaaatttagtttcgatctgggaaaaggagaggttatcaaggcatgggacatcgcaatcgcaactatgaaagtcggtgaggtgtgtcatatcacttgtaaaccagagtacgcctatggaagcgccggcagcccccctaagatcccccccaacgctacgttggtttttgaagtggagctctttgagttcaagggagaagatctgactgaggaggaagacggcggcatcattcggcgcattcagacccgaggtgagggctatgccaaaccgaacgaaggcgctatcgtggaagtagccctggaggggtattataaggacaaacttttcgaccagagagaactccggttcgagatcggtgagggcgagaacctagacctcccctatggcctggagagggccatacagcgcatggaaaagggtgaacacagcatagtctacctgaaaccatcatatgctttcgggtcagtcggtaaggagaaattccagatcccacctaatgcagaactcaagtacgaactgcatctgaagtcattcgaaaaagctaaggaaagctgggaaatgaattctgaagagaagctagaacagtcaaccatcgtgaaggagagaggaacagtctatttcaaagagggaaagtacaagcaggcactgctgcagtacaagaaaatcgtaagctggcttgaatacgagtctagcttttccaatgaggaagctcagaaagcccaggcgttgcggctggcctcacaccttaatctggccatgtgccacctgaaactgcaggcgttttctgctgctattgagtcttgcaacaaggcccttgagctcgactccaataatgaaaagggcctcttccgaaggggtgaggcccatttagccgtcaacgattttgaactggcccgcgctgactttcagaaagtgctgcagctctatccaaataacaaggcagccaaaactcagctagcagtctgccaacagagaattaggcgacagctggctagagagaagaaactatacgcaaatatgtttgagaggctcgccgaggaagagaacaaagccaaggccgaagcctcgtctggcgatcaccccacagataccgaaatgaaagaggaacaaaagtctaatactgcagggtcacagtcacaggtggagacagaagcctag

SEQ ID NO: 123184 - DNA, 2267 bp, Artificial Sequence
  derived and/or modified sequence
gagccgctcctgacccacctaccccagctctcgcgccgcgtgcagaggtgctcaagcctcctcgcggtccgcagtcagtgccgccgcgcccggcctcccgcacgccccgcaggtagcgcccccgcccgcggcccagagtgcgctcgcgccggcaccagctcccggataaacggcgcgccgcgcggagatgacagccgaggagatgaaggcgaccgagagcggggcgcagtcggcgccgctgcccatggagggagtggacatcagccccaaacaggacgaaggcgtgctgaaggtcatcaagagagagggcacaggtacagagatgcccatgattggggaccgagtctttgtccactacactggctggctattagatggcacaaagtttgactccagtctggatcgcaaggacaaattctcctttgacctgggaaaaggggaggtcatcaaggcttgggacattgccatagccaccatgaaggtgggggaggtgtgccacatcacctgcaaaccagaatatgcctacggttcagcaggcagtcctccaaagattccccccaatgccacgcttgtatttgaggtggagttgtttgagtttaagggagaagatctgacggaagaggaagatggcggaatcattcgcagaatacagactcgcggtgaaggctatgctaagcccaatgagggtgctatcgtggaggttgcactggaagggtactacaaggacaagctctttgaccagcgggagctccgctttgagattggcgagggggagaacctggatctgccttatggtctggagagggccattcagcgcatggagaaaggagaacattccatcgtgtacctcaagcccagctatgcttttggcagtgttgggaaggaaaagttccaaatcccaccaaatgctgagctgaaatatgaattacacctcaagagttttgaaaaggccaaggagtcttgggagatgaattcagaagagaagctggaacagagcaccatagtgaaagagcggggcactgtgtacttcaaggaaggtaaatacaagcaagctttactacagtataagaagatcgtgtcttggctggaatatgagtctagtttttccaatgaggaagcacagaaagcacaggcccttcgactggcctctcacctcaacctggccatgtgtcatctgaaactacaggccttctctgctgccattgaaagctgtaacaaggccctagaactggacagcaacaacgagaagggcctcttccgccggggagaggcccacctggccgtgaatgactttgaactggcacgggctgatttccagaaggtcctgcagctctaccccaacaacaaagccgccaagacccagctggctgtgtgccagcagcggatccgaaggcagcttgcccgggagaagaagctctatgccaatatgtttgagaggctggctgaggaggagaacaaggccaaggcagaggcttcctcaggagaccatcccactgacacagagatgaaggaggagcagaagagcaacacggcagggagccagtctcaggtggagacagaagcatagcccctctccaccagccctactcctgcggctgcctgccccccagtctccccactccaccctgttagttttgtaaaaactgaagaattttgagtgaattagacctttatttttctatctggttggatggtggctttaggggaagggggaaaggtgtaggctgggggattgaggtggggaatcattttagctggtgtcagcccctcttcccttcctccattgcacatgaacatatgtccatccatatatattcatcagaatgttaatttattttgctccctctgttaggtccattttctaagggtagaagaggcaagtggtagggatgaggtctgataagaacccagggtggagagggagactcctgggcagccgttttcctcatcctttccctctcccagtccatttccaaatgtggcctccatgtgggtgctagggacatgggaaaaaccactgctatgccatttcttctctctgttcccttcctcacccccgacggtgtggctgatgatgtcttctggtgtcatggtgaccaccccctgttccctgttctggtatttcccctgtcagtttcccctctcggccaggttgtgtcccaaaatcccctcagcctcttctctgcacgttgctgaaggtccaggcttgcctcaagttccatgcttgagcaataaagtggaaacaataaaacctgggtgtcagacaa

SEQ ID NO: 123185 - DNA, 1380 bp, Artificial Sequence
  derived and/or modified sequence
atgacagctgaggagatgaaggccacagaaagtggggcccagagcgcccccctgcccatggagggcgtggacatcagccccaagcaggatgagggcgtgctgaaggtgatcaagcgggagggcaccggcacagagatgcccatgattggagacagagtgtttgtgcactacacaggctggctgctggatggcaccaagtttgacagcagcctggacaggaaggacaagttctcctttgacctgggcaaaggagaggtgatcaaggcctgggacatcgccatcgccaccatgaaggtgggggaggtgtgccacatcacctgcaagccagaatatgcctacggcagcgctggcagcccccccaagatccccccaaatgccaccctggtgtttgaggtggagctgtttgagttcaagggggaggacctgacagaggaggaggatggcggcatcatccgccgcatccagaccagaggagagggctacgccaagcccaatgaaggagccatcgtggaggtggccctggagggctactacaaggacaagctgtttgaccagcgggagctgcgctttgagatcggggagggggagaacctggacctgccctacggcctggagcgggccatccagaggatggagaagggggagcacagcatcgtgtacctgaagcccagctatgcctttggatctgtgggcaaggagaagttccagatccccccaaatgctgagctgaagtatgagctgcacctgaagagctttgagaaggccaaggagagctgggagatgaacagcgaggagaagctggagcagagcaccatcgtgaaggagcggggcaccgtgtacttcaaggagggcaagtacaagcaggccctgctgcagtacaagaagatcgtgtcctggctggagtatgagagcagcttcagcaatgaggaggcccagaaggcccaggccctgcggctggccagccacctgaacctggccatgtgccacctgaagctgcaggccttctctgctgccatcgagagctgcaacaaggccctggagctggacagcaacaatgagaagggcctcttccggcggggggaggcccacctggccgtgaatgactttgagctggcccgggctgacttccagaaggtgctgcagctgtaccccaacaacaaggccgccaagacccagctggccgtgtgccagcagaggatccggcggcagctggcccgggagaagaagctgtatgccaacatgtttgagcggctggccgaggaggagaacaaggccaaggccgaggccagcagcggggaccaccccacagacacagagatgaaggaggagcagaagagcaacacagctggcagccagagccaggtggagacagaggcctag

SEQ ID NO: 123186 - DNA, 1380 bp, Artificial Sequence
  derived and/or modified sequence
atgaccgccgaggagatgaaggccaccgagagcggcgcccagagcgctccccttcctatggaaggcgtggatatctccccgaagcaggacgaaggggtgctcaaggtgattaagagggaaggcactggcaccgaaatgccaatgattggcgatcgtgtgtttgttcactataccggctggttgttggacggaaccaagtttgactcctccctggatagaaaggataaattttccttcgacctggggaagggtgaagtgataaaggcttgggacatcgcaatcgctacgatgaaagtcggagaggtctgccatatcacctgtaaaccagagtatgcctatgggagtgcagggtctccccctaagattccgcccaacgcgacgctggtcttcgaagtagaattgttcgagttcaaaggcgaggacctgaccgaagaggaagatggcggaattatccgccggatccagacccgaggagaaggctatgcaaagcctaatgagggcgccatcgtagaggttgctctcgagggctactataaggacaagctgtttgaccagcgggagctgcggttcgaaattggtgagggagagaatctggacctgccatatggcctcgagcgggctatccaacggatggaaaagggcgagcatagtatcgtgtacctgaagccatcctatgccttcggttctgtcgggaaggagaaatttcaaataccacctaacgcagaactcaagtacgagctgcacctgaaatctttcgagaaggctaaagagtcgtgggagatgaactctgaagagaagctcgaacagagtaccatcgtaaaagagaggggcaccgtgtatttcaaagagggtaagtacaagcaggccctgctgcagtacaagaaaatcgtgtcctggctggagtacgaatcctcattttcgaacgaagaggcacagaaagcacaagcgctgcgattggcgtcccacttgaaccttgccatgtgccacctgaagttgcaggcctttagtgctgccatagagtcttgcaataaggccctggaactggactctaacaatgaaaaaggactcttccgaagaggagaggcgcaccttgcggtgaacgattttgagctggccagggctgacttccagaaagtgctgcagctgtaccccaataacaaggctgctaagacacagttagccgtttgccagcagcgtatccggagacagctcgcaagagagaaaaagctgtatgccaatatgttcgaacgtctggcggaggaagaaaataaagccaaggctgaagctagctcaggagaccaccccactgacactgaaatgaaagaagaacagaaatcaaataccgctgggtctcagtcccaagtggaaacagaagcttag

SEQ ID NO: 123187 - DNA, 1380 bp, Artificial Sequence
  derived and/or modified sequence
atgactgctgaagagatgaaggctacagagagcggagcccaatcggcgcctctcccaatggaaggcgtagacatatctcccaaacaggatgagggcgtcttgaaggtcatcaaaagagagggaaccggtactgagatgcccatgatcggagatcgcgttttcgtgcactacacaggctggttactggacggaacaaaattcgacagttcccttgatcgcaaagacaagttcagcttcgatctcggtaaaggagaggtgattaaggcatgggatattgccattgcaaccatgaaagtgggagaggtgtgtcatattacttgcaagcctgagtatgcttatggctctgccggatcccccccaaagatcccacccaatgccaccttggtttttgaagtagagctgttcgagtttaagggggaagatttgaccgaggaggaggacggaggaattatccgtaggatacaaacgcgaggtgagggttatgctaaacccaacgaaggagctatcgtagaagtggcactggaggggtattacaaggataagctctttgaccaaagagaacttcgcttcgaaataggggagggtgagaatctggatcttccttacggactggagagagccatccagcgaatggagaaaggtgagcattccattgtgtacctgaaaccttcatatgcctttggtagcgtggggaaagaaaaatttcagatacccccaaacgcggaacttaagtatgagctgcatctgaagagcttcgaaaaggctaaggagagctgggagatgaactctgaagaaaaactggagcaaagcacgatagtgaaagagagggggacagtctattttaaggaagggaagtacaagcaggctctgttgcagtacaaaaagattgtgtcctggttggaatatgagtcgtctttctctaacgaggaggcccagaaagcccaggccctgcgcctcgcttcccacttgaatctggctatgtgccacctcaaactgcaggcctttagtgctgcaatcgaatcatgcaacaaagcactcgaactggattctaataacgaaaagggactcttccgcaggggcgaagctcatctggccgtgaatgattttgagctggccagagcggatttccagaaagtgctgcagctgtacccaaacaataaggctgccaaaacacagctggctgtttgtcagcagcgtattcgcaggcagctggccagggagaaaaaactttacgccaacatgttcgaacgcctggcagaagaagaaaacaaggccaaggcggaggcctcgagcggcgaccacccaaccgacacggagatgaaggaagaacagaaatcaaatacggcaggtagccagagtcaagtcgaaactgaagcatag

SEQ ID NO: 123188 - DNA, 1380 bp, Artificial Sequence
  derived and/or modified sequence
atgacggcagaggagatgaaggccaccgagtcaggtgcccagagcgcgcccctgcccatggagggagtggatatcagccccaagcaggatgagggggtccttaaagtgatcaagagggagggtaccggaaccgaaatgcctatgattggagaccgggtgttcgtgcattatactgggtggctgctcgacgggactaaattcgatagttcactggatcgcaaggacaagttttccttcgacttagggaaaggagaagtgatcaaggcatgggacatcgctatcgctacgatgaaggtcggggaagtgtgtcatattacatgcaagccagaatatgcttatgggagcgccggttctccacccaaaattccccccaacgcaacattggtattcgaggtggagctgtttgagttcaaaggagaggatcttaccgaagaggaggatggtggcatcatcaggcggatacagacccgcggcgaggggtacgcaaaaccaaacgaaggcgcgatcgtggaagtggcactcgagggttactacaaagacaaactttttgatcaacgcgagctgagattcgagataggagagggagaaaatctagatctgccctatggccttgaaagggcaatacaacggatggagaagggcgaacacagtattgtctaccttaaaccatcctatgctttcgggtccgttggcaaggagaagtttcagataccccccaatgcggaactcaaatacgagctgcacttaaagtcttttgaaaaggccaaagagtcctgggaaatgaacagcgaggaaaaacttgaacaaagtaccatcgtgaaagagcgcggtacagtttacttcaaagaaggcaaatataagcaagcgctgctgcagtacaagaagatcgtgtcctggctcgagtacgagagcagtttttctaacgaagaggcccagaaagctcaggcactgcgactggctagtcatctcaacctggccatgtgccaccttaaattgcaagccttttccgctgcaatcgagtcatgtaacaaggcactagagcttgattccaacaacgaaaagggacttttccggcgcggggaagcgcacctcgctgtgaatgattttgaactcgcaagagcggacttccaaaaagtactacagctctatccgaacaacaaggctgcaaaaacacaactagcagtttgtcagcaacgtattagacgtcagctggcccgggaaaaaaaactgtatgcaaatatgtttgagagactcgcagaagaagagaataaagcgaaggcagaggcctcaagtggcgaccaccctacagacacagaaatgaaagaggaacaaaaaagcaacacagcaggatcacagtcacaagtagaaactgaggcctag

SEQ ID NO: 123189 - DNA, 1380 bp, Artificial Sequence
  derived and/or modified sequence
atgaccgcagaagaaatgaaggcaaccgagagtggtgcgcaaagtgcccctttgcctatggagggggtcgacattagtcctaaacaagacgagggagtactgaaagtcattaagcgcgaaggaaccgggactgaaatgcctatgatcggcgatcgcgtatttgtgcattacacaggttggctgctggatggaacgaagtttgactccagtcttgacaggaaagataaatttagcttcgacttaggtaaaggcgaggtgataaaagcttgggatattgctattgctacaatgaaagtcggcgaagtgtgtcatattacatgcaagccagaatatgcttatgggagcgccggttctccacccaaaattccccccaacgcaacattggtattcgaggtggagctgtttgagttcaaaggagaggatcttaccgaagaggaggatggtggcatcatcaggcggatacagacccgcggcgaggggtacgcaaaaccaaacgaaggcgcgatcgtggaagtggcactcgagggttactacaaagacaaactttttgatcaacgcgagctgagattcgagataggagagggagaaaatctagatctgccttacggactggagagggccatacagaggatggaaaaaggcgagcatagcatcgtctatttaaagccgagttatgcatttggaagcgtgggcaaagaaaagttccaaatccccccgaacgcagagctcaagtatgaacttcatttgaaaagttttgagaaagcaaaagagagttgggaaatgaattctgaagaaaagctggaacagagcacaattgtgaaagagagaggaaccgtctattttaaagaaggcaagtacaagcaagcacttctgcagtataaaaagatcgtgagctggctcgagtacgagtctagcttttccaacgaggaagcacagaaggctcaagcattacgtctggcctcccacctcaacctggctatgtgccacttgaagctccaggcattttcagccgccatcgaaagctgcaacaaggcattagaactcgacagcaacaacgaaaaaggattgttccgccgaggcgaagctcatctggcagtcaacgatttcgagctggcccgagccgacttccagaaagtgttacagttgtatccgaataacaaagcagccaagacccagttagcagtatgccagcagcgaattagacgtcagctggcccgggaaaaaaaactgtatgcaaatatgtttgagagactcgcagaagaagagaataaagcgaaggcagaggcctcaagtggcgaccaccctacagacacagaaatgaaagaggaacaaaaaagcaacacagcaggatcacagtcacaagtagaaactgaggcctag

SEQ ID NO: 123190 - DNA, 1380 bp, Artificial Sequence
  derived and/or modified sequence
atgaccgccgaggagatgaaggccaccgagagcggcgcccagagcgcccccctgcccatggagggcgtggacatcagccccaagcaggacgagggcgtgctgaaggtgatcaagagagagggcaccggcaccgagatgcccatgatcggcgacagagtgttcgtgcactacaccggctggctgctggacggcaccaagttcgacagcagcctggacagaaaggacaagttcagcttcgacctgggcaagggcgaggtgatcaaggcctgggacatcgccatcgccaccatgaaggtgggcgaggtgtgccacatcacctgcaagcccgagtacgcctacggcagcgccggcagcccccccaagatcccccccaacgccaccctggtgttcgaggtggagctgttcgagttcaagggcgaggacctgaccgaggaggaggacggcggcatcatcagaagaatccagaccagaggcgagggctacgccaagcccaacgagggcgccatcgtggaggtggccctggagggctactacaaggacaagctgttcgaccagagagagctgagattcgagatcggcgagggcgagaacctggacctgccctacggcctggagagagccatccagagaatggagaagggcgagcacagcatcgtgtacctgaagcccagctacgccttcggcagcgtgggcaaggagaagttccagatcccccccaacgccgagctgaagtacgagctgcacctgaagagcttcgagaaggccaaggagagctgggagatgaacagcgaggagaagctggagcagagcaccatcgtgaaggagagaggcaccgtgtacttcaaggagggcaagtacaagcaggccctgctgcagtacaagaagatcgtgagctggctggagtacgagagcagcttcagcaacgaggaggcccagaaggcccaggccctgagactggccagccacctgaacctggccatgtgccacctgaagctgcaggccttcagcgccgccatcgagagctgcaacaaggccctggagctggacagcaacaacgagaagggcctgttcagaagaggcgaggcccacctggccgtgaacgacttcgagctggccagagccgacttccagaaggtgctgcagctgtaccccaacaacaaggccgccaagacccagctggccgtgtgccagcagagaatcagaagacagctggccagagagaagaagctgtacgccaacatgttcgagagactggccgaggaggagaacaaggccaaggccgaggccagcagcggcgaccaccccaccgacaccgagatgaaggaggagcagaagagcaacaccgccggcagccagagccaggtggagaccgaggcctag

SEQ ID NO: 123191 - RNA, 1380 nt, Artificial Sequence
  derived and/or modified sequence
augacggcagaggagaugaaggccaccgagucaggugcccagagcgcgccccugcccauggagggaguggauaucagccccaagcaggaugaggggguccuuaaagugaucaagagggaggguaccggaaccgaaaugccuaugauuggagaccggguguucgugcauuauacuggguggcugcucgacgggacuaaauucgauaguucacuggaucgcaaggacaaguuuuccuucgacuuagggaaaggagaagugaucaaggcaugggacaucgcuaucgcuacgaugaaggucggggaagugugucauauuacaugcaagccagaauaugcuuaugggagcgccgguucuccacccaaaauuccccccaacgcaacauugguauucgagguggagcuguuugaguucaaaggagaggaucuuaccgaagaggaggaugguggcaucaucaggcggauacagacccgcggcgagggguacgcaaaaccaaacgaaggcgcgaucguggaaguggcacucgaggguuacuacaaagacaaacuuuuugaucaacgcgagcugagauucgagauaggagagggagaaaaucuagaucugcccuauggccuugaaagggcaauacaacggauggagaagggcgaacacaguauugucuaccuuaaaccauccuaugcuuucggguccguuggcaaggagaaguuucagauaccccccaaugcggaacucaaauacgagcugcacuuaaagucuuuugaaaaggccaaagaguccugggaaaugaacagcgaggaaaaacuugaacaaaguaccaucgugaaagagcgcgguacaguuuacuucaaagaaggcaaauauaagcaagcgcugcugcaguacaagaagaucguguccuggcucgaguacgagagcaguuuuucuaacgaagaggcccagaaagcucaggcacugcgacuggcuagucaucucaaccuggccaugugccaccuuaaauugcaagccuuuuccgcugcaaucgagucauguaacaaggcacuagagcuugauuccaacaacgaaaagggacuuuuccggcgcggggaagcgcaccucgcugugaaugauuuugaacucgcaagagcggacuuccaaaaaguacuacagcucuauccgaacaacaaggcugcaaaaacacaacuagcaguuugucagcaacguauuagacgucagcuggcccgggaaaaaaaacuguaugcaaauauguuugagagacucgcagaagaagagaauaaagcgaaggcagaggccucaaguggcgaccacccuacagacacagaaaugaaagaggaacaaaaaagcaacacagcaggaucacagucacaaguagaaacugaggccuag

SEQ ID NO: 123192 - RNA, 1380 nt, Artificial Sequence
  derived and/or modified sequence
augaccgcagaagaaaugaaggcaaccgagaguggugcgcaaagugccccuuugccuauggagggggucgacauuaguccuaaacaagacgagggaguacugaaagucauuaagcgcgaaggaaccgggacugaaaugccuaugaucggcgaucgcguauuugugcauuacacagguuggcugcuggauggaacgaaguuugacuccagucuugacaggaaagauaaauuuagcuucgacuuagguaaaggcgaggugauaaaagcuugggauauugcuauugcuacaaugaaagucggcgaagugugucauauuacaugcaagccagaauaugcuuaugggagcgccgguucuccacccaaaauuccccccaacgcaacauugguauucgagguggagcuguuugaguucaaaggagaggaucuuaccgaagaggaggaugguggcaucaucaggcggauacagacccgcggcgagggguacgcaaaaccaaacgaaggcgcgaucguggaaguggcacucgaggguuacuacaaagacaaacuuuuugaucaacgcgagcugagauucgagauaggagagggagaaaaucuagaucugccuuacggacuggagagggccauacagaggauggaaaaaggcgagcauagcaucgucuauuuaaagccgaguuaugcauuuggaagcgugggcaaagaaaaguuccaaauccccccgaacgcagagcucaaguaugaacuucauuugaaaaguuuugagaaagcaaaagagaguugggaaaugaauucugaagaaaagcuggaacagagcacaauugugaaagagagaggaaccgucuauuuuaaagaaggcaaguacaagcaagcacuucugcaguauaaaaagaucgugagcuggcucgaguacgagucuagcuuuuccaacgaggaagcacagaaggcucaagcauuacgucuggccucccaccucaaccuggcuaugugccacuugaagcuccaggcauuuucagccgccaucgaaagcugcaacaaggcauuagaacucgacagcaacaacgaaaaaggauuguuccgccgaggcgaagcucaucuggcagucaacgauuucgagcuggcccgagccgacuuccagaaaguguuacaguuguauccgaauaacaaagcagccaagacccaguuagcaguaugccagcagcgaauuagacgucagcuggcccgggaaaaaaaacuguaugcaaauauguuugagagacucgcagaagaagagaauaaagcgaaggcagaggccucaaguggcgaccacccuacagacacagaaaugaaagaggaacaaaaaagcaacacagcaggaucacagucacaaguagaaacugaggccuag

SEQ ID NO: 123193 - protein, 655 aa, Artificial Sequence
  derived and/or modified sequence
MAEAPQVVEIDPDFEPLPRPRSCTWPLPRPEFSQSNSATSSPAPSGSAAANPDAAAGLPSASAAAVSADFMSNLSLLEESEDFPQAPGSVAAAVAAAAAAAATGGLCGDFQGPEAGCLHPAPPQPPPPGPLSQHPPVPPAAAGPLAGQPRKSSSSRRNAWGNLSYADLITKAIESSAEKRLTLSQIYEWMVKSVPYFKDKGDSNSSAGWKNSIRHNLSLHSKFIRVQNEGTGKSSWWMLNPEGGKSGKSPRRRAASMDNNSKFAKSRSRAAKKKASLQSGQEGAGDSPGSQFSKWPASPGSHSNDDFDNWSTFRPRTSSNASTISGRLSPIMTEQDDLGEGDVHSMVYPPSAAKMASTLPSLSEISNPENMENLLDNLNLLSSPTSLTVSTQSSPGTMMQQTPCYSFAPPNTSLNSPSPNYQKYTYGQSSMSPLPQMPIQTLQDNKSSYGGMSQYNCAPGLLKELLTSDSPPHNDIMTPVDPGVAQPNSRVLGQNVMMGPNSVMSTYGSQASHNKMMNPSSHTHPGHAQQTSAVNGRPLPHTVSTMPHTSGMNRLTQVKTPVQVPLPHPMQMSALGGYSSVSSCNGYGRMGLLHQEKLPSDLDGMFIERLDCDMESIIRNDLMDGDTLDFNFDNVLPNQSFPHSVKTTTHSWVSG

SEQ ID NO: 123194 - DNA, 5738 bp, Artificial Sequence
  derived and/or modified sequence
gcagccgccacattcaacaggcagcagcgcagcgggcgcgccgctggggagagcaagcggcccgcggcgtccgtccgtccttccgtccgcggccctgtcagctggagcgcggcgcaggctctgccccggcccggcggctctggccggccgtccagtccgtgcggcggaccccgaggagcctcgatgtggatggccccgcgaagttaagttctgggctcgcgcttccactccgccgcgccttcctcccagtttccgtccgctcgccgcaccggcttcgttcccccaaatctcggaccgtcccttcgcgccccctccccgtccgcccccagtgctgcgttctccccctcttggctctcctgcggctgggggaggggcgggggtcaccatggccgaggcgcctcaggtggtggagatcgacccggacttcgagccgctgccccggccgcgctcgtgcacctggccgctgcccaggccggagtttagccagtccaactcggccacctccagcccggcgccgtcgggcagcgcggctgccaaccccgacgccgcggcgggcctgccctcggcctcggctgccgctgtcagcgccgacttcatgagcaacctgagcttgctggaggagagcgaggacttcccgcaggcgcccggctccgtggcggcggcggtggcggcggcggccgccgcggccgccaccggggggctgtgcggggacttccagggcccggaggcgggctgcctgcacccagcgccaccgcagcccccgccgcccgggccgctgtcgcagcacccgccggtgccccccgccgccgctgggccgctcgcggggcagccgcgcaagagcagctcgtcccgccgcaacgcgtggggcaacctgtcctacgccgacctcatcaccaaggccatcgagagctcggcggagaagcggctcacgctgtcgcagatctacgagtggatggtcaagagcgtgccctacttcaaggataagggtgacagcaacagctcggcgggctggaagaattcaattcgtcataatctgtccctacacagcaagttcattcgtgtgcagaatgaaggaactggaaaaagttcttggtggatgctcaatccagagggtggcaagagcgggaaatctcctaggagaagagctgcatccatggacaacaacagtaaatttgctaagagccgaagccgagctgccaagaagaaagcatctctccagtctggccaggagggtgctggggacagccctggatcacagttttccaaatggcctgcaagccctggctctcacagcaatgatgactttgataactggagtacatttcgccctcgaactagctcaaatgctagtactattagtgggagactctcacccattatgaccgaacaggatgatcttggagaaggggatgtgcattctatggtgtacccgccatctgccgcaaagatggcctctactttacccagtctgtctgagataagcaatcccgaaaacatggaaaatcttttggataatctcaaccttctctcatcaccaacatcattaactgtttcgacccagtcctcacctggcaccatgatgcagcagacgccgtgctactcgtttgcgccaccaaacaccagtttgaattcacccagcccaaactaccaaaaatatacatatggccaatccagcatgagccctttgccccagatgcctatacaaacacttcaggacaataagtcgagttatggaggtatgagtcagtataactgtgcgcctggactcttgaaggagttgctgacttctgactctcctccccataatgacattatgacaccagttgatcctggggtagcccagcccaacagccgggttctgggccagaacgtcatgatgggccctaattcggtcatgtcaacctatggcagccaggcatctcataacaaaatgatgaatcccagctcccatacccaccctggacatgctcagcagacatctgcagttaacgggcgtcccctgccccacacggtaagcaccatgccccacacctcgggtatgaaccgcctgacccaagtgaagacacctgtacaagtgcctctgccccaccccatgcagatgagtgccctggggggctactcctccgtgagcagctgcaatggctatggcagaatgggccttctccaccaggagaagctcccaagtgacttggatggcatgttcattgagcgcttagactgtgacatggaatccatcattcggaatgacctcatggatggagatacattggattttaactttgacaatgtgttgcccaaccaaagcttcccacacagtgtcaagacaacgacacatagctgggtgtcaggctgagggttagtgagcaggttacacttaaaagtacttcagattgtctgacagcaggaactgagagaagcagtccaaagatgtctttcaccaactcccttttagttttcttggttaaaaaaaaaaacaaaaaaaaaaaccctccttttttcctttcgtcagacttggcagcaaagacatttttcctgtacaggatgtttgcccaatgtgtgcaggttatgtgctgctgtagataaggactgtgccattggaaatttcattacaatgaagtgccaaactcactacaccatataattgcagaaaagattttcagatcctggtgtgctttcaagttttgtatataagcagtagatacagattgtatttgtgtgtgtttttggtttttctaaatatccaattggtccaaggaaagtttatactctttttgtaatactgtgatgggcctcatgtcttgataagttaaacttttgtttgtactacctgttttctgcggaactgacggatcacaaagaactgaatctccattctgcatctccattgaacagccttggacctgttcacgttgccacagaattcacatgagaaccaagtagcctgttatcaatctgctaaattaatggacttgttaaacttttggaaaaaaaaagattaaatgccagctttgtacaggtcttttctatttttttttgtttattttgttatttgcaaatttgtacaaacatttaaatggttctaatttccagataaatgatttttgatgttattgttgggacttaagaacatttttggaatagatattgaactgtaataatgttttcttaaaactagagtctactttgttacatagtcagcttgtaaattttgtggaaccacaggtatttggggcagcattcataattttcattttgtattctaactggattagtactaattttatacatgcttaactggtttgtacactttgggatgctacttagtgatgtttctgactaatcttaaatcattgtaattagtacttgcatattcaacgtttcaggccctggttgggcaggaaagtgatgtatagttatggacactttgcgtttcttatttaggataacttaatatgtttttatgtatgtattttaaagaaatttcatctgcttctactgaactatgcgtactgcatagcatcaagtcttctctagagacctctgtagtcctgggaggcctcataatgtttgtagatcagaaaagggagatctgcatctaaagcaatggtcctttgtcaaacgagggattttgatccacttcaccattttgagttgagctttagcaaaagtttcccctcataattctttgctcttgtttcagtccaggtggaggttggttttgtagttctgccttgaggaattatgtcaacactcatacttcatctcattctcccttctgccctgcagattagattacttagcacactgtggaagtttaagtggaaggagggaatttaaaaatgggacttgagtggtttgtagaatttgtgttcataagttcagatgggtagcaaatggaatagaacttacttaaaaattggggagatttatttgaaaaccagctgtaagttgtgcattgagattatgttaaaagccttggcttaagaatttgaaaatttctttagcctgtagcaacctaaactgtaattcctatcattatgttttattactttccaattacctgtaactgacagaccaaattaattggctttgtgtcctatttagtccatcagtattttcaagtcatgtggaaagcccaaagtcatcacaatgaagagaacaggtgcacagcactgttcctcttgtgttcttgagaaggatctaatttttctgtatatagcccacatcacacttgctttgtcttgtatgttaattgcatcttcattggcttggtatttcctaaatgtttaacaagaacacaagtgttcctgataagatttcctacagtaagccagctctattgtaagcttcccactgtgatgatcatttttttgaagattcattgaacagccaccactctatcatcctcattttggggcagtccaagacatagctggttttagaaacccaagttcctctaagcacagcctcccgggtatgtaactgaacttggtgccaaagtacttgtgtactaatttctattactacgtactgtcactttcctcccgtgccattactgcatcataatacaaggaacctcagagcccccatttgttcattaaagaggcaactacagccaaaatcactgttaaaatcttactacttcatggagtagctcttaggaaaatatatcttcctcctgagtctgggtaattatacctctcccaagcccccattgtgtgttgaaatcctgtcatgaatccttggtagctctctgagaacagtgaagtccagggaaaggcatctggtctgtctggaaagcaaacattatgtggcctctggtagtttttttcctgtaagaatactgactttctggagtaatgagtatatatcagttattgtacatgattgctttgtgaaatgtgcaaatgatatcacctatgcagccttgtttgatttattttctctggtttgtactgttattaaaagcatattgtattatagagctattcagatattttaaatataaagatgtattgtttccgtaatatagacgtatggaatatatttaggtaatagatgtattacttggaaagttctgctttgacaaactgacaaagtctaaatgagcacatgtatcccagtgagcagtaaatcaatggaacatcccaagaagaggataaggatgcttaaaatggaaatcattctccaacgatatacaaattggacttgttcaactgctggatatatgctaccaataaccccagccccaacttaaaattcttacattcaagctcctaagagttcttaatttataactaattttaaaagagaagtttcttttctggttttagtttgggaataatcattcattaaaaaaaatgtattgtggtttatgcgaacagaccaacctggcattacagttggcctctccttgaggtgggcacagcctggcagtgtggccaggggtggccatgtaagtcccatcaggacgtagtcatgcctcctgcatttcgctacccgagtttagtaacagtgcagattccacgttcttgttccgatactctgagaagtgcctgatgttgatgtacttacagacacaagaacaatctttgctataattgtataaagccataaatgtacataaattatgtttaaatggcttggtgtctttcttttctaattatgcagaataagctctttattaggaattttttgtgaagctattaaatacttgagttaagtcttgtcagccacaa

SEQ ID NO: 123195 - DNA, 1968 bp, Artificial Sequence
  derived and/or modified sequence
atggccgaggccccccaggtggtggagatcgaccccgacttcgagcccctgcccagacccagaagctgcacctggcccctgcccagacccgagttcagccagagcaacagcgccaccagcagccccgcccccagcggcagcgccgccgccaaccccgacgccgccgccggcctgcccagcgccagcgccgccgccgtgagcgccgacttcatgagcaacctgagcctgctggaggagagcgaggacttcccccaggcccccggcagcgtggccgccgccgtggccgccgccgccgccgccgccgccaccggcggcctgtgcggcgacttccagggccccgaggccggctgcctgcaccccgcccccccccagccccccccccccggccccctgagccagcacccccccgtgccccccgccgccgccggccccctggccggccagcccagaaagagcagcagcagcagaagaaacgcctggggcaacctgagctacgccgacctgatcaccaaggccatcgagagcagcgccgagaagagactgaccctgagccagatctacgagtggatggtgaagagcgtgccctacttcaaggacaagggcgacagcaacagcagcgccggctggaagaacagcatcagacacaacctgagcctgcacagcaagttcatcagagtgcagaacgagggcaccggcaagagcagctggtggatgctgaaccccgagggcggcaagagcggcaagagccccagaagaagagccgccagcatggacaacaacagcaagttcgccaagagcagaagcagagccgccaagaagaaggccagcctgcagagcggccaggagggcgccggcgacagccccggcagccagttcagcaagtggcccgccagccccggcagccacagcaacgacgacttcgacaactggagcaccttcagacccagaaccagcagcaacgccagcaccatcagcggcagactgagccccatcatgaccgagcaggacgacctgggcgagggcgacgtgcacagcatggtgtacccccccagcgccgccaagatggccagcaccctgcccagcctgagcgagatcagcaaccccgagaacatggagaacctgctggacaacctgaacctgctgagcagccccaccagcctgaccgtgagcacccagagcagccccggcaccatgatgcagcagaccccctgctacagcttcgccccccccaacaccagcctgaacagccccagccccaactaccagaagtacacctacggccagagcagcatgagccccctgccccagatgcccatccagaccctgcaggacaacaagagcagctacggcggcatgagccagtacaactgcgcccccggcctgctgaaggagctgctgaccagcgacagccccccccacaacgacatcatgacccccgtggaccccggcgtggcccagcccaacagcagagtgctgggccagaacgtgatgatgggccccaacagcgtgatgagcacctacggcagccaggccagccacaacaagatgatgaaccccagcagccacacccaccccggccacgcccagcagaccagcgccgtgaacggcagacccctgccccacaccgtgagcaccatgccccacaccagcggcatgaacagactgacccaggtgaagacccccgtgcaggtgcccctgccccaccccatgcagatgagcgccctgggcggctacagcagcgtgagcagctgcaacggctacggcagaatgggcctgctgcaccaggagaagctgcccagcgacctggacggcatgttcatcgagagactggactgcgacatggagagcatcatcagaaacgacctgatggacggcgacaccctggacttcaacttcgacaacgtgctgcccaaccagagcttcccccacagcgtgaagaccaccacccacagctgggtgagcggctag

SEQ ID NO: 123196 - DNA, 1968 bp, Artificial Sequence
  derived and/or modified sequence
atggcggaggctcctcaggtggttgaaattgatcctgattttgagccgctcccaaggcctcgatcatgtacttggcccctcccgcgccctgagttctctcaaagcaatagcgcaacatcaagccctgcccccagtggctctgccgctgccaatcctgacgcagctgctggcctccccagcgcctctgccgcggcagtgagcgcagactttatgtcaaacctgagtctactggaagagtcagaggactttccccaggcccccgggtccgtagccgctgccgtcgcagcagcggctgctgccgctgccaccggtggcttgtgcggggatttccagggaccggaagcaggctgtctgcaccccgcccccccccagcccccaccgcccggtcctctgtctcagcatcctccagtgcctcccgccgcagccggacctctggcgggacagcctcgaaaatcctccagttcgcggcgcaacgcatgggggaatctgtcgtacgcagacctgataaccaaggccattgagagtagtgcagagaagcggctgacacttagtcagatctatgaatggatggttaagagtgtgccttatttcaaagacaagggcgactctaactcttcggcagggtggaagaatagcataaggcacaatctctctttacactccaaattcatcagggtgcagaacgagggtacaggcaagagtagctggtggatgcttaatcccgagggcggtaagtccggaaagtccccccgcaggagggccgctagtatggataacaactcgaagtttgcgaaatctcgcagccgtgctgccaaaaagaaagcctctcttcagtctggccaagagggagctggcgacagtccgggttcccagttcagcaagtggccagccagccccggctctcattcgaatgatgatttcgacaactggagcacttttagaccccgcacctcgtccaacgccagcactatctcagggagactgagccctattatgaccgaacaggatgatctgggcgaaggagatgtgcatagcatggtttacccaccctctgctgccaagatggcatctacccttccatctctctcagagatctccaacccggaaaacatggagaacctattggataatttgaacctactgagcagtccgaccagcctcacagtgtcaacccagtcctcccctggcaccatgatgcaacaaaccccttgctactccttcgcaccccctaacacctctcttaacagcccgagccccaattaccaaaagtacacctacggacagagcagcatgtccccattgccacagatgccaattcagactcttcaggacaacaagtcttcgtatggtgggatgagccagtataactgtgctcccggacttctgaaagaactcctgacttctgacagcccaccgcataacgatatcatgacgcccgtagaccctggtgtagcccagcccaacagccgcgtcctgggccaaaatgtcatgatgggtcctaattccgtaatgtctacatatggtagtcaagcatcacataacaagatgatgaaccccagctcacacactcatccgggccacgctcaacagacttctgctgtgaatgggagaccactgccgcacacagtctccaccatgccacacacttccggcatgaatcgactgacacaggtcaagaccccggttcaggtaccactcccacaccctatgcagatgtccgccctgggaggatatagctctgtctcttcctgcaacggctacgggcgcatgggcttactgcaccaggaaaaattgccttcggatctagatggaatgtttatcgagcgcttggattgtgatatggaatcaatcattagaaacgaccttatggacggggatacccttgattttaatttcgacaatgtgctgcccaaccagagcttccctcacagtgtcaaaacaacaacacattcatgggtgtcagggtag

SEQ ID NO: 123197 - DNA, 5722 bp, Artificial Sequence
  derived and/or modified sequence
gcagccgccacattcaacaggcagcagcgcagcgggcgcgccgctggggagagcaagcggcccgcggcgtccgtccgtccttccgtccgcggccctgtcagctggagcgcggcgcaggctctgccccggcccggcggctctggccggccgtccagtccgtgcggcggaccccgaggagcctcgatgtggatggccccgcgaagttaagttctgggctcgcgcttccactccgccgcgccttcctcccagtttccgtccgctcgccgcaccggcttcgttcccccaaatctcggaccgtcccttcgcgccccctccccgtccgcccccagtgctgcgttctccccctcttggctctcctgcggctgggggaggggcgggggtcaccatggccgaggcgcctcaggtggtggagatcgacccggacttcgagccgctgccccggccgcgctcgtgcacctggccgctgcccaggccggagtttagccagtccaactcggccacctccagcccggcgccgtcgggcagcgcggctgccaaccccgacgccgcggcgggcctgccctcggcctcggctgccgctgtcagcgccgacttcatgagcaacctgagcttgctggaggagagcgaggacttcccgcaggcgcccggctccgtggcggcggcggtggcggcggcggccgccgcggccgccaccggggggctgtgcggggacttccagggcccggaggcgggctgcctgcacccagcgccaccgcagcccccgccgcccgggccgctgtcgcagcacccgccggtgccccccgccgccgctgggccgctcgcggggcagccgcgcaagagcagctcgtcccgccgcaacgcgtggggcaacctgtcctacgccgacctcatcaccaaggccatcgagagctcggcggagaagcggctcacgctgtcgcagatctacgagtggatggtcaagagcgtgccctacttcaaggataagggtgacagcaacagctcggcgggctggaagaattcaattcgtcataatctgtccctacacagcaagttcattcgtgtgcagaatgaaggaactggaaaaagttcttggtggatgctcaatccagagggtggcaagagcgggaaatctcctaggagaagagctgcatccatggacaacaacagtaaatttgctaagagccgaagccgagctgccaagaagaaagcatctctccagtctggccaggagggtgctggggacagccctggatcacagttttccaaatggcctgcaagccctggctctcacagcaatgatgactttgataactggagtacatttcgccctcgaactagctcaaatgctagtactattagtgggagactctcacccattatgaccgaacaggatgatcttggagaaggggatgtgcattctatggtgtacccgccatctgccgcaaagatggcctctactttacccagtctgtctgagataagcaatcccgaaaacatggaaaatcttttggataatctcaaccttctctcatcaccaacatcattaactgtttcgacccagtcctcacctggcaccatgatgcagcagacgccgtgctactcgtttgcgccaccaaacaccagtttgaattcacccagcccaaactaccaaaaatatacatatggccaatccagcatgagccctttgccccagatgcctatacaaacacttcaggacaataagtcgagttatggaggtatgagtcagtataactgtgcgcctggactcttgaaggagttgctgacttctgactctcctccccataatgacattatgacaccagttgatcctggggtagcccagcccaacagccgggttctgggccagaacgtcatgatgggccctaattcggtcatgtcaacctatggcagccaggcatctcataacaaaatgatgaatcccagctcccatacccaccctggacatgctcagcagacatctgcagttaacgggcgtcccctgccccacacggtaagcaccatgccccacacctcgggtatgaaccgcctgacccaagtgaagacacctgtacaagtgcctctgccccaccccatgcagatgagtgccctggggggctactcctccgtgagcagctgcaatggctatggcagaatgggccttctccaccaggagaagctcccaagtgacttggatggcatgttcattgagcgcttagactgtgacatggaatccatcattcggaatgacctcatggatggagatacattggattttaactttgacaatgtgttgcccaaccaaagcttcccacacagtgtcaagacaacgacacatagctgggtgtcaggctgagggttagtgagcaggttacacttaaaagtacttcagattgtctgacagcaggaactgagagaagcagtccaaagatgtctttcaccaactcccttttagttttcttggttaaaaaaaaaaacaaaaaaaaaaaccctccttttttcctttcgtcagacttggcagcaaagacatttttcctgtacaggatgtttgcccaatgtgtgcaggttatgtgctgctgtagataaggactgtgccattggaaatttcattacaatgaagtgccaaactcactacaccatataattgcagaaaagattttcagatcctggtgtgctttcaagttttgtatataagcagtagatacagattgtatttgtgtgtgtttttggtttttctaaatatccaattggtccaaggaaagtttatactctttttgtaatactgtgatgggcctcatgtcttgataagttaaacttttgtttgtactacctgttttctgcggaactgacggatcacaaagaactgaatctccattctgcatctccattgaacagccttggacctgttcacgttgccacagaattcacatgagaaccaagtagcctgttatcaatctgctaaattaatggacttgttaaacttttggaaaaaaaaagattaaatgccagctttgtacaggtcttttctatttttttttgtttattttgttatttgcaaatttgtacaaacatttaaatggttctaatttccagataaatgatttttgatgttattgttgggacttaagaacatttttggaatagatattgaactgtaataatgttttcttaaaactagagtctactttgttacatagtcagcttgtaaattttgtggaaccacaggtatttggggcagcattcataattttcattttgtattctaactggattagtactaattttatacatgcttaactggtttgtacactttgggatgctacttagtgatgtttctgactaatcttaaatcattgtaattagtacttgcatattcaacgtttcaggccctggttgggcaggaaagtgatgtatagttatggacactttgcgtttcttatttaggataacttaatatgtttttatgtatgtattttaaagaaatttcatctgcttctactgaactatgcgtactgcatagcatcaagtcttctctagagacctctgtagtcctgggaggcctcataatgtttgtagatcagaaaagggagatctgcatctaaagcaatggtcctttgtcaaacgagggattttgatccacttcaccattttgagttgagctttagcaaaagtttcccctcataattctttgctcttgtttcagtccaggtggaggttggttttgtagttctgccttgaggaattatgtcaacactcatacttcatctcattctcccttctgccctgcagattagattacttagcacactgtggaagtttaagtggaaggagggaatttaaaaatgggacttgagtggtttgtagaatttgtgttcataagttcagatgggtagcaaatggaatagaacttacttaaaaattggggagatttatttgaaaaccagctgtaagttgtgcattgagattatgttaaaagccttggcttaagaatttgaaaatttctttagcctgtagcaacctaaactgtaattcctatcattatgttttattactttccaattacctgtaactgacagaccaaattaattggctttgtgtcctatttagtccatcagtattttcaagtcatgtggaaagcccaaagtcatcacaatgaagagaacaggtgcacagcactgttcctcttgtgttcttgagaaggatctaatttttctgtatatagcccacatcacacttgctttgtcttgtatgttaattgcatcttcattggcttggtatttcctaaatgtttaacaagaacacaagtgttcctgataagatttcctacagtaagccagctctattgtaagcttcccactgtgatgatcatttttttgaagattcattgaacagccaccactctatcatcctcattttggggcagtccaagacatagctggttttagaaacccaagttcctctaagcacagcctcccgggtatgtaactgaacttggtgccaaagtacttgtgtactaatttctattactacgtactgtcactttcctcccgtgccattactgcatcataatacaaggaacctcagagcccccatttgttcattaaagaggcaactacagccaaaatcactgttaaaatcttactacttcatggagtagctcttaggaaaatatatcttcctcctgagtctgggtaattatacctctcccaagcccccattgtgtgttgaaatcctgtcatgaatccttggtagctctctgagaacagtgaagtccagggaaaggcatctggtctgtctggaaagcaaacattatgtggcctctggtagtttttttcctgtaagaatactgactttctggagtaatgagtatatatcagttattgtacatgattgctttgtgaaatgtgcaaatgatatcacctatgcagccttgtttgatttattttctctggtttgtactgttattaaaagcatattgtattatagagctattcagatattttaaatataaagatgtattgtttccgtaatatagacgtatggaatatatttaggtaatagatgtattacttggaaagttctgctttgacaaactgacaaagtctaaatgagcacatgtatcccagtgagcagtaaatcaatggaacatcccaagaagaggataaggatgcttaaaatggaaatcattctccaacgatatacaaattggacttgttcaactgctggatatatgctaccaataaccccagccccaacttaaaattcttacattcaagctcctaagagttcttaatttataactaattttaaaagagaagtttcttttctggttttagtttgggaataatcattcattaaaaaaaatgtattgtggtttatgcgaacagaccaacctggcattacagttggcctctccttgaggtgggcacagcctggcagtgtggccaggggtggccatgtaagtcccatcaggacgtagtcatgcctcctgcatttcgctacccgagtttagtaacagtgcagattccacgttcttgttccgatactctgagaagtgcctgatgttgatgtacttacagacacaagaacaatctttgctataattgtataaagccataaatgtacataaattatgtttaaatggcttggtgtctttcttttctaattatgcagaataagctctttattaggaattttttgtgaagctattaaatacttgagttaa

SEQ ID NO: 123198 - DNA, 1968 bp, Artificial Sequence
  derived and/or modified sequence
atggccgaggccccccaggtggtggagattgatcctgactttgagcccctgccccggcccaggagctgcacctggcccctgcccaggcctgagttcagccagagcaacagcgccaccagcagccctgcccccagcggcagcgctgctgccaacccagatgctgctgctggcctgcccagcgccagcgctgctgctgtgtctgctgacttcatgagcaacctgagcctgctggaggagagcgaggacttcccccaggcccctggctctgtggccgctgctgtggccgctgctgctgctgctgctgccactggaggcctgtgtggggacttccagggccctgaggccggctgcctgcacccagccccaccccagcccccacctcctggccccctgagccagcacccccctgtgcccccagctgctgctggccccctggccggccagcccaggaagagcagcagcagcagaagaaatgcctggggcaacctgtcctatgctgacctgatcaccaaggccatcgagagcagcgctgagaagaggctgaccctgagccagatctatgagtggatggtgaagtctgtgccctacttcaaggacaagggggacagcaacagcagcgctggctggaagaacagcatccgccacaacctgagcctgcacagcaagttcatccgggtgcagaatgaaggaacaggcaagagctcctggtggatgctgaaccctgagggcggcaagagcggcaagagcccccggcggcgggccgcctccatggacaacaacagcaagtttgccaagagccgcagccgggccgccaagaagaaggccagcctgcagagcggccaggagggcgctggggacagccctggcagccagttcagcaagtggccagccagccctggcagccacagcaatgatgactttgacaactggagcaccttccggcccaggaccagcagcaatgccagcaccatcagcggccgcctgagccccatcatgacagagcaggatgacctgggggagggagatgtgcacagcatggtgtacccaccttctgctgccaagatggccagcaccctgcccagcctgtctgagatcagcaaccctgagaacatggagaacctgctggacaacctgaacctgctgagcagccccaccagcctgactgtgtccacccagagcagccctggcaccatgatgcagcagaccccctgctacagctttgccccacccaacaccagcctgaacagccccagccccaactaccagaagtacacctacggccagagctccatgagccccctgccccagatgcccatccagaccctgcaggacaacaagagcagctatggaggcatgagccagtacaactgtgcccctggcctgctgaaggagctgctgaccagtgacagccccccccacaatgacatcatgacccctgtggaccccggggtggcccagcccaacagccgggtgctgggccagaatgtgatgatgggccccaacagcgtgatgagcacctacggcagccaggccagccacaacaagatgatgaaccccagcagccacacccaccctggccacgcccagcagaccagcgctgtgaatggccggcccctgccccacacagtgtccaccatgccccacaccagcggcatgaaccggctgacccaggtgaagacccctgtgcaggtgcccctgccccaccccatgcagatgtctgccctgggcggctacagctctgtgagcagctgcaatggctacggccgcatgggcctgctgcaccaggagaagctgcccagcgacctggatggcatgtttattgagcggctggactgtgacatggagagcatcatcagaaatgacctgatggatggagacaccctggacttcaactttgacaacgtgctgcccaaccagagcttcccccacagcgtgaagaccaccacccacagctgggtgtctggatag

SEQ ID NO: 123199 - DNA, 1968 bp, Artificial Sequence
  derived and/or modified sequence
atggccgaggccccccaggtggtggagatcgaccccgacttcgagccccttccccggcctagatcctgtacctggcctctgccaagaccagaatttagtcagagcaactcagccacgtcaagcccagcaccttccgggtccgccgcagctaatccagatgccgccgcgggactgcccagcgccagcgccgccgcggtgtctgctgacttcatgtcaaacctgagcctattagaagaaagcgaggatttccctcaagcgccagggtccgtcgcagcagcggtcgctgccgccgcagcagcggcggccacaggagggctttgcggtgactttcagggtccggaggccggttgcctgcacccggctcccccccagcctcctccccctgggcccctcagccagcaccctccagtgccaccagctgccgcaggccccctggctggacagcctagaaaatcttcctcaagtaggaggaatgcctggggtaacctatcctacgctgatttaatcaccaaagccattgagtcctctgccgagaaacgcctgactctttcccagatatatgagtggatggttaaatccgtgccatactttaaggacaagggtgactccaatagctctgctggctggaaaaattctattagacataacctctctcttcacagtaagttcataagagtccagaatgaaggtaccggcaaaagtagttggtggatgctaaaccctgagggaggaaaaagcggcaaaagccctagacgacgcgctgcaagcatggataataattctaaatttgccaaatcgcgctcaagggcagctaagaagaaggcttctctgcagtctggccaagagggcgccggcgattctcccggctcccagttcagcaagtggcccgccagccctggtagccattctaatgacgatttcgacaactggagcacctttcggccacgtacaagttcaaacgcctctactattagtggcagactgtccccgattatgacagaacaagatgacttaggggagggcgacgtccatagcatggtctaccccccatcggccgccaaaatggcctctaccctgccttcactttccgagatcagcaatcctgaaaatatggaaaaccttctcgacaaccttaatttgctctctagccccacctccctgactgtgtccacccagagtagcccaggcacaatgatgcagcagactccttgttatagttttgcgcctcctaacaccagccttaatagcccatctccgaattaccagaaatacacctacggacaaagttcgatgtctcctttaccacagatgcccatacaaaccctccaggacaataagtctagctatggggggatgtcccaatataattgtgccccgggattgctgaaagagctgcttacttctgattctccacctcacaacgacattatgacgcctgtagacccgggggtcgcccaaccaaacagtagggtactaggacagaacgtcatgatgggtcccaattctgtgatgtcaacttatgggtcccaggcgtcccataataaaatgatgaacccgtcaagccacacacatcccggtcatgcccagcagacatctgcagtcaacgggagaccattgccccacacagttagcaccatgcctcacacatccggaatgaatcgcctgacgcaggttaagactcccgtgcaggtgcccctccctcaccctatgcagatgtccgctcttggcggctactcgtcggtgtcgtcttgcaatggctacggcaggatggggctgttacaccaagaaaaattgcctagcgatctcgatggcatgttcattgaaagattagactgtgacatggagtcaattataaggaacgacctgatggacggcgataccctggacttcaactttgacaatgttttgcctaaccagagcttccctcactctgttaagactaccacccactcctgggtatcaggttag

SEQ ID NO: 123200 - DNA, 1968 bp, Artificial Sequence
  derived and/or modified sequence
atggcggaggcacctcaagtagtagagattgaccccgactttgagccgctgccacgccctcgatcatgcacgtggcccttaccacgtccagagttcagccaaagcaatagcgcaacaagctctcccgctccctcaggtagtgctgccgctaatcccgatgccgcagccggtttgccttcggcctcagctgcagcagtgagcgccgactttatgagcaacttgtcactactggaggagagcgaagacttcccacaggctccgggttctgtggccgcagctgtcgccgcagcagcagcagcggcagctacaggaggcctgtgcggggacttccaaggcccagaggcagggtgtctccatcccgctcccccacaacctccaccgccagggcctctttctcaacaccccccagtgccacctgccgctgctggcccattagcaggccagccaagaaaatcatcatccagtaggaggaatgcttgggggaatctgagttacgccgacctgattacaaaggctatcgaaagttccgcagagaaacgattgacactgagtcagatatatgagtggatggttaagtctgtaccctacttcaaggacaaaggtgactctaacagttctgccggatggaagaacagcattcgtcacaatctgagcttacactctaaattcatcagagttcagaatgagggaaccggaaaatcttcctggtggatgctgaaccccgagggagggaaaagcggtaaaagccctcggagaagggcggctagtatggataataattcaaaatttgcaaaatcacgcagtagagcggctaagaaaaaggcgtcactgcagagcggacaggagggtgccggtgactcaccaggctcacagttctctaagtggccggcaagtccaggtagtcactcaaatgacgatttcgacaattggtccactttccgacccaggacaagctctaatgcatccaccatctcaggccgactcagtccgattatgacagaacaagacgacctgggagaaggggatgtccactccatggtctaccctccatcagctgcaaagatggcctcaaccttaccgagcctgtcagagatctcaaatcccgaaaatatggagaacctcctcgacaatttgaatctgttatccagccctacatcgcttacggtgagtacccagtcgagccccggaaccatgatgcagcagacaccctgttacagctttgcacctcctaatacctcacttaattccccaagtcccaactatcagaaatacacctacgggcagtcatccatgtctccactgccccaaatgccgatacagaccctccaggacaacaagagcagctacggagggatgtcccagtacaactgcgccccaggtctgctgaaggaactgcttacaagcgactcaccgccacataacgacatcatgacccccgtggacccaggcgtagctcagcccaactcacgcgtactcggacagaacgtaatgatgggtcccaactccgtcatgagtacttacggctctcaggcttcccataacaaaatgatgaacccaagtagccacacccatcccggtcatgcgcagcagacttccgcggtgaatggccgaccactgcctcacactgtgtcaaccatgcctcacacctccggcatgaacagactgacgcaggtcaaaacacccgttcaagttcctttgccccaccctatgcagatgtcagccctgggcggttattccagtgtgtcatcctgcaacggctatggacgcatgggacttctgcaccaggaaaagctgccgtcagatctagacgggatgtttatcgagcgactggactgtgacatggagtcgatcatcagaaatgatctgatggatggggataccctcgactttaatttcgataacgtgcttcctaaccagtcatttccgcacagcgttaagaccacaactcattcctgggttagtggctag

SEQ ID NO: 123201 - DNA, 387 bp, Artificial Sequence
  derived and/or modified sequence
atgagctgccaccagagccccctggtgttcgacgtgggccagtgcaggcaacatgaccttgccggtcaaatcctgatttaccatagccttactcccgctggccccctgggacgccctccagatgttccccattcgccccatctggcttctccaacgggttctcgccagagaactgttggggggacatgcgacacggcactctttctatgtagctgcttctctagctctttcttctcccttctcgtaactctgttctttttcaccctgtctcctcataaaaccagaaattttgtgattttgctgatattcctatacagtgtgtgtctccatacggatggttacctgcgggcgagtgagctaagcctaccaccttctattatttcttag

SEQ ID NO: 123202 - protein, 322 aa, Artificial Sequence
  derived and/or modified sequence
LYQVSTHEQSESSHGWTGPSTRGRQGSRHEQAQDSSRHSASQDGQDTIRGHPGSSRGGRQGYHHEHSVDSSGHSGSHHSHTTSQGRSDASRGQSGSRSASRTTRNEEQSGDGSRHSGSRHHEASTHADISRHSQAVQGQSEGSRRSRRQGSSVSQDSDSEGHSEDSERWSGSASRNHRGSVQEQSRHGSRHPRSHHEDRAGHGHSADRSRQSGTRHAETSSGGQAASSHEQARSSPGERHGSRHQQSADSSRHSGIPRGQASSAVRDSRHWGSSGSQASDSEGHSEESDTQSVSGHGQAGPHQQSHQESARDRSGGRSGRSG

SEQ ID NO: 123203 - protein, 4061 aa, Artificial Sequence
  derived and/or modified sequence
MSTLLENIFAIINLFKQYSKKDKNTDTLSKKELKELLEKEFRQILKNPDDPDMVDVFMDHLDIDHNKKIDFTEFLLMVFKLAQAYYESTRKENLPISGHKHRKHSHHDKHEDNKQEENKENRKRPSSLERRNNRKGNKGRSKSPRETGGKRHESSSEKKERKGYSPTHREEEYGKNHHNSSKKEKNKTENTRLGDNRKRLSERLEEKEDNEEGVYDYENTGRMTQKWIQSGHIATYYTIQDEAYDTTDSLLEENKIYERSRSSDGKSSSQVNRSRHENTSQVPLQESRTRKRRGSRVSQDRDSEGHSEDSERHSGSASRNHHGSAWEQSRDGSRHPRSHDEDRASHGHSADSSRQSGTRHAETSSRGQTASSHEQARSSPGERHGSGHQQSADSSRHSATGRGQASSAVSDRGHRGSSGSQASDSEGHSENSDTQSVSGHGKAGLRQQSHQESTRGRSGERSGRSGSSLYQVSTHEQPDSAHGRTGTSTGGRQGSHHEQARDSSRHSASQEGQDTIRGHPGSSRGGRQGSHHEQSVNRSGHSGSHHSHTTSQGRSDASHGQSGSRSASRQTRNEEQSGDGTRHSGSRHHEASSQADSSRHSQVGQGQSSGPRTSRNQGSSVSQDSDSQGHSEDSERWSGSASRNHHGSAQEQSRDGSRHPRSHHEDRAGHGHSADSSRKSGTRHTQNSSSGQAASSHEQARSSAGERHGSRHQLQSADSSRHSGTGHGQASSAVRDSGHRGSSGSQATDSEGHSEDSDTQSVSGHGQAGHHQQSHQESARDRSGERSRRSGSFLYQVSTHKQSESSHGWTGPSTGVRQGSHHEQARDNSRHSASQDGQDTIRGHPGSSRRGRQGSHHEQSVDRSGHSGSHHSHTTSQGRSDASRGQSGSRSASRTTRNEEQSRDGSRHSGSRHHEASSHADISRHSQAGQGQSEGSRTSRRQGSSVSQDSDSEGHSEDSERWSGSASRNHRGSAQEQSRHGSRHPRSHHEDRAGHGHSADSSRQSGTPHAETSSGGQAASSHEQARSSPGERHGSRHQQSADSSRHSGIPRRQASSAVRDSGHWGSSGSQASDSEGHSEESDTQSVSGHGQDGPHQQSHQESARDWSGGRSGRSGSFIYQVSTHEQSESAHGRTRTSTGRRQGSHHEQARDSSRHSASQEGQDTIRAHPGSRRGGRQGSHHEQSVDRSGHSGSHHSHTTSQGRSDASHGQSGSRSASRQTRKDKQSGDGSRHSGSRHHEAASWADSSRHSQVGQEQSSGSRTSRHQGSSVSQDSDSERHSDDSERLSGSASRNHHGSSREQSRDGSRHPGFHQEDRASHGHSADSSRQSGTHHTESSSHGQAVSSHEQARSSPGERHGSRHQQSADSSRHSGIGHRQASSAVRDSGHRGSSGSQVTNSEGHSEDSDTQSVSAHGQAGPHQQSHKESARGQSGESSGRSRSFLYQVSSHEQSESTHGQTAPSTGGRQGSRHEQARNSSRHSASQDGQDTIRGHPGSSRGGRQGSYHEQSVDRSGHSGYHHSHTTPQGRSDASHGQSGPRSASRQTRNEEQSGDGSRHSGSRHHEPSTRAGSSRHSQVGQGESAGSKTSRRQGSSVSQDRDSEGHSEDSERRSESASRNHYGSAREQSRHGSRNPRSHQEDRASHGHSAESSRQSGTRHAETSSGGQAASSQEQARSSPGERHGSRHQQSADSSTDSGTGRRQDSSVVGDSGNRGSSGSQASDSEGHSEESDTQSVSAHGQAGPHQQSHQESTRGQSGERSGRSGSFLYQVSTHEQSESAHGRTGPSTGGRQRSRHEQARDSSRHSASQEGQDTIRGHPGSSRGGRQGSHYEQSVDSSGHSGSHHSHTTSQERSDVSRGQSGSRSVSRQTRNEKQSGDGSRHSGSRHHEASSRADSSRHSQVGQGQSSGPRTSRNQGSSVSQDSDSQGHSEDSERWSGSASRNHLGSAWEQSRDGSRHPGSHHEDRAGHGHSADSSRQSGTRHTESSSRGQAASSHEQARSSAGERHGSHHQLQSADSSRHSGIGHGQASSAVRDSGHRGYSGSQASDSEGHSEDSDTQSVSAQGKAGPHQQSHKESARGQSGESSGRSGSFLYQVSTHEQSESTHGQSAPSTGGRQGSHYDQAQDSSRHSASQEGQDTIRGHPGPSRGGRQGSHQEQSVDRSGHSGSHHSHTTSQGRSDASRGQSGSRSASRKTYDKEQSGDGSRHSGSHHHEASSWADSSRHSLVGQGQSSGPRTSRPRGSSVSQDSDSEGHSEDSERRSGSASRNHHGSAQEQSRDGSRHPRSHHEDRAGHGHSAESSRQSGTHHAENSSGGQAASSHEQARSSAGERHGSHHQQSADSSRHSGIGHGQASSAVRDSGHRGSSGSQASDSEGHSEDSDTQSVSAHGQAGPHQQSHQESTRGRSAGRSGRSGSFLYQVSTHEQSESAHGRTGTSTGGRQGSHHKQARDSSRHSTSQEGQDTIHGHPGSSSGGRQGSHYEQLVDRSGHSGSHHSHTTSQGRSDASHGHSGSRSASRQTRNDEQSGDGSRHSGSRHHEASSRADSSGHSQVGQGQSEGPRTSRNWGSSFSQDSDSQGHSEDSERWSGSASRNHHGSAQEQLRDGSRHPRSHQEDRAGHGHSADSSRQSGTRHTQTSSGGQAASSHEQARSSAGERHGSHHQQSADSSRHSGIGHGQASSAVRDSGHRGYSGSQASDNEGHSEDSDTQSVSAHGQAGSHQQSHQESARGRSGETSGHSGSFLYQVSTHEQSESSHGWTGPSTRGRQGSRHEQAQDSSRHSASQDGQDTIRGHPGSSRGGRQGYHHEHSVDSSGHSGSHHSHTTSQGRSDASRGQSGSRSASRTTRNEEQSGDGSRHSGSRHHEASTHADISRHSQAVQGQSEGSRRSRRQGSSVSQDSDSEGHSEDSERWSGSASRNHHGSAQEQLRDGSRHPRSHQEDRAGHGHSADSSRQSGTRHTQTSSGGQAASSHEQARSSAGERHGSHHQQSADSSRHSGIGHGQASSAVRDSGHRGYSGSQASDNEGHSEDSDTQSVSAHGQAGSHQQSHQESARGRSGETSGHSGSFLYQVSTHEQSESSHGWTGPSTRGRQGSRHEQAQDSSRHSASQYGQDTIRGHPGSSRGGRQGYHHEHSVDSSGHSGSHHSHTTSQGRSDASRGQSGSRSASRTTRNEEQSGDSSRHSVSRHHEASTHADISRHSQAVQGQSEGSRRSRRQGSSVSQDSDSEGHSEDSERWSGSASRNHRGSVQEQSRHGSRHPRSHHEDRAGHGHSADRSRQSGTRHAETSSGGQAASSHEQARSSPGERHGSRHQQSADSSRHSGIPRGQASSAVRDSRHWGSSGSQASDSEGHSEESDTQSVSGHGQAGPHQQSHQESARDRSGGRSGRSGSFLYQVSTHEQSESAHGRTRTSTGRRQGSHHEQARDSSRHSASQEGQDTIRGHPGSSRRGRQGSHYEQSVDRSGHSGSHHSHTTSQGRSDASRGQSGSRSASRQTRNDEQSGDGSRHSWSHHHEASTQADSSRHSQSGQGQSAGPRTSRNQGSSVSQDSDSQGHSEDSERWSGSASRNHRGSAQEQSRDGSRHPTSHHEDRAGHGHSAESSRQSGTHHAENSSGGQAASSHEQARSSAGERHGSHHQQSADSSRHSGIGHGQASSAVRDSGHRGSSGSQASDSEGHSEDSDTQSVSAHGQAGPHQQSHQESTRGRSAGRSGRSGSFLYQVSTHEQSESAHGRAGPSTGGRQGSRHEQARDSSRHSASQEGQDTIRGHPGSRRGGRQGSYHEQSVDRSGHSGSHHSHTTSQGRSDASHGQSGSRSASRETRNEEQSGDGSRHSGSRHHEASTQADSSRHSQSGQGESAGSRRSRRQGSSVSQDSDSEAYPEDSERRSESASRNHHGSSREQSRDGSRHPGSSHRDTASHVQSSPVQSDSSTAKEHGHFSSLSQDSAYHSGIQSRGSPHSSSSYHYQSEGTERQKGQSGLVWRHGSYGSADYDYGESGFRHSQHGSVSYNSNPVVFKERSDICKASAFGKDHPRYYATYINKDPGLCGHSSDISKQLGFSQSQRYYYYE

SEQ ID NO: 123204 - DNA, 966 bp, Artificial Sequence
  derived and/or modified sequence
ctctaccaggtgagcactcatgaacagtctgagtccgcccatggacgcacagggcccagcactggaggaagacaaagatcccgccacgagcaggcacgagacagctccaggcactcagcgtcccaagagggtcaggacaccattcgtggacacccagggtcaagcagaggaggaaggcagggatcccactatgagcaatcggtagatagttctggacactcagggtctcatcacagccacaccacgtcccaggaaaggtctgatgtctcccgtgggcagtcaggatccagaagtgtcagcagacaaacacgtaatgagaaacaatcaggagacggctccaggcactcagggtcgcgtcaccatgaagcttcctctcgggccgacagctctagacactcgcaggtgggccagggacaatcatcagggcccaggacaagcaggaaccagggatccagtgttagccaggacagtgacagtcagggacactcagaagactctgagaggcggtctgggtctgcgtccagaaaccatcatggatctgctcaggagcagtcaagagatggctccagacaccccaggtcccatcacgaagacagagccggtcatgggcactctgcagagagctccagacaatcaggcactcatcatgcagagaattcctctggtggacaggctgcatcatcccatgaacaggcaagatcaagtgcaggagagagacacggatcccaccaccagcagtcagcagacagctccagacactcaggcattgggcacggacaagcttcatctgcagtcagagacagtggacaccgagggtccagtggtagtcaggccagtgacagtgagggacattcagaagactcagacacacagtcagtgtcagcccacggacaggctgggccccatcagcagagccaccaagagtccacacgtggccggtcagcaggaaggtctggacgttcaggg

SEQ ID NO: 123205 - DNA, 966 bp, Artificial Sequence
  derived and/or modified sequence
ctctaccaggtgagcactcatgaacagtctgagtcctcccatggatggacggggcccagcactagaggaagacaaggatcccgccatgagcaggcacaagacagctccaggcactcagcatcccaagacggtcaggacaccattcgtggacacccggggtcaagcagaggaggaaggcaggggtaccaccacgagcattcggtagatagctctggacactcagggtcccatcacagccacaccacatcccagggaaggtctgatgcctcccgtgggcagtcaggatccagaagtgcaagcagaacaacacgtaatgaggaacaatcaggagacggctccaggcactcagggtcgcgtcaccatgaagcttccactcatgccgacatctctagacactcacaggcagtccagggacaatcagaggggtccaggagaagcaggcgccagggatccagtgtgagccaggacagtgacagtgagggacattcagaagactctgagaggtggtctgggtctgcttccagaaaccatcgtggatctgttcaggagcagtcaaggcacggctccagacaccccaggtcccatcacgaagacagagccggtcacgggcactctgcagaccgctccagacaatcaggcactcgtcacgcagagacttcctctggtggacaggctgcatcatcccatgaacaggcaagatcaagtccaggagagagacacggatcccgccaccagcagtcagcagacagctccagacactcaggcattccgcgtggacaagcttcatctgcagtcagagacagtagacactgggggtccagtggtagtcaggccagtgatagtgagggacattcagaagagtcagacacacagtcagtgtcaggccatggacaggctgggccccatcagcagagccaccaagagtccgcacgtgaccggtcagggggaaggtctggacgttcaggg

SEQ ID NO: 123206 - DNA, 12747 bp, Artificial Sequence
  derived and/or modified sequence
cttttggtgaacaaggttcacatttattgccaaaagatgtctactctcctggaaaacatctttgccataattaatcttttcaagcaatattcaaaaaaagataaaaacactgacacattgagtaaaaaagagctgaaggaacttctggaaaaggaatttcggcaaatcctgaagaatccagatgacccagatatggttgatgtcttcatggatcacttggatatagaccacaacaagaaaattgacttcactgagtttcttctgatggtattcaagttggctcaagcatattatgagtctaccagaaaagagaatttaccgatatcaggacacaagcacagaaagcacagtcatcatgataaacatgaagataataaacaggaagaaaacaaagaaaacagaaaaagaccctcaagtctggaaagaagaaacaatagaaaagggaataagggaagatccaagagcccaagagaaacaggggggaaaaggcatgaatctagttctgaaaaaaaagaaagaaaaggatattcacctactcatagagaagaagaatatggaaaaaaccatcataactcaagtaaaaaagagaaaaacaagactgaaaatactagattaggagacaataggaagaggctaagtgaaagacttgaagagaaagaagacaatgaagaaggagtatatgattatgaaaatacaggaagaatgactcaaaaatggatacaatcaggccatattgccacatattacacaatccaggatgaagcctatgacaccactgatagtctattagaagaaaacaaaatatatgaaagatcaaggtcatctgatggcaaatcatcatctcaagtgaacaggtcaagacatgaaaatacaagccaggtaccattgcaggagtccaggacaagaaagcgtaggggatccagagttagccaggacagggacagtgagggacactcagaagactctgagaggcactctgggtcggcttccagaaaccatcatggatctgcgtgggagcagtcaagagatggctccagacaccccaggtcccatgatgaagacagagccagtcatgggcactctgcagacagctccagacaatcaggcactcgtcacgcagagacttcctctcgtggacagactgcatcatcccatgaacaggcaagatcaagtccaggagaaagacatggatccggccaccagcagtcagcagacagctccagacactcagccactgggcgcgggcaagcttcatctgcagtcagcgatcgtggacaccgggggtctagcggtagtcaggccagtgacagtgagggacattcagaaaactcagacacacaatcagtgtcaggccacggaaaggctgggctgagacagcagagccaccaagagtccacacgtggccggtcaggggaacggtctggacgttcagggtcttccctctaccaggtgagcactcatgaacagcctgactctgcccatggacggaccgggaccagcactggaggaagacaaggatcgcaccacgagcaggcacgagacagctccaggcattcagcgtcccaagagggtcaggacaccattcgtggacacccggggtcaagcagaggaggaaggcagggatcccaccacgagcaatcggtaaataggtctggacactcaggttcccatcacagccacaccacatcccagggaaggtctgatgcctcccatgggcagtcaggatccagaagtgcaagcagacaaacacgaaatgaggaacaatcaggagacggcaccaggcactcagggtcacgtcatcatgaagcttcctctcaggctgacagctctagacactcacaggtgggccagggacaatcatcggggcccaggacaagtaggaaccagggatccagtgttagccaggacagtgacagtcagggacactcagaagactctgagaggtggtctgggtctgcttccagaaaccatcatggatctgctcaggagcagtcaagagatggctccagacaccccaggtcccatcacgaagacagagctggtcatgggcactctgcagacagctccagaaaatcaggcactcgtcacacacagaattcctctagtggacaggctgcgtcatcccatgaacaggcaagatcaagtgcaggagaaagacatggatcccgccaccagctccagtcagcagacagctccagacactcaggcactgggcacggacaagcttcatctgcagtcagagacagtggacaccgagggtccagtggtagtcaggccactgacagtgagggacattcagaagactcagacacacagtcagtgtcaggccatggacaggctggtcaccatcagcagagccaccaagagtccgcacgtgaccggtcaggggaaaggtctcgacgttcagggtctttcctctaccaggtgagcactcataaacagtctgagtcctcccatggatggacagggcccagcactggagtaagacaaggatcccaccatgagcaggcacgagacaactccaggcactcagcatcccaagatggtcaggacaccattcgtggacacccggggtcaagcagaagaggaaggcaggggtcccaccacgagcaatcggtagataggtctggacactcagggtcccatcacagccacaccacatcccagggaaggtctgatgcctcccgtgggcagtcaggatccagaagtgcaagcagaacaacacgtaatgaggaacaatcaagagacggctccaggcactcagggtcacgtcaccatgaagcttcctctcatgccgacatctctagacactcacaggcaggccagggacaatcagaggggtccaggacaagcaggcgccagggatccagtgttagccaggacagtgacagtgagggacattcagaagactctgagaggtggtctgggtctgcttccagaaaccatcgtggatctgctcaggagcagtcaagacatggctccagacaccccaggtcccatcacgaagacagagccggtcacgggcactctgcagacagctccagacaatcaggaactcctcacgcagagacttcctctggtggacaggctgcgtcatcccatgaacaggcaagatcaagtccaggagaaagacacggatcccgccaccagcagtcagcagacagctccagacactcaggcattccgcgcagacaagcttcatctgcagtcagagacagtggacactgggggtccagtggtagtcaggccagtgatagtgagggacattcagaggagtcagacacacagtcagtgtcaggccatggacaggatgggccccatcagcagagccaccaagagtccgcacgtgactggtcagggggaaggtctggacgttcagggtctttcatctaccaggtgagcactcatgaacagtctgagtctgcccatgggcggaccaggaccagcactggacgaagacaaggatcccaccacgagcaggcacgagacagctccaggcactcagcgtcccaagagggtcaggacaccattcgtgcacacccggggtcaaggagaggaggaaggcagggatcccaccatgagcaatcggtagatagatctggacactcagggtcccatcacagccacaccacatcccagggaaggtctgatgcctcccatgggcagtcaggatccagaagtgcaagcagacaaactcgtaaggacaaacaatcaggagacggctccaggcactcagggtcacgtcaccatgaagctgcctcttgggctgacagctctagacactcacaggtgggacaggaacaatcatcggggtccaggacaagcaggcaccagggatccagtgttagccaggacagtgacagtgagagacactcagacgactccgagaggttgtctgggtctgcttccagaaaccatcatggatcttctcgggagcagtcaagagatggctccagacaccctgggttccatcaagaagacagagccagtcacgggcactctgcagacagctccagacaatcaggcactcatcacacagagtcttcctctcatggacaggctgtgtcatcccatgaacaggcaagatcaagtccaggagaaagacatggatcccgccaccagcagtcagcagacagctccagacactcaggcattgggcacagacaagcttcatctgcagtcagagacagtggacaccgagggtccagtggtagtcaggtcactaacagtgagggacattcagaagactcagacacacagtcagtgtcagcccacggacaagctgggccccatcagcagagccacaaagagtccgcacgtggccagtcaggggaaagctctggacgttcaaggtctttcctctaccaggtgagctctcatgaacagtctgagtccacacacggacagactgcacccagcactggaggaagacaaggatcccgccatgagcaggcacgaaacagctctaggcactcagcatcccaagacggtcaggacaccattcgtggacacccggggtcaagcagaggaggaaggcagggatcctaccacgagcaatcagtagataggtctggacactcagggtaccatcacagccacaccacaccccagggaaggtctgatgcctcccatgggcagtcaggacccagaagtgcaagcaggcaaacaagaaatgaggaacaatcaggagacggctccaggcactcagggtcacgtcaccatgaaccttccactcgggccggcagctctagacactcacaggtgggccagggagaatcagcggggtccaagacaagcaggcgccagggatccagtgttagtcaggacagggacagtgagggacactcagaagactctgagaggcggtctgagtcggcttccagaaaccattatggatctgctcgggagcagtcaagacatggctccaggaaccccaggtcccatcaagaagatagagccagtcatgggcactctgcagagagctccagacaatcaggcactcgtcatgcagagacttcctctggtggacaggctgcatcatcccaggaacaggcaaggtcaagtccaggagaaagacatggatcccgccaccagcagtcagcagacagctccacagactcaggcactgggcgcagacaagattcatctgtagtcggagacagtggaaaccgagggtccagtggtagccaggccagtgacagcgagggacactcagaagagtcagacacacagtcagtgtcagcccacggacaggctgggccccatcagcagagccaccaagagtccacacgtggccagtcaggggaaaggtctggacgttcagggtctttcctctaccaggtgagcactcatgaacagtctgagtccgcccatggacgcacagggcccagcactggaggaagacaaagatcccgccacgagcaggcacgagacagctccaggcactcagcgtcccaagagggtcaggacaccattcgtggacacccagggtcaagcagaggaggaaggcagggatcccactatgagcaatcggtagatagttctggacactcagggtctcatcacagccacaccacgtcccaggaaaggtctgatgtctcccgtgggcagtcaggatccagaagtgtcagcagacaaacacgtaatgagaaacaatcaggagacggctccaggcactcagggtcgcgtcaccatgaagcttcctctcgggccgacagctctagacactcgcaggtgggccagggacaatcatcagggcccaggacaagcaggaaccagggatccagtgttagccaggacagtgacagtcagggacactcagaagactctgagaggtggtctgggtctgcttccagaaaccatcttggatctgcttgggagcagtcaagagatggctccagacaccctgggtcccatcacgaagacagagccggtcacgggcactctgcagacagctccagacaatcaggcactcgtcacacagagtcttcctctcgtggacaggctgcgtcatcccatgaacaggcaagatcaagtgcaggagaaagacatggatcccaccaccagctccagtcagcagacagctccagacactcaggcattgggcatggacaagcttcatctgcagtcagagacagtggacaccgagggtacagtggtagtcaggccagtgacagtgagggacattcagaagactcagacacacagtcagtgtcagcacagggaaaagctgggccccatcagcagagccacaaagagtccgcacgtggccagtcaggggaaagctctggacgttcagggtctttcctctaccaggtgagcactcatgaacagtctgagtccacccatggacagtctgcgcccagcactggaggaagacaaggatcccattatgatcaggcacaagacagctccaggcactcagcatcccaagagggtcaggacaccattcgtggacacccggggccaagcagaggaggaagacaggggtcccaccaagagcaatcggtagataggtctggacactcagggtctcatcacagccacaccacatcccagggaaggtctgatgcctcccgtgggcagtcaggatccagaagtgcaagcagaaaaacatatgacaaggaacaatcaggagatggctctaggcactcagggtcgcatcatcatgaagcttcctcttgggccgacagctctagacactcactggtgggccagggacaatcatcagggcccaggacaagcaggccccggggatccagtgttagccaggacagtgacagtgagggacactcagaagattctgagaggcggtctgggtctgcgtccagaaaccatcatggatctgctcaggagcagtcaagagatggctccagacaccccaggtcccatcacgaagacagagccggtcatgggcactctgcagagagctccagacaatcaggcactcatcatgcagagaattcctctggtggacaggctgcatcatcccatgaacaggcaagatcaagtgcaggagagagacacggatcccaccaccagcagtcagcagacagctccagacactcaggcattgggcacggacaagcttcatctgcagtcagagacagtggacaccgagggtccagtggtagtcaggccagtgacagtgagggacattcagaagactcagacacacagtcagtgtcagcccacggacaggctgggccccatcagcagagccaccaagagtccacacgtggccggtcagcaggaaggtctggacgttcagggtctttcctctaccaggtgagcactcatgaacagtctgagtccgcccatggacggaccgggaccagcactggaggaagacaaggatcccaccacaagcaggcacgagacagctccaggcactcaacgtcccaagagggtcaggacaccattcatggacacccggggtcaagcagtggaggaaggcagggatcccactacgagcaattggtagatagatctggacactcagggtctcatcacagccacaccacatcccagggaaggtctgatgcctcccatgggcactcaggatccagaagtgcaagcagacaaactcgtaacgatgaacaatcaggagacggctccaggcactcagggtcgcgtcaccatgaagcttcctctcgggccgacagctctggacactcgcaggtgggccagggacaatcagaggggcccaggacaagcaggaactggggatccagttttagccaggacagtgacagtcagggacactcagaagactctgagaggtggtctgggtctgcttccagaaaccatcatggatctgctcaggagcagctaagagatggctccagacaccccaggtcccatcaagaagacagagctggtcatgggcactctgcagacagctccagacaatcaggcactcgtcacacacagacttcctctggtggacaggctgcatcatcccatgaacaggcaagatcaagtgcaggagaaagacatggatcccaccaccagcagtcagcagacagctccagacactcaggcattgggcacggacaagcttcatctgcagtcagagacagtggacaccgagggtacagtggtagtcaggccagtgacaatgagggacattcagaagactcagacacacagtcagtgtcagcccacggacaggctgggtcccatcagcagagccaccaagagtccgcacgtggccggtcaggggaaacgtctggacattcaggatctttcctctaccaggtgagcactcatgaacagtctgagtcctcccatggatggacggggcccagcactagaggaagacaaggatcccgccatgagcaggcacaagacagctccaggcactcagcatcccaagacggtcaggacaccattcgtggacacccggggtcaagcagaggaggaaggcaggggtaccaccacgagcattcggtagatagctctggacactcagggtcccatcacagccacaccacatcccagggaaggtctgatgcctcccgtgggcagtcaggatccagaagtgcaagcagaacaacacgtaatgaggaacaatcaggagacggctccaggcactcagggtcgcgtcaccatgaagcttccactcatgccgacatctctagacactcacaggcagtccagggacaatcagaggggtccaggagaagcaggcgccagggatccagtgtgagccaggacagtgacagtgagggacattcagaagactctgagaggtggtctgggtctgcttccagaaaccatcatggatctgctcaggagcagctaagagatggctccagacaccccaggtcccatcaagaagacagagctggtcatgggcactctgcagacagctccagacaatcaggcactcgtcacacacagacttcctctggtggacaggctgcatcatcccatgaacaggcaagatcaagtgcaggagaaagacatggatcccaccaccagcagtcagcagacagctccagacactcaggcattgggcacggacaagcttcatctgcagtcagagacagtggacaccgagggtacagtggtagtcaggccagtgacaatgagggacattcagaagactcagacacacagtcagtgtcagcccacggacaggctgggtcccatcagcagagccaccaagagtccgcacgtggccggtcaggggaaacgtctggacattcaggatctttcctctaccaggtgagcactcatgaacagtctgagtcctcccatggatggacggggcccagcactagaggaagacaaggatcccgccatgagcaggcacaagacagctccaggcactcagcatcccaatacggtcaggacaccattcgtggacacccggggtcaagcagaggaggaaggcaggggtaccaccacgagcattcggtagatagctctggacactcagggtcccatcacagccacaccacatcccagggaaggtctgatgcctcccgtgggcagtcaggatccagaagtgcaagcagaacaacacgtaatgaggaacaatcaggagacagctccaggcactcagtgtcacgtcaccatgaagcttccactcatgccgacatctctagacactcacaggcagtccagggacaatcagaggggtccaggagaagcaggcgccagggatccagtgtgagccaggacagtgacagtgagggacattcagaagactctgagaggtggtctgggtctgcttccagaaaccatcgtggatctgttcaggagcagtcaaggcacggctccagacaccccaggtcccatcacgaagacagagccggtcacgggcactctgcagaccgctccagacaatcaggcactcgtcacgcagagacttcctctggtggacaggctgcatcatcccatgaacaggcaagatcaagtccaggagagagacacggatcccgccaccagcagtcagcagacagctccagacactcaggcattccgcgtggacaagcttcatctgcagtcagagacagtagacactgggggtccagtggtagtcaggccagtgatagtgagggacattcagaagagtcagacacacagtcagtgtcaggccatggacaggctgggccccatcagcagagccaccaagagtccgcacgtgaccggtcagggggaaggtctggacgttcagggtctttcctctaccaggtgagcactcatgaacagtctgagtctgcccatgggcggaccaggaccagcactggacgaagacaaggatcccaccacgagcaggcacgagacagctccaggcactcagcgtcccaagagggtcaggacaccattcgtggacacccggggtcaagcagaagaggaaggcagggatcccactacgagcaatcggtagataggtctggacactcagggtcccatcacagccacaccacatcccagggaaggtctgatgcctcccgtgggcagtcaggatccagaagtgccagcagacaaactcgtaatgacgaacaatcaggagatggctccaggcactcatggtcgcatcaccatgaagcttccactcaggcggacagctctagacactcacagtccggccagggacaatcagcggggcccaggacaagcaggaaccagggatccagtgttagccaggacagtgacagtcagggacactcagaagactctgagaggtggtctgggtctgcttccagaaaccatcgtggatctgctcaggagcagtcaagagatggctccagacaccccacgtcccatcacgaagacagagccggtcacgggcactctgcagagagctccagacaatcaggcactcatcatgcagagaattcctctggtggacaggctgcatcatcccatgaacaggcaagatcaagtgcaggagagagacatggatcccaccaccagcagtcagcagacagctccagacactcaggcattgggcacggacaagcttcatctgcagtcagagacagtggacaccgagggtccagtggtagtcaggccagtgacagtgagggacattcagaagactcagacacacagtcagtgtcagcccacggacaggctgggccccatcagcagagccaccaagagtccacacgtggccggtcagcaggaaggtctggacgttcagggtctttcctctaccaggtgagcactcatgaacagtctgagtctgcccatggacgggctgggcccagtactggaggaagacaaggatcccgccacgagcaggcacgagacagctccaggcactcagcgtcccaagagggtcaggacaccattcgtggacacccggggtcaaggagaggaggaagacagggatcctaccacgagcaatcggtagataggtctggacactcagggtcccatcacagccacaccacatcccagggaaggtctgatgcctcccatgggcagtcaggatccagaagtgcaagcagagaaacacgtaatgaggaacagtcaggagacggctccaggcactcagggtcgcgtcaccatgaagcttccactcaggctgacagctctagacactcacagtccggccagggtgaatcagcggggtccaggagaagcaggcgccagggatccagtgttagccaggacagtgacagtgaggcatacccagaggactctgagaggcgatctgagtctgcttccagaaaccatcatggatcttctcgggagcagtcaagagatggctccagacaccccggatcctctcaccgcgatacagccagtcatgtacagtcttcacctgtacagtcagactctagtaccgctaaggaacatggtcactttagtagtctttcacaagattctgcgtatcactcaggaatacagtcacgtggcagtcctcacagttctagttcttatcattatcaatctgagggcactgaaaggcaaaaaggtcaatcaggtttagtttggagacatggcagctatggtagtgcagattatgattatggtgaatccgggtttagacactctcagcacggaagtgttagttacaattccaatcctgttgttttcaaggaaagatctgatatctgtaaagcaagtgcgtttggtaaagatcatccaaggtattatgcaacgtatattaataaggacccaggtttatgtggccattctagtgatatatcgaaacaactgggatttagtcagtcacagagatactattactatgagtaagaaattaatggcaaaggaattaatccaagaatagaagaatgaagcaagttcactttcaatcaagaaacttcataatactttcagggaagttatcttttcctgtcaatctgtttaaaatatgctatagtatttcattagtttggtggtagcttatttttattgtgtaatgatctttaaacgctatatttcagaaatattaaatggaagaaatcaatatcatggagagctaactttagaaaactagctggagtattttaggagattctgggtcaagtaatgttttatgtttttgaaagtttaagttttagacactccccaaatttctaaattaatctttttcagaaatatcgaaggagccaaaaatataaaacagttctgtataccaaagtggctatatcaacatcagggctagcacatctttctctattatccttctattggaattctagtattctgtattcaaaaaatcatcttggacataattaatattatagtaagctgcatctaaattaaaaataaactatt

SEQ ID NO: 123207 - DNA, 966 bp, Artificial Sequence
  derived and/or modified sequence
ctctaccaggtgagcactcatgaacagcctgactctgcccatggacggaccgggaccagcactggaggaagacaaggatcgcaccacgagcaggcacgagacagctccaggcattcagcgtcccaagagggtcaggacaccattcgtggacacccggggtcaagcagaggaggaaggcagggatcccaccacgagcaatcggtaaataggtctggacactcaggttcccatcacagccacaccacatcccagggaaggtctgatgcctcccatgggcagtcaggatccagaagtgcaagcagacaaacacgaaatgaggaacaatcaggagacggcaccaggcactcagggtcacgtcatcatgaagcttcctctcaggctgacagctctagacactcacaggcaggccagggacaatcagaggggtccaggacaagcaggcgccagggatccagtgttagccaggacagtgacagtgagggacattcagaagactctgagaggtggtctgggtctgcttccagaaaccatcgtggatctgctcaggagcagtcaagacatggctccagacaccccaggtcccatcacgaagacagagccggtcacgggcactctgcagacagctccagacaatcaggaactcctcacgcagagacttcctctggtggacaggctgcgtcatcccatgaacaggcaagatcaagtccaggagaaagacacggatcccgccaccagcagtcagcagacagctccagacactcaggcattccgcgcagacaagcttcatctgcagtcagagacagtggacactgggggtccagtggtagtcaggccagtgatagtgagggacattcagaggagtcagacacacagtcagtgtcaggccatggacaggatgggccccatcagcagagccaccaagagtccgcacgtgactggtcagggggaaggtctggacgttcaggg

SEQ ID NO: 123208 - DNA, 969 bp, Artificial Sequence
  derived and/or modified sequence
ttgtaccaggtgtccacccacgaacagagtgagagtgctcatgggcggaccggccccagcacagggggacgtcaacggtccaggcatgagcaggcgcgggactcctccaggcatagcgcgagtcaagaagggcaggacacaattagaggccaccctggatcttcgaggggcggtaggcaggggtcccactatgagcagtcagtagattcctccggccacagcgggagccaccactcacacaccacatcccaggagcgttcagacgtcagtagaggacagtcaggcagccgaagcgttagccggcagacacgcaacgagaaacagtcaggggacgggagccgccactccgggtcccgccaccacgaggctagttcacgagctgactcttcacggcatagccaggtgggtcagggtcaatctagtggccccaggacctctaggaaccaaggaagctccgtatcacaggactccgattctcaaggacactctgaggactccgaacggcgcagcggttctgcgtctagaaaccatcacggctcggcgcaagaacaatccagggacgggtcaaggcaccctcggagtcaccatgaggacagggcaggtcacggccactctgccgagtccagtcgccagagtggaacccaccacgccgaaaactcctccgggggtcaggcggctagtagccatgaacaggctcggagttccgcaggcgagaggcatgggagccatcaccaacagtcagccgactcatcccgccactcgggtataggccacggccaggcctcttcggcggttagagattctggtcaccgtggatcctcaggcagtcaggccagcgatagcgagggacactcagaagatagtgacacacagtcggtgtccgcacatggacaagccggaccacaccagcagtcacaccaggaatctactagggggcgatctgccggaagaagcgggagaagtggctag

SEQ ID NO: 123209 - DNA, 969 bp, Artificial Sequence
  derived and/or modified sequence
ctgtatcaagtttcaactcacgagcagtcggaatcctcccatggctggaccggcccatctactcggggcagacaaggatccagacacgagcaggcgcaagacagcagcagacactccgcaagccaggacggccaggatacaattcgtggtcatccaggcagttctagagggggccggcagggctaccaccatgaacactctgtcgattccagcgggcactccgggagccaccattcgcataccacctcccaaggtcggagcgacgcctctcgtggccagtccgggtcaaggtctgcatcgcgcactacccgaaatgaagagcagagtggagacggaagcagacactccggtagtagacatcacgaggcctcaacccatgccgacatttccaggcatagccaggctgtccaaggacagagcgagggctctcggagaagccggcgacaagggtcttcagtgagccaggattccgactcggagggccatagtgaggacagcgagaggtggagcggatcagccagtaggaaccatcgaggctccgtgcaggagcagtctcggcacggctctagacatccacggtcgcatcacgaagaccgggctgggcacgggcactcagcggaccgctccagacagagtggcacaagacacgcagagacatcttccggcggtcaagccgcgagttcccacgaacaggccaggtcgtcccccggagaacgacacggctccaggcaccagcagtctgctgacagtagtagacactcagggatcccacgcggccaggcaagctccgcagtcagagacagccgacactggggatcaagcggcagccaagcttctgacagtgagggccacagcgaagagagcgatacgcagagcgtttctggacatggccaggccggaccacaccaacaatcacaccaggagagcgcgcgggatcgttctggagggcgcagcggacggagtggctag

SEQ ID NO: 123210 - DNA, 12186 bp, Artificial Sequence
  derived and/or modified sequence
atgagtacgcttcttgagaatatctttgctatcataaaccttttcaagcagtacagcaagaaagataaaaacaccgatactttatctaagaaagagctgaaggaactcctggaaaaggagtttagacagattctcaagaaccccgatgacccagatatggtggacgtgttcatggatcacctcgatatagaccacaataagaagatcgatttcacagaattcttgctgatggtctttaaactcgcgcaagcctattacgagagcacccggaaagagaaccttcccatttctggtcataagcacagaaagcattctcaccacgacaagcacgaggataataaacaggaggagaataaagagaataggaagaggccctccagccttgaaagaagaaataaccggaaaggaaataagggacgcagcaagagtccgcgcgaaactgggggcaagcgacacgaaagctcctcagaaaagaaagaacggaaaggttacagccccacccaccgggaggaagaatatggcaagaaccatcataacagttcaaaaaaagagaagaacaagacagaaaatactcggttaggcgataatcggaagaggctgagcgagcgtctggaggagaaggaggataacgaagagggtgtatatgattatgaaaacactggcagaatgactcagaaatggattcagagcgggcacattgctacttactacaccatccaggacgaggcttacgacacaaccgacagtctattagaagagaacaaaatttatgaacggagtcggagctcggacggcaaaagctcgtcccaagtgaacaggagcaggcacgagaacacgagtcaggttccactacaggagagcagaacccgaaagcggagggggtccagagtgagtcaagaccgagactccgagggccattccgaagattctgagcgccattccggcagtgcttctcggaaccatcacggctcagcttgggagcagagcagagatggatctagacaccctcggagtcacgacgaggatcgtgcttctcacgggcattcagctgacagtagtaggcagtccggtaccaggcatgcggagaccagctccagaggccagactgcctcatctcacgaacaggcaaggagttccccgggtgagcgccatgggtctggacatcagcaaagcgcagacagctccagacacagcgctaccggtcgtggccaggccagcagtgccgtatcggacagggggcataggggctcttccgggagccaggcgagcgactcagaaggacattccgagaatagcgacactcaaagcgttagtgggcatgggaaggccgggctgcggcagcagtcacatcaagagagcactcggggtcggtcaggcgaaaggagtgggaggagcgggtccagtttgtatcaagtatctacccacgaacaaccggactcagctcatggaagaacagggactagcacaggtggccggcagggatcgcatcatgagcaggctcgggattccagccgccactccgcctctcaagaggggcaggatactattcgtggccacccaggttcttccagaggggggcgccaaggaagccatcatgaacagtccgttaatagatctggtcactcaggctcccaccactcgcacaccacaagtcagggacggtcagacgcgtctcacggccagtccggttcacgcagtgctagtcgacagacccgcaacgaagaacagtcgggcgacgggacacgccacagcggaagcagacatcacgaggcttcaagtcaggccgattcatcccggcattcccaggtaggccagggccagagctccggccctaggacctctcgaaaccagggaagcagcgtgagccaggattccgatagtcagggccactccgaggactccgaaagatggtccggctcggcaagcaggaaccaccacggcagtgcccaggagcaatctcgggatggatccagacatcctcggtctcatcacgaagaccgggctgggcatggtcattccgctgacagttctcgcaaaagcggaacccggcacacacaaaatagctcatcaggccaggctgcctcatctcatgagcaggccaggtcttcggcaggagagcggcatgggtcacgccatcagctgcagagtgctgactctagccgacatagcggcacgggccatggacaagcttcttcagccgtgagagattctggccacagaggcagcagtggctcccaggccaccgacagcgaaggacactccgaggatagtgacacacaatcagtttccggacatggacaagccggacaccatcaacagtcgcatcaagagtccgcccgggataggtctggagaacggtcccgtaggtctggctctttcctgtatcaggtgagtacacacaaacaatctgagtcatctcatggatggacaggcccctctactggagttaggcagggatcccatcatgaacaagcgcgggacaactcccgacattctgcttcgcaggatggacaggacactatccgtggccaccccggttcgagtagaagaggaaggcaaggttcccaccacgaacagagcgtggatagatccggccattctggatcccatcactctcacactacctcccaggggcgctctgacgcctctcgcggccagagtggatctcgctccgctagtagaaccacccgcaatgaagaacagtcacgagatggttctaggcactctggcagcagacatcacgaagcaagttcccacgctgacattagccgacacagtcaggcgggacaagggcagtctgaaggaagcaggactagccgccgccagggctcttcagtgtcacaggatagtgatagcgaggggcattctgaagattcagagcgttggagcgggagcgcttctcgtaatcaccgtggatcggcgcaggagcagtcccggcacggatccaggcatcctcggtcccaccacgaggatcgggccggccacggacacagcgcggactcttctcgacagtcgggaactccccacgccgaaactagttccggcggccaggctgccagtagccatgagcaagctcgcagcagcccaggtgagcgccacggcagccggcaccagcagtcggcagacagtagccgccacagcggaattccaagaagacaagctagtagtgccgtgcgggactctggccattggggatcatccgggagtcaggccagcgactccgagggtcattccgaggaatcggacacccagagcgtgtctggacacggacaagacggcccacatcagcagtcacaccaggaatcagctcgcgattggagcgggggtaggagcggccgctccgggtctttcatttaccaggtgagcacacatgaacaaagcgaatccgcgcacggacgcacaaggacgtcaacaggacgcaggcaggggtcacaccacgaacaggctagggactcatccaggcattcagcatctcaggagggacaggacacaattcgggcgcatcctgggagtcgccgcggggggaggcaggggagtcaccatgagcaaagtgttgacaggagcggacattcgggtagccaccattcccataccacgtctcaggggcgctccgacgcttctcacgggcagagcggctcaaggtccgcttcccggcagacaaggaaagataagcagagcggggatggatctagacactccggtagccgacatcatgaagccgcttcttgggctgatagctctcggcactcccaagtcggccaggaacagtcttccggttcccggacttcaagacaccagggatccagtgtctcacaggatagcgactctgaaagacacagcgacgacagtgagagactgtctggatccgcttcaaggaatcaccacgggtcctcccgcgaacaaagccgcgatgggtcaagacatccaggattccatcaagaagatcgcgcgtctcacgggcatagtgcagacagttccagacagagcggcacgcatcatactgaatcttcatcccatggccaggcggtatctagccatgagcaggcaagatccagccccggggagaggcatgggagcagacatcagcagtcagccgatagctccaggcacagcgggatcggccaccggcaggccagtagcgcggtgagggattcaggtcatagagggagttccggctctcaagtcacaaatagcgaggggcactctgaagactccgatacacagtcagtgtccgcccacggacaggcaggccctcaccagcagtcccataaggagtctgcccgaggccagagtggagagagttcaggccgttctagaagtttcctgtatcaagtctcatctcatgaacaatctgagtccactcatggacagactgctcctagcacaggggggcggcaaggaagcaggcatgagcaggcccgcaatagttccagacactcggcttcccaagatggccaagacaccattagaggacatcccggttcctcaagaggtggccgacagggatcttaccacgaacagtcagtcgatcgcagcggtcacagtggctaccaccactcccacaccacccctcagggccggagtgacgcgtcccacgggcaatcggggcctaggtccgccagtcggcagactagaaatgaagagcagtctggcgacggttccagacactccggttccaggcaccacgaaccatcaacacgcgctggatcatcccgccactctcaggtcggacagggagagtcagccggcagcaagaccagcaggcgtcaaggctcgtccgtttcccaagatagagattccgaaggtcacagtgaagacagcgagcgcaggtccgaatctgccagccgcaaccattatggttctgcgagggagcagtcccgacacggctcccggaatccaagatcccaccaggaggatagggcgtcccatggccacagtgcagaatcctcgcgccaatcaggcaccagacacgcagaaacctcctctgggggacaagctgctagttctcaggagcaggcccggtcaagtccaggcgagcgccacggcagtaggcatcagcagtcggccgactcgagcactgattccggaactggccggcgacaggacagttcagtggtgggtgattctggtaaccgagggagttctggtagtcaagcctctgatagtgaagggcatagcgaagagtcagacacacagagtgtaagtgctcacgggcaggctggaccccaccagcagagccaccaagaaagcacacgcggtcagagcggcgagcgctcaggcaggtccgggtcctttctgtaccaggtaagcacccacgagcagagcgagagcgcacacgggcgcaccggacctagcacgggggggcgccagcgaagtcgccacgagcaggctagagactcttcaagacattcagcctctcaggaaggacaggatacgatacgcggccacccagggtcatcccggggaggaaggcagggctcacactacgagcaatcagtcgattcttctggccacagcgggtcccatcattcacataccactagccaggaacgatctgatgtgtctcgcggacaaagcggctcccgctctgtgtcacgccagacccggaacgaaaagcaaagcggcgatggatcgaggcatagcgggagtcggcaccacgaggccagctctcgcgccgattctagccgacattcccaggtggggcaaggccagtcttcaggtccccggacctcacggaatcaggggagttcagtgtcacaagactcagactcacaggggcacagtgaagactctgaaagatggtcaggctcagctagcagaaatcatctggggagcgcttgggagcagtctcgtgatggatcacgacaccctgggtctcaccacgaggacagagccggtcatggacattcagccgactcatcccgacagagtggcaccagacacactgaatccagtagcagaggtcaggctgcctcatcgcatgagcaggcccggagctccgcgggtgaaaggcacggatctcatcaccagttgcaaagcgcagacagctcgaggcactccggcatcggccatggacaggcatcgtctgccgtgcgtgatagcggacatcgcggctatagtggtagtcaagcgtccgactctgagggccattccgaggattccgatacccagtctgtgagcgcccaagggaaggccggaccacaccagcagtctcacaaagaaagcgcaaggggccagagtggggagtcttccggtaggtccggttcttttctgtaccaagtgtctacacatgagcagagtgagagcacccacggccagtcagctcctagtaccggtggaagacagggatcccactacgaccaggcacaggatagctcacgccattctgcttcacaggagggccaggatacaatccgtggacacccaggacctagcagaggaggacgccagggatctcaccaagagcaatcagtagaccgttctgggcacagcggcagccatcactctcataccacgtcccagggcaggtccgatgcatccaggggtcagagtggttctcgtagcgccagtaggaaaacttatgacaaggagcagtccggtgacggttccaggcatagcggcagccaccatcacgaagcttctagttgggctgactcgtcgcgccatagtctcgttgggcaggggcagagctctggacctcggacatctcgtccgcgagggtcaagcgttagccaggacagcgacagcgagggacacagcgaagactcagaacgccggtcaggctccgcttcacggaatcatcacggcagtgctcaagaacagagccgtgatggctcccggcatcctcgttctcatcacgaggatcgcgctgggcacggacattctgccgaaagcagtcggcaaagcggcacccatcatgccgaaaattcatccggggggcaggccgcaagctcacacgaacaggcaagatcatccgccggagaaagacacggcagccaccaccaacagagtgctgattcaagccgccacagcggcattggtcatggccaggcatccagtgctgtccgggactctgggcatagagggagtagtggctctcaagcctccgacagcgagggccattccgaggactctgacactcagagtgtgagcgctcatggccaagccggtccacaccagcagagccaccaggagtcgactcggggaagatctgctggcaggagcggaagaagcgggagctttctttatcaagtgagtacccatgagcagtccgagagcgctcacgggcgcacagggacctcgaccgggggccgccaggggtcgcatcataagcaagcccgagattccagtcgtcacagcacatcccaggagggtcaagataccattcacggccaccccgggtcatcttccggaggacgacaggggtcccactatgagcagctagtggaccggagtggccactccgggagccatcattcccatactacatcacaaggaaggtctgatgcctctcacggccacagtggttcccgatctgccagcagacagaccagaaatgacgaacagtctggcgacggatcacgccactcgggctcccggcaccacgaggcatcttcgagagctgattcctcagggcactcccaggtggggcagggccaatcagaaggaccgagaacatcacgcaattggggtagctccttttcccaggactccgatagccagggtcactcagaagattcagaaagatggtccgggtccgcgtcaagaaaccaccatggctcagctcaggagcagctgcgggatgggagtcgccatccccggagtcaccaagaagatcgcgccggacacgggcacagcgcggactcctcgagacagagcggaacgcggcacacccagacctctagtggcggacaggccgcttcaagccatgaacaggcacgctcgagcgccggagaacgccacggtagtcaccatcagcaatctgctgacagttcccggcactccggcatcggacacggccaggcaagctctgccgtcagggacagcggtcacagaggatatagcggctcccaggcctcggataatgagggtcatagcgaagactcagatactcaaagcgtgagtgcccatggccaggcggggtcccaccagcagagccatcaggagtccgccagaggccgatctggcgaaacctccggacactctgggtccttcctgtaccaagtgtcaacccatgagcaaagcgaatcctctcatggatggactggtcctagtacacgtggccggcagggatcacgccacgaacaggctcaggactcgagtcgacactccgcatcccaggacggccaggacaccattaggggacacccgggaagctcaagggggggtaggcaaggctatcaccacgaacacagcgtggacagttctggccacagtggctctcaccactcccacacaacgtctcagggccgaagtgacgcttctcggggccaaagcgggtcacgctcagccagccgaaccactaggaatgaggaacaaagcggtgacggaagccgacattccggctctcggcaccatgaggcatctacccatgccgacataagcaggcattctcaggccgttcaggggcagtccgaaggctcccgccgctccaggcggcagggtagcagtgtgtcacaagattccgatagcgaggggcattcggaggactcggaacgatggtcaggcagcgccagtaggaaccatcatggatcggcccaggagcagctgagggatggctccaggcatccaaggtctcaccaggaagaccgcgcaggtcacggccacagcgcagacagttcaaggcagtccgggacccggcatacccaaacatcttctggcggccaggccgcaagcagccacgaacaagctagaagctcggccggcgagcgccacgggagtcatcatcaacaatccgccgactcatcgcggcacagcggcatcgggcacggacaggcaagctcagccgtcagagatagtggccatagagggtactctgggtctcaagcttccgataacgaaggtcactcggaggactcagacacccagtccgtgtccgcacacgggcaggctgggagccatcagcaaagccaccaggaatctgctaggggtcggtcaggagagacctctggccacagtggctcattcctttatcaggtttcaacgcacgagcaatccgaaagtagtcacgggtggacaggccctagtaccaggggccggcagggctcccgtcatgagcaggcacaagacagttcacgtcactcagcaagccagtacggccaagatacgatccgcggccatccaggctcctcgagagggggacgtcagggataccatcacgaacatagcgtggattcaagcggccactcaggtagccaccattcgcacacaacctcacaggggcggagtgacgcctcccgcggccaatcaggatctaggagtgcgtctcggaccactcggaacgaggaacaatccggtgatagttcccgtcatagcgtctcaaggcaccatgaggcgtcaacgcacgcagacatttcaagacactctcaggcagtccaggggcaatccgaaggaagcagaagatcccgaaggcaaggaagcagcgtctcccaggattcagattccgaggggcacagtgaagattccgagcggtggagcggctctgcgtcccgtaatcatcgcggttccgttcaggaacagagccggcacggaagcagacacccacgatcccaccacgaggaccgagctggacacggccacagcgccgaccgtagtcgtcagagcggcacacgacacgctgagacttcctccggcgggcaggccgctagttcacacgagcaggcacggtcttcacccggggaacgtcatggctccagacatcagcaatcagccgactcgtctcggcatagcgggataccaagggggcaggcaagctctgcggtcagggactccagacactggggatcatctggtagccaagcttcggatagtgaaggccattctgaggagagtgatacgcagtctgtgtcagggcatggccaggcggggccccaccagcaaagtcaccaggagagcgcccgcgacaggtctggcggtagatctggcagaagtggttcctttctctaccaggtcagcacgcacgagcagtccgagtctgcgcatggtagaaccaggacttctacaggacggagacaggggtcacaccatgaacaggcccgggattcatctcggcactctgcaagccaagagggacaagataccatacggggccatccggggtcttcaagaagaggacgacaagggagtcactacgagcaatccgtggaccgatcaggccattctggatctcaccacagccacactactagccagggccgtagtgacgcctcaagaggccagagtggatctaggagcgctagtaggcagacccgtaatgacgagcagagcggagacgggtctaggcactcttggagccaccaccatgaagcctctacgcaggcagacagttcacggcacagccagagtggccagggtcaatcagccggaccaaggacatcccgaaaccaaggaagttcagtgtcacaagattctgatagtcagggtcactcagaggactcagaaagatggagcggcagcgcttcccgcaatcatcgaggctctgcccaggaacagtcccgggacggttcccgacaccccacctcccaccatgaggaccgagccggccacggccactccgcggagtcttctaggcagtcagggacgcatcacgccgaaaactcttccggaggtcaggccgcctccagccatgagcaggcgaggtcatcggccggtgagcggcacggaagtcaccatcagcagtcagcagactctagtcggcatagcggtatcgggcatgggcaagcgagctccgccgtgagagattctgggcatcggggatccagcgggtcacaagcctctgactctgagggacacagtgaggacagcgatacacagtctgtaagtgctcatgggcaagccgggccccaccagcagtcccaccaagagagcacaagggggagaagcgcaggtaggtcgggaaggagtgggtctttcctgtatcaagtgtctacgcatgagcagtcggaaagcgcccacggtcgggctggtcctagtactggcggtcgccagggctctaggcatgaacaggcccgggatagcagcagacacagcgccagccaggaaggacaagatacaattaggggacaccctggctcccgtagaggcgggcggcagggctcttaccacgagcagtcagttgaccgcagcgggcactcggggtcccatcattcccataccaccagccagggtcgctctgatgcctcgcatgggcagtcgggaagtcgcagtgcttccagagagacaaggaacgaggaacagtctggagatggcagcagacactcgggcagccgccaccatgaagcttccacccaggccgactccagtcgtcactctcagtccggacaaggagagagcgcgggttccaggagatctcgacgacagggcagcagcgtgtcgcaggacagcgactcagaagcctacccagaggactccgagcggagaagtgaatcagcatctcgcaaccaccatggctctagtagggaacaatcaagggatgggtctcgccatcccggcagttctcacagggatactgcctcacatgtacagagttctcctgtgcagtctgacagctcgacagcaaaagaacacggtcatttctctagcctgtcgcaagattctgcatatcattccggtatacagagtaggggctcgcctcattcctcttcatcctatcactaccaaagtgaaggcaccgaacgccagaaggggcaaagcggtttggtctggaggcacgggtcttatggaagcgccgattatgactacggagagtccggtttcaggcacagtcagcacggctcggtgagctataatagcaatcccgtcgtctttaaggagagatctgatatttgtaaagcctccgctttcggcaaagatcaccctagatactatgcaacgtacataaataaggacccaggcctgtgtgggcactctagcgatattagcaaacagttagggttttcacagtcccagcgctattactattacgaatag

SEQ ID NO: 123211 - DNA, 969 bp, Artificial Sequence
  derived and/or modified sequence
ctgtaccaggtttcaacccacgagcagcccgatagcgctcatgggaggaccgggacttcaacaggcggaaggcagggtagccatcacgagcaggctagagattcgagccgccattccgcctcccaggagggacaggataccattcggggccatcctgggtcatcccgggggggacgtcaggggtctcaccatgaacagagcgtgaatcgcagcggacattcaggcagccatcattcgcatacgaccagtcagggacggtctgatgcttcccatgggcagagtggaagtcgtagcgcatcgagacagacgcgcaacgaagagcagtccggagatggaactcgccattcaggttcaaggcaccatgaggcttcgtcgcaggccgatagtagccgccactcacaggccggccaggggcagagtgagggcagccgaacctctaggagacagggaagctcagtgtctcaggacagcgattcagaagggcatagcgaggatagcgagcgctggagtggctcagcatccaggaaccaccgtggaagcgctcaggaacagagcaggcatgggtccaggcacccaaggtctcaccacgaggatcgtgccggtcatggacacagcgcagattcttccaggcaaagcggcaccccccatgcggagacctcgtcgggaggccaagcagccagttcccacgaacaagcacgcagttctcctggcgaaagacatgggagcaggcaccagcagtcggcagatagcagtagacattccgggatacccaggaggcaggctagctctgccgtgagggatagcggtcactgggggtccagcggaagccaggcaagcgatagtgagggtcactcagaagaaagtgacactcagtcggtttctggccacggccaggatggacctcaccagcaatctcaccaggaatccgcccgcgactggagtggcggccgtagtgggagatcaggttag

SEQ ID NO: 123212 - DNA, 969 bp, Artificial Sequence
  derived and/or modified sequence
ctctaccaggtgtccacccatgagcagagcgagagcgcccacggccgcacaggccccagcactggaggccggcagaggagcagacatgagcaggcccgggacagcagccgccacagcgccagccaggagggccaggacaccatccggggccaccctggcagcagcagaggaggccggcagggcagccactatgagcagagcgtggacagcagcggccacagcggcagccaccacagccacaccaccagccaggagaggagtgatgtgtcccggggccagagcggcagccgctctgtgtcccggcagaccagaaatgagaagcagagcggagatggcagccgccacagcggcagccgccaccacgaggccagcagcagagctgacagcagccgccacagccaggtgggccagggccagagcagcggccccaggaccagcaggaaccagggcagctctgtgtcccaggacagcgacagccagggccacagcgaggacagcgagcggcgcagcggcagcgccagcaggaaccaccacggcagcgcccaggagcagagcagagatggcagccgccaccccaggagccaccatgaagatcgggccggccacggccacagcgctgagagcagccggcagagcggcacccaccacgccgagaacagcagcggcggccaggccgccagcagccatgagcaggcccggagcagcgctggggagcggcacggcagccaccaccagcagagcgctgacagcagccgccacagcggcatcggccacggccaggccagcagcgctgtgcgggacagcggccaccggggcagcagcggcagccaggccagtgacagcgagggccacagcgaggacagcgacacccagagcgtgtctgcccacggccaggccggcccccaccagcagagccaccaggagagcacccggggccgctctgctggccgcagcggccgctctggatag

SEQ ID NO: 123213 - DNA, 969 bp, Artificial Sequence
  derived and/or modified sequence
ctctaccaggtgtccacccatgagcagagcgagagcagccacggctggacaggccccagcacccggggccggcagggcagcagacatgagcaggcccaggacagcagccgccacagcgccagccaggacggccaggacaccatccggggccaccctggcagcagcagaggaggccggcagggctaccaccacgagcacagcgtggacagcagcggccacagcggcagccaccacagccacaccaccagccagggccgcagtgatgccagccggggccagagcggcagccgcagcgccagcaggaccaccagaaatgaggagcagagcggagatggcagccgccacagcggcagccgccaccacgaggccagcacccatgctgacatcagccgccacagccaggccgtgcagggccagagcgagggcagccgccgcagccggcggcagggcagctctgtgtcccaggacagcgacagcgagggccacagcgaggacagcgagcgctggagcggcagcgccagcaggaaccaccggggctctgtgcaggagcagagcagacatggcagccgccaccccaggagccaccatgaagatcgggccggccacggccacagcgctgacaggagccggcagagcggcaccaggcatgctgagaccagcagcggcggccaggccgccagcagccatgagcaggcccggagcagccctggagagcggcacggcagccgccaccagcagagcgctgacagcagccgccacagcggcatcccccggggccaggccagcagcgctgtgcgggacagccgccactggggcagcagcggcagccaggccagtgacagcgagggccacagcgaggagagtgacacccagagcgtgtctggccacggccaggccggcccccaccagcagagccaccaggagagcgcccgggacagaagtggcggccgcagcggccgctctggatag

SEQ ID NO: 123214 - DNA, 12186 bp, Artificial Sequence
  derived and/or modified sequence
atgagcaccctgctggagaacatctttgccatcatcaacctcttcaagcagtacagcaagaaggacaagaacacagacaccctgagcaagaaggagctgaaggagctgctggagaaggagttccggcagatcctgaagaacccagatgatcctgacatggtggatgtgttcatggaccacctggacatcgaccacaacaagaagattgacttcacagagttcctgctgatggtgttcaagctggcccaggcctactatgagagcaccaggaaggagaacctgcccatcagcggccacaagcacaggaagcacagccaccacgacaagcatgaggacaacaagcaggaggagaacaaggagaacaggaagaggcccagcagcctggagaggaggaacaacagaaaaggaaacaagggccgcagcaagagcccccgggagactggaggcaagagacatgagagcagcagcgagaagaaggagaggaagggctacagccccacccaccgggaggaggagtatggcaagaaccaccacaacagcagcaagaaggagaagaacaagacagagaacacccggctgggggacaacaggaagaggctgtctgagcggctggaggagaaggaggacaatgaggagggcgtgtatgactatgagaacacaggccgcatgacccagaagtggatccagagcggccacatcgccacctactacaccatccaggatgaggcctatgacaccacagacagcctgctggaggagaacaagatctatgaaagaagccgcagcagtgatggcaagagcagcagccaggtgaacagaagcagacatgagaacaccagccaggtgcccctgcaggagagcaggaccaggaagaggcggggcagccgggtgtcccaggaccgggacagcgagggccacagcgaggacagcgagcggcacagcggcagcgccagcaggaaccaccacggcagcgcctgggagcagagcagagatggcagccgccaccccaggagccatgatgaagatcgggccagccacggccacagcgctgacagcagccggcagagcggcaccaggcatgctgagaccagcagccggggccagacagccagcagccatgagcaggcccggagcagccctggagagcggcacggcagcggccaccagcagagcgctgacagcagccgccacagcgccaccggccggggccaggccagcagcgctgtgtctgaccggggccaccggggcagcagcggcagccaggccagtgacagcgagggccacagcgagaacagcgacacccagagcgtgtctggccacggcaaggccggcctgcggcagcagagccaccaggagagcacccggggccgcagcggggagaggagcggccgcagcggcagcagcctgtaccaggtgtccacccatgagcagcctgacagcgcccacggccgcacaggcaccagcactggaggccggcagggcagccaccacgagcaggcccgggacagcagccgccacagcgccagccaggagggccaggacaccatccggggccaccctggcagcagcagaggaggccggcagggcagccaccacgagcagagcgtgaacagaagtggccacagcggcagccaccacagccacaccaccagccagggccgcagtgatgccagccacggccagagcggcagccgcagcgccagccggcagaccagaaatgaggagcagagcggagatggcaccaggcacagcggcagccgccaccacgaggccagcagccaggccgacagcagccgccacagccaggtgggccagggccagagcagcggccccaggaccagcaggaaccagggcagctctgtgtcccaggacagcgacagccagggccacagcgaggacagcgagcgctggagcggcagcgccagcaggaaccaccacggcagcgcccaggagcagagcagagatggcagccgccaccccaggagccaccatgaagatcgggccggccacggccacagcgctgacagcagcaggaagagcggcaccaggcacacccagaacagcagcagcggccaggccgccagcagccatgagcaggcccggagcagcgctggggagcggcacggcagccgccaccagctgcagagcgctgacagcagccgccacagcggcactggacatggccaggccagcagcgctgtgcgggacagcggccaccggggcagcagcggcagccaggccacagacagcgagggccacagtgaagattctgacacccagagcgtgtctggccacggccaggccggccaccaccagcagagccaccaggagagcgcccgggacagaagtggagagaggagccgccgcagcggcagcttcctgtaccaggtgtccacccacaagcagagcgagagcagccacggctggacaggccccagcactggagtgcggcagggcagccaccacgagcaggcccgggacaacagccgccacagcgccagccaggacggccaggacaccatccggggccaccctggcagcagcagaagaggccggcagggcagccaccacgagcagagcgtggacaggagcggccacagcggcagccaccacagccacaccaccagccagggccgcagtgatgccagccggggccagagcggcagccgcagcgccagcaggaccaccagaaatgaggagcagagcagagatggcagccgccacagcggcagccgccaccacgaggccagcagccacgccgacatcagccgccacagccaggccggccagggccagagcgagggcagcaggaccagccggcggcagggcagctctgtgtcccaggacagcgacagcgagggccacagtgaagattctgagcgctggagcggcagcgccagcaggaaccaccggggcagcgcccaggagcagagccgccacggcagccgccaccccaggagccaccacgaggacagagctggccacggccacagcgctgacagcagccggcagagcggcacccctcatgctgagaccagcagcggcggccaggccgccagcagccatgagcaggcccggagcagccctggagagagacatggcagccgccaccagcagagcgctgacagcagccgccacagcggcatcccccggcggcaggccagcagcgctgtgcgggacagcggccactggggcagcagcggcagccaggccagtgacagcgagggccacagcgaggagagtgacacccagagcgtgtctggccacggccaggacggcccccaccagcagagccaccaggagagcgcccgggactggagcggcggccgcagcggccgcagcggcagcttcatctaccaggtgtccacccatgagcagagcgagagcgcccacggccgcaccaggaccagcacaggccggcggcagggcagccaccacgagcaggcccgggacagcagccgccacagcgccagccaggagggccaggacaccatccgggcccaccctggcagccggcggggcggccggcagggcagccaccacgagcagagcgtggacaggagcggccacagcggcagccaccacagccacaccaccagccagggccgcagtgatgccagccacggccagagcggcagccgcagcgccagccggcagaccaggaaggacaagcagagcggagatggcagccgccacagcggcagccgccaccacgaggccgcctcctgggccgacagcagccgccacagccaggtgggccaggagcagagcagcggcagcaggaccagccgccaccagggcagctctgtgtcccaggacagcgacagcgagcggcacagtgatgattctgagcggctgagcggcagcgccagcaggaaccaccacggcagcagccgggagcagagcagagatggcagccgccaccctggcttccaccaggaggaccgggccagccacggccacagcgctgacagcagccggcagagcggcacccaccacacagagagcagcagccacggccaggccgtgagcagccatgagcaggcccggagcagccctggagagagacatggcagccgccaccagcagagcgctgacagcagccgccacagcggcatcggccaccggcaggccagcagcgctgtgcgggacagcggccaccggggcagcagcggcagccaggtgaccaacagcgagggccacagtgaagattctgacacccagagcgtgtctgcccacggccaggccggcccccaccagcagagccacaaggagagcgcccggggccagagcggggagagcagcggccgcagccgctccttcctgtaccaggtgagcagccatgagcagagcgagagcacccacggccagacagcccccagcactggaggccggcagggcagcagacatgagcaggccaggaacagcagccgccacagcgccagccaggacggccaggacaccatccggggccaccctggcagcagccggggcggccggcagggcagctaccacgagcagagcgtggacaggagcggccacagcggctaccaccacagccacaccaccccccagggccgcagtgatgccagccacggccagagcggccccaggtctgccagccggcagaccagaaatgaggagcagagcggagatggcagccgccacagcggcagccgccaccacgagcccagcacccgggccggcagcagccgccacagccaggtgggccagggcgagagcgctggcagcaagaccagccggcggcagggcagctctgtgtcccaggaccgggacagcgagggccacagtgaagattctgaaagaagaagtgaaagtgccagcaggaaccactacggcagcgcccgggagcagagccgccacggcagcaggaaccccaggagccaccaggaggaccgggccagccacggccacagcgctgagagcagccggcagagcggcaccaggcatgctgagaccagcagcggcggccaggccgccagcagccaggagcaggcccggagcagccctggagagagacatggcagccgccaccagcagagcgctgacagcagcacagattctggaactggaagacggcaggacagctctgtggtgggggacagcggcaacagaggcagcagcggcagccaggccagtgacagcgagggccacagcgaggagagtgacacccagagcgtgtctgcccacggccaggccggcccccaccagcagagccaccaggagagcacccggggccagagcggggagaggagcggccgcagcggcagcttcctgtaccaggtgtccacccatgagcagagcgagagcgcccacggccgcacaggccccagcactggaggccggcagaggagcagacatgagcaggcccgggacagcagccgccacagcgccagccaggagggccaggacaccatccggggccaccctggcagcagccggggcggccggcagggcagccactatgagcagagcgtggacagcagcggccacagcggcagccaccacagccacaccaccagccaggagaggagtgatgtgtcccggggccagagcggcagccgctctgtgtcccggcagaccagaaatgagaagcagagcggagatggcagccgccacagcggcagccgccaccacgaggccagcagcagagctgacagcagccgccacagccaggtgggccagggccagagcagcggccccaggaccagcaggaaccagggcagctctgtgtcccaggacagcgacagccagggccacagtgaagattctgagcgctggagcggcagcgccagcaggaaccacctgggcagcgcctgggagcagagcagagatggcagccgccaccctggcagccaccacgaggacagagctggccacggccacagcgctgacagcagccggcagagcggcaccaggcacacagagagcagcagccggggccaggccgccagcagccatgagcaggcccggagcagcgctggggagagacatggcagccaccaccagctgcagagcgctgacagcagccgccacagcggcatcggccacggccaggccagcagcgctgtgcgggacagcggccaccggggctacagcggcagccaggccagtgacagcgagggccacagcgaggacagcgacacccagagcgtgtctgcccagggcaaggccggcccccaccagcagagccacaaggagagcgcccggggccagagcggggagagcagcggccgcagcggcagcttcctgtaccaggtgtccacccatgagcagagcgagagcacccacggccagagcgcccccagcactggaggccggcagggcagccactatgaccaggcccaggacagcagccgccacagcgccagccaggagggccaggacaccatccggggccaccctggccccagcagaggaggccggcagggcagccaccaggagcagagcgtggacagaagtggccacagcggcagccaccacagccacaccaccagccagggccgcagtgatgccagccggggccagagcggcagccgcagcgccagcaggaagacctatgacaaggagcagagcggagatggcagccgccacagcggcagccaccaccacgaggccagctcctgggccgacagcagccgccacagcctggtgggccagggccagagcagcggccccaggaccagccggccccggggcagctctgtgtcccaggacagcgacagcgagggccacagcgaggacagcgagcggcgcagcggcagcgccagcaggaaccaccacggcagcgcccaggagcagagcagagatggcagccgccaccccaggagccaccatgaagatcgggccggccacggccacagcgctgagagcagccggcagagcggcacccaccacgccgagaacagcagcggcggccaggccgccagcagccatgagcaggcccggagcagcgctggggagcggcacggcagccaccaccagcagagcgctgacagcagccgccacagcggcatcggccacggccaggccagcagcgctgtgcgggacagcggccaccggggcagcagcggcagccaggccagtgacagcgagggccacagcgaggacagcgacacccagagcgtgtctgcccacggccaggccggcccccaccagcagagccaccaggagagcacccggggccgctctgctggccgcagcggccgcagcggcagcttcctgtaccaggtgtccacccatgagcagagcgagagcgcccacggccgcacaggcaccagcactggaggccggcagggcagccaccacaagcaggcccgggacagcagccgccacagcaccagccaggagggccaggacaccatccacggccaccctggcagcagcagcggcggccggcagggcagccactatgagcagctggtggacagaagtggccacagcggcagccaccacagccacaccaccagccagggccgcagtgatgccagccacggccacagcggcagccgcagcgccagccggcagaccagaaatgatgagcagagcggagatggcagccgccacagcggcagccgccaccacgaggccagcagcagagctgacagcagcggccacagccaggtgggccagggccagagcgagggccccaggaccagcaggaactggggcagcagcttcagccaggacagcgacagccagggccacagcgaggacagcgagcgctggagcggcagcgccagcaggaaccaccacggcagcgcccaggagcagctgagagatggcagccgccaccccaggagccaccaggaggaccgggccggccacggccacagcgctgacagcagccggcagagcggcaccaggcacacccagaccagcagcggcggccaggccgccagcagccatgagcaggcccggagcagcgctggggagcggcacggcagccaccaccagcagagcgctgacagcagccgccacagcggcatcggccacggccaggccagcagcgctgtgcgggacagcggccaccggggctacagcggcagccaggccagtgacaatgaaggccacagcgaggacagcgacacccagagcgtgtctgcccacggccaggccggcagccaccagcagagccaccaggagagcgcccggggccgcagcggggagaccagcggccacagcggcagcttcctgtaccaggtgtccacccatgagcagagcgagagcagccacggctggacaggccccagcacccggggccggcagggcagcagacatgagcaggcccaggacagcagccgccacagcgccagccaggacggccaggacaccatccggggccaccctggcagcagcagaggaggccggcagggctaccaccacgagcacagcgtggacagcagcggccacagcggcagccaccacagccacaccaccagccagggccgcagtgatgccagccggggccagagcggcagccgcagcgccagcaggaccaccagaaatgaggagcagagcggagatggcagccgccacagcggcagccgccaccacgaggccagcacccatgctgacatcagccgccacagccaggccgtgcagggccagagcgagggcagccgccgcagccggcggcagggcagctctgtgtcccaggacagcgacagcgagggccacagcgaggacagcgagcgctggagcggcagcgccagcaggaaccaccacggcagcgcccaggagcagctgagagatggcagccgccaccccaggagccaccaggaggaccgggccggccacggccacagcgctgacagcagccggcagagcggcaccaggcacacccagaccagcagcggcggccaggccgccagcagccatgagcaggcccggagcagcgctggggagcggcacggcagccaccaccagcagagcgctgacagcagccgccacagcggcatcggccacggccaggccagcagcgctgtgcgggacagcggccaccggggctacagcggcagccaggccagtgacaatgaaggccacagcgaggacagcgacacccagagcgtgtctgcccacggccaggccggcagccaccagcagagccaccaggagagcgcccggggccgcagcggggagaccagcggccacagcggcagcttcctgtaccaggtgtccacccatgagcagagcgagagcagccacggctggacaggccccagcacccggggccggcagggcagcagacatgagcaggcccaggacagcagccgccacagcgccagccagtatggccaggacaccatccggggccaccctggcagcagcagaggaggccggcagggctaccaccacgagcacagcgtggacagcagcggccacagcggcagccaccacagccacaccaccagccagggccgcagtgatgccagccggggccagagcggcagccgcagcgccagcaggaccaccagaaatgaggagcagagcggggacagcagccgccacagcgtgagccgccaccacgaggccagcacccatgctgacatcagccgccacagccaggccgtgcagggccagagcgagggcagccgccgcagccggcggcagggcagctctgtgtcccaggacagcgacagcgagggccacagcgaggacagcgagcgctggagcggcagcgccagcaggaaccaccggggctctgtgcaggagcagagcagacatggcagccgccaccccaggagccaccatgaagatcgggccggccacggccacagcgctgacaggagccggcagagcggcaccaggcatgctgagaccagcagcggcggccaggccgccagcagccatgagcaggcccggagcagccctggagagcggcacggcagccgccaccagcagagcgctgacagcagccgccacagcggcatcccccggggccaggccagcagcgctgtgcgggacagccgccactggggcagcagcggcagccaggccagtgacagcgagggccacagcgaggagagtgacacccagagcgtgtctggccacggccaggccggcccccaccagcagagccaccaggagagcgcccgggacagaagtggcggccgcagcggccgcagcggcagcttcctgtaccaggtgtccacccatgagcagagcgagagcgcccacggccgcaccaggaccagcactggaagacggcagggcagccaccacgagcaggcccgggacagcagccgccacagcgccagccaggagggccaggacaccatccggggccaccctggcagcagccggcggggccggcagggcagccactatgagcagagcgtggacagaagtggccacagcggcagccaccacagccacaccaccagccagggccgcagtgatgccagccggggccagagcggcagccgcagcgccagccggcagaccagaaatgatgagcagagcggagatggcagccgccacagctggagccaccaccacgaggccagcacccaggccgacagcagccgccacagccagagcggccagggccagagcgctggccccaggaccagcaggaaccagggcagctctgtgtcccaggacagcgacagccagggccacagcgaggacagcgagcgctggagcggcagcgccagcaggaaccaccggggcagcgcccaggagcagagcagagatggcagccgccaccccaccagccaccatgaagatcgggccggccacggccacagcgctgagagcagccggcagagcggcacccaccacgccgagaacagcagcggcggccaggccgccagcagccatgagcaggcccggagcagcgctggggagcggcacggcagccaccaccagcagagcgctgacagcagccgccacagcggcatcggccacggccaggccagcagcgctgtgcgggacagcggccaccggggcagcagcggcagccaggccagtgacagcgagggccacagcgaggacagcgacacccagagcgtgtctgcccacggccaggccggcccccaccagcagagccaccaggagagcacccggggccgctctgctggccgcagcggccgcagcggcagcttcctgtaccaggtgtccacccatgagcagagcgagagcgcccacggccgggccggccccagcactggaggccggcagggcagcagacatgagcaggcccgggacagcagccgccacagcgccagccaggagggccaggacaccatccggggccaccctggcagcagaagaggaggccggcagggcagctaccacgagcagagcgtggacagaagtggccacagcggcagccaccacagccacaccaccagccagggccgcagtgatgccagccacggccagagcggcagccgcagcgccagccgggagaccagaaatgaggagcagagcggagatggcagccgccacagcggcagccgccaccacgaggccagcacccaggccgacagcagccgccacagccagagcggccagggcgagagcgctggcagccgccgcagccggcggcagggcagctctgtgtcccaggacagcgacagcgaggcctacccagaggacagcgagcggcgctctgagagcgccagcaggaaccaccacggcagcagccgggagcagagcagagatggcagccgccaccctggcagcagccaccgggacacagccagccacgtgcagagcagccctgtgcagagcgacagcagcacagccaaggagcacggccacttcagcagcctgagccaggacagcgcctaccacagcggcatccagagccggggcagcccccacagcagcagcagctaccactaccagagcgagggcacagagcggcagaagggccagagcggcctggtgtggaggcatggcagctatggcagcgctgactatgactatggagagagcggcttccgccacagccagcacggctctgtgtcctacaacagcaaccctgtggtgttcaaggagaggagtgacatctgcaaggccagcgccttcggcaaggaccacccccgctactatgccacctacatcaacaaggaccccggcctgtgtggccacagcagtgacatcagcaagcagctgggcttcagccagagccagcgctactactactatgaatag

SEQ ID NO: 123215 - DNA, 969 bp, Artificial Sequence
  derived and/or modified sequence
ctctaccaggtgtccacccatgagcagcctgacagcgcccacggccgcacaggcaccagcactggaggccggcagggcagccaccacgagcaggcccgggacagcagccgccacagcgccagccaggagggccaggacaccatccggggccaccctggcagcagcagaggaggccggcagggcagccaccacgagcagagcgtgaacagaagtggccacagcggcagccaccacagccacaccaccagccagggccgcagtgatgccagccacggccagagcggcagccgcagcgccagccggcagaccagaaatgaggagcagagcggagatggcaccaggcacagcggcagccgccaccacgaggccagcagccaggccgacagcagccgccacagccaggccggccagggccagagcgagggcagcaggaccagccggcggcagggcagctctgtgtcccaggacagcgacagcgagggccacagcgaggacagcgagcgctggagcggcagcgccagcaggaaccaccggggcagcgcccaggagcagagcagacatggcagccgccaccccaggagccaccatgaagatcgggccggccacggccacagcgctgacagcagccggcagagcggcacccctcatgctgagaccagcagcggcggccaggccgccagcagccatgagcaggcccggagcagccctggagagcggcacggcagccgccaccagcagagcgctgacagcagccgccacagcggcatcccccggcggcaggccagcagcgctgtgcgggacagcggccactggggcagcagcggcagccaggccagtgacagcgagggccacagcgaggagagtgacacccagagcgtgtctggccacggccaggacggcccccaccagcagagccaccaggagagcgcccgggactggagcggcggccgcagcggccgctctggatag

SEQ ID NO: 123216 - DNA, 969 bp, Artificial Sequence
  derived and/or modified sequence
ctgtaccaggtgagcacccacgagcagagcgagagcgcccacggcaggaccggcccatcaactggtggtcgacaaaggagccgacatgagcaagccagagactcttcaaggcacagtgcgtctcaggaaggtcaagacacaatcaggggacatccaggcagctcacggggtgggcgtcaggggtcacattacgaacagagcgtggattcctccggccattctgggtcccatcatagtcacacaacatcccaggagcgttccgatgtctcgcgcggacagagcggttctcgatccgttagccgccagaccaggaatgaaaaacagtcaggcgatggctctcggcattctggctctcgccaccatgaggcctctagccgcgcggactcgtccaggcatagtcaggttggacagggccaatcctccggccctaggacctctaggaatcagggctctagcgtatctcaggacagtgattcccagggtcattcagaggactcagaacgccgatccggcagtgcctcgaggaaccaccacggttcagctcaggaacagagcagggacggatccagacatcctcggtcccaccatgaagatagagccggccacggacatagcgccgagagttcacgtcagagtggaacccaccacgctgaaaacagtagtgggggtcaggctgcttcttcgcatgagcaagcccgcagcagcgccggcgagcgccacggttctcaccaccaacagtccgccgacagtagcagacactcagggatcgggcatggacaggcttcctctgccgtgcgtgatagtggtcaccggggatcctcgggatcacaggcttctgattcggaaggacacagcgaagattcagacactcagagcgtgtctgcccatggccaggctggcccccaccaacagtcccatcaggaatctacccgaggccggtctgctggccggagtggaagatcagggtag

SEQ ID NO: 123217 - DNA, 969 bp, Artificial Sequence
  derived and/or modified sequence
ctgtaccaggtgagcacccacgagcagagcgagagcagccacggctggaccggaccaagtacccgcggccgacagggcagccggcatgagcaagcgcaggactccagccggcacagtgccagccaagatgggcaggatacaattagaggacatccggggtcatctcgaggagggagacagggttatcaccacgaacattccgtcgactcttctggacattctgggtcacaccatagccacactacttctcaaggacggtcggacgcaagccgcggccagagcggctctcgaagtgccagcaggaccactagaaatgaagagcagagcggagacgggagtcgacactctggtagccgtcaccatgaagcttccacccatgccgatatttctaggcactcccaagctgtacaggggcagtcggaggggtcgcggcgctctcggcgccagggttcttcagtgtctcaggatagtgactcagagggacacagtgaagattccgagaggtggtccggaagtgcctcccggaatcaccgcgggagcgtgcaggagcagtccagacatggctcccgccaccccaggagtcaccacgaggacagggccgggcacggacactccgctgatagaagcagacagtctggcaccaggcacgccgaaacaagtagcggaggccaggccgcatcatcccacgaacaagccaggagcagcccgggtgaacggcatggatcgaggcatcaacagtcagcagatagctctagacactctggtatccctcgagggcaggcctcctccgcagttcgagatagcaggcattggggttcttcgggatcacaggcctccgattctgaggggcatagcgaggaatcggatacgcagtcagtgtccggccatgggcaggctggaccccatcagcagagtcaccaggagtccgcaagggatcgctctggcgggagatcaggaaggtccggctag

SEQ ID NO: 123218 - DNA, 12186 bp, Artificial Sequence
  derived and/or modified sequence
atgagcaccctgctggagaacatcttcgccatcatcaacctgttcaagcagtacagcaagaaagacaagaatacagataccctaagcaaaaaggagctgaaagaactgctggagaaggaattccggcagatcctcaagaatcccgacgatccagatatggtggacgtgttcatggaccatctggacattgatcacaataagaagattgacttcactgagtttctcctgatggtttttaaactcgcccaagcctactatgagtccacaaggaaggagaatctccctatttcgggccacaagcacagaaaacactcacaccatgacaaacatgaagacaacaaacaggaggagaataaggaaaataggaagcgaccctcatctctggaacggcgtaataaccgcaagggcaataaaggacgctcaaagagcccaagggagacagggggcaagaggcatgaatcttcctccgagaaaaaggagcgtaagggatactctccaactcatcgcgaagaagaatacgggaagaatcaccacaattccagcaaaaaggaaaagaataaaacagagaatacgaggctgggcgataaccggaagcgcctgagtgagaggctcgaagagaaggaagataacgaggagggcgtttatgattacgagaacacggggaggatgacccagaagtggatacagagcggccatattgctacttactatacaatccaggatgaagcttacgatacaaccgattccctgcttgaagagaataagatttatgaacgttctcgctctagcgacggtaagtcttctagtcaagtgaacagatccaggcatgagaatacctcccaagtgcccctgcaggaatcaaggacacggaagcggcgagggtcacgagtgagccaggatcgtgactctgagggccattcagaggattctgaacggcactccgggtctgccagccgcaaccaccatggaagcgcctgggagcagtcacgcgatgggtcccggcatccccggagtcatgatgaagatagggcctctcatggccattctgctgactccagcagacagagcggcactaggcatgcagagacaagcagcagaggacaaaccgcaagtagccacgagcaggcacgctcttccccgggggaaagacacggaagcgggcaccagcaatccgctgatagctcacgccatagcgcaactgggcggggccaggcttcttccgcagtctcagatcgtggacaccggggaagcagcggaagccaggcatccgacagtgaagggcattcagagaacagtgatacccagagtgtgtcggggcatggtaaagccggcctgagacagcagtcacatcaggagagtacacgcgggcggagcggtgaacggtctggccggtcagggtcctctctatatcaggtctccacccacgaacagcctgacagtgcccatggcagaaccggcacgtctaccggaggtcgccaagggtcccaccacgagcaggctcgcgattcatcccgtcacagcgcgagccaagagggccaggatactattcgagggcaccccggctcttctaggggaggacgccagggaagccaccatgaacaatctgtcaaccgcagtggccacagcggtagtcatcactcacacactacttcacagggaaggagcgacgccagccatggccaaagcggtagccgctctgcctctcggcagacacgcaatgaggaacagagtggggatggcacccggcattcagggtctagacaccacgaggcctcatcccaggccgatagctctaggcatagtcaggttggtcagggacagtcttccggcccccgtacatctaggaatcagggatccagtgtatcccaagatagcgactcccagggccattcagaagatagcgaaaggtggtctggcagcgcttccaggaatcatcatggttccgctcaggagcagagcagggacggatcgcgccacccaaggagccaccacgaagatcgggctggccatggtcactcggcagactcctcaaggaaaagtggcacacgacacacccagaatagctcctccggtcaggcagcttccagccatgagcaggctaggagctctgccggagagcggcacggcagtcggcaccagctccagtcagctgattctagccggcactcaggtactggacatggtcaggcgtcttccgctgtccgcgattctggccaccggggatcatccggctctcaggcaacagacagcgaaggtcacagtgaggactccgatacccagagcgtctcaggccacgggcaggccggccaccaccagcagagtcatcaagagtccgcccgagatcggtctggtgaacgttcacggagaagcggtagctttctgtatcaagttagtacacataagcagagcgagtcttctcatggatggaccggcccaagcaccggtgtccgacagggtagtcaccatgaacaggcaagggacaatagccggcactctgctagccaggacggccaggacaccatacgtgggcatccaggaagctctcggcgcggccgtcaaggctcacaccatgaacagtccgtggacaggtccgggcattccggctcacaccatagtcacactactagtcagggccggtccgacgcctccaggggacagtccggcagtcgttccgcctcaagaaccacaagaaacgaggagcagtctcgagacggctcacgccacagtggaagcagacaccatgaggccagcagccacgccgatataagcaggcacagccaggctggacaaggccagagcgaaggctctcgtactagtcgacggcagggttcatccgtgagccaagacagcgactctgaggggcactccgaggactccgagaggtggagtggtagtgcctcacgcaaccatcgaggatccgcccaggaacagagtcgacatggctcacgacacccccgctcacatcacgaagatagggccggccacgggcatagtgcagattcctctcgacaaagcggcactccccatgcagagactagctctgggggccaagccgcaagcagccacgaacaggcccggtcaagtcccggcgagaggcatgggagcaggcaccagcaatctgccgactcatctagacattcaggcatcccacggcgtcaggcttcatccgcagtgcgtgattctggtcactggggtagctctggaagccaggcgtctgattcagaagggcactctgaggagagcgatactcagtctgtgtctggccacggacaggacggcccacaccaacagagccaccaggaatcggcaagagattggtcaggtgggaggtctggtagatcaggctcatttatctaccaagtgtccacacacgaacaatccgaatctgctcatggtagaaccaggaccagcacaggtaggcgccagggaagccatcacgaacaggccagagattcttctcggcacagcgcgtctcaagagggccaggataccattcgcgctcaccccggctctcggagaggagggcgccagggatctcaccatgagcagtcggtagaccgttcggggcattccggcagtcaccactcccacactacctcacagggaaggtccgatgcgtcccacggccagtctgggtcgagaagcgcttcgaggcaaactagaaaagacaagcagagcggcgatgggtctagacattccggcagccgccaccacgaggctgctagctgggccgacagctctcgtcattcacaggtggggcaggaacagtcttctggatcacggacatcacggcatcaggggtcctcagtatcccaggatagtgatagtgaaagacactccgacgactcggaacggctgagcgggagcgctagcagaaaccaccatggatcctcccgagaacagtccagagacgggtcccgccatcccggcttccaccaagaggaccgtgccagccatggccactctgccgacagctctcggcagtcaggcactcaccacacagaaagtagcagccacgggcaggccgtatccagccatgagcaggcaagaagttctccgggagaacgccatggcagtaggcatcagcagagcgctgacagctcccgacactctggaatcggacatcgccaggcctcctcggccgtaagggactctgggcatagggggtctagcgggtctcaggtgaccaactctgagggacatagcgaagatagcgacacgcagagtgtctcggcccatgggcaggcggggccgcaccaacagtcgcacaaggagtcagccagggggcagtctggggagagctccggccgctcgcgctcgtttctttatcaggtcagctctcacgagcagtcagaaagcacccacggtcagaccgccccctcaaccggcggccggcaaggcagtcgacatgaacaggccaggaactccagccgtcattcggcttcccaggacggccaggatacgatccgcgggcaccccggcagctcgcgtgggggccgccagggctcttatcatgaacagtccgtggacagatcagggcatagcggataccatcactctcacaccactccgcaggggcggtccgacgccagccacggacagagcggaccaaggtctgccagtagacagacacggaatgaggagcagagcggcgacggctcaaggcatagcgggtcacggcaccacgaaccctcaacaagggccggtagcagtaggcatagtcaggtcgggcagggggaaagcgcaggatcaaaaacctcaaggcgccagggaagtagtgtttcccaagatcgggatagcgagggtcactcagaggactccgagcgtagatctgaaagtgcctcacgcaaccattacggcagcgcccgcgaacagtctcgacatggatcccgcaacccccgatctcaccaagaggatagggcctctcacggacactcagcagaatcgagtaggcagtccggcactcggcacgccgagaccagtagcggaggccaggccgcgagtagccaagagcaagcccggagctcaccgggtgagcggcacggctcgcgtcaccaacagagcgcagatagcagcactgactcgggaacgggccgacggcaggactcctcggtggttggggatagcggcaaccgaggtagcagtggttcccaggcttctgattccgaagggcacagcgaggagagcgatactcagagtgtcagtgcgcatgggcaagctggaccacaccagcagagccaccaggaatccaccaggggccagagcggagaacgctccggtcggtccggcagtttcttatatcaggtctctacacatgagcaatctgagtccgctcatggcaggacgggacctagtactggcggccgacagcggagccgccacgagcaggcacgtgattcaagccgtcactcagccagccaggaaggccaagataccataagaggacaccctggatccagccgcgggggccggcagggctcccactatgagcagtcagttgacagcagtggtcatagtggctcccaccacagccatactacctcccaggagcgcagcgacgtgtcccgtggacagagtgggagcaggagtgtctcccgtcagactcgtaacgaaaaacagagtggagacggcagtagacactccgggtctcgacatcacgaggcatcctcgcgggccgacagctccaggcatagccaagtcggacaggggcagtcctccggcccccggaccagcaggaaccaggggtctagtgtgtcacaagatagcgattcccagggacactcagaggattctgaacgatggagcggatcagcttcccgaaaccatctgggctctgcatgggagcagtcccgagatggaagcaggcatcctgggagccaccacgaagaccgcgccggacatgggcactctgcagatagctctagacagtcaggcaccagacacaccgagagctcttcaagggggcaggcggcttcaagccatgagcaggcccgcagcagtgctggcgagcggcacgggtctcatcaccagctgcaatctgccgattcatcacgtcatagcggcatcgggcacggccaggccagttctgctgtcagggattctggacacagaggatactccggaagtcaggctagcgattctgaaggccacagtgaggactctgacacacagagcgtgagcgcacaaggtaaggcggggccccatcagcagtcacacaaggagtccgcccgtggccagtcgggagagagttctggtcggtcgggctcgttcctgtaccaggtttctacccacgaacaatccgagtccacccatggacaatcggcaccaagcacgggtggcaggcaggggtcacattatgatcaggcacaggactccagcagacatagcgcatctcaagagggacaagataccataaggggccacccagggccatcacgcgggggaaggcaggggagtcaccaagaacagagcgtggaccgtagtggtcactctgggagtcatcactctcacacaacatcccagggccgctctgatgcatccagaggccagagtggctctagatctgcaagtagaaaaacttacgataaagaacagagcggtgacgggtctcgacattctggctcacaccatcacgaggcatcgtcttgggctgactcatctcgtcactccctggtgggccagggtcagagcagcgggccacggacctctagaccccggggcagctctgtaagtcaggactccgatagcgagggacacagtgaggacagcgaacgccgctcaggctccgcttctcggaaccaccacgggagtgctcaggagcagtcaagagatggctctcgacacccgcgctctcatcatgaggaccgcgccggtcacggacactcagccgagagcagtcgacagtcagggactcaccatgcagagaactcctccggggggcaggctgcctcttcacacgagcaagcgcgctcctcggccggcgaaagacacggtagtcaccatcagcaaagtgctgactctagtcggcattcgggcatcgggcatgggcaggcgagctccgcagtaagggatagcggccacaggggcagttccggctcccaggcatctgacagtgaaggacacagcgaagattccgacacacagagcgtcagcgctcacggccaggcaggacctcatcagcagtcccaccaggagagcacccggggacggtccgccggaagaagtggccgcagtggttcctttctgtaccaggtgtccacacacgagcagagtgagagtgcccatggtcgaacaggaacatccacggggggaaggcagggcagccaccataagcaggccagagactcttctcggcacagcacttctcaggagggccaggacacaatccacgggcaccctggctcgtcaagtggcgggcgccagggctctcactacgaacaattggtagatcgatccggccacagcgggtcacatcacagccataccacttcccagggcaggtctgacgcctctcatgggcactctggatccagatctgcctctagacaaactaggaacgatgaacagagtggggacggctccagacattccggttctcgccatcacgaggcatcaagccgggcggattcatctgggcacagtcaggttggtcaaggacagtctgagggtcctagaaccagccggaactggggtagctccttttcccaggactccgattcacaggggcacagcgaggacagcgagagatggtcagggagtgcctcccggaatcatcatggaagcgctcaggagcagctccgagatgggagccgccaccctcggtcacaccaagaggatcgggctggccacggacacagcgcggatagcagtcggcagtctggcacacgccatacacaaacctctagtggaggacaggccgcgagcagccacgaacaggcgcggtcctctgcaggggaaaggcatggcagccaccatcaacagtccgccgactcttcaagacactcaggaatcggacatgggcaggcatcttctgctgtgagagattccggccataggggttatagcggatcccaagcatccgataatgagggtcattccgaagactcagacactcagagcgtcagcgctcatgggcaggcaggcagtcaccaacaaagtcatcaggagagtgccaggggccgcagcggagagaccagcggccacagcggaagcttcttgtaccaggtcagtacgcacgagcaatctgaatcctcacacggctggaccggcccctccacaaggggaaggcagggcagcaggcacgaacaggctcaggattccagccgccattcagcgtctcaggatgggcaggacaccatcaggggccaccccggtagtagcagggggggccggcagggatatcaccacgagcacagcgtagattcttcgggccactcaggcagtcaccactcccacacaacctcccagggtagatcagacgcgagccgaggtcaaagcggcagccggtccgcttcacggaccacacggaatgaagagcagtcaggagatggaagcagacattctggcagtagacaccatgaagcctccactcacgcggacatctctagacattcacaggcggtgcagggccagtccgaaggcagcagacggtcacggcgccagggcagctcagtcagccaggactcagactctgaagggcacagcgaggactccgagaggtggtctggaagcgctagcaggaaccaccatgggagcgcccaagaacagctaagggacgggtcacgccacccccgctctcaccaggaggacagggcagggcacggtcattctgcagattcttctcggcagtccggaacgcgacatacacagacttctagcgggggccaagccgcctcaagtcacgagcaggctcggtcttctgcaggagagagacacggcagccatcatcagcagtccgctgactcatcccgccatagcgggatcggacacggtcaggctagcagcgcagtacgagatagcggccacagaggctactcagggtcacaagcatccgacaacgaagggcacagcgaggattctgatacccagagtgtctccgctcatggccaggctggaagccaccaacagtcccaccaggaatctgctcgaggacgtagcggcgagacttcaggccatagtggctcctttctgtatcaggtgtcaactcacgagcaaagtgagtcatcccatggttggacggggccttccactcggggccgacagggctccagacacgaacaagcccaagatagctctcggcactcggcgtcacaatacggccaagataccatcagagggcatcccggatccagccggggtgggcgccaggggtatcaccatgaacactcggtggacagttctggacattccggctcccaccatagtcatactacctctcaggggcgctcggatgccagtcgcgggcagtcaggatccaggtctgcaagcagaacaacccggaatgaggagcagagcggtgacagctccaggcactcggtgtctaggcatcatgaggcctctacacacgctgatatttcaaggcactctcaagccgtccaaggacagagcgaaggatccagaaggtctcgcagacagggatccagcgtgtcccaggattctgacagtgaaggccattccgaagattcggagcggtggagcggttccgcttccaggaaccataggggcagtgtacaagagcaaagtcggcatgggagccgacatcccagaagtcatcatgaggatcgggcggggcacggccactccgcggaccgatcgagacaatccgggacccgccatgctgaaaccagtagcggcggtcaggctgcatcgagtcacgaacaggcgaggagcagccctggcgagagacacgggtcccgtcaccaacagagcgcggacagctcaaggcattctggcattcctagaggccaagcaagttcagcagtcagggacagtcgtcattggggatcttcaggcagccaggcctctgattcggaggggcacagcgaggaaagcgacactcagagcgtgagtgggcacggtcaagcagggccacaccaacagagccaccaggagtccgcgcgagaccggtcaggcggcaggtcgggaaggagcgggtcgttcttgtaccaggtcagcacccacgagcagagcgaaagcgcccacgggcgtacccggacatcaacgggaaggcgccaaggaagtcatcacgagcaggcccgtgatagctccagacattccgcctctcaagaaggtcaagacaccatccgcgggcacccaggtagcagccgtcgggggcgacaggggtctcattacgaacagtccgttgacagatctggacatagcggatcccaccacagccacaccacgtctcagggacgctctgatgcatcaagggggcagtccggcagtaggtccgctagtaggcaaaccaggaacgacgagcaaagtggggatggatccagacactcttggtctcatcaccacgaggctagcactcaggcggattcaagccgtcactcccagtctggtcaggggcagtcagctgggccccgcacctctagaaaccagggttcctccgtgtctcaggattcggactcccagggccattcagaagatagcgagagatggtccgggtcggcaagccgcaatcaccgggggagtgcgcaggagcagtccagggatggcagccgtcatcccacatctcatcacgaagatcgggcgggacacggccactctgccgaatcctcacgacagtccggtacccaccatgctgaaaactcctccggcggtcaggcggcatcaagccacgagcaagccagatctagcgcaggtgagaggcacgggagccaccaccagcagagcgcagacagtagtcggcactccggaatagggcacgggcaagcctcctcggccgttagggacagtggacaccgcgggtcctctggaagccaggcttccgactccgaagggcatagcgaagacagcgacacacagtctgtgtcggcccacggccaagctgggccacatcagcagtcacaccaggagagcacacgcggccggtccgctggccgcagtggtaggtcaggcagtttcctgtaccaggtcagcactcatgaacagagcgagagcgctcacgggcgcgctggtccgtccacaggtggacgtcaggggtcgcggcacgagcaggcccgcgactccagccgccattccgccagtcaggagggacaggataccattagaggccatccgggatcacgtagaggcggaagacagggctcttaccacgaacagtcagtcgatagaagcggacactccggctcccaccacagtcatacaactagccaaggcagaagtgacgccagccatgggcagagcggctctagaagcgcatcaagggagacgcgaaatgaagagcaatcgggtgatgggtcccgccactctggctcccgccaccacgaagcttccacacaagctgacagctctaggcatagtcagtccggacagggggagagtgctggcagtagacggtctagacgacaaggctcatcggtttcccaagattccgattcagaagcctatcccgaagacagtgaaagaaggtctgaaagcgcctcccgaaaccaccacggaagctcacgggagcagagtagagacgggagccgccatcccggttcttcccacagggacactgccagccacgtccagtcctcacccgtgcagagcgacagcagtactgccaaggagcacggccatttcagtagtctttctcaggactctgcgtaccatagtggcatccagagcagggggagcccccatagctcctcttcataccactaccagtcagaggggacggaacgccagaagggtcaatcaggcttggtctggagacatggtagctacggcagtgctgactacgactacggggagtctggcttccgtcatagccagcacggtagcgttagctacaacagtaatcccgtggttttcaaggaaaggtccgatatttgcaaagcatctgccttcggaaaggaccaccctagatactatgcaacttacataaacaaggatcccggactctgcggccactcgtccgacataagtaagcagctcgggttcagccagtcccagaggtattattattacgagtag

SEQ ID NO: 123219 - DNA, 969 bp, Artificial Sequence
  derived and/or modified sequence
ctgtaccaggtgagcacccacgagcagcccgacagcgcccacggccggaccggcacaagcactggcggacgacagggctctcaccatgagcaggcccgcgactcaagccgacacagcgcctctcaggaagggcaggataccatccgaggccaccctggaagttcacgtgggggaagacagggtagtcatcatgagcagtctgtcaataggagtggccactccggttctcatcattcgcacaccacatcccagggccgtagcgatgcctcgcatggccaatccggcagccgtagcgcgtctcgccagacaaggaatgaggagcagagcggggacggtactaggcacagtggttccaggcaccacgaggcatcctctcaggctgatagtagccggcactcccaggcggggcaggggcagagcgaaggaagccgtacaagccgtagacaaggatcctctgtgtcacaagactccgactctgaaggccacagcgaggattcagaaagatggagcggatcagcatcacgtaaccatcgcgggagtgcacaggaacagagcaggcacggctcccgccatccaaggtcccaccacgaagacagggccggccatggccactccgcagatagtagccgccaaagcggaaccccacatgcagagacatcctccggtggacaagccgcatcttcacatgaacaggcccgtagttccccaggggagcgacacggcagtagacaccaacaatccgccgatagttcaaggcattccggcattccgcgcaggcaagctagctccgctgtccgggattctgggcactggggatcctccggctcccaggcaagcgacagcgaaggtcatagcgaagaatctgacacacagtctgtcagcggacacggacaagacggaccccaccagcagtcccaccaagagtccgccagggactggagcggcggacgcagtggacgcagcggctag

SEQ ID NO: 123220 - DNA, 969 bp, Artificial Sequence
  derived and/or modified sequence
ctgtaccaggtgagcacacacgaacagtcagagtccgcccatggtcgcacgggcccatctacgggtggcagacagcggagccggcatgaacaggcccgtgatagctccaggcacagtgccagccaagaaggccaggacaccattaggggtcaccctgggagctctagaggcggaagacagggctctcattatgagcagtccgttgacagctccgggcatagtgggtcacaccactcccatacgactagccaggagcggtcggacgtcagcagaggacaaagcggctcccgatccgtcagcagacaaactcggaatgaaaaacagtctggcgatgggtcacggcattccggcagccgacaccacgaagccagttcccgggctgactcatctcggcattcccaggtaggccagggccagtccagcggtcccagaacctcacgcaatcaggggagctccgtgtcccaggatagtgactcgcagggtcattcagaggattcggagagacggtctggctccgcctcgcggaaccaccatggctccgctcaggaacagtcccgggatgggtcacgccaccctagaagtcaccatgaagacagagcaggacatggccactccgccgagagtagccggcagtctggcactcatcacgccgagaactcatcgggcggacaagcagcttccagccacgaacaggcacgatctagcgctggcgagcgccacgggtcacatcaccagcagtccgctgactctagcaggcacagcgggattggccacggccaggcctcctccgcagtacgcgattccggccacaggggatcatccggatcccaggcgtctgatagcgagggacattctgaggatagcgatactcaatccgtgtctgcccacggtcaggctggcccacaccagcagtctcaccaggagagtacccggggtagatctgcgggaagatccggtagatctggatag

SEQ ID NO: 123221 - DNA, 969 bp, Artificial Sequence
  derived and/or modified sequence
ctgtatcaggtgtctacccacgaacagtctgaatcaagccacggttggaccggcccatccaccaggggtcgccagggatctagacacgaacaggcacaggattcctcacggcacagtgcctcgcaggatggccaagatacaatcagaggacacccaggaagcagtagagggggaagacagggttaccaccatgagcacagcgtggattcatcaggacatagcggctcccatcatagtcatacaacatctcaggggcgttccgacgcatctcgaggtcagtctggctcccggtccgcctcccgaacaactagaaacgaggagcagtccggcgatggttcgaggcacagtggaagtaggcaccacgaagcatccactcatgctgatatctctagacattcgcaggctgttcaggggcagagcgagggctctcgcaggtcccgaagacaaggctcttccgtctctcaggattcggactcggagggccattctgaggacagtgaacggtggtctgggtctgcatctagaaatcaccgcggatccgtgcaggaacagtccagacacggctcacggcatcccaggagccaccacgaagaccgagcaggacacggccactctgctgaccgcagccgtcagtccggcacaaggcacgccgaaacatcaagtggaggccaggcagcatcaagccacgagcaggcccgatccagtcccggagagaggcacggaagccgtcatcagcagagcgcagattcctcaaggcactctgggattccgaggggtcaggcaagctccgctgtaagggattctcgccactgggggagctccggctcacaggcttctgacagtgaaggccatagcgaggaatccgacacccaaagcgtgagcggccatgggcaggctggacctcaccagcagtctcatcaagagtctgctagagacaggtccgggggaagaagtgggcgtagtgggtag

SEQ ID NO: 123222 - DNA, 12186 bp, Artificial Sequence
  derived and/or modified sequence
atgagcacgctactcgagaacatcttcgcaatcattaatttatttaaacagtacagcaagaaagacaagaacaccgataccctgtcaaaaaaagagctgaaagagcttctggaaaaggagtttcggcagatactcaaaaaccctgatgacccggacatggtggacgtgtttatggaccatctggatatcgatcataacaagaagatcgacttcaccgagtttttactcatggtctttaagttagcacaagcgtattacgaatccacacgtaaggaaaatctccccatctctgggcataagcaccggaagcactcacatcacgacaaacacgaggacaacaagcaggaggagaacaaggaaaacaggaagagaccttcttcgcttgaacggaggaataatagaaaaggaaataaaggacgtagtaagtctccaagggaaactggtggtaaaaggcatgagtcctcctccgaaaagaaggagagaaagggttactctccaactcacagggaggaggaatatggtaaaaaccaccataactccagcaaaaaggagaagaacaagactgaaaacactcgcttgggggataatcgcaagagactgagcgagagactggaagagaaagaggataacgaggaaggtgtttacgactacgaaaacacagggaggatgacacagaaatggatccagagtggccacattgctacctactacacgatccaggatgaggcttatgacaccaccgattctctgctcgaagaaaacaaaatctatgagcgatccagatcctccgacgggaagtctagctcacaggttaacaggagtcgccatgagaacacaagccaagtcccgttacaggagagtaggaccagaaaacggagagggtcccgcgtatcacaggaccgcgatagtgaagggcacagcgaggattccgagcgacatagcggaagcgcctccagaaatcaccacggcagcgcatgggagcagagtagagatggctctagacacccccgtagtcacgatgaggaccgagctagtcacgggcattctgctgacagttcaaggcagtctggcacccgccatgcggaaacaagctcacggggacaaaccgcttctagccacgagcaggctcggagttcccctggggagcgccacggctcgggtcaccagcagtccgctgatagtagtaggcacagcgccactgggaggggccaagcaagtagtgctgttagcgaccggggacatcgcggatcttcaggcagtcaagctagcgacagcgaaggccatagtgagaacagtgatacccagtctgttagcgggcatggtaaagccggtttgcggcagcaaagccaccaggagtcaacacggggtcgttcaggggaacgctctgggcgatctggtagctctctttaccaggtgtcaacccacgagcagcccgatagcgcccatggaaggactggcacgtccacagggggtcggcagggatctcatcacgagcaggccagagactcatcccgccattcagcgtcacaggaaggtcaagatactatccgaggacatcctggctctagccgagggggtcggcagggctcacaccacgaacagagtgtgaaccggagtggacatagtggcagtcaccacagtcatacaacctcccagggacgtagtgatgcttcccatggtcaatccggttccagatcagcatcccggcagacacgaaacgaggaacagtctggggatgggactcggcatagcggttcccggcatcatgaagcaagcagtcaggctgattcatccaggcactcgcaagtaggccaaggacagagtagtggcccacgaacctctagaaaccaggggagttccgtcagccaggactccgacagccagggccacagcgaggactcagaaagatggagcggaagtgcgtctcgaaaccaccacggttctgcacaggagcaaagcagagacgggagcagacacccgagatcccaccacgaagacagggccggacatggacactcagccgatagctcgagaaagagtggaactcgtcatacgcagaattcatctagtggtcaagcagcctcatctcatgagcaggccagaagctccgcgggagaacgccacggttcaaggcaccagttgcagtccgctgattcgtctaggcattccggcaccgggcatggccaggcctcatcggcggttcgtgactccggccaccgtggctctagcgggagtcaggccaccgacagcgaaggccactctgaggactcagacacccagtccgtatccggccacggccaggctgggcatcaccagcagtcacaccaagaaagcgcccgtgaccgctctggggaacgctcgcgcaggtcaggttcattcctgtaccaagtatccacccacaagcagtcagaaagtagccacggctggacaggtcccagtacaggcgtgaggcagggatcccatcatgagcaggctagagataattcccgccacagcgcttcgcaggatggacaggacaccatccgaggccaccccggtagctcccgacgcggtcgtcagggctctcatcatgaacagtctgtcgatcgaagcggccacagcggaagccaccattctcatactacctcccagggacgatccgacgcatcaagaggccagtccgggtcaaggtccgcttcgagaaccactcgaaatgaggagcagtcccgcgacgggtcaagacacagcgggtctcgccatcatgaggctagctctcacgcggacatatcacggcactcccaggcgggacaaggccagtctgagggcagtcgcacgtcaagacggcaaggatcaagtgtctcccaggatagcgattctgaaggccactctgaggattctgagcgctggagcggatcggcttctcgaaatcacagagggtccgctcaggagcaatccagacatggcagcagacacccaaggagtcaccacgaggacagggccggacatggacacagtgccgactcttctcgacagtctggtacccctcatgccgaaacttccagcggcggtcaggcagctagttcccatgagcaagccaggtcctccccgggtgaaaggcatggttcacgacaccaacagtccgccgacagctccagacattccggcatccctcgacggcaagcgagctcagcagtacgcgactctggtcattgggggtccagcggaagccaggccagcgattcagaaggacattctgaggagtcggacacgcagagtgtctctgggcacgggcaggacggccctcaccagcagtctcatcaggagtctgcccgtgattggtccggcggtcggagcgggaggtccggaagctttatctaccaagtctcaacacacgaacaatcggaatccgctcacggcaggactaggacatccaccggacgacgccagggcagccatcatgaacaggctcgggactcgagtaggcacagcgcctcccaagaggggcaagataccatccgagcccatcctggctcccgaaggggcggaaggcaaggatctcaccacgagcaatcagtggacagatcaggtcacagtgggagccaccactcccatactacatcccagggaaggtctgatgccagccacgggcagtctggatccagatcagcctcacggcagacccgaaaagacaaacagtccggagacggatcaaggcactcgggaagcagacaccacgaggcagcgtcctgggcggattcctcacggcattcacaggtgggccaggagcaatcgtcagggtcaagaacttctcggcaccaggggtcgtccgtaagccaggactccgatagtgaaagacactctgatgacagtgaacggttaagcgggtctgcaagcaggaaccaccatggatcctcccgcgaacaatccagagacggttctcggcaccctggtttccatcaagaggatagggcatcacacggccacagcgctgattcttctcgacagtccggtacacaccacactgagagctctagtcatggccaggccgtttcctcgcacgagcaggccaggagcagtcccggtgagcgccacggaagccgacaccaacagagtgctgacagttccaggcactctggtatcggccaccgccaggccagtagcgcagttagagatagcggccacagaggttcttccggatctcaggtcactaattctgagggacactctgaggattctgacactcagtcggtgagcgcgcacggtcaagccggaccccatcagcagagccacaaagagtccgccagaggccaaagtggagagtcatctggccgttcccgtagttttctgtatcaagtgtccagccatgagcagtccgagtctactcacggtcagactgctccaagcaccggcggtcgtcaagggtctcggcacgagcaggccagaaactcttccaggcattccgcctctcaggatgggcaggacaccatcaggggtcacccgggtagctcacgtgggggacgtcaggggtcctatcacgagcaaagtgtggacagaagcggccatagcggttaccaccattcacacaccaccccccaggggagatccgatgcctcccacggccagagtgggcctcggagcgcatcccggcagacccgcaatgaagagcagagtggggacggatccaggcactctggatccaggcaccatgagccatccacaagggccggaagttcccgtcactcccaggtggggcagggcgagtctgcgggaagcaaaacctcaaggcgccagggttcgtccgtgagtcaggatcgggactctgagggacactctgaggacagcgagcgcaggtcagaatcagcttccagaaaccattacggctctgcaagagaacaaagccgccacgggagcagaaatcccagatctcatcaagaagatagggccagccatgggcattctgcagagtcctccaggcagtccggcacaaggcacgctgaaactagtagcggtggtcaggccgcaagtagccaggagcaggcgcgttctagcccaggagaacgccatggaagcagacatcagcagtcggcagactcttccactgactcgggaaccggccgtaggcaggactcctccgttgtcggggatagtggtaatcgaggatcatcagggtctcaagcctcagatagcgagggccactccgaggaaagcgacactcaatctgtcagcgcacacgggcaggcgggtccccaccagcaaagtcaccaggagtcaacacggggacagagcggtgaacgaagcgggagaagcgggtcattcctttaccaagtcagtacacacgagcagtccgagtccgcccacggcaggactgggcctagcaccggcggacgacagcgcagccggcacgagcaggccagggatagtagccgtcattctgcatctcaggagggccaggataccataaggggtcatcccggttctagccggggtgggagacaaggttcgcactacgagcaaagcgtcgattctagtggtcatagcggatcccaccactcccacactacatctcaggagcgctccgatgttagcagaggccagtcagggtctcgctccgtttccaggcagacccgcaatgagaagcaatcaggggatggatccagacacagcggttcacgccatcacgaggcatcatctagagcagacagcagcagacattctcaggtgggacaaggccaaagtagcggcccacgaacttccagaaaccaaggttcaagcgtcagtcaggattcagattctcaaggacacagtgaggatagtgagaggtggagcggcagtgcaagcagaaaccatctggggtccgcctgggagcaaagtagggacggctcccgccatcctggtagccaccatgaggatagagccggacacggccattcagcagactcttccaggcagagtgggactaggcacaccgaaagcagttcccgcggtcaagcagcctcttcacatgagcaggcgagaagcagcgctggagaacggcacggctcccaccaccagctccaaagtgccgacagcagtcgacattcagggatcggacacggtcaggcctcaagcgctgtcagggattcgggccacaggggatactcaggctcacaggctagcgattccgaaggccactccgaagatagcgatactcagtcagtgtcagcccaaggaaaggccggtccccatcagcaatcccataaggaaagcgccagggggcagtctggcgaatcgtccggcaggtcgggaagctttctctatcaggtgtctacacatgagcaatccgagagtacacacgggcaaagtgcccctagtactggcggaagacagggctcccactatgaccaggcccaggactcttctaggcactcagcttcccaagaaggccaagatacgattcgtgggcaccccggaccttctaggggcggaaggcagggctcccaccaagaacagagcgtggatagatcaggtcactcagggtctcatcattcgcatacaaccagtcaaggtaggagcgatgcctcacggggtcagtcaggttcccgatcagcatctaggaagacctatgataaggagcagagcggtgacggaagccgccattctgggtctcatcaccatgaagcaagttcctgggccgacagctcaagacacagcctcgttgggcagggtcagagtagtggaccaaggactagccggcctcggggttcttccgtgtctcaggactcagacagtgagggccattccgaggattccgaacgcaggtctgggagtgccagtagaaaccaccacggtagtgcgcaggaacagagcagagatggctccagacatccacgtagccaccatgaagacagagctggccacggacactccgccgagtcttccaggcagtccgggactcatcatgctgagaactccagcgggggtcaggccgcaagcagtcacgaacaggcaaggtcctccgccggagaaagacatggctcacaccaccaacaaagcgcagactctagccgccactctggaatcgggcatggacaggccagctcagctgtccgtgacagcggacacagagggtcctccggcagtcaggcctctgattctgagggccacagcgaggactccgacacacagtcagttagcgcacatggccaagcagggccacatcagcaatcacatcaggaatccacaagaggcagatccgcgggaagatcaggacgatctgggagtttcttgtatcaggtgagcacacacgaacagagcgagtccgcacatggaaggacaggtactagtactggtgggagacagggatctcatcacaagcaagctagggactcctccaggcatagtacttcacaggaaggacaggacaccatccatggccatcctgggagcagcagtggaggccgtcaaggctctcattatgagcagctggtggatcgttctggacactcaggatcgcatcatagccacacaacaagccagggccgttccgacgcgtcacacggacacagcggatctcgttccgccagccggcagacacggaacgacgagcaaagtggcgacggctccagacactctggatcacgtcatcatgaggcctcatcccgtgctgatagttccggacattcccaagttggccagggtcagtccgaagggcctcgaacatcacgaaactggggcagctcattttctcaagattctgactcccaaggacactctgaagacagcgagaggtggtcaggtagtgcaagtcggaaccaccatggaagcgcccaggagcagctacgtgacggatcaaggcatcccagatcccatcaggaagatcgggcaggccacggacactcagctgactctagccggcagagcggaactaggcacactcagactagctcaggtgggcaggccgcttctagccacgaacaggcacgttcctcagcaggagaaaggcacggctcccaccaccagcaatccgccgacagcagccgacactccgggatcggacacggtcaggcgtcgtcggccgtacgcgattcagggcacaggggttactcagggagccaggcatcggacaacgaaggccacagtgaagacagtgacactcaatccgtttccgcccacggccaagccggttcacatcagcagagtcatcaggagagcgcgaggggacgatctggagagacgtctgggcactctggctcttttctgtatcaagtatccacccacgagcagtcagaatcctcccatggttggaccggcccaagcacgaggggccgtcaaggaagtcgacacgagcaggcccaggactccagccgtcactccgcaagccaggatgggcaggatacaatccggggacatcctggatcaagccgtggaggacgtcaaggttaccaccatgagcacagcgtggattcctcaggacattctggctcccaccactctcatacgacaagtcagggacgcagtgacgcctcaagaggacagtccggatccagatcagcaagccgcacaacaagaaacgaagagcagtctggcgatggctccagacactccggctcccggcaccacgaagcttccacccatgccgacatctcccgtcactcgcaagccgtgcagggccagagtgagggttctcgcagatcaaggcgccaggggtcctccgtgtcccaggacagcgatagcgaaggccattccgaagactcggaacgctggtctggctcagcctcacggaatcaccatggatcagcacaagaacagctgcgagatggctccaggcacccccgtagccatcaagaggatagggccggacacggtcactcggcagattcttctaggcagagtggcactaggcatacgcagacaagctcgggtggacaggccgcaagcagtcacgaacaggctagatcctctgctggggagcgccatggctcgcaccatcagcaatccgcagactcaagcagacattcggggatcgggcatggccaggcgtcctcagccgtccgcgacagtggccacagagggtactccggatcccaagcctcagacaacgagggccattctgaagatagtgacacccagtccgtttccgctcatggccaggctggctcgcaccagcagagtcatcaagagtccgccagagggcgaagcggtgagacaagcggccacagcggatccttcctataccaagtgagcacgcacgagcaaagtgagagctcacacgggtggacaggtcctagcacacggggaaggcaaggatcgcgtcatgagcaggcccaagatagcagtagacattcagctagtcagtacgggcaggacacaatcaggggccatcctggaagctcacgcggtgggaggcaggggtatcaccatgaacactctgtcgactcttcgggccattccggctctcaccacagtcacacaaccagccaaggacgtagtgacgccagccgaggtcagtcggggtccagaagcgctagccgtactacccgcaatgaggagcaatccggcgactcttccaggcatagcgtttcgaggcatcatgaggccagcacacacgccgacatttccaggcactcacaagcggtacaggggcagagcgagggatcccgacggtctaggagacaggggagctccgtaagccaagattcagactccgaggggcattccgaggattctgagcgctggtcaggaagtgcctcacggaaccacaggggtagtgtccaggaacagtctagacacggttcacgccatcctcgctctcaccatgaggacagagctggccatgggcattctgccgatcggtctcgacaatccggcacccgacacgccgagaccagcagcggtggccaggctgcctcaagccacgaacaagcaaggtcttcgcccggagagagacacggctcccgacaccaacagtctgccgactcctctcgtcacagcggtatacccagaggacaggcgtccagcgctgtaagagacagcagacattgggggtcctctgggtctcaagcctcagattcagagggccactccgaggagtccgacacccagagtgtatccggccacggacaggccggtcctcaccagcagtcccatcaggagagcgccagggaccgttccgggggaagatccggcaggtccgggtcattcctgtatcaagttagtacccacgaacagagtgagtccgcccatggaagaacaaggacgagcaccgggcgtcggcaggggtctcaccatgagcaggctagggactcttctcgccatagcgcaagccaggaaggccaagatacaattaggggccatccagggtcatcaagacggggaagacagggctcacactacgagcagtctgtggacaggtccgggcactcaggctctcaccactcacacaccacgagccagggcaggtctgacgcatcacggggtcaaagtggaagtcggtctgcatctagacagactagaaacgacgagcaatccggcgacggatccagacattcctggtcccaccaccacgaagcaagcacgcaggcagactcttcccgacactcccagtctggacagggccagagcgcgggacctaggacgagccggaaccagggctccagcgtatcacaagactcagacagtcagggtcattccgaagactctgaacgctggtcaggctctgcctctagaaatcaccgtgggagcgcacaggagcagtccagagatggctccagacatccaacctcacatcatgaggatcgagctggccacggacacagcgcagaaagtagtaggcagagcgggacccaccacgctgaaaatagttctgggggacaggctgccagtagccacgaacaagcccgaagttcggccggagagcgacatggcagccatcaccagcaatcagctgactccagtcgccattccggaatcgggcacgggcaggcaagctctgccgtgcgtgactccggccaccgcggaagctccggttcgcaggcttctgacagtgaaggtcactccgaagattctgacacacaaagtgtttcagctcacgggcaggccggacctcatcagcagtcccaccaggagagcaccaggggaagatccgcaggccgttccggccgtagtggttctttcctgtatcaggtgtccactcatgaacagagcgagtcagcgcacggcagagcaggccctagtaccggcggtcggcagggctcccgccatgagcaggccagagactcaagccgccatagtgcctcccaggaaggacaagacacaatcaggggacaccccggttctagacgcggtggccgtcagggcagctaccacgaacagtcggtcgaccgctccgggcactcaggtagccaccactcacatactacctcacaaggacgctccgacgcatctcatggccagagcgggtcccgaagcgccagccgcgagacacggaatgaggagcaaagcggagatgggtcccgacactctggcagtagacatcatgaagctagcacacaggcggattctagtaggcatagccaatcagggcagggtgagagcgcagggtcccggcgaagtcgacgccaggggtcatccgtatctcaggacagcgattcagaggcatatcccgaagatagcgaaaggagatcggaatcggcatcccggaatcaccacggttcaagtcgggagcagtcccgggacggaagccggcaccccggatcctcccacagagacacggcgagtcatgtgcagtccagcccagtacagagcgacagtagcacggcaaaagagcatggccatttcagctctctgtcgcaggactctgcataccactccgggatccaaagtagggggagtccccacagctcctccagttaccattaccaaagcgaaggaactgagcgccaaaagggtcaatccggactggtgtggaggcatggaagttatggaagtgccgactatgattacggggagtcggggttccggcattcacagcatgggtcagtgagttacaattcaaatccagtggtgttcaaagaaaggagtgatatttgtaaagccagtgcgttcggtaaagaccaccctcgctactatgccacctatattaacaaagatcctggcctttgtggtcattcaagtgacatcagcaagcagttggggttttcacagtcacaacgctattattattatgagtat

SEQ ID NO: 123223 - DNA, 969 bp, Artificial Sequence
  derived and/or modified sequence
ctgtatcaagttagcacacacgaacagccagattccgctcacggcaggactggaacttcaacagggggacgtcagggatcccatcacgaacaggccagagacagtagcaggcactccgcttcacaggaaggacaggatacaattcgaggtcaccctggctctagtagaggcggtaggcaggggagccatcacgaacagtctgtgaaccgttcggggcattctggcagtcatcactcgcatacaacgtctcagggccgatcagacgcttcacatgggcagtctggaagtcgttccgctagcagacagacacgaaatgaggaacaatcaggggacgggaccagacactcaggttctcgacatcatgaagcctcctcccaagctgactcctccaggcattcgcaggccggtcaaggccagtctgaggggtcgcggacaagccgcaggcaagggtcgtcagttagtcaagacagcgatagcgagggacatagcgaagacagtgagaggtggtccgggtctgcaagccgtaaccataggggaagcgcccaggaacagagtcgccacggtagccgtcacccacggagtcaccatgaggacagggcaggccacgggcactccgctgattcttctcgacagtccggcacacctcacgccgagactagctctggaggccaagctgccagcagtcacgaacaggctcgttcgtcccccggtgaacggcacgggtctcgtcatcagcagtctgctgatagttcacgtcacagcggtattccaagacgacaggcctcctccgctgtccgcgactcaggtcactggggctcgtccggtagccaggctagcgactcggagggtcactcagaggaaagtgatacccaatccgtcagtggccacggccaagacggccctcatcaacagagtcaccaggagtccgctagggactggtcaggcggacgtagtgggaggagcggatag

SEQ ID NO: 123224 - DNA, 969 bp, Artificial Sequence
  derived and/or modified sequence
ctgtaccaggtgagcacccacgagcagagcgagagcgcccacggcagaaccggccccagcaccggcggcagacagagaagcagacacgagcaggccagagacagcagcagacacagcgccagccaggagggccaggacaccatcagaggccaccccggcagcagcagaggcggcagacagggcagccactacgagcagagcgtggacagcagcggccacagcggcagccaccacagccacaccaccagccaggagagaagcgacgtgagcagaggccagagcggcagcagaagcgtgagcagacagaccagaaacgagaagcagagcggcgacggcagcagacacagcggcagcagacaccacgaggccagcagcagagccgacagcagcagacacagccaggtgggccagggccagagcagcggccccagaaccagcagaaaccagggcagcagcgtgagccaggacagcgacagccagggccacagcgaggacagcgagagaagaagcggcagcgccagcagaaaccaccacggcagcgcccaggagcagagcagagacggcagcagacaccccagaagccaccacgaggacagagccggccacggccacagcgccgagagcagcagacagagcggcacccaccacgccgagaacagcagcggcggccaggccgccagcagccacgagcaggccagaagcagcgccggcgagagacacggcagccaccaccagcagagcgccgacagcagcagacacagcggcatcggccacggccaggccagcagcgccgtgagagacagcggccacagaggcagcagcggcagccaggccagcgacagcgagggccacagcgaggacagcgacacccagagcgtgagcgcccacggccaggccggcccccaccagcagagccaccaggagagcaccagaggcagaagcgccggcagaagcggcagaagcggctag

SEQ ID NO: 123225 - DNA, 969 bp, Artificial Sequence
  derived and/or modified sequence
ctgtaccaggtgagcacccacgagcagagcgagagcagccacggctggaccggccccagcaccagaggcagacagggcagcagacacgagcaggcccaggacagcagcagacacagcgccagccaggacggccaggacaccatcagaggccaccccggcagcagcagaggcggcagacagggctaccaccacgagcacagcgtggacagcagcggccacagcggcagccaccacagccacaccaccagccagggcagaagcgacgccagcagaggccagagcggcagcagaagcgccagcagaaccaccagaaacgaggagcagagcggcgacggcagcagacacagcggcagcagacaccacgaggccagcacccacgccgacatcagcagacacagccaggccgtgcagggccagagcgagggcagcagaagaagcagaagacagggcagcagcgtgagccaggacagcgacagcgagggccacagcgaggacagcgagagatggagcggcagcgccagcagaaaccacagaggcagcgtgcaggagcagagcagacacggcagcagacaccccagaagccaccacgaggacagagccggccacggccacagcgccgacagaagcagacagagcggcaccagacacgccgagaccagcagcggcggccaggccgccagcagccacgagcaggccagaagcagccccggcgagagacacggcagcagacaccagcagagcgccgacagcagcagacacagcggcatccccagaggccaggccagcagcgccgtgagagacagcagacactggggcagcagcggcagccaggccagcgacagcgagggccacagcgaggagagcgacacccagagcgtgagcggccacggccaggccggcccccaccagcagagccaccaggagagcgccagagacagaagcggcggcagaagcggcagaagcggctag

SEQ ID NO: 123226 - DNA, 12186 bp, Artificial Sequence
  derived and/or modified sequence
atgagcaccctgctggagaacatcttcgccatcatcaacctgttcaagcagtacagcaagaaggacaagaacaccgacaccctgagcaagaaggagctgaaggagctgctggagaaggagttcagacagatcctgaagaaccccgacgaccccgacatggtggacgtgttcatggaccacctggacatcgaccacaacaagaagatcgacttcaccgagttcctgctgatggtgttcaagctggcccaggcctactacgagagcaccagaaaggagaacctgcccatcagcggccacaagcacagaaagcacagccaccacgacaagcacgaggacaacaagcaggaggagaacaaggagaacagaaagagacccagcagcctggagagaagaaacaacagaaagggcaacaagggcagaagcaagagccccagagagaccggcggcaagagacacgagagcagcagcgagaagaaggagagaaagggctacagccccacccacagagaggaggagtacggcaagaaccaccacaacagcagcaagaaggagaagaacaagaccgagaacaccagactgggcgacaacagaaagagactgagcgagagactggaggagaaggaggacaacgaggagggcgtgtacgactacgagaacaccggcagaatgacccagaagtggatccagagcggccacatcgccacctactacaccatccaggacgaggcctacgacaccaccgacagcctgctggaggagaacaagatctacgagagaagcagaagcagcgacggcaagagcagcagccaggtgaacagaagcagacacgagaacaccagccaggtgcccctgcaggagagcagaaccagaaagagaagaggcagcagagtgagccaggacagagacagcgagggccacagcgaggacagcgagagacacagcggcagcgccagcagaaaccaccacggcagcgcctgggagcagagcagagacggcagcagacaccccagaagccacgacgaggacagagccagccacggccacagcgccgacagcagcagacagagcggcaccagacacgccgagaccagcagcagaggccagaccgccagcagccacgagcaggccagaagcagccccggcgagagacacggcagcggccaccagcagagcgccgacagcagcagacacagcgccaccggcagaggccaggccagcagcgccgtgagcgacagaggccacagaggcagcagcggcagccaggccagcgacagcgagggccacagcgagaacagcgacacccagagcgtgagcggccacggcaaggccggcctgagacagcagagccaccaggagagcaccagaggcagaagcggcgagagaagcggcagaagcggcagcagcctgtaccaggtgagcacccacgagcagcccgacagcgcccacggcagaaccggcaccagcaccggcggcagacagggcagccaccacgagcaggccagagacagcagcagacacagcgccagccaggagggccaggacaccatcagaggccaccccggcagcagcagaggcggcagacagggcagccaccacgagcagagcgtgaacagaagcggccacagcggcagccaccacagccacaccaccagccagggcagaagcgacgccagccacggccagagcggcagcagaagcgccagcagacagaccagaaacgaggagcagagcggcgacggcaccagacacagcggcagcagacaccacgaggccagcagccaggccgacagcagcagacacagccaggtgggccagggccagagcagcggccccagaaccagcagaaaccagggcagcagcgtgagccaggacagcgacagccagggccacagcgaggacagcgagagatggagcggcagcgccagcagaaaccaccacggcagcgcccaggagcagagcagagacggcagcagacaccccagaagccaccacgaggacagagccggccacggccacagcgccgacagcagcagaaagagcggcaccagacacacccagaacagcagcagcggccaggccgccagcagccacgagcaggccagaagcagcgccggcgagagacacggcagcagacaccagctgcagagcgccgacagcagcagacacagcggcaccggccacggccaggccagcagcgccgtgagagacagcggccacagaggcagcagcggcagccaggccaccgacagcgagggccacagcgaggacagcgacacccagagcgtgagcggccacggccaggccggccaccaccagcagagccaccaggagagcgccagagacagaagcggcgagagaagcagaagaagcggcagcttcctgtaccaggtgagcacccacaagcagagcgagagcagccacggctggaccggccccagcaccggcgtgagacagggcagccaccacgagcaggccagagacaacagcagacacagcgccagccaggacggccaggacaccatcagaggccaccccggcagcagcagaagaggcagacagggcagccaccacgagcagagcgtggacagaagcggccacagcggcagccaccacagccacaccaccagccagggcagaagcgacgccagcagaggccagagcggcagcagaagcgccagcagaaccaccagaaacgaggagcagagcagagacggcagcagacacagcggcagcagacaccacgaggccagcagccacgccgacatcagcagacacagccaggccggccagggccagagcgagggcagcagaaccagcagaagacagggcagcagcgtgagccaggacagcgacagcgagggccacagcgaggacagcgagagatggagcggcagcgccagcagaaaccacagaggcagcgcccaggagcagagcagacacggcagcagacaccccagaagccaccacgaggacagagccggccacggccacagcgccgacagcagcagacagagcggcaccccccacgccgagaccagcagcggcggccaggccgccagcagccacgagcaggccagaagcagccccggcgagagacacggcagcagacaccagcagagcgccgacagcagcagacacagcggcatccccagaagacaggccagcagcgccgtgagagacagcggccactggggcagcagcggcagccaggccagcgacagcgagggccacagcgaggagagcgacacccagagcgtgagcggccacggccaggacggcccccaccagcagagccaccaggagagcgccagagactggagcggcggcagaagcggcagaagcggcagcttcatctaccaggtgagcacccacgagcagagcgagagcgcccacggcagaaccagaaccagcaccggcagaagacagggcagccaccacgagcaggccagagacagcagcagacacagcgccagccaggagggccaggacaccatcagagcccaccccggcagcagaagaggcggcagacagggcagccaccacgagcagagcgtggacagaagcggccacagcggcagccaccacagccacaccaccagccagggcagaagcgacgccagccacggccagagcggcagcagaagcgccagcagacagaccagaaaggacaagcagagcggcgacggcagcagacacagcggcagcagacaccacgaggccgccagctgggccgacagcagcagacacagccaggtgggccaggagcagagcagcggcagcagaaccagcagacaccagggcagcagcgtgagccaggacagcgacagcgagagacacagcgacgacagcgagagactgagcggcagcgccagcagaaaccaccacggcagcagcagagagcagagcagagacggcagcagacaccccggcttccaccaggaggacagagccagccacggccacagcgccgacagcagcagacagagcggcacccaccacaccgagagcagcagccacggccaggccgtgagcagccacgagcaggccagaagcagccccggcgagagacacggcagcagacaccagcagagcgccgacagcagcagacacagcggcatcggccacagacaggccagcagcgccgtgagagacagcggccacagaggcagcagcggcagccaggtgaccaacagcgagggccacagcgaggacagcgacacccagagcgtgagcgcccacggccaggccggcccccaccagcagagccacaaggagagcgccagaggccagagcggcgagagcagcggcagaagcagaagcttcctgtaccaggtgagcagccacgagcagagcgagagcacccacggccagaccgcccccagcaccggcggcagacagggcagcagacacgagcaggccagaaacagcagcagacacagcgccagccaggacggccaggacaccatcagaggccaccccggcagcagcagaggcggcagacagggcagctaccacgagcagagcgtggacagaagcggccacagcggctaccaccacagccacaccaccccccagggcagaagcgacgccagccacggccagagcggccccagaagcgccagcagacagaccagaaacgaggagcagagcggcgacggcagcagacacagcggcagcagacaccacgagcccagcaccagagccggcagcagcagacacagccaggtgggccagggcgagagcgccggcagcaagaccagcagaagacagggcagcagcgtgagccaggacagagacagcgagggccacagcgaggacagcgagagaagaagcgagagcgccagcagaaaccactacggcagcgccagagagcagagcagacacggcagcagaaaccccagaagccaccaggaggacagagccagccacggccacagcgccgagagcagcagacagagcggcaccagacacgccgagaccagcagcggcggccaggccgccagcagccaggagcaggccagaagcagccccggcgagagacacggcagcagacaccagcagagcgccgacagcagcaccgacagcggcaccggcagaagacaggacagcagcgtggtgggcgacagcggcaacagaggcagcagcggcagccaggccagcgacagcgagggccacagcgaggagagcgacacccagagcgtgagcgcccacggccaggccggcccccaccagcagagccaccaggagagcaccagaggccagagcggcgagagaagcggcagaagcggcagcttcctgtaccaggtgagcacccacgagcagagcgagagcgcccacggcagaaccggccccagcaccggcggcagacagagaagcagacacgagcaggccagagacagcagcagacacagcgccagccaggagggccaggacaccatcagaggccaccccggcagcagcagaggcggcagacagggcagccactacgagcagagcgtggacagcagcggccacagcggcagccaccacagccacaccaccagccaggagagaagcgacgtgagcagaggccagagcggcagcagaagcgtgagcagacagaccagaaacgagaagcagagcggcgacggcagcagacacagcggcagcagacaccacgaggccagcagcagagccgacagcagcagacacagccaggtgggccagggccagagcagcggccccagaaccagcagaaaccagggcagcagcgtgagccaggacagcgacagccagggccacagcgaggacagcgagagatggagcggcagcgccagcagaaaccacctgggcagcgcctgggagcagagcagagacggcagcagacaccccggcagccaccacgaggacagagccggccacggccacagcgccgacagcagcagacagagcggcaccagacacaccgagagcagcagcagaggccaggccgccagcagccacgagcaggccagaagcagcgccggcgagagacacggcagccaccaccagctgcagagcgccgacagcagcagacacagcggcatcggccacggccaggccagcagcgccgtgagagacagcggccacagaggctacagcggcagccaggccagcgacagcgagggccacagcgaggacagcgacacccagagcgtgagcgcccagggcaaggccggcccccaccagcagagccacaaggagagcgccagaggccagagcggcgagagcagcggcagaagcggcagcttcctgtaccaggtgagcacccacgagcagagcgagagcacccacggccagagcgcccccagcaccggcggcagacagggcagccactacgaccaggcccaggacagcagcagacacagcgccagccaggagggccaggacaccatcagaggccaccccggccccagcagaggcggcagacagggcagccaccaggagcagagcgtggacagaagcggccacagcggcagccaccacagccacaccaccagccagggcagaagcgacgccagcagaggccagagcggcagcagaagcgccagcagaaagacctacgacaaggagcagagcggcgacggcagcagacacagcggcagccaccaccacgaggccagcagctgggccgacagcagcagacacagcctggtgggccagggccagagcagcggccccagaaccagcagacccagaggcagcagcgtgagccaggacagcgacagcgagggccacagcgaggacagcgagagaagaagcggcagcgccagcagaaaccaccacggcagcgcccaggagcagagcagagacggcagcagacaccccagaagccaccacgaggacagagccggccacggccacagcgccgagagcagcagacagagcggcacccaccacgccgagaacagcagcggcggccaggccgccagcagccacgagcaggccagaagcagcgccggcgagagacacggcagccaccaccagcagagcgccgacagcagcagacacagcggcatcggccacggccaggccagcagcgccgtgagagacagcggccacagaggcagcagcggcagccaggccagcgacagcgagggccacagcgaggacagcgacacccagagcgtgagcgcccacggccaggccggcccccaccagcagagccaccaggagagcaccagaggcagaagcgccggcagaagcggcagaagcggcagcttcctgtaccaggtgagcacccacgagcagagcgagagcgcccacggcagaaccggcaccagcaccggcggcagacagggcagccaccacaagcaggccagagacagcagcagacacagcaccagccaggagggccaggacaccatccacggccaccccggcagcagcagcggcggcagacagggcagccactacgagcagctggtggacagaagcggccacagcggcagccaccacagccacaccaccagccagggcagaagcgacgccagccacggccacagcggcagcagaagcgccagcagacagaccagaaacgacgagcagagcggcgacggcagcagacacagcggcagcagacaccacgaggccagcagcagagccgacagcagcggccacagccaggtgggccagggccagagcgagggccccagaaccagcagaaactggggcagcagcttcagccaggacagcgacagccagggccacagcgaggacagcgagagatggagcggcagcgccagcagaaaccaccacggcagcgcccaggagcagctgagagacggcagcagacaccccagaagccaccaggaggacagagccggccacggccacagcgccgacagcagcagacagagcggcaccagacacacccagaccagcagcggcggccaggccgccagcagccacgagcaggccagaagcagcgccggcgagagacacggcagccaccaccagcagagcgccgacagcagcagacacagcggcatcggccacggccaggccagcagcgccgtgagagacagcggccacagaggctacagcggcagccaggccagcgacaacgagggccacagcgaggacagcgacacccagagcgtgagcgcccacggccaggccggcagccaccagcagagccaccaggagagcgccagaggcagaagcggcgagaccagcggccacagcggcagcttcctgtaccaggtgagcacccacgagcagagcgagagcagccacggctggaccggccccagcaccagaggcagacagggcagcagacacgagcaggcccaggacagcagcagacacagcgccagccaggacggccaggacaccatcagaggccaccccggcagcagcagaggcggcagacagggctaccaccacgagcacagcgtggacagcagcggccacagcggcagccaccacagccacaccaccagccagggcagaagcgacgccagcagaggccagagcggcagcagaagcgccagcagaaccaccagaaacgaggagcagagcggcgacggcagcagacacagcggcagcagacaccacgaggccagcacccacgccgacatcagcagacacagccaggccgtgcagggccagagcgagggcagcagaagaagcagaagacagggcagcagcgtgagccaggacagcgacagcgagggccacagcgaggacagcgagagatggagcggcagcgccagcagaaaccaccacggcagcgcccaggagcagctgagagacggcagcagacaccccagaagccaccaggaggacagagccggccacggccacagcgccgacagcagcagacagagcggcaccagacacacccagaccagcagcggcggccaggccgccagcagccacgagcaggccagaagcagcgccggcgagagacacggcagccaccaccagcagagcgccgacagcagcagacacagcggcatcggccacggccaggccagcagcgccgtgagagacagcggccacagaggctacagcggcagccaggccagcgacaacgagggccacagcgaggacagcgacacccagagcgtgagcgcccacggccaggccggcagccaccagcagagccaccaggagagcgccagaggcagaagcggcgagaccagcggccacagcggcagcttcctgtaccaggtgagcacccacgagcagagcgagagcagccacggctggaccggccccagcaccagaggcagacagggcagcagacacgagcaggcccaggacagcagcagacacagcgccagccagtacggccaggacaccatcagaggccaccccggcagcagcagaggcggcagacagggctaccaccacgagcacagcgtggacagcagcggccacagcggcagccaccacagccacaccaccagccagggcagaagcgacgccagcagaggccagagcggcagcagaagcgccagcagaaccaccagaaacgaggagcagagcggcgacagcagcagacacagcgtgagcagacaccacgaggccagcacccacgccgacatcagcagacacagccaggccgtgcagggccagagcgagggcagcagaagaagcagaagacagggcagcagcgtgagccaggacagcgacagcgagggccacagcgaggacagcgagagatggagcggcagcgccagcagaaaccacagaggcagcgtgcaggagcagagcagacacggcagcagacaccccagaagccaccacgaggacagagccggccacggccacagcgccgacagaagcagacagagcggcaccagacacgccgagaccagcagcggcggccaggccgccagcagccacgagcaggccagaagcagccccggcgagagacacggcagcagacaccagcagagcgccgacagcagcagacacagcggcatccccagaggccaggccagcagcgccgtgagagacagcagacactggggcagcagcggcagccaggccagcgacagcgagggccacagcgaggagagcgacacccagagcgtgagcggccacggccaggccggcccccaccagcagagccaccaggagagcgccagagacagaagcggcggcagaagcggcagaagcggcagcttcctgtaccaggtgagcacccacgagcagagcgagagcgcccacggcagaaccagaaccagcaccggcagaagacagggcagccaccacgagcaggccagagacagcagcagacacagcgccagccaggagggccaggacaccatcagaggccaccccggcagcagcagaagaggcagacagggcagccactacgagcagagcgtggacagaagcggccacagcggcagccaccacagccacaccaccagccagggcagaagcgacgccagcagaggccagagcggcagcagaagcgccagcagacagaccagaaacgacgagcagagcggcgacggcagcagacacagctggagccaccaccacgaggccagcacccaggccgacagcagcagacacagccagagcggccagggccagagcgccggccccagaaccagcagaaaccagggcagcagcgtgagccaggacagcgacagccagggccacagcgaggacagcgagagatggagcggcagcgccagcagaaaccacagaggcagcgcccaggagcagagcagagacggcagcagacaccccaccagccaccacgaggacagagccggccacggccacagcgccgagagcagcagacagagcggcacccaccacgccgagaacagcagcggcggccaggccgccagcagccacgagcaggccagaagcagcgccggcgagagacacggcagccaccaccagcagagcgccgacagcagcagacacagcggcatcggccacggccaggccagcagcgccgtgagagacagcggccacagaggcagcagcggcagccaggccagcgacagcgagggccacagcgaggacagcgacacccagagcgtgagcgcccacggccaggccggcccccaccagcagagccaccaggagagcaccagaggcagaagcgccggcagaagcggcagaagcggcagcttcctgtaccaggtgagcacccacgagcagagcgagagcgcccacggcagagccggccccagcaccggcggcagacagggcagcagacacgagcaggccagagacagcagcagacacagcgccagccaggagggccaggacaccatcagaggccaccccggcagcagaagaggcggcagacagggcagctaccacgagcagagcgtggacagaagcggccacagcggcagccaccacagccacaccaccagccagggcagaagcgacgccagccacggccagagcggcagcagaagcgccagcagagagaccagaaacgaggagcagagcggcgacggcagcagacacagcggcagcagacaccacgaggccagcacccaggccgacagcagcagacacagccagagcggccagggcgagagcgccggcagcagaagaagcagaagacagggcagcagcgtgagccaggacagcgacagcgaggcctaccccgaggacagcgagagaagaagcgagagcgccagcagaaaccaccacggcagcagcagagagcagagcagagacggcagcagacaccccggcagcagccacagagacaccgccagccacgtgcagagcagccccgtgcagagcgacagcagcaccgccaaggagcacggccacttcagcagcctgagccaggacagcgcctaccacagcggcatccagagcagaggcagcccccacagcagcagcagctaccactaccagagcgagggcaccgagagacagaagggccagagcggcctggtgtggagacacggcagctacggcagcgccgactacgactacggcgagagcggcttcagacacagccagcacggcagcgtgagctacaacagcaaccccgtggtgttcaaggagagaagcgacatctgcaaggccagcgccttcggcaaggaccaccccagatactacgccacctacatcaacaaggaccccggcctgtgcggccacagcagcgacatcagcaagcagctgggcttcagccagagccagagatactactactacgagtag

SEQ ID NO: 123227 - DNA, 969 bp, Artificial Sequence
  derived and/or modified sequence
ctgtaccaggtgagcacccacgagcagcccgacagcgcccacggcagaaccggcaccagcaccggcggcagacagggcagccaccacgagcaggccagagacagcagcagacacagcgccagccaggagggccaggacaccatcagaggccaccccggcagcagcagaggcggcagacagggcagccaccacgagcagagcgtgaacagaagcggccacagcggcagccaccacagccacaccaccagccagggcagaagcgacgccagccacggccagagcggcagcagaagcgccagcagacagaccagaaacgaggagcagagcggcgacggcaccagacacagcggcagcagacaccacgaggccagcagccaggccgacagcagcagacacagccaggccggccagggccagagcgagggcagcagaaccagcagaagacagggcagcagcgtgagccaggacagcgacagcgagggccacagcgaggacagcgagagatggagcggcagcgccagcagaaaccacagaggcagcgcccaggagcagagcagacacggcagcagacaccccagaagccaccacgaggacagagccggccacggccacagcgccgacagcagcagacagagcggcaccccccacgccgagaccagcagcggcggccaggccgccagcagccacgagcaggccagaagcagccccggcgagagacacggcagcagacaccagcagagcgccgacagcagcagacacagcggcatccccagaagacaggccagcagcgccgtgagagacagcggccactggggcagcagcggcagccaggccagcgacagcgagggccacagcgaggagagcgacacccagagcgtgagcggccacggccaggacggcccccaccagcagagccaccaggagagcgccagagactggagcggcggcagaagcggcagaagcggctag

SEQ ID NO: 123228 - protein, 419 aa, Artificial Sequence
  derived and/or modified sequence
MTASGSPDYGQPHKINPLPPQQEWINQPVRVNVKREYDHMNGSRESPVDCSVSKCSKLVGGGESNPMNYNSYMDEKNGPPPPNMTTNERRVIVPADPTLWTQEHVRQWLEWAIKEYSLMEIDTSFFQNMDGKELCKMNKEDFLRATTLYNTEVLLSHLSYLRESSLLAYNTTSHTDQSSRLSVKEDPSYDSVRRGAWGNNMNSGLNKSPPLGGAQTISKNTEQRPQPDPYQILGPTSSRLANPGSGQIQLWQFLLELLSDSANASCITWEGTNGEFKMTDPDEVARRWGERKSKPNMNYDKLSRALRYYYDKNIMTKVHGKRYAYKFDFHGIAQALQPHPTESSMYKYPSDISYMPSYHAHQQKVNFVPPHPSSMPVTSSSFFGAASQYWTSPTGGIYPNPNVPRHPNTHVPSHLGSYY

SEQ ID NO: 123229 - protein, 452 aa, Artificial Sequence
  derived and/or modified sequence
MDGTIKEALSVVSDDQSLFDSAYGAAAHLPKADMTASGSPDYGQPHKINPLPPQQEWINQPVRVNVKREYDHMNGSRESPVDCSVSKCSKLVGGGESNPMNYNSYMDEKNGPPPPNMTTNERRVIVPADPTLWTQEHVRQWLEWAIKEYSLMEIDTSFFQNMDGKELCKMNKEDFLRATTLYNTEVLLSHLSYLRESSLLAYNTTSHTDQSSRLSVKEDPSYDSVRRGAWGNNMNSGLNKSPPLGGAQTISKNTEQRPQPDPYQILGPTSSRLANPGSGQIQLWQFLLELLSDSANASCITWEGTNGEFKMTDPDEVARRWGERKSKPNMNYDKLSRALRYYYDKNIMTKVHGKRYAYKFDFHGIAQALQPHPTESSMYKYPSDISYMPSYHAHQQKVNFVPPHPSSMPVTSSSFFGAASQYWTSPTGGIYPNPNVPRHPNTHVPSHLGSYY

SEQ ID NO: 123230 - DNA, 3993 bp, Artificial Sequence
  derived and/or modified sequence
agaagagagaggagagctcgaggcgagagagagagagagagagagagagagagagagagagagagagagagagagataggacttcctccccgattcgcaaagtgaagtcacttcccaaaattagctgaaaaaaaagtttcatccggttaactgtctctttcgctccgctacaacaacaaacgtgcacaggggagtgagggcagggcgctcgcagggggcacgcagggagggcccagggcgccagggaggccgcgccgggctaatccgaaggggctgcgaggtcaggctgtaaccgggtcaatgtgtggaatattggggggctcggctgcagacttggccaaatggacgggactattaaggaggctctgtcggtggtgagcgacgaccagtccctctttgactcagcgtacggagcggcagcccatctccccaaggccgacatgactgcctcggggagtcctgactacgggcagccccacaagatcaaccccctcccaccacagcaggagtggatcaatcagccagtgagggtcaacgtcaagcgggagtatgaccacatgaatggatccagggagtctccggtggactgcagcgttagcaaatgcagcaagctggtgggcggaggcgagtccaaccccatgaactacaacagctatatggacgagaagaatggcccccctcctcccaacatgaccaccaacgagaggagagtcatcgtccccgcagaccccacactgtggacacaggagcatgtgaggcaatggctggagtgggccataaaggagtacagcttgatggagatcgacacatcctttttccagaacatggatggcaaggaactgtgtaaaatgaacaaggaggacttcctccgcgccaccaccctctacaacacggaagtgctgttgtcacacctcagttacctcagggaaagttcactgctggcctataatacaacctcccacaccgaccaatcctcacgattgagtgtcaaagaagacccttcttatgactcagtcagaagaggagcttggggcaataacatgaattctggcctcaacaaaagtcctccccttggaggggcacaaacgatcagtaagaatacagagcaacggccccagccagatccgtatcagatcctgggcccgaccagcagtcgcctagccaaccctggaagcgggcagatccagctgtggcaattcctcctggagctgctctccgacagcgccaacgccagctgtatcacctgggaggggaccaacggggagttcaaaatgacggaccccgatgaggtggccaggcgctggggcgagcggaaaagcaagcccaacatgaattacgacaagctgagccgggccctccgttattactatgataaaaacattatgaccaaagtgcacggcaaaagatatgcttacaaatttgacttccacggcattgcccaggctctgcagccacatccgaccgagtcgtccatgtacaagtacccttctgacatctcctacatgccttcctaccatgcccaccagcagaaggtgaactttgtccctccccatccatcctccatgcctgtcacttcctccagcttctttggagccgcatcacaatactggacctcccccacggggggaatctaccccaaccccaacgtcccccgccatcctaacacccacgtgccttcacacttaggcagctactactagaagcttactcatcagtggccttctagctgaagcccatcctgcacacttactggatgctttggactcaacaggacatatgtggccttgaagggaagacaaaactggatgttctttcttgttggatagaacctttgtatttgttctttaaaaacattttttttaatgttggtaacttttgcttcctctacctgaacaaagagatgaataattccatgggccagtatgccagtttgaattctcagtctcctagcatcttgtgagttgcatattaagattactggaatggttaagtcatggttctgagaaagaagctgtacgttttctttatgtttttatgaccaaagcagtttcttgtcaatacacggggttcagtatgacacagaatcatggacttaacccgtcatgttctggtttgagatttagtgacaaatagaggtgggaagcttataatctaattttaggaggaccaaattcagtggatggcaactggaacattgattgtaaggccagtgaagttttcacccaactggaatttgatggaaagaaggtttgtgtgtttaagacgccaagggcattgcagaatccctctcagtggacagtatgcactcagctgaccactctctctagaaatagtcaagatatgaactaagaaattttaatgcaaatacatacattcctgaaagacggggaattaaattactaatttttttttttttttaaatgatgacagtggtcccagaacttggaaaagttgtagggatttctaaactcaagcagattcgcaagtgctgtgcgcttgtcagaccatcagaccagggccaaccaatcagaaggcaacttactgtataaattatgcagagttattttcctatatctcacagtattaaaaataaataattaaaaattaagaataaataaacgagttgacctcggtcacaaaagcagttttactatcgaatcaatcgctgttattttttttaatgtaatttgtacatcttttttcaatctgtacatttgggctgtctgtatgtttttatagctggtttttaaaaagcataatatgcctatagctgaaaaggaaacagggctgtttaagtcactgacttatgagaaagcaaagcactggtacagttatttaacaggcatacacaagcagggaaaagataatccatttagatctttaatgctttggaaatgcgtgtaacagtactgcaataatcacagctctgggaaaaacaacgaaactttcccttgtggagaggagggattttcctgctctatataagcaacatatttttagacattaaaatatatataattttgcaggtaattgttgacttttttaactatattaagtgttaagctgacaactgtcaaagaagaccatgttgtaaaataatttgactaaataaatggttccttctctcagtgctgaggacagttttcttatttaccgcccccgttaggtcaaagggttttccctggggaactttcctatttacttcttgcactatcaagaatttttcgaatgtacctactgcagtacagcagaaggtaaaaaatcagtgtggtttttcattgttgttgatgatgtttgtagtgtttttgtgtgtgttatttaaatcttcctccagcctaaaagggttttataaaacagcagctaaggccatggataaacctgtatgtaaggactggagcaaagcgagctggtctatccagactggtctgtgagatttaactctgcagcctcccctgggcacttcagacccagacggccaccttctgccactccagcaaagaataagcgccctgcttccttcaggtctcagaccaggactttatggctcatgcagatttttaaggtcatttttcttcccaaggaagaaacttgcctccagttccttcactgttaggtagcttattttcattttctctattttacaatgaaaagagtgagacctgggaagtccttgatttgcaaggaattagactcacagcattggtaaccctagaaccttcttagggtaacactaagtaccttctagacaacatgtctacctaaatgaaatgggatgtgtttcggaacatttgtctccagtttttttttaatcttgcaccctgccatttaaaaagatgtgtaaagcacatattctcaacatatgcacattgatttataaatcatatatacaaactgttacattattcttcatattagaaaacaaatacaaaatagaacattttaaatggtgatataaaaataaattgaaactgaaattctaaaaaaaaaaaaaaa

SEQ ID NO: 123231 - DNA, 3926 bp, Artificial Sequence
  derived and/or modified sequence
gccactccaggtctggtcacgttcagacccgtgtctgtattcgaacccaaaattggagccgaattgatgagactaatttctagagagggagggggagggagggagacgagtgagctctcgggctcaattgctcctgaagaaataaagaattaataagtcaccttttttcgcctctgtggacacccttttgaaattttttcttccaattgacttggatctcctctggattttttttccctctttcccccgtcggactcttaaataaaagtgagcaagtccaaagcgtggtccggagagcgtggacaaggaggctctgtcggtggtgagcgacgaccagtccctctttgactcagcgtacggagcggcagcccatctccccaaggccgacatgactgcctcggggagtcctgactacgggcagccccacaagatcaaccccctcccaccacagcaggagtggatcaatcagccagtgagggtcaacgtcaagcgggagtatgaccacatgaatggatccagggagtctccggtggactgcagcgttagcaaatgcagcaagctggtgggcggaggcgagtccaaccccatgaactacaacagctatatggacgagaagaatggcccccctcctcccaacatgaccaccaacgagaggagagtcatcgtccccgcagaccccacactgtggacacaggagcatgtgaggcaatggctggagtgggccataaaggagtacagcttgatggagatcgacacatcctttttccagaacatggatggcaaggaactgtgtaaaatgaacaaggaggacttcctccgcgccaccaccctctacaacacggaagtgctgttgtcacacctcagttacctcagggaaagttcactgctggcctataatacaacctcccacaccgaccaatcctcacgattgagtgtcaaagaagacccttcttatgactcagtcagaagaggagcttggggcaataacatgaattctggcctcaacaaaagtcctccccttggaggggcacaaacgatcagtaagaatacagagcaacggccccagccagatccgtatcagatcctgggcccgaccagcagtcgcctagccaaccctggaagcgggcagatccagctgtggcaattcctcctggagctgctctccgacagcgccaacgccagctgtatcacctgggaggggaccaacggggagttcaaaatgacggaccccgatgaggtggccaggcgctggggcgagcggaaaagcaagcccaacatgaattacgacaagctgagccgggccctccgttattactatgataaaaacattatgaccaaagtgcacggcaaaagatatgcttacaaatttgacttccacggcattgcccaggctctgcagccacatccgaccgagtcgtccatgtacaagtacccttctgacatctcctacatgccttcctaccatgcccaccagcagaaggtgaactttgtccctccccatccatcctccatgcctgtcacttcctccagcttctttggagccgcatcacaatactggacctcccccacggggggaatctaccccaaccccaacgtcccccgccatcctaacacccacgtgccttcacacttaggcagctactactagaagcttactcatcagtggccttctagctgaagcccatcctgcacacttactggatgctttggactcaacaggacatatgtggccttgaagggaagacaaaactggatgttctttcttgttggatagaacctttgtatttgttctttaaaaacattttttttaatgttggtaacttttgcttcctctacctgaacaaagagatgaataattccatgggccagtatgccagtttgaattctcagtctcctagcatcttgtgagttgcatattaagattactggaatggttaagtcatggttctgagaaagaagctgtacgttttctttatgtttttatgaccaaagcagtttcttgtcaatacacggggttcagtatgacacagaatcatggacttaacccgtcatgttctggtttgagatttagtgacaaatagaggtgggaagcttataatctaattttaggaggaccaaattcagtggatggcaactggaacattgattgtaaggccagtgaagttttcacccaactggaatttgatggaaagaaggtttgtgtgtttaagacgccaagggcattgcagaatccctctcagtggacagtatgcactcagctgaccactctctctagaaatagtcaagatatgaactaagaaattttaatgcaaatacatacattcctgaaagacggggaattaaattactaatttttttttttttttaaatgatgacagtggtcccagaacttggaaaagttgtagggatttctaaactcaagcagattcgcaagtgctgtgcgcttgtcagaccatcagaccagggccaaccaatcagaaggcaacttactgtataaattatgcagagttattttcctatatctcacagtattaaaaataaataattaaaaattaagaataaataaacgagttgacctcggtcacaaaagcagttttactatcgaatcaatcgctgttattttttttaatgtaatttgtacatcttttttcaatctgtacatttgggctgtctgtatgtttttatagctggtttttaaaaagcataatatgcctatagctgaaaaggaaacagggctgtttaagtcactgacttatgagaaagcaaagcactggtacagttatttaacaggcatacacaagcagggaaaagataatccatttagatctttaatgctttggaaatgcgtgtaacagtactgcaataatcacagctctgggaaaaacaacgaaactttcccttgtggagaggagggattttcctgctctatataagcaacatatttttagacattaaaatatatataattttgcaggtaattgttgacttttttaactatattaagtgttaagctgacaactgtcaaagaagaccatgttgtaaaataatttgactaaataaatggttccttctctcagtgctgaggacagttttcttatttaccgcccccgttaggtcaaagggttttccctggggaactttcctatttacttcttgcactatcaagaatttttcgaatgtacctactgcagtacagcagaaggtaaaaaatcagtgtggtttttcattgttgttgatgatgtttgtagtgtttttgtgtgtgttatttaaatcttcctccagcctaaaagggttttataaaacagcagctaaggccatggataaacctgtatgtaaggactggagcaaagcgagctggtctatccagactggtctgtgagatttaactctgcagcctcccctgggcacttcagacccagacggccaccttctgccactccagcaaagaataagcgccctgcttccttcaggtctcagaccaggactttatggctcatgcagatttttaaggtcatttttcttcccaaggaagaaacttgcctccagttccttcactgttaggtagcttattttcattttctctattttacaatgaaaagagtgagacctgggaagtccttgatttgcaaggaattagactcacagcattggtaaccctagaaccttcttagggtaacactaagtaccttctagacaacatgtctacctaaatgaaatgggatgtgtttcggaacatttgtctccagtttttttttaatcttgcaccctgccatttaaaaagatgtgtaaagcacatattctcaacatatgcacattgatttataaatcatatatacaaactgttacattattcttcatattagaaaacaaatacaaaatagaacattttaaatggtgatataaaaataaattgaaactgaaattct

SEQ ID NO: 123232 - DNA, 3051 bp, Artificial Sequence
  derived and/or modified sequence
aggacttcctccccgattcgcaaagtgaagtcacttcccaaaattagctgaaaaaaaagtttcatccggttaactgtctctttcgctccgctacaacaacaaacgtgcacaggggagtgagggcagggcgctcgcagggggcacgcagggagggcccagggcgccagggaggccgcgccgggctaatccgaaggggctgcgaggtcaggctgtaaccgggtcaatgtgtggaatattggggggctcggctgcagacttggccaaatggacgggactattaaggaggctctgtcggtggtgagcgacgaccagtccctctttgactcagcgtacggagcggcagcccatctccccaaggccgacatgactgcctcggggagtcctgactacgggcagccccacaagatcaaccccctcccaccacagcaggagtggatcaatcagccagtgagggtcaacgtcaagcgggagtatgaccacatgaatggatccagggagtctccggtggactgcagcgttagcaaatgcagcaagctggtgggcggaggcgagtccaaccccatgaactacaacagctatatggacgagaagaatggcccccctcctcccaacatgaccaccaacgagaggagagtcatcgtccccgcagaccccacactgtggacacaggagcatgtgaggcaatggctggagtgggccataaaggagtacagcttgatggagatcgacacatcctttttccagaacatggatggcaaggaactgtgtaaaatgaacaaggaggacttcctccgcgccaccaccctctacaacacggaagtgctgttgtcacacctcagttacctcagggaaagttcactgctggcctataatacaacctcccacaccgaccaatcctcacgattgagtgtcaaagaagacccttcttatgactcagtcagaagaggagcttggggcaataacatgaattctggcctcaacaaaagtcctccccttggaggggcacaaacgatcagtaagaatacagagcaacggccccagccagatccgtatcagatcctgggcccgaccagcagtcgcctagccaaccctggaagcgggcagatccagctgtggcaattcctcctggagctgctctccgacagcgccaacgccagctgtatcacctgggaggggaccaacggggagttcaaaatgacggaccccgatgaggtggccaggcgctggggcgagcggaaaagcaagcccaacatgaattacgacaagctgagccgggccctccgttattactatgataaaaacattatgaccaaagtgcacggcaaaagatatgcttacaaatttgacttccacggcattgcccaggctctgcagccacatccgaccgagtcgtccatgtacaagtacccttctgacatctcctacatgccttcctaccatgcccaccagcagaaggtgaactttgtccctccccatccatcctccatgcctgtcacttcctccagcttctttggagccgcatcacaatactggacctcccccacggggggaatctaccccaaccccaacgtcccccgccatcctaacacccacgtgccttcacacttaggcagctactactagaagcttactcatcagtggccttctagctgaagcccatcctgcacacttactggatgctttggactcaacaggacatatgtggccttgaagggaagacaaaactggatgttctttcttgttggatagaacctttgtatttgttctttaaaaacattttttttaatgttggtaacttttgcttcctctacctgaacaaagagatgaataattccatgggccagtatgccagtttgaattctcagtctcctagcatcttgtgagttgcatattaagattactggaatggttaagtcatggttctgagaaagaagctgtacgttttctttatgtttttatgaccaaagcagtttcttgtcaatacacggggttcagtatgacacagaatcatggacttaacccgtcatgttctggtttgagatttagtgacaaatagaggtgggaagcttataatctaattttaggaggaccaaattcagtggatggcaactggaacattgattgtaaggccagtgaagttttcacccaactggaatttgatggaaagaaggtttgtgtgtttaagacgccaagggcattgcagaatccctctcagtggacagtatgcactcagctgaccactctctctagaaatagtcaagatatgaactaagaaattttaatgcaaatacatacattcctgaaagacggggaattaaattactaatttttttttttttttaaatgatgacagtggtcccagaacttggaaaagttgtagggatttctaaactcaagcagattcgcaagtgctgtgcgcttgtcagaccatcagaccagggccaaccaatcagaaggcaacttactgtataaattatgcagagttattttcctatatctcacagtattaaaaataaataattaaaaattaagaataaataaacgagttgacctcggtcacaaaagcagttttactatcgaatcaatcgctgttattttttttaatgtaatttgtacatcttttttcaatctgtacatttgggctgtctgtatgtttttatagctggtttttaaaaagcataatatgcctatagctgaaaaggaaacagggctgtttaagtcactgacttatgagaaagcaaagcactggtacagttatttaacaggcatacacaagcagggaaaagataatccatttagatctttaatgctttggaaatgcgtgtaacagtactgcaataatcacagctctgggaaaaacaacgaaactttcccttgtggagaggagggattttcctgctctatataagcaacatatttttagacattaaaatatatataattttgcaggtaattgttgacttttttaactatattaagtgttaagctgacaactgtcaaagaagaccatgttgtaaaataatttgactaaataaatggttccttctctca

SEQ ID NO: 123233 - DNA, 1359 bp, Artificial Sequence
  derived and/or modified sequence
atggacgggacaatcaaagaggccctgtctgttgtgtctgatgatcaatcgctattcgacagtgcctatggcgcggccgcccacctgccaaaggccgacatgaccgctagcggttcacctgactatggccaaccccataaaatcaacccactccctccgcagcaagagtggataaatcagccagtccgcgtcaacgtaaaacgggaatacgatcacatgaatgggagcagggagagtcccgtcgattgctcagtgtccaaatgcagcaagcttgtcggggggggggagtctaacccgatgaactacaactcttatatggacgaaaaaaatggacctcctcctcctaatatgaccaccaacgagcggcgtgtgattgtgcccgcagatccaacactttggactcaggagcacgtccgtcagtggctagaatgggctattaaggagtactcactcatggagattgacacatcctttttccagaacatggacgggaaagagctgtgcaagatgaataaggaggacttcctccgcgctaccaccttgtacaacacggaggtgctcctgagccatctgtcctacctccgggagtccagtctgctggcctacaataccacctcccatacagaccaaagtagccgtctgtccgttaaagaagacccaagctacgatagcgttagaaggggggcgtggggcaacaacatgaatagcgggttaaacaaatcacccccgctcggtggcgcccagaccatttcaaaaaatactgagcagaggccgcagcccgacccctatcagatcctcggacccacatctagcaggttggccaatcccggttcaggtcagatccagctgtggcagttcctgctggaacttttgagtgattcggctaacgccagttgcattacatgggaagggactaatggggaattcaaaatgactgaccccgatgaagtggcacgccgatggggcgaacggaagtcaaaacctaatatgaattatgataagctgagccgagcactgaggtactactatgacaagaatatcatgactaaggtccacggcaaacggtacgcatacaaatttgatttccacgggatagcgcaagcattacagccacacccaacagaatctagcatgtacaagtatccaagcgatattagctatatgcccagttaccacgcccaccagcagaaggtcaattttgtgcccccccacccctcgtctatgcctgtgacaagctcctcctttttcggggctgccagccagtactggacctcacccaccggagggatctaccctaatccaaacgtgccacggcaccctaacacccatgtaccatcccatcttggtagctattactag

SEQ ID NO: 123234 - DNA, 1359 bp, Artificial Sequence
  derived and/or modified sequence
atggatggcaccatcaaggaggccctgtctgtggtgtctgatgaccagagcctgtttgattctgcctatggagctgctgcccacctgcccaaggctgacatgacagccagcggcagcccagactatggccagccccacaagatcaaccccctgcccccccagcaggagtggatcaaccagcctgtgcgggtgaatgtgaagcgggagtatgaccacatgaatggcagccgggagagccctgtggactgcagcgtgtccaagtgcagcaagctggtgggcggcggggagagcaaccccatgaactacaacagctacatggatgagaagaatggccccccaccacccaacatgaccaccaatgaaagaagagtgattgtgcctgctgaccccaccctgtggacccaggagcacgtgcggcagtggctggagtgggccatcaaggagtacagcctgatggagattgacaccagcttcttccagaacatggatggcaaggagctgtgcaagatgaacaaggaggacttcctgcgggccaccaccctgtacaacacagaggtgctgctgagccacctgagctacctgcgggagagcagcctgctggcctacaacaccaccagccacacagaccagagcagccggctgtctgtgaaggaggaccccagctatgacagcgtgcggcggggggcctggggcaacaacatgaacagcggcctgaacaagagcccccccctgggcggggcccagaccatcagcaagaacacagagcagaggccccagcctgacccctaccagatcctgggccccaccagcagccggctggccaaccctggcagcggccagatccagctgtggcagttcctgctggagctgctgagtgacagcgccaatgccagctgcatcacctgggagggcaccaacggggagttcaagatgacagatcctgatgaggtggcccggcgctggggcgagaggaagagcaagcccaacatgaactatgacaagctgagccgggccctgcgctactactatgacaagaacatcatgaccaaggtgcacggcaagagatatgcctacaagtttgacttccatggaattgcccaggccctgcagccccaccccacagagagctccatgtacaagtaccccagcgacatctcctacatgcccagctaccacgcccaccagcagaaggtgaactttgtgcccccccaccccagctccatgcctgtgaccagcagcagcttcttcggggccgccagccagtactggaccagccccactggaggcatctaccccaaccccaacgtgcccaggcaccccaacacccacgtgcccagccacctgggcagctactactag

SEQ ID NO: 123235 - DNA, 1359 bp, Artificial Sequence
  derived and/or modified sequence
atggacggcaccatcaaggaggccctgagcgtggtgagcgacgaccagagcctgtttgacagcgcctacggtgccgcggcgcacttgccaaaagctgatatgacggcaagcggcagtcctgactacggccaacctcataagataaacccgctgcccccccagcaagagtggataaatcagccggtcagggtgaacgtgaagagggagtatgatcacatgaatggatctcgcgagagccctgtcgattgttcggtgagtaagtgcagtaagcttgtagggggcggagaatccaacccaatgaattacaacagctatatggatgagaaaaacgggcctccccccccaaacatgaccaccaacgagaggagggtgattgtgcccgccgacccaaccctttggactcaagaacatgtgcgtcagtggcttgagtgggccataaaggagtactcacttatggaaatagatacaagtttcttccagaacatggacggaaaagagctgtgcaagatgaataaagaagactttcttagagcaaccacgctgtataacacagaagtgttgctttctcacttgagctacttgagggaaagctccttgctagcctacaacacaacttcccataccgaccaatcttctcgactgtcggttaaagaggaccctagctacgactctgttcgaaggggcgcttgggggaacaacatgaactctgggttgaataaatcccctcccctgggtggagcacagacaatcagcaaaaacaccgagcagcggccccaaccagacccttaccaaatcctgggccctaccagtagtaggctggcgaaccccgggtctgggcaaattcaactttggcagtttttactcgagctactcagcgacagtgccaatgcgagttgtattacgtgggaagggacgaacggagagttcaagatgaccgaccccgacgaggtcgctcgcaggtggggcgagagaaaatcgaagcccaacatgaactacgacaagctctctagggccttaaggtactactatgacaaaaatatcatgactaaggtgcacgggaaacggtatgcttacaaattcgatttccacgggattgctcaagcgctgcaaccgcaccccacggaatccagcatgtacaagtatccgtccgatatctcttacatgccatcataccatgcgcatcagcaaaaggtcaacttcgtgcctcctcatccatcttcaatgcccgttaccagtagctcttttttcggagctgcctcacaatattggacaagccccactggcggaatatatcctaatcctaacgtgccacgccaccccaatactcacgtaccttcacacttaggcagttactactag

SEQ ID NO: 123236 - DNA, 1359 bp, Artificial Sequence
  derived and/or modified sequence
atggacggcacaatcaaggaagctctgagtgttgtgtccgacgatcagagtctgtttgatagcgcgtatggggctgccgcacatcttcccaaggctgacatgactgccagtggcagccccgactatgggcagcctcacaaaatcaatccgctgccacctcagcaggagtggatcaaccagcctgttcgcgtgaacgtgaaacgtgaatatgaccacatgaacgggtcaagggaatcccccgttgattgctccgtgtctaagtgttccaagctggtggggggaggcgagtccaacccaatgaattacaattcttacatggacgagaaaaacggcccacctcctcccaacatgacaacaaacgagcgacgggtgatcgtgcctgcggaccctaccttatggacacaggagcacgtacggcagtggctcgagtgggctatcaaagagtactccctgatggagattgatacaagtttttttcagaatatggacggaaaggagctgtgtaagatgaataaagaagactttttacgcgcaacgacactgtataacacagaagttctgctctcccacctctcctatctacgagagtcctctttattggcgtacaatactacctcgcataccgaccaaagctcgcgcctatctgtcaaggaagatcctagctacgattccgtgagaagaggtgcctggggcaacaacatgaacagtgggctgaataaatctcctcctctgggtggggctcagaccatctccaaaaatacagaacaaagacctcagcccgatccctatcagatcctcggtcctaccagttcaagactcgcgaatccaggtagcggccagattcagctttggcagttcctgcttgagctgctcagcgactctgcaaacgcatcgtgcattacttgggaaggtaccaatggggagttcaaaatgacagaccccgatgaggtggccagacgctggggtgagcgtaaaagtaaaccgaacatgaattacgacaaactgtccagagcgttgcgatactactatgataagaacatcatgaccaaggttcacggaaagcgctatgcctataaattcgacttccatgggattgcacaggcactgcaacctcaccctactgagtcctcaatgtacaagtatccaagcgatatttcgtatatgcctagttatcacgctcaccagcagaaggtgaacttcgtccctccccacccttcttcaatgcctgtcacatctagttctttctttggggctgccagtcagtattggacatccccaacaggaggtatatatccaaatccaaatgttcctcgccaccctaatactcatgtcccgtcccacctggggtcttattattag

SEQ ID NO: 123237 - DNA, 1359 bp, Artificial Sequence
  derived and/or modified sequence
atggacggcaccatcaaggaggccctgagcgtggtgagcgacgaccagagcctgttcgacagcgcctacggcgccgccgcccacctgcccaaggccgacatgaccgccagcggcagccccgactacggccagccccacaagatcaaccccctgcccccccagcaggagtggatcaaccagcccgtgagagtgaacgtgaagagagagtacgaccacatgaacggcagcagagagagccccgtggactgcagcgtgagcaagtgcagcaagctggtgggcggcggcgagagcaaccccatgaactacaacagctacatggacgagaagaacggcccccccccccccaacatgaccaccaacgagagaagagtgatcgtgcccgccgaccccaccctgtggacccaggagcacgtgagacagtggctggagtgggccatcaaggagtacagcctgatggagatcgacaccagcttcttccagaacatggacggcaaggagctgtgcaagatgaacaaggaggacttcctgagagccaccaccctgtacaacaccgaggtgctgctgagccacctgagctacctgagagagagcagcctgctggcctacaacaccaccagccacaccgaccagagcagcagactgagcgtgaaggaggaccccagctacgacagcgtgagaagaggcgcctggggcaacaacatgaacagcggcctgaacaagagcccccccctgggcggcgcccagaccatcagcaagaacaccgagcagagaccccagcccgacccctaccagatcctgggccccaccagcagcagactggccaaccccggcagcggccagatccagctgtggcagttcctgctggagctgctgagcgacagcgccaacgccagctgcatcacctgggagggcaccaacggcgagttcaagatgaccgaccccgacgaggtggccagaagatggggcgagagaaagagcaagcccaacatgaactacgacaagctgagcagagccctgagatactactacgacaagaacatcatgaccaaggtgcacggcaagagatacgcctacaagttcgacttccacggcatcgcccaggccctgcagccccaccccaccgagagcagcatgtacaagtaccccagcgacatcagctacatgcccagctaccacgcccaccagcagaaggtgaacttcgtgcccccccaccccagcagcatgcccgtgaccagcagcagcttcttcggcgccgccagccagtactggaccagccccaccggcggcatctaccccaaccccaacgtgcccagacaccccaacacccacgtgcccagccacctgggcagctactactag

SEQ ID NO: 123238 - protein, 1269 aa, Artificial Sequence
  derived and/or modified sequence
MEATGVLPFVRGVDLSGNDFKGGYFPENVKAMTSLRWLKLNRTGLCYLPEELAALQKLEHLSVSHNNLTTLHGELSSLPSLRAIVARANSLKNSGVPDDIFKLDDLSVLDLSHNQLTECPRELENAKNMLVLNLSHNSIDTIPNQLFINLTDLLYLDLSENRLESLPPQMRRLVHLQTLVLNGNPLLHAQLRQLPAMTALQTLHLRSTQRTQSNLPTSLEGLSNLADVDLSCNDLTRVPECLYTLPSLRRLNLSSNQITELSLCIDQWVHVETLNLSRNQLTSLPSAICKLSKLKKLYLNSNKLDFDGLPSGIGKLTNLEEFMAANNNLELVPESLCRCPKLRKLVLNKNHLVTLPEAIHFLTEIEVLDVRENPNLVMPPKPADRAAEWYNIDFSLQNQLRLAGASPATVAAAAAAGSGPKDPMARKMRLRRRKDSAQDDQAKQVLKGMSDVAQEKNKKQEESADARAPSGKVRRWDQGLEKPRLDYSEFFTEDVGQLPGLTIWQIENFVPVLVEEAFHGKFYEADCYIVLKTFLDDSGSLNWEIYYWIGGEATLDKKACSAIHAVNLRNYLGAECRTVREEMGDESEEFLQVFDNDISYIEGGTASGFYTVEDTHYVTRMYRVYGKKNIKLEPVPLKGTSLDPRFVFLLDRGLDIYVWRGAQATLSSTTKARLFAEKINKNERKGKAEITLLVQGQELPEFWEALGGEPSEIKKHVPEDFWPPQPKLYKVGLGLGYLELPQINYKLSVEHKQRPKVELMPRMRLLQSLLDTRCVYILDCWSDVFIWLGRKSPRLVRAAALKLGQELCGMLHRPRHATVSRSLEGTEAQVFKAKFKNWDDVLTVDYTRNAEAVLQSPGLSGKVKRDAEKKDQMKADLTALFLPRQPPMSLAEAEQLMEEWNEDLDGMEGFVLEGKKFARLPEEEFGHFYTQDCYVFLCRYWVPVEYEEEEKKEDKEEKAEGKEGEEATAEAEEKQPEEDFQCIVYFWQGREASNMGWLTFTFSLQKKFESLFPGKLEVVRMTQQQENPKFLSHFKRKFIIHRGKRKAVQGAQQPSLYQIRTNGSALCTRCIQINTDSSLLNSEFCFILKVPFESEDNQGIVYAWVGRASDPDEAKLAEDILNTMFDTSYSKQVINEGEEPENFFWVGIGAQKPYDDDAEYMKHTRLFRCSNEKGYFAVTEKCSDFCQDDLADDDIMLLDNGQEVYMWVGTQTSQVEIKLSLKACQVYIQHMRSKEHERPRRLRLVRKGNEQHAFTRCFHAWSAFCKALA

SEQ ID NO: 123239 - DNA, 4164 bp, Artificial Sequence
  derived and/or modified sequence
cctcgccccggcgctccctagcccggcgcggcccggcagcgagagcggcgccatggaggccaccggggtgctgccgttcgtgcgtggcgtggacctcagcggcaacgacttcaagggcggctacttccctgagaatgtcaaggccatgaccagcctgcggtggctgaagctgaaccgcactggcctctgctacctgcccgaggagctggccgccctgcagaagctggaacacttgtctgtgagccacaacaacctgaccacgcttcatggggagctgtccagcctgccatcgctgcgcgccatcgtggcccgagccaacagtctgaagaattccggagtccccgatgacatcttcaagctagatgatctctcagtcctggacttgagccacaaccagctgacagagtgcccgcgggagctggagaacgccaagaacatgctggtgctgaacctcagccacaacagcatcgacaccatccccaaccagctcttcatcaacctcactgacctactatacctggacctcagcgagaaccgcctggagagcctgcccccgcagatgcgccgcctggtgcacctgcagacgctcgtgctcaatggaaaccccctgctgcatgcacagctccggcagctcccagcgatgacggccctgcagaccctgcacctgcggagcacccagcgcacccagagcaacctgcccaccagcctggagggtctgagcaacctcgcagacgtggatctgtcctgcaatgacctgacacgggtgcccgagtgtctgtacaccctccccagcctgcgccgcctcaacctcagcagcaaccagatcacggagctgtccctgtgcatagaccagtgggtgcacgtggaaactctgaacctgtcccgaaatcagctcacctcactgccctcagccatttgcaagctgagcaagctgaagaagctgtacctgaattccaacaagctggactttgacgggctgccctcaggcattggcaagctcaccaacctggaagagttcatggctgccaacaacaacctggagctggtccctgaaagtctctgcaggtgcccaaagctgaggaaacttgtcctgaacaagaaccacctggtgaccctcccagaagccatccatttcctgacggagatcgaggtcctggatgtgcgggagaaccccaacctggtcatgccgcccaagcccgcagaccgtgccgctgagtggtacaacatcgacttctcgctgcagaaccagctgcggctagcgggtgcctctcctgctaccgtggctgcagctgcagctgcagggagtgggcccaaggaccctatggctcgcaagatgcgactgcggaggcgcaaggattcagcccaggatgaccaggccaagcaggtgctgaagggcatgtcagatgttgcccaggagaagaacaaaaagcaggaggagagcgcagatgcccgggcccccagcgggaaggtgcggcgttgggaccagggcctggagaagccccgccttgactactccgagttcttcacggaggacgtgggccagctgcccggactgaccatctggcagatagagaacttcgtgcctgtgctggtggaggaagccttccacggcaagttctacgaggctgactgctacattgtgctcaagacctttctggatgacagcggctccctcaactgggagatctactactggattggcggggaggccacactcgacaagaaagcttgctctgccatccacgctgtcaacttgcgcaactacctgggtgctgagtgccgcactgtccgggaggagatgggcgatgagagcgaggagttcctgcaggtgtttgacaacgacatctcctacattgagggtggaacagccagtggcttctacactgtggaagacacacactatgtcaccaggatgtatcgtgtgtatgggaaaaagaacatcaagttggagcctgtgcccctcaaggggacctctctggacccaaggtttgttttcctgctggaccgagggctagacatctacgtatggcggggggcccaggccacactgagcagcaccaccaaggccaggctctttgcagagaaaattaacaagaatgagcggaaagggaaggctgagatcacactgctggtgcagggccaggagctcccagagttctgggaggcactgggtggggagccctctgagatcaagaagcacgtgcctgaagacttctggccgccgcagcccaagctgtacaaggtgggcctgggcttgggctacctggagctgccacagatcaactacaagctctccgtggaacataagcagcgtcccaaggtggagctgatgccaagaatgcggctgctgcagagtctgctggacacgcgctgcgtgtacattctggactgttggtccgacgtgttcatctggctcggccgcaagtccccgcgcctggtgcgcgctgccgccctcaagctgggtcaggagctgtgcgggatgctgcaccggccacgccatgccacggtcagccgcagcctcgagggcaccgaggcgcaggtgttcaaggccaagttcaagaattgggacgatgtgttgacggtggactacacacgcaatgcggaggccgtgctgcagagcccgggtctctccgggaaggtgaaacgcgacgccgagaagaaagaccagatgaaggctgacctcactgcgcttttcctgccgcggcagccgcccatgtcgctggccgaggcggagcagctgatggaggagtggaacgaagacctagacggcatggagggtttcgtgctggagggcaagaagtttgcgcggctgccggaagaggagtttggccacttctacacgcaggactgctacgtcttcctctgcaggtactgggtgcctgtggagtacgaggaggaggaaaagaaggaagacaaggaggagaaggccgagggcaaagaaggcgaggaagcaaccgctgaggcagaggagaagcagccagaggaggacttccagtgcatcgtgtacttctggcagggccgtgaagcctccaatatgggctggctcaccttcaccttcagcctgcaaaagaagttcgagagcctcttccctgggaagctggaggtggtacgcatgacgcagcagcaggagaaccccaagttcctgtcccatttcaagaggaagttcatcatccaccggggcaagaggaaggcggtccagggcgcccaacagcccagcctctaccagatccgcaccaacggcagcgccctctgcacccggtgcatccagatcaacaccgactccagcctcctcaactccgagttctgcttcatcctcaaggttccctttgagagtgaggacaaccagggcatcgtgtatgcctgggtgggccgggcatcagaccctgacgaagccaagttggcagaagacatcctgaacaccatgtttgacacctcctacagcaagcaggttatcaacgaaggtgaggagcctgagaacttcttctgggtgggcattggggcacagaagccctatgatgacgatgccgagtacatgaaacacacacgtctcttccggtgctccaacgagaagggctactttgcagtgactgagaaatgctccgacttttgccaagatgacctggcagatgatgacatcatgttgctagacaatggccaagaggtctacatgtgggtggggacccagactagccaggtggagatcaagctgagcctgaaggcctgccaggtatatatccagcacatgcggtccaaggaacatgagcggccgcgccggctgcgcctggtccgcaagggcaatgagcagcacgcctttacccgctgcttccacgcctggagcgccttctgcaaggccctggcctaagacaggctggcacagccccaggcttggtgaggaagaggaaggggcctcatccactgtctgctagcaaagaatgtactcaggtgacaccacctgctccagccacgtccagtgccacagtccccagtagcctcaagcagcaccaatggggatgaccctgacaggtgccctcaggggtctgggaaatccaactctctccacagtgtgagtgcacgtgtgaagccccctcactcttccgctagggataaagcagatgtggatgccctttaagagatattaaatgcttttattttcaatattaaaaa

SEQ ID NO: 123240 - DNA, 3795 bp, Artificial Sequence
  derived and/or modified sequence
ctcgccccggcgctccctagcccggcgcggcccggcagcgagagcggcgccatggaggccaccggggtgctgccgttcgtgcgtggcgtggacctcagcggcaacgacttcaagggcggctacttccctgagaatgtcaaggccatgaccagcctgcggtggctgaagctgaaccgcactggcctctgctacctgcccgaggagctggccgccctgcagaagctggaacacttgtctgtgagccacaacaacctgaccacgcttcatggggagctgtccagcctgccatcgctgcgcgccatcgtggcccgagccaacagtctgaagaattccggagtccccgatgacatcttcaagctagatgatctctcagtcctggacttgagccacaaccagctgacagagtgcccgcgggagctggagaacgccaagaacatgctggtgctgaacctcagccacaacagcatcgacaccatccccaaccagctcttcatcaacctcactgacctactatacctggacctcagcgagaaccgcctggagagcctgcccccgcagatgcgccgcctggtgcacctgcagacgctcgtgctcaatggaaaccccctgctgcatgcacagctccggcagctcccagcgatgacggccctgcagaccctgcacctgcggagcacccagcgcacccagagcaacctgcccaccagcctggagggtctgagcaacctcgcagacgtggatctgtcctgcaatgacctgacacgggtgcccgagtgtctgtacaccctccccagcctgcgccgcctcaacctcagcagcaaccagatcacggagctgtccctgtgcatagaccagtgggtgcacgtggaaactctgaacctgtcccgaaatcagctcacctcactgccctcagccatttgcaagctgagcaagctgaagaagctgtacctgaattccaacaagctggactttgacgggctgccctcaggcattggcaagctcaccaacctggaagagttcatggctgccaacaacaacctggagctggtccctgaaagtctctgcaggtgcccaaagctgaggaaacttgtcctgaacaagaaccacctggtgaccctcccagaagccatccatttcctgacggagatcgaggtcctggatgtgcgggagaaccccaacctggtcatgccgcccaagcccgcagaccgtgccgctgagtggtacaacatcgacttctcgctgcagaaccagctgcggctagcgggtgcctctcctgctaccgtggctgcagctgcagctgcagggagtgggcccaaggaccctatggctcgcaagatgcgactgcggaggcgcaaggattcagcccaggatgaccaggccaagcaggtgctgaagggcatgtcagatgttgcccaggagaagaacaaaaagcaggaggagagcgcagatgcccgggcccccagcgggaaggtgcggcgttgggaccagggcctggagaagccccgccttgactactccgagttcttcacggaggacgtgggccagctgcccggactgaccatctggcagatagagaacttcgtgcctgtgctggtggaggaagccttccacggcaagttctacgaggctgactgctacattgtgctcaagacctttctggatgacagcggctccctcaactgggagatctactactggattggcggggaggccacactcgacaagaaagcttgctctgccatccacgctgtcaacttgcgcaactacctgggtgctgagtgccgcactgtccgggaggagatgggcgatgagagcgaggagttcctgcaggtgtttgacaacgacatctcctacattgagggtggaacagccagtggcttctacactgtggaagacacacactatgtcaccaggatgtatcgtgtgtatgggaaaaagaacatcaagttggagcctgtgcccctcaaggggacctctctggacccaaggtttgttttcctgctggaccgagggctagacatctacgtatggcggggggcccaggccacactgagcagcaccaccaaggccaggctctttgcagagaaaattaacaagaatgagcggaaagggaaggctgagatcacactgctggtgcagggccaggagctcccagagttctgggaggcactgggtggggagccctctgagatcaagaagaattgggacgatgtgttgacggtggactacacacgcaatgcggaggccgtgctgcagagcccgggtctctccgggaaggtgaaacgcgacgccgagaagaaagaccagatgaaggctgacctcactgcgcttttcctgccgcggcagccgcccatgtcgctggccgaggcggagcagctgatggaggagtggaacgaagacctagacggcatggagggtttcgtgctggagggcaagaagtttgcgcggctgccggaagaggagtttggccacttctacacgcaggactgctacgtcttcctctgcaggtactgggtgcctgtggagtacgaggaggaggaaaagaaggaagacaaggaggagaaggccgagggcaaagaaggcgaggaagcaaccgctgaggcagaggagaagcagccagaggaggacttccagtgcatcgtgtacttctggcagggccgtgaagcctccaatatgggctggctcaccttcaccttcagcctgcaaaagaagttcgagagcctcttccctgggaagctggaggtggtacgcatgacgcagcagcaggagaaccccaagttcctgtcccatttcaagaggaagttcatcatccaccggggcaagaggaaggcggtccagggcgcccaacagcccagcctctaccagatccgcaccaacggcagcgccctctgcacccggtgcatccagatcaacaccgactccagcctcctcaactccgagttctgcttcatcctcaaggttccctttgagagtgaggacaaccagggcatcgtgtatgcctgggtgggccgggcatcagaccctgacgaagccaagttggcagaagacatcctgaacaccatgtttgacacctcctacagcaagcaggttatcaacgaaggtgaggagcctgagaacttcttctgggtgggcattggggcacagaagccctatgatgacgatgccgagtacatgaaacacacacgtctcttccggtgctccaacgagaagggctactttgcagtgactgagaaatgctccgacttttgccaagatgacctggcagatgatgacatcatgttgctagacaatggccaagaggtctacatgtgggtggggacccagactagccaggtggagatcaagctgagcctgaaggcctgccaggtatatatccagcacatgcggtccaaggaacatgagcggccgcgccggctgcgcctggtccgcaagggcaatgagcagcacgcctttacccgctgcttccacgcctggagcgccttctgcaaggccctggcctaagacaggctggcacagccccaggcttggtgaggaagaggaaggggcctcatccactgtctgctagcaaagaatgtactcaggtgacaccacctgctccagccacgtccagtgccacagtccccagtagcctcaagcagcaccaatggggatgaccctgacaggtgccctcaggggtctgggaaatccaactctctccacagtgtgagtgcacgtgtgaagccccctcactcttccgctagggataaagcagatgtggatgccctttaagagatattaaatgcttttattttcaatatt

SEQ ID NO: 123241 - DNA, 3810 bp, Artificial Sequence
  derived and/or modified sequence
atggaagctactggcgtattaccttttgtacgaggggtggacctctctggaaacgatttcaaaggcggttacttccccgaaaacgtgaaagctatgactagcctaagatggctaaaactgaaccgaaccggactctgttacctgccggaagaactcgccgctctgcagaagctcgagcacctttcagtgtctcacaataatctgacaaccctgcacggcgaactgtcatccctgccgtccctgagggcgatagtggcgcgggctaactccctgaaaaactcaggggtccctgacgacatattcaaactggatgaccttagtgtgctggacctctcacacaaccagctaaccgagtgcccacgcgaactggaaaatgccaagaatatgctcgtgctgaacctgtcccacaactccatcgataccatcccaaaccagctctttatcaacctcaccgacctactgtacctggatctgtccgaaaacaggctggagtccctccccccccagatgagaaggttggttcacctgcagacactggttctgaatggcaatcctctgctacacgcccagctgaggcagctccccgccatgacagctcttcaaactctccatttgagatctacccagcggacccagagcaatctgcctacatcactggaggggttgtcgaatcttgccgacgtggacctgtcctgcaatgatctgaccagggtgcctgagtgtctatacacgctgccctcactgcgcagactcaatctgtctagcaaccagatcactgaactctcattgtgtatcgaccagtgggttcatgtggaaacgttgaatctctctagaaatcaacttacatcactgccaagcgccatctgtaaactaagcaaactcaaaaaactctatctgaactcaaacaagttggacttcgacggattaccttccgggattggcaagctgacaaaccttgaggagttcatggctgccaataacaacttggaactagtgccagaaagcctctgccgctgccccaaattacggaaattggtgctcaataaaaaccatctggtgacgctccccgaagccattcatttcctcacagagatcgaagtgcttgacgttcgtgaaaacccaaacttggttatgccacctaaaccggcagaccgggccgccgagtggtacaatatcgacttctcattgcagaatcagctccggctggcgggcgcctcgcctgcaactgttgccgccgccgcagctgccggcagtggcccaaaggaccccatggctaggaaaatgaggctgagaagacggaaagactccgcccaggacgatcaggccaagcaagtgttgaaggggatgagcgacgtggcccaggagaaaaataaaaaacaggaggaatctgcagacgcccgcgccccctcaggaaaggtcagaaggtgggatcagggcctggagaagcctcgtttggactatagtgagttctttaccgaggacgtcggtcagcttcctggcctcacaatttggcagattgaaaatttcgtgcccgtgctggttgaagaagcgttccatggcaagttttacgaggccgactgttatatcgtcttgaaaacctttttggacgactccggcagtctgaactgggagatttactactggatcggcggcgaggccacattggataagaaagcttgttctgccatccatgccgtgaacctgaggaattacctgggtgcggagtgccgtactgtgcgcgaggagatgggtgatgagagcgaggagttcctgcaagtcttcgataacgacatttcttacatcgagggaggcaccgcctcaggtttttacactgtggaggacacgcattatgtgactcggatgtatagggtatacggtaagaagaatattaagcttgaaccagttccactgaagggaacatctttagacccgaggtttgtgtttctgttggatcgcggactcgacatttacgtttggaggggcgcccaagcaaccctgtccagcactaccaaggcccgcctgttcgcggagaagatcaataaaaacgagagaaagggaaaggccgaaatcactcttctagttcaaggacaggaactcccggagttctgggaggcactcggtggagagccttccgagataaagaagcacgtacccgaggatttttggccacctcaaccaaaattgtacaaggtaggtctgggcctgggctaccttgaacttccccagatcaactacaaactctcagtcgagcataaacagaggcccaaggtggaattaatgccaagaatgaggctcctccaaagtctgttggacacacgatgcgtatatatcttagactgctggagcgacgtgttcatctggttggggaggaaaagcccacgccttgttcgagcagctgcgctcaagttagggcaggagctatgtggaatgctgcataggcccaggcacgccacagtgtcgcgctctctcgaaggcaccgaagcccaggtttttaaggcaaagtttaagaattgggacgacgtcctgaccgtcgattacacgaggaatgcagaggccgtgctgcaatcccccgggctgtcggggaaggttaaaagagacgctgaaaaaaaggatcagatgaaggcagatttaactgcactgtttctcccacggcaaccgccgatgtcactggcagaggctgagcaactgatggaagaatggaatgaggacttggacgggatggagggttttgtactcgagggcaaaaaatttgcccggctgcctgaagaggagttcggtcacttttacacccaagattgctatgtcttcctgtgccggtactgggtacccgtggagtacgaggaggaagagaaaaaggaggacaaggaggagaaggccgaggggaaggaaggggaggaagccactgccgaggccgaggagaagcagccagaagaggactttcagtgtattgtgtacttctggcagggtagggaggcttctaatatggggtggttaacttttaccttttcactccagaagaagttcgaatccttgtttcccggcaagttggaggttgtacgaatgacccagcaacaggaaaatcccaagtttctttcacatttcaagagaaaattcatcattcacaggggtaagaggaaggccgtacagggcgcccagcagccttcactctaccagatcaggacaaatgggtccgcgctttgcactaggtgcatacagattaacaccgattcgtctctgctcaacagcgagttctgttttattttgaaggtacccttcgaaagtgaagataatcagggcatcgtctacgcctgggttggtagggcaagcgatcccgatgaagcaaagctcgcagaagacattcttaacaccatgtttgacaccagctactccaagcaagttatcaacgaaggcgaagagccagagaatttcttttgggtgggcattggcgcgcaaaaaccttacgacgacgatgcagagtatatgaagcacacgcgattatttaggtgtagtaacgagaagggatattttgccgtgacagagaagtgcagcgacttttgccaggatgatctcgcagatgacgacattatgctactagacaatggtcaggaagtttacatgtgggtgggtacgcagaccagccaggttgagatcaagttgagtctcaaagcatgtcaggtttatattcagcacatgaggtctaaagaacatgagcggccgagaagactccgactcgtgcgaaaagggaacgagcagcatgccttcacacggtgctttcatgcctggtcagccttttgcaaggccctggcatag

SEQ ID NO: 123242 - DNA, 3447 bp, Artificial Sequence
  derived and/or modified sequence
atggaagcgaccggcgtgctgcctttcgttagaggtgttgatctgtcgggcaacgacttcaagggtggatatttcccagagaacgtgaaggcaatgacctccctgcggtggcttaagctgaataggacaggcctgtgttaccttcccgaggagctggccgctttgcagaaactggaacatttgtctgttagccataataacctaaccacccttcacggtgaattgagcagcctcccaagcctccgagccattgtggcaagggcgaactccctgaaaaacagtggagtgcctgacgatattttcaaactggatgatctcagcgtcttggacttgtcccataatcagctgacggagtgtcccagagaattggagaatgcgaagaacatgctggttttgaatctgtctcataattcaatcgacacaataccgaaccagttattcatcaacctgacagacctgctctatctggacctgtccgagaatcggctagagagcttacctccccagatgcggaggttagtacatttacagactctggttctcaacggaaaccctttactccacgcccaactgcgccagcttcctgccatgactgccctgcagacgttgcatctgcgctcgacacagaggacccaaagtaacctgccaacgtccttagaaggcctgagtaatctcgcagacgtcgatctaagttgcaacgatttgacgcgggtgccggagtgtctgtacactcttccctccctgcggaggcttaacctttcatcaaatcagataaccgaactctctctgtgcatagatcagtgggtgcacgttgaaacactcaatctgtccaggaatcagctcacatccctgccctccgccatctgcaaactcagcaaactcaagaagctttatttgaattccaataagttagactttgatgggttgccctcagggattgggaagctgacgaacctggaagagtttatggcagctaacaataatttggagctggtgcccgaaagtctgtgccgctgtcctaaactgcgaaagttggttctgaacaaaaaccacctcgtgaccctcccggaggcaatccacttcctcactgagatcgaggttttggacgtcagggaaaatcccaacctggtgatgcctccaaagcctgccgatagggccgccgagtggtacaacattgactttagtctccaaaatcagctccgcctcgctggcgcttctccggccacagtggctgccgcagcagccgcgggctcagggcccaaagatcctatggccaggaagatgagattacgtcggagaaaagattccgcacaagatgatcaggcaaaacaggtgctcaaaggaatgagtgacgtggcacaggaaaagaataaaaaacaagaggagtctgccgacgcgcgagcccctagcggaaaggtgcgaaggtgggaccaaggactagagaagcctcgcctcgattatagcgagttttttacagaagacgtcggacaactgccagggctgactatctggcagattgagaacttcgtccctgtgctcgtggaagaagcttttcatggcaagttctacgaagctgactgctacatagtgctgaagacatttttagatgacagtggctcactgaactgggagatatactattggatcgggggtgaggccactctggacaaaaaggcttgctccgcaattcacgctgtcaatctgagaaactatctgggagctgagtgccggacagttcgcgaggaaatgggcgacgaaagtgaagagttccttcaggtgtttgacaatgacattagctacatcgagggaggaacagctagcggattctacactgttgaagacacacattatgtgactcggatgtatcgcgtgtacggaaagaaaaacattaagctggagccagtccctctcaagggcaccagcttggatccacgattcgtgttcttactggaccggggactggacatttacgtgtggcggggcgctcaagccaccctgagttcaaccaccaaggcccgtctctttgctgagaagataaacaaaaatgaacgcaaagggaaggctgaaatcaccctactggtccagggacaggaactccctgagttctgggaggcactcggaggcgaacctagtgagattaagaagaattgggatgatgtgctgactgtggattataccagaaatgctgaggccgtccttcagtccccggggctctctggcaaggttaaacgcgacgctgaaaagaaggatcaaatgaaagctgatctcaccgctctgtttttgccccggcagcccccaatgagcttagcagaagccgaacagctgatggaggaatggaacgaggatctggacgggatggagggcttcgtcttggaagggaagaaatttgcccgcttgcccgaggaagaatttggccatttttatactcaggattgctatgtgttcttatgccgttactgggtcccagtggaatacgaggaagaggagaaaaaagaagacaaagaggaaaaggccgagggcaaagaaggtgaagaggccacggcagaagccgaggaaaagcaacccgaagaagattttcagtgtatcgtctacttctggcaaggacgagaagcttcgaatatgggttggttaacctttacttttagccttcaaaaaaagttcgagtctctgttccccggcaaactggaagttgtacgcatgacccagcagcaggaaaaccctaaatttttatcgcacttcaaaagaaaatttatcattcaccgaggcaagagaaaggcagtacaaggcgcccagcagccctcgctctaccagatccgtactaacgggtccgctttgtgcactcgctgcatccagataaatacggactcctctctgcttaattccgaattctgctttatcctaaaagtaccatttgaatctgaggataatcagggaattgtgtatgcctgggtggggagggccagtgatcccgatgaagcaaagctggccgaggacattctgaatactatgtttgatacatcgtactccaaacaagtgatcaacgagggagaggaacccgaaaatttcttttgggtgggcataggagctcagaagccctacgacgacgacgccgaatacatgaagcacacccggctgttcagatgttctaacgaaaaaggatacttcgctgtgacagagaagtgtagtgatttttgccaggatgatctagccgacgacgacatcatgctgctggataatggacaggaggtgtatatgtgggtggggacgcagacatctcaggtagaaatcaaactctccttaaaagcatgccaagtttacattcagcacatgcggtccaaggagcatgaacgccctcggcggctgcgccttgtgcggaagggtaacgaacagcatgcctttacacgctgtttccatgcttggagcgcattttgcaaggctctcgcttag

SEQ ID NO: 123243 - DNA, 3810 bp, Artificial Sequence
  derived and/or modified sequence
atggaggccaccggggtgctgccctttgtgcggggcgtggacctgtctggaaatgacttcaagggcggctacttcccagaaaatgtgaaggccatgaccagcctgcgctggctgaagctgaacagaacaggcctgtgctacctgcctgaggagctggccgccctgcagaagctggagcacctgtctgtgagccacaacaacctgaccaccctgcacggggagctgagcagcctgcccagcctgcgggccatcgtggcccgggccaacagcctgaagaacagcggcgtgcctgatgacatcttcaagctggatgacctgtctgtgctggacctgagccacaaccagctgacagagtgcccccgggagctggagaatgccaagaacatgctggtgctgaacctgagccacaacagcattgacaccatccccaaccagctgttcatcaacctgacagacctgctgtacctggacctgtctgagaaccggctggagagcctgcccccccagatgaggcggctggtgcacctgcagaccctggtgctgaatggaaaccccctgctgcacgcccagctgcggcagctgcctgccatgacagccctgcagaccctgcacctgcggagcacccagaggacccagagcaacctgcccaccagcctggagggcctgagcaacctggctgatgtggacctgagctgcaatgacctgaccagggtgcctgagtgcctgtacaccctgcccagcctgcggcggctgaacctgagcagcaaccagatcacagagctgagcctgtgcatcgaccagtgggtgcacgtggagaccctgaacctgagcaggaaccagctgaccagcctgcccagcgccatctgcaagctgagcaagctgaagaagctgtacctgaacagcaacaagctggactttgatggcctgcccagcggcatcggcaagctgaccaacctggaggagttcatggccgccaacaacaacctggagctggtgcctgagagcctgtgccgctgccccaagctgaggaagctggtgctgaacaagaaccacctggtgaccctgcctgaggccatccacttcctgacagaaattgaggtgctggatgtgcgggagaaccccaacctggtgatgccacccaagccagctgacagagctgctgagtggtacaacatcgacttcagcctgcagaaccagctgcggctggccggggccagccctgccaccgtggccgctgctgctgctgctggcagcggccccaaggaccccatggccaggaagatgaggctgcggcggaggaaggacagcgcccaggatgaccaggccaagcaggtgctgaagggcatgtctgatgtggcccaggagaagaacaagaagcaggaggagagcgcagatgcccgggcccccagcggcaaggtgcggcgctgggaccagggcctggagaagccccggctggactacagcgagttcttcacagaagatgtgggccagctgcccggcctgaccatctggcagattgaaaattttgtgcctgtgctggtggaggaggccttccacggcaagttctatgaagctgactgctacatcgtgctgaagaccttcctggatgacagcggcagcctgaactgggagatctactactggattggaggagaggccaccctggacaagaaggcctgcagcgccatccatgctgtgaacctgaggaactacctgggcgcagaatgtagaacagtgcgggaggagatgggagatgaaagtgaggagttcctgcaggtgtttgacaatgacatctcctacattgaaggaggaacagccagcggcttctacacagtggaggacacccactacgtgaccaggatgtacagagtgtatggcaagaagaacatcaagctggagcctgtgcccctgaagggcaccagcctggaccccaggtttgtgttcctgctggaccggggcctggacatctacgtgtggaggggggcccaggccaccctgagcagcaccaccaaggcccggctgtttgctgagaagatcaacaagaatgaaaggaagggcaaggccgagatcaccctgctggtgcagggccaggagctgcctgagttctgggaggccctgggcggggagcccagcgagatcaagaagcacgtgcctgaggacttctggccaccccagcccaagctgtacaaggtgggcctgggcctgggctacctggagctgccccagatcaactacaagctgtctgtggagcacaagcagaggcccaaggtggagctgatgcccaggatgaggctgctgcagagcctgctggacacccgctgtgtgtacatcctggactgctggagcgatgtgttcatctggctgggcaggaagagcccccggctggtgcgggctgctgccctgaagctgggccaggagctgtgtggcatgctgcaccggcccaggcatgccaccgtgagccgcagcctggagggcacagaggcccaggtgttcaaggccaagttcaagaactgggatgatgtgctgactgtggactacaccagaaatgctgaggccgtgctgcagagccctggcctgagcggcaaggtgaagagagatgctgagaagaaggaccagatgaaggctgacctgacagccctcttcctgccccggcagccccccatgagcctggccgaggccgagcagctgatggaggagtggaatgaagacctggatggcatggagggctttgtgctggagggcaagaagtttgcccggctgcctgaggaggagtttggccacttctacacccaggactgctacgtgttcctgtgccgctactgggtgcctgtggagtatgaggaggaggagaagaaggaggacaaggaggagaaggccgagggcaaggagggggaggaggccacagctgaggccgaggagaagcagcctgaggaggacttccagtgcatcgtgtacttctggcagggccgggaggccagcaacatgggctggctgaccttcaccttcagcctgcagaagaagtttgagagcctcttccctgggaagctggaggtggtgaggatgacccagcagcaggagaaccccaagttcctgagccacttcaagaggaagttcatcatccaccggggcaagaggaaggctgtgcagggcgcccagcagcccagcctgtaccagatccgcaccaacggcagcgccctgtgcacccgctgcatccagatcaacacagacagcagcctgctgaacagcgagttctgcttcatcctgaaggtgccctttgaaagtgaggacaaccagggcatcgtgtatgcctgggtgggccgggccagtgaccctgatgaggccaagctggccgaggacatcctgaacaccatgtttgacaccagctacagcaagcaggtgatcaatgaaggagaggagcctgagaacttcttctgggtgggcatcggggcccagaagccctatgatgatgatgctgagtacatgaagcacaccaggctcttccgctgcagcaatgagaagggctactttgctgtgacagagaagtgcagcgacttctgccaggatgacctggctgatgatgacatcatgctgctggacaatggccaggaggtgtacatgtgggtgggcacccagaccagccaggtggagatcaagctgagcctgaaggcctgccaggtgtacatccagcacatgaggagcaaggagcacgagcggccccggcggctgcggctggtgaggaaaggaaatgagcagcacgccttcacccgctgcttccacgcctggagcgccttctgcaaggccctggcctag

SEQ ID NO: 123244 - DNA, 3447 bp, Artificial Sequence
  derived and/or modified sequence
atggaggccaccggggtgctgccctttgtgcggggcgtggacctgtctggaaatgacttcaagggcggctacttcccagaaaatgtgaaggccatgaccagcctgcgctggctgaagctgaacagaacaggcctgtgctacctgcctgaggagctggccgccctgcagaagctggagcacctgtctgtgagccacaacaacctgaccaccctgcacggggagctgagcagcctgcccagcctgcgggccatcgtggcccgggccaacagcctgaagaacagcggcgtgcctgatgacatcttcaagctggatgacctgtctgtgctggacctgagccacaaccagctgacagagtgcccccgggagctggagaatgccaagaacatgctggtgctgaacctgagccacaacagcattgacaccatccccaaccagctgttcatcaacctgacagacctgctgtacctggacctgtctgagaaccggctggagagcctgcccccccagatgaggcggctggtgcacctgcagaccctggtgctgaatggaaaccccctgctgcacgcccagctgcggcagctgcctgccatgacagccctgcagaccctgcacctgcggagcacccagaggacccagagcaacctgcccaccagcctggagggcctgagcaacctggctgatgtggacctgagctgcaatgacctgaccagggtgcctgagtgcctgtacaccctgcccagcctgcggcggctgaacctgagcagcaaccagatcacagagctgagcctgtgcatcgaccagtgggtgcacgtggagaccctgaacctgagcaggaaccagctgaccagcctgcccagcgccatctgcaagctgagcaagctgaagaagctgtacctgaacagcaacaagctggactttgatggcctgcccagcggcatcggcaagctgaccaacctggaggagttcatggccgccaacaacaacctggagctggtgcctgagagcctgtgccgctgccccaagctgaggaagctggtgctgaacaagaaccacctggtgaccctgcctgaggccatccacttcctgacagaaattgaggtgctggatgtgcgggagaaccccaacctggtgatgccacccaagccagctgacagagctgctgagtggtacaacatcgacttcagcctgcagaaccagctgcggctggccggggccagccctgccaccgtggccgctgctgctgctgctggcagcggccccaaggaccccatggccaggaagatgaggctgcggcggaggaaggacagcgcccaggatgaccaggccaagcaggtgctgaagggcatgtctgatgtggcccaggagaagaacaagaagcaggaggagagcgcagatgcccgggcccccagcggcaaggtgcggcgctgggaccagggcctggagaagccccggctggactacagcgagttcttcacagaagatgtgggccagctgcccggcctgaccatctggcagattgaaaattttgtgcctgtgctggtggaggaggccttccacggcaagttctatgaagctgactgctacatcgtgctgaagaccttcctggatgacagcggcagcctgaactgggagatctactactggattggaggagaggccaccctggacaagaaggcctgcagcgccatccatgctgtgaacctgaggaactacctgggcgcagaatgtagaacagtgcgggaggagatgggagatgaaagtgaggagttcctgcaggtgtttgacaatgacatctcctacattgaaggaggaacagccagcggcttctacacagtggaggacacccactacgtgaccaggatgtacagagtgtatggcaagaagaacatcaagctggagcctgtgcccctgaagggcaccagcctggaccccaggtttgtgttcctgctggaccggggcctggacatctacgtgtggaggggggcccaggccaccctgagcagcaccaccaaggcccggctgtttgctgagaagatcaacaagaatgaaaggaagggcaaggccgagatcaccctgctggtgcagggccaggagctgcctgagttctgggaggccctgggcggggagcccagcgagatcaagaagaactgggatgatgtgctgactgtggactacaccagaaatgctgaggccgtgctgcagagccctggcctgagcggcaaggtgaagagagatgctgagaagaaggaccagatgaaggctgacctgacagccctcttcctgccccggcagccccccatgagcctggccgaggccgagcagctgatggaggagtggaatgaagacctggatggcatggagggctttgtgctggagggcaagaagtttgcccggctgcctgaggaggagtttggccacttctacacccaggactgctacgtgttcctgtgccgctactgggtgcctgtggagtatgaggaggaggagaagaaggaggacaaggaggagaaggccgagggcaaggagggggaggaggccacagctgaggccgaggagaagcagcctgaggaggacttccagtgcatcgtgtacttctggcagggccgggaggccagcaacatgggctggctgaccttcaccttcagcctgcagaagaagtttgagagcctcttccctgggaagctggaggtggtgaggatgacccagcagcaggagaaccccaagttcctgagccacttcaagaggaagttcatcatccaccggggcaagaggaaggctgtgcagggcgcccagcagcccagcctgtaccagatccgcaccaatggaagtgccctgtgcacccgctgcatccagatcaacacagacagcagcctgctgaacagcgagttctgcttcatcctgaaggtgccctttgaaagtgaggacaaccagggcatcgtgtatgcctgggtgggccgggccagtgaccctgatgaggccaagctggccgaggacatcctgaacaccatgtttgacaccagctacagcaagcaggtgatcaatgaaggagaggagcctgagaacttcttctgggtgggcattggagcccagaagccctatgatgatgatgctgagtacatgaagcacaccaggctcttccgctgcagcaatgagaagggctactttgctgtgacagagaagtgcagcgacttctgccaggatgacctggctgatgatgacatcatgctgctggacaatggccaggaggtgtacatgtgggtgggcacccagaccagccaggtggagatcaagctgagcctgaaggcctgccaggtgtacatccagcacatgaggagcaaggagcacgagcggccccggcggctgcggctggtgaggaaaggaaatgagcagcacgccttcacccgctgcttccacgcctggagcgccttctgcaaggccctggcctag

SEQ ID NO: 123245 - DNA, 3810 bp, Artificial Sequence
  derived and/or modified sequence
atggaggccaccggcgtgctgcccttcgtgcggggcgtggacctgtcagggaatgatttcaagggaggttattttcccgagaacgtgaaggctatgactagcctccgctggcttaaattgaacagaaccggcctgtgctatcttcctgaggaactggcggccctgcagaagctcgagcacctttctgtctcgcataacaatttaaccaccttgcatggagagctctccagcctgcctagcctgcgcgccatcgtagcaagagctaattcccttaagaacagcggcgtgcccgacgatatcttcaaactggatgacttgagcgttttagacctttctcacaatcagcttaccgaatgtcctcgtgaactcgagaatgccaagaatatgctggtactgaacctgtctcataattctatcgacaccattccaaaccaactttttattaacctgactgacttgctctatctcgacctgtccgagaataggctggagtccctgcccccacagatgaggcgcctggtccatttgcagacactggtgctcaatggaaatcctttgctccatgcccaattaaggcaacttccagctatgacagcattacagaccctccaccttaggtccacacaaagaactcagtctaatctacccacgtctctggagggattgtccaaccttgcagacgttgacctgtcttgcaacgatctgaccagagttccggagtgcctctacactcttccatcactccggcgtctgaacctctctagtaaccagattactgaactttcactgtgtatcgatcaatgggtgcacgtcgagaccttgaatctgtcccggaaccagctcacttccttgccctccgcaatttgcaaactaagcaagttgaaaaagctttacctcaattccaataaactcgacttcgacggcctacccagcggcatcggtaagctgactaatttagaggagtttatggccgcaaacaataatctagagctggtcccggagtccctttgcaggtgtccaaagctccgcaagctggtcttaaacaaaaaccacctcgtgactcttcctgaggccattcatttccttacagaaatagaagttctggatgtgcgcgagaatcctaacttagtgatgccacccaagccagctgatagggcagcggaatggtataatatcgatttctccttgcagaaccagttacgattggctggagcatccccggcaaccgtggccgccgcggccgccgccgggtctggccctaaggacccgatggcccggaaaatgagactccgccgaaggaaagatagcgcccaagacgaccaggctaaacaggtgcttaagggtatgagtgatgtagcgcaagaaaagaataagaaacaggaagaatcggcagatgctcgtgcgccgagcgggaaggtgcgccgatgggatcaggggttggaaaagcctagactggattattctgaattttttactgaggatgtgggtcagctaccagggttaactatttggcagatcgagaacttcgtgccagtgttggtggaagaggccttccatggaaaattctatgaggcagactgctacattgtgttaaaaacatttctcgatgactccggctctcttaactgggagatatattactggattggcggcgaagctaccttggacaagaaggcctgcagcgcaattcacgctgtgaatcttaggaattacctgggggcagagtgccgtaccgttagagaggagatgggcgatgaaagcgaggaattcttgcaggtttttgacaacgacatttcatacattgaaggcggcactgcttccggattttacacagtggaggatacccattacgtgacccgaatgtaccgcgtgtatggtaaaaagaatattaaacttgagcctgtgcctcttaaaggtactagtcttgacccccgcttcgtgttcctgctggaccgcggactggacatttacgtctggagaggagcccaggccaccttgtccagcactacaaaggcccggctattcgctgaaaagatcaacaaaaatgaacggaagggcaaagccgagattacgttgctggtgcaggggcaagagctaccagagttctgggaggcgcttggcggagagccctccgagatcaagaagcatgtcccagaagatttttggcctccccagcctaaactatacaaggttggactgggactaggctatttagagttaccacagattaactacaagctttctgtggagcataagcaacggcctaaagtcgagctcatgccccgtatgcgcctgctgcagtccctgctcgacacccgctgtgtctatatactagattgctggagcgatgtatttatatggcttggaaggaagagccccaggcttgttagagccgccgctctgaaactcggccaggagctctgcggtatgttacaccggcctcgccacgccacggtttccaggtcactggaaggcactgaagcgcaagtatttaaggccaaattcaaaaactgggacgatgtgctgaccgttgactacacgagaaacgccgaagcggtcttgcagtcgccaggcctatccggaaaagtaaagcgggatgcagagaaaaaagatcaaatgaaggcagacctgaccgccttattcctgccacgtcaacctcccatgtccctggcagaggccgagcagctgatggaagaatggaatgaggacctggacggtatggagggattcgttttggaaggaaagaagttcgcacgcttacctgaagaggaatttggacacttctacacacaagattgttacgtgtttctttgccggtactgggtcccagtggaatacgaagaagaagagaagaaagaagataaggaggagaaagcagaggggaaggaaggggaagaggccacagctgaggccgaagaaaaacaaccggaggaggacttccagtgtattgtgtacttttggcagggaagggaagcatctaacatggggtggcttacatttacattctcactgcagaagaaattcgagagcctcttcccgggcaaattggaggtagtccgtatgacccaacagcaagagaacccgaagttcctctcccacttcaagaggaaattcattattcacagaggcaagcgaaaagcagtgcagggggcccagcagccttccctttaccagatcaggacaaatggaagtgcactctgcactcggtgtatccagatcaacaccgatagttctctgctcaactcggaattctgcttcattctcaaagttcccttcgaatcagaagataaccagggtatcgtatacgcatgggttggtcgggcaagcgacccagacgaggccaagctcgccgaagatatccttaatacgatgttcgacacctcctactctaaacaggttatcaacgaaggcgaggaacccgagaacttcttctgggtagggatcggagctcagaaaccctatgatgacgacgcggaatacatgaagcatactcggctgtttcgctgttccaatgagaaaggctattttgccgttactgaaaaatgcagcgatttttgtcaagacgatttggcagacgacgatatcatgcttcttgataacggtcaagaagtttatatgtgggtcggcacacagaccagccaggtcgaaattaaactgagcctcaaggcctgccaggtttacattcagcacatgagatctaaggaacacgaaagacctagacggctaaggttggtgcgcaagggaaatgaacagcatgctttcactaggtgtttccatgcctggtctgccttttgcaaagccctagcttag

SEQ ID NO: 123246 - DNA, 3447 bp, Artificial Sequence
  derived and/or modified sequence
atggaggccaccggcgtgctgcccttcgtgcggggcgtggacctgagtggaaatgacttcaaaggcgggtactttccagagaatgtcaaagccatgacctctttacgatggctgaagttgaatagaaccggattatgctatttaccagaggagttagccgcactgcaaaagttggaacatctcagcgtctcacataataatctgaccaccctgcacggtgaactgtcatctttaccttccctgcgagccatcgtggcacgtgccaattctctgaagaattccggagtgcctgatgatatctttaaactggacgatttgagcgtgctcgacctgtcgcacaaccagttgacagagtgtcctcgcgagctggagaacgctaagaatatgttggttttgaatctttcccacaactccatcgataccattcccaatcaactgtttatcaatctgactgatctgctctatctcgacctgagtgaaaaccgccttgaaagcttgccgcctcaaatgcgccgtctcgttcacctgcagaccctggtgttgaatggtaaccctttgttgcacgcacagctgcgacagctgcccgccatgaccgccttgcaaacgcttcaccttcgatccacccagagaacacaatctaaccttccgacatcactggagggcctctcaaatcttgctgacgtggatttaagctgcaatgatctgacacgcgtgcctgagtgtctgtatactctccccagtctgcggcgactcaatctctcgagcaaccaaataactgagctctcgctttgtattgatcagtgggtgcacgttgagaccctgaacctctctcgcaaccaactcacctctctgcccagtgcaatttgtaaacttagcaagctaaaaaaactctacctgaactctaacaagctggacttcgatgggttgccaagtggcatcgggaagttgactaacttggaggagttcatggctgcgaataacaacctggagctagtgcccgaatcactgtgcaggtgcccgaaacttcgtaaactggtgttaaataagaaccatctcgtcaccctccccgaggctatccactttctaaccgagatagaggtcctcgacgtaagggaaaatcctaacctagtcatgcctcccaagccagctgaccgggccgccgaatggtacaacatcgacttcagcttacagaatcagttaagactggctggtgcttcgcccgcaaccgtggcagctgctgctgctgccggtagtggtccaaaagaccccatggcaagaaagatgcgactgcgtcgcagaaaagattccgctcaggatgatcaagctaaacaggtccttaagggcatgagcgatgtcgcacaggagaaaaataagaaacaggaagagagcgcagacgccagagccccaagcggaaaggtgcgaagatgggatcaggggctcgagaagcctcggctggactactctgaattcttcactgaagacgttgggcagttgccaggcttgacaatttggcagattgagaacttcgtgccagttttggttgaagaagcttttcatggcaaattttatgaggccgattgctatattgtcctgaaaacttttctggatgattccggtagtctaaattgggaaatttactattggatcggtggggaagctaccctggataagaaggcttgctcagccatccatgcagttaacctccggaattatttaggggccgaatgcaggactgttagagaggagatgggagacgagtcagaggaatttctgcaggtattcgataatgatatctcatatatcgagggcggaaccgcatcaggcttttataccgtggaagacacccactatgtgaccagaatgtatcgagtctatgggaaaaagaacatcaagctggagcccgtgccactgaaaggcaccagcctggatccaaggtttgtgttccttctcgacaggggactcgacatctacgtgtggaggggggcccaagctaccctgagttcgaccaccaaagctagactcttcgccgaaaaaattaataaaaacgagcggaagggcaaagcagaaattaccctactggtccaggggcaggaactgccagagttctgggaggccttgggaggtgagcccagtgagataaagaaaaattgggacgatgtgctgactgttgactatacaaggaacgccgaggcagttcttcagtcgccgggcctgagcggcaaggtaaaacgagatgccgagaagaaggaccagatgaaggcagacctcaccgcgttatttcttccccggcagccgcctatgtccctggctgaggccgagcagctgatggaggagtggaatgaagacctggatggtatggagggtttcgtcctcgagggaaaaaagtttgctcggctcccggaagaagagttcgggcatttttacacacaggactgctatgtgttcctctgtagatactgggtgcctgtcgaatacgaagaggaagagaagaaggaagacaaagaagagaaagcagaggggaaggaaggagaagaagcaactgcagaggctgaggagaaacagcccgaagaggacttccaatgtattgtgtacttctggcagggtagagaggcaagtaacatgggttggctgacattcacattttccctgcagaagaagttcgagtcgctgtttcccggaaagctggaagtggtgaggatgacacaacagcaggagaacccgaagttcctaagtcatttcaagaggaagtttataattcataggggaaagcggaaggccgtgcaaggtgcacagcaaccatccttgtaccagattagaaccaatggttctgctttgtgtactcggtgtattcagatcaacacagacagttctctgcttaattccgaattctgcttcatcctcaaagtcccttttgagtcagaggataaccagggtatcgtgtacgcctgggtggggcgtgcttcggatccagacgaggctaagctggccgaggacatactgaacacaatgtttgatacatcctactctaagcaggtgatcaacgaaggagaggagccagagaattttttctgggtgggaattggcgctcaaaagccctacgacgacgatgccgagtacatgaagcacactcggctcttcaggtgttcaaacgagaaaggctactttgccgtgactgaaaagtgcagcgacttttgccaagacgacctggccgatgatgacattatgctactcgacaacggccaagaggtttatatgtgggtcggcactcagactagccaagttgaaattaagctttccctgaaagcttgccaggtctatatccagcatatgaggtcaaaggaacacgagcgtccacggcggcttcggctcgttcgaaaggggaatgagcagcacgctttcacccggtgcttccacgcttggtccgcgttctgcaaggcgctcgcctag

SEQ ID NO: 123247 - DNA, 3810 bp, Artificial Sequence
  derived and/or modified sequence
atggaggcaacaggcgtgcttcccttcgttagaggcgtggatctgtctggcaatgattttaaggggggatattttccggaaaacgtaaaagccatgacttctttacggtggctgaaactgaatcgaaccgggctgtgttacctgcctgaggagctggcggcactgcagaagctggagcacttgagtgtgtcccataataatctgactacactccacggtgagctctcatcgctgccatctctgagagcgattgtggctcgcgctaatagcttgaagaatagcggagtgcccgacgatatattcaagttggacgacctttctgtgctggatctgagccataatcagcttaccgagtgcccaagggaactagagaacgctaagaacatgcttgtcctgaacctgtctcacaattctattgacactatccctaaccagctttttattaacctgacggacttgctctatttagacctgtctgagaatcgactggagagtttgccaccacagatgcggagactggttcacctccagaccttagttctcaatgggaaccctctgctgcatgcccaactgcgccagcttcccgcaatgaccgctttgcagactctccatttgcgctctacgcagagaactcagagcaacctccccaccagcctggagggactgagtaacctggccgacgtggaccttagctgtaatgatctgacacgtgtcccagagtgtctgtacactttgccttcacttaggaggctcaatctaagttctaaccagattaccgaactgtcactctgtattgaccagtgggtacacgtggaaaccctaaacctgtctaggaaccagctcaccagtctcccctcagccatatgcaagctcagtaaacttaaaaaactctatctcaattccaacaagctggatttcgatggtctgccatctggaatcggcaaactgactaatcttgaagagttcatggcggctaataacaatcttgagttggttcctgaaagcctgtgccggtgtcccaaattgcggaagctggtgttaaacaagaatcacctggttacgctgcctgaggccatccattttttgaccgagatagaggtgctcgacgtccgcgaaaatcctaaccttgttatgcctccaaaacccgctgaccgggcagccgaatggtacaatatcgacttctctctgcagaaccagcttcgtctggcgggagccagccctgccacagtcgcggcagctgccgctgcaggctccggccctaaggatcccatggccagaaaaatgcgtctgcggagaaggaaagactcagcccaggacgaccaggcaaaacaggtcctgaaggggatgagcgatgtggctcaggagaagaacaaaaaacaagaagaaagcgcagatgcgcgagcgcctagcggcaaagtccgacgctgggatcagggactggagaaacctagactcgactattctgaatttttcacagaagacgttggtcagctacccggtctgaccatctggcaaatcgagaactttgtccccgtgctcgtagaagaggcttttcatggtaagttttacgaagccgattgttacatcgtgctgaaaacattcttagacgactccggcagcttaaactgggagatatattattggattggtggagaggccaccctagacaaaaaagcatgctctgcaattcatgcagtgaacctcaggaattatctaggcgctgaatgccggactgttcgcgaggaaatgggcgatgagagtgaggagttcttgcaagttttcgacaatgatattagctacattgagggtggtaccgcatccggtttttacactgtggaggatacccactacgtgacgcggatgtatcgcgtgtatggaaaaaagaacatcaagcttgagccggtgcctcttaaaggaactagtctggatccacgctttgtgttcttactagaccggggactagatatttacgtgtggcgtggcgctcaggccaccctcagcagtactaccaaagcccgactgtttgctgagaagataaacaaaaatgagcgaaagggtaaagcggagattactctgttggtgcaggggcaggagcttcccgagttttgggaggccctgggaggagagcccagcgaaatcaagaaacacgtgccagaggacttctggccccctcagcccaaattgtataaggttgggcttggccttggctatctagagctgccgcagatcaactacaagcttagcgtcgaacacaagcaacgccctaaggtcgaactcatgccgagaatgcgacttctgcagtcccttctcgataccagatgcgtgtacattctggactgttggtccgatgtgttcatctggctgggaagaaagtctcccaggctggtccgggctgctgccctgaagcttggccaggaactgtgtggcatgctgcacagacctcggcatgctactgtgtcccggtcactagagggcacagaggctcaagtgttcaaggctaagttcaagaattgggacgatgtcctcacggtagattacacccggaacgctgaggccgtgttacagtcccctggcctatccggtaaagtcaagagggatgccgagaaaaaggaccagatgaaggccgatctgactgcactgtttctgccaagacagccaccaatgtcactcgctgaggcagaacagcttatggaggagtggaatgaggatttggacggaatggagggtttcgtgctcgaaggcaaaaaatttgccagactgcccgaggaagagtttggacacttttatactcaggactgttacgttttcctttgccgttactgggtccctgtggagtatgaagaggaggagaaaaaggaggataaggaagaaaaggccgaaggaaaagaaggggaagaagccaccgccgaggccgaggagaaacaacctgaggaggactttcagtgcatcgtctacttttggcaggggcgagaagccagtaacatgggttggctgacctttacattctctttacagaagaagttcgagagcctatttcctggcaaactggaagtggttcgtatgacgcagcagcaagaaaatccaaaattcctgtcccattttaagagaaagttcatcatccaccggggtaagaggaaagccgttcagggtgcacaacaaccctccctgtaccagattagaaccaacggctctgccttgtgtactagatgtatacagataaacactgactccagcctgctgaactctgaattttgtttcattctcaaggtgccctttgaaagcgaggacaatcagggcattgtgtatgcctgggtcgggagggcctcagaccctgatgaagctaagctggcggaggatatattaaacacgatgttcgacacttcctacagcaagcaggtcatcaacgagggcgaggagcccgagaacttcttttgggtcgggatcggcgctcagaaaccctacgatgacgatgccgaatacatgaagcacacccgcctgttcagatgctccaacgagaagggttactttgcagtgactgaaaagtgctccgatttctgccaagatgacctggcagacgacgacataatgctgttggataatggccaagaagtgtacatgtgggtggggacgcagacttcccaggtcgagataaaactctcattgaaggcatgccaggtgtacatccagcacatgcggtcaaaagaacacgagcgtcccaggaggctccgtttggttcgtaaggggaatgagcaacatgcatttacaaggtgctttcatgcttggtccgcgttctgtaaggcattagcttag

SEQ ID NO: 123248 - DNA, 3447 bp, Artificial Sequence
  derived and/or modified sequence
atggaagcaacaggtgtgttgcctttcgtgaggggcgtggacttgagtgggaatgactttaaaggcggatattttcctgaaaatgtgaaagctatgacgtcactccggtggctcaagctgaatagaacgggtctctgctatctgccagaagagctggcagccctgcaaaaactggagcatttgtctgtcagccataataaccttacgacgctccatggagaattgtcatctctgccgtccctcagagctattgtggcgagagccaactccctgaaaaacagtggcgttcctgatgacatctttaagctggatgacctgtctgtgcttgacttgtcgcataaccagctgacagaatgcccgagagagttggagaatgctaagaatatgctagtgctaaatctaagtcacaacagtatcgacacaatacccaaccagttattcataaacctgacggatctgctctatctggacttgagtgaaaatcgcctagagagcctcccacctcagatgagaagattggtgcacctgcagacactggtgcttaacggcaatcccctcctacatgctcaattgaggcagttgccggctatgactgctctgcaaaccttgcatctgcgcagcacccagcgtactcaatccaacctgccaacctctctggaggggctttcgaatctcgccgacgtggacctgtcatgtaacgacctgacacgcgtgcccgaatgtttgtacacccttcccagtctcaggcggctcaaccttagcagtaaccagatcacagagttgagcctctgtattgatcagtgggtccacgtcgagactctgaatttatcacgcaaccagctcacatctctgcctagcgctatatgtaagctgtctaagcttaagaaattgtatctcaatagtaataaattggattttgacgggctgccgtccggaatcgggaagctgactaacctggaagaatttatggcagccaacaataatcttgaactggtgcctgaatctctgtgtaggtgtcctaaactcagaaagctcgtgctcaacaagaaccacctagttacccttccggaagcaatacacttcctcaccgagatcgaagttctcgatgtacgggagaatccaaacctggtgatgcctccaaaacccgcagatagggcggctgaatggtataacatagatttctcacttcaaaatcaactacgacttgcaggagcttctccagccaccgtggctgccgcagcagcggctggctctggacccaaggacccaatggctcggaaaatgaggcttcgccgaaggaaagattctgcccaggatgatcaggcaaagcaggtcctcaaggggatgagcgatgtggctcaagagaaaaataagaagcaggaagaaagtgccgatgccagagccccttccggtaaggttcggagatgggatcagggcctcgaaaaaccaaggttagattattccgagttttttacagaagatgtcggacagctgccagggctcacgatttggcagatagagaactttgtccccgtactggttgaagaagcttttcatgggaagttctacgaggcagactgctacatcgtgcttaagactttcctcgacgattctggatctctcaattgggaaatttattattggatcgggggtgaggccacgctggacaagaaggcatgcagcgccatccacgcggttaatttgcggaactacctcggggctgaatgtagaaccgttcgggaagaaatgggcgacgagtctgaagaatttctgcaggtgtttgacaacgacatttcctacatcgaagggggaacagctagcggtttctacacagtagaagacactcactacgtgacccgcatgtaccgtgtctacggcaagaaaaacatcaagctcgagcctgtccccctgaagggcacttcacttgaccctcggttcgtctttctgctggatcggggacttgacatctacgtgtggaggggcgcacaggctacactgtccagtaccaccaaggcaaggctgtttgccgagaagattaataagaatgagcgtaagggcaaagccgagatcaccctgttagtccagggccaggaactgcccgagttctgggaggctcttggtggcgaaccttctgaaatcaaaaagaactgggacgacgtgttgactgtggattacacccgaaacgccgaagccgttctacagtccccagggcttagtggaaaggtgaagcgggacgctgagaaaaaagatcagatgaaagctgacctgactgccctgtttctgcctcggcaacccccaatgtccctggccgaggccgagcagctcatggaagagtggaacgaagacctggatgggatggaaggcttcgtcctcgaaggcaaaaaattcgcaaggctcccggaagaggagttcgggcacttctatactcaggactgctacgtcttcctgtgccgctactgggtgcccgtggaatacgaagaggaggagaaaaaagaggataaagaggaaaaggcggagggcaaggagggtgaggaggccaccgcggaggcagaagaaaaacagccagaagaggattttcagtgcatcgtctatttctggcaggggcgtgaagcatcaaatatgggatggttgaccttcacctttagcctgcaaaaaaaattcgagagtctctttcctggcaaattggaggtggtgcgcatgacccagcagcaggagaatccaaagtttctaagccacttcaaaagaaagtttattatccaccgcggaaaacgcaaagctgtacagggagcacagcagccttcactgtatcagatcagaacaaatggcagcgcactttgcacacggtgcattcagatcaacaccgactcctccctactcaattcagagttctgcttcatcctcaaggttccattcgagagtgaagacaaccaaggaatagtgtacgcctgggtcggccgagcctctgatcccgacgaggcgaagctggctgaagatatcttaaatactatgttcgatacgtcttactccaagcaggtaataaatgagggggaggagcccgaaaactttttttgggtggggattggcgctcagaagccctatgacgatgatgccgagtacatgaagcacacccggttgtttcgctgttctaatgagaagggctacttcgccgtgactgaaaagtgcagcgatttttgccaagacgatctggcagacgatgatattatgctgctagacaacggacaggaggtgtatatgtgggtggggactcaaacaagccaggtggaaattaagctgagcctcaaggcttgccaagtctatattcagcacatgagatccaaagagcatgagcggcctagacggctccgactagtgagaaaagggaacgaacaacacgcctttacccgctgtttccacgcgtggtccgctttttgtaaggctcttgcctag

SEQ ID NO: 123249 - DNA, 3810 bp, Artificial Sequence
  derived and/or modified sequence
atggaggccaccggcgtgctgcccttcgtgagaggcgtggacctgagcggcaacgacttcaagggcggctacttccccgagaacgtgaaggccatgaccagcctgagatggctgaagctgaacagaaccggcctgtgctacctgcccgaggagctggccgccctgcagaagctggagcacctgagcgtgagccacaacaacctgaccaccctgcacggcgagctgagcagcctgcccagcctgagagccatcgtggccagagccaacagcctgaagaacagcggcgtgcccgacgacatcttcaagctggacgacctgagcgtgctggacctgagccacaaccagctgaccgagtgccccagagagctggagaacgccaagaacatgctggtgctgaacctgagccacaacagcatcgacaccatccccaaccagctgttcatcaacctgaccgacctgctgtacctggacctgagcgagaacagactggagagcctgcccccccagatgagaagactggtgcacctgcagaccctggtgctgaacggcaaccccctgctgcacgcccagctgagacagctgcccgccatgaccgccctgcagaccctgcacctgagaagcacccagagaacccagagcaacctgcccaccagcctggagggcctgagcaacctggccgacgtggacctgagctgcaacgacctgaccagagtgcccgagtgcctgtacaccctgcccagcctgagaagactgaacctgagcagcaaccagatcaccgagctgagcctgtgcatcgaccagtgggtgcacgtggagaccctgaacctgagcagaaaccagctgaccagcctgcccagcgccatctgcaagctgagcaagctgaagaagctgtacctgaacagcaacaagctggacttcgacggcctgcccagcggcatcggcaagctgaccaacctggaggagttcatggccgccaacaacaacctggagctggtgcccgagagcctgtgcagatgccccaagctgagaaagctggtgctgaacaagaaccacctggtgaccctgcccgaggccatccacttcctgaccgagatcgaggtgctggacgtgagagagaaccccaacctggtgatgccccccaagcccgccgacagagccgccgagtggtacaacatcgacttcagcctgcagaaccagctgagactggccggcgccagccccgccaccgtggccgccgccgccgccgccggcagcggccccaaggaccccatggccagaaagatgagactgagaagaagaaaggacagcgcccaggacgaccaggccaagcaggtgctgaagggcatgagcgacgtggcccaggagaagaacaagaagcaggaggagagcgccgacgccagagcccccagcggcaaggtgagaagatgggaccagggcctggagaagcccagactggactacagcgagttcttcaccgaggacgtgggccagctgcccggcctgaccatctggcagatcgagaacttcgtgcccgtgctggtggaggaggccttccacggcaagttctacgaggccgactgctacatcgtgctgaagaccttcctggacgacagcggcagcctgaactgggagatctactactggatcggcggcgaggccaccctggacaagaaggcctgcagcgccatccacgccgtgaacctgagaaactacctgggcgccgagtgcagaaccgtgagagaggagatgggcgacgagagcgaggagttcctgcaggtgttcgacaacgacatcagctacatcgagggcggcaccgccagcggcttctacaccgtggaggacacccactacgtgaccagaatgtacagagtgtacggcaagaagaacatcaagctggagcccgtgcccctgaagggcaccagcctggaccccagattcgtgttcctgctggacagaggcctggacatctacgtgtggagaggcgcccaggccaccctgagcagcaccaccaaggccagactgttcgccgagaagatcaacaagaacgagagaaagggcaaggccgagatcaccctgctggtgcagggccaggagctgcccgagttctgggaggccctgggcggcgagcccagcgagatcaagaagcacgtgcccgaggacttctggcccccccagcccaagctgtacaaggtgggcctgggcctgggctacctggagctgccccagatcaactacaagctgagcgtggagcacaagcagagacccaaggtggagctgatgcccagaatgagactgctgcagagcctgctggacaccagatgcgtgtacatcctggactgctggagcgacgtgttcatctggctgggcagaaagagccccagactggtgagagccgccgccctgaagctgggccaggagctgtgcggcatgctgcacagacccagacacgccaccgtgagcagaagcctggagggcaccgaggcccaggtgttcaaggccaagttcaagaactgggacgacgtgctgaccgtggactacaccagaaacgccgaggccgtgctgcagagccccggcctgagcggcaaggtgaagagagacgccgagaagaaggaccagatgaaggccgacctgaccgccctgttcctgcccagacagccccccatgagcctggccgaggccgagcagctgatggaggagtggaacgaggacctggacggcatggagggcttcgtgctggagggcaagaagttcgccagactgcccgaggaggagttcggccacttctacacccaggactgctacgtgttcctgtgcagatactgggtgcccgtggagtacgaggaggaggagaagaaggaggacaaggaggagaaggccgagggcaaggagggcgaggaggccaccgccgaggccgaggagaagcagcccgaggaggacttccagtgcatcgtgtacttctggcagggcagagaggccagcaacatgggctggctgaccttcaccttcagcctgcagaagaagttcgagagcctgttccccggcaagctggaggtggtgagaatgacccagcagcaggagaaccccaagttcctgagccacttcaagagaaagttcatcatccacagaggcaagagaaaggccgtgcagggcgcccagcagcccagcctgtaccagatcagaaccaacggcagcgccctgtgcaccagatgcatccagatcaacaccgacagcagcctgctgaacagcgagttctgcttcatcctgaaggtgcccttcgagagcgaggacaaccagggcatcgtgtacgcctgggtgggcagagccagcgaccccgacgaggccaagctggccgaggacatcctgaacaccatgttcgacaccagctacagcaagcaggtgatcaacgagggcgaggagcccgagaacttcttctgggtgggcatcggcgcccagaagccctacgacgacgacgccgagtacatgaagcacaccagactgttcagatgcagcaacgagaagggctacttcgccgtgaccgagaagtgcagcgacttctgccaggacgacctggccgacgacgacatcatgctgctggacaacggccaggaggtgtacatgtgggtgggcacccagaccagccaggtggagatcaagctgagcctgaaggcctgccaggtgtacatccagcacatgagaagcaaggagcacgagagacccagaagactgagactggtgagaaagggcaacgagcagcacgccttcaccagatgcttccacgcctggagcgccttctgcaaggccctggcctag

SEQ ID NO: 123250 - DNA, 3447 bp, Artificial Sequence
  derived and/or modified sequence
atggaggccaccggcgtgctgcccttcgtgagaggcgtggacctgagcggcaacgacttcaagggcggctacttccccgagaacgtgaaggccatgaccagcctgagatggctgaagctgaacagaaccggcctgtgctacctgcccgaggagctggccgccctgcagaagctggagcacctgagcgtgagccacaacaacctgaccaccctgcacggcgagctgagcagcctgcccagcctgagagccatcgtggccagagccaacagcctgaagaacagcggcgtgcccgacgacatcttcaagctggacgacctgagcgtgctggacctgagccacaaccagctgaccgagtgccccagagagctggagaacgccaagaacatgctggtgctgaacctgagccacaacagcatcgacaccatccccaaccagctgttcatcaacctgaccgacctgctgtacctggacctgagcgagaacagactggagagcctgcccccccagatgagaagactggtgcacctgcagaccctggtgctgaacggcaaccccctgctgcacgcccagctgagacagctgcccgccatgaccgccctgcagaccctgcacctgagaagcacccagagaacccagagcaacctgcccaccagcctggagggcctgagcaacctggccgacgtggacctgagctgcaacgacctgaccagagtgcccgagtgcctgtacaccctgcccagcctgagaagactgaacctgagcagcaaccagatcaccgagctgagcctgtgcatcgaccagtgggtgcacgtggagaccctgaacctgagcagaaaccagctgaccagcctgcccagcgccatctgcaagctgagcaagctgaagaagctgtacctgaacagcaacaagctggacttcgacggcctgcccagcggcatcggcaagctgaccaacctggaggagttcatggccgccaacaacaacctggagctggtgcccgagagcctgtgcagatgccccaagctgagaaagctggtgctgaacaagaaccacctggtgaccctgcccgaggccatccacttcctgaccgagatcgaggtgctggacgtgagagagaaccccaacctggtgatgccccccaagcccgccgacagagccgccgagtggtacaacatcgacttcagcctgcagaaccagctgagactggccggcgccagccccgccaccgtggccgccgccgccgccgccggcagcggccccaaggaccccatggccagaaagatgagactgagaagaagaaaggacagcgcccaggacgaccaggccaagcaggtgctgaagggcatgagcgacgtggcccaggagaagaacaagaagcaggaggagagcgccgacgccagagcccccagcggcaaggtgagaagatgggaccagggcctggagaagcccagactggactacagcgagttcttcaccgaggacgtgggccagctgcccggcctgaccatctggcagatcgagaacttcgtgcccgtgctggtggaggaggccttccacggcaagttctacgaggccgactgctacatcgtgctgaagaccttcctggacgacagcggcagcctgaactgggagatctactactggatcggcggcgaggccaccctggacaagaaggcctgcagcgccatccacgccgtgaacctgagaaactacctgggcgccgagtgcagaaccgtgagagaggagatgggcgacgagagcgaggagttcctgcaggtgttcgacaacgacatcagctacatcgagggcggcaccgccagcggcttctacaccgtggaggacacccactacgtgaccagaatgtacagagtgtacggcaagaagaacatcaagctggagcccgtgcccctgaagggcaccagcctggaccccagattcgtgttcctgctggacagaggcctggacatctacgtgtggagaggcgcccaggccaccctgagcagcaccaccaaggccagactgttcgccgagaagatcaacaagaacgagagaaagggcaaggccgagatcaccctgctggtgcagggccaggagctgcccgagttctgggaggccctgggcggcgagcccagcgagatcaagaagaactgggacgacgtgctgaccgtggactacaccagaaacgccgaggccgtgctgcagagccccggcctgagcggcaaggtgaagagagacgccgagaagaaggaccagatgaaggccgacctgaccgccctgttcctgcccagacagccccccatgagcctggccgaggccgagcagctgatggaggagtggaacgaggacctggacggcatggagggcttcgtgctggagggcaagaagttcgccagactgcccgaggaggagttcggccacttctacacccaggactgctacgtgttcctgtgcagatactgggtgcccgtggagtacgaggaggaggagaagaaggaggacaaggaggagaaggccgagggcaaggagggcgaggaggccaccgccgaggccgaggagaagcagcccgaggaggacttccagtgcatcgtgtacttctggcagggcagagaggccagcaacatgggctggctgaccttcaccttcagcctgcagaagaagttcgagagcctgttccccggcaagctggaggtggtgagaatgacccagcagcaggagaaccccaagttcctgagccacttcaagagaaagttcatcatccacagaggcaagagaaaggccgtgcagggcgcccagcagcccagcctgtaccagatcagaaccaacggcagcgccctgtgcaccagatgcatccagatcaacaccgacagcagcctgctgaacagcgagttctgcttcatcctgaaggtgcccttcgagagcgaggacaaccagggcatcgtgtacgcctgggtgggcagagccagcgaccccgacgaggccaagctggccgaggacatcctgaacaccatgttcgacaccagctacagcaagcaggtgatcaacgagggcgaggagcccgagaacttcttctgggtgggcatcggcgcccagaagccctacgacgacgacgccgagtacatgaagcacaccagactgttcagatgcagcaacgagaagggctacttcgccgtgaccgagaagtgcagcgacttctgccaggacgacctggccgacgacgacatcatgctgctggacaacggccaggaggtgtacatgtgggtgggcacccagaccagccaggtggagatcaagctgagcctgaaggcctgccaggtgtacatccagcacatgagaagcaaggagcacgagagacccagaagactgagactggtgagaaagggcaacgagcagcacgccttcaccagatgcttccacgcctggagcgccttctgcaaggccctggcctag

SEQ ID NO: 123251 - protein, 1338 aa, Artificial Sequence
  derived and/or modified sequence
MVSYWDTGVLLCALLSCLLLTGSSSGSKLKDPELSLKGTQHIMQAGQTLHLQCRGEAAHKWSLPEMVSKESERLSITKSACGRNGKQFCSTLTLNTAQANHTGFYSCKYLAVPTSKKKETESAIYIFISDTGRPFVEMYSEIPEIIHMTEGRELVIPCRVTSPNITVTLKKFPLDTLIPDGKRIIWDSRKGFIISNATYKEIGLLTCEATVNGHLYKTNYLTHRQTNTIIDVQISTPRPVKLLRGHTLVLNCTATTPLNTRVQMTWSYPDEKNKRASVRRRIDQSNSHANIFYSVLTIDKMQNKDKGLYTCRVRSGPSFKSVNTSVHIYDKAFITVKHRKQQVLETVAGKRSYRLSMKVKAFPSPEVVWLKDGLPATEKSARYLTRGYSLIIKDVTEEDAGNYTILLSIKQSNVFKNLTATLIVNVKPQIYEKAVSSFPDPALYPLGSRQILTCTAYGIPQPTIKWFWHPCNHNHSEARCDFCSNNEESFILDADSNMGNRIESITQRMAIIEGKNKMASTLVVADSRISGIYICIASNKVGTVGRNISFYITDVPNGFHVNLEKMPTEGEDLKLSCTVNKFLYRDVTWILLRTVNNRTMHYSISKQKMAITKEHSITLNLTIMNVSLQDSGTYACRARNVYTGEEILQKKEITIRDQEAPYLLRNLSDHTVAISSSTTLDCHANGVPEPQITWFKNNHKIQQEPGIILGPGSSTLFIERVTEEDEGVYHCKATNQKGSVESSAYLTVQGTSDKSNLELITLTCTCVAATLFWLLLTLFIRKMKRSSSEIKTDYLSIIMDPDEVPLDEQCERLPYDASKWEFARERLKLGKSLGRGAFGKVVQASAFGIKKSPTCRTVAVKMLKEGATASEYKALMTELKILTHIGHHLNVVNLLGACTKQGGPLMVIVEYCKYGNLSNYLKSKRDLFFLNKDAALHMEPKKEKMEPGLEQGKKPRLDSVTSSESFASSGFQEDKSLSDVEEEEDSDGFYKEPITMEDLISYSFQVARGMEFLSSRKCIHRDLAARNILLSENNVVKICDFGLARDIYKNPDYVRKGDTRLPLKWMAPESIFDKIYSTKSDVWSYGVLLWEIFSLGGSPYPGVQMDEDFCSRLREGMRMRAPEYSTPEIYQIMLDCWHRDPKERPRFAELVEKLGDLLQANVQQDGKDYIPINAILTGNSGFTYSTPAFSEDFFKESISAPKFNSGSSDDVRYVNAFKFMSLERIKTFEELLPNATSMFDDYQGDSSTLLASPMLKRFTWTDSKPKASLKIDLRVTSKSKESGLSDVSRPSFCHSSCGHVSEGKRRFTYDHAELERKIACCSPPPDYNSVVLYSTPPI

SEQ ID NO: 123252 - protein, 556 aa, Artificial Sequence
  derived and/or modified sequence
MKRSSSEIKTDYLSIIMDPDEVPLDEQCERLPYDASKWEFARERLKLGKSLGRGAFGKVVQASAFGIKKSPTCRTVAVKMLKEGATASEYKALMTELKILTHIGHHLNVVNLLGACTKQGGPLMVIVEYCKYGNLSNYLKSKRDLFFLNKDAALHMEPKKEKMEPGLEQGKKPRLDSVTSSESFASSGFQEDKSLSDVEEEEDSDGFYKEPITMEDLISYSFQVARGMEFLSSRKCIHRDLAARNILLSENNVVKICDFGLARDIYKNPDYVRKGDTRLPLKWMAPESIFDKIYSTKSDVWSYGVLLWEIFSLGGSPYPGVQMDEDFCSRLREGMRMRAPEYSTPEIYQIMLDCWHRDPKERPRFAELVEKLGDLLQANVQQDGKDYIPINAILTGNSGFTYSTPAFSEDFFKESISAPKFNSGSSDDVRYVNAFKFMSLERIKTFEELLPNATSMFDDYQGDSSTLLASPMLKRFTWTDSKPKASLKIDLRVTSKSKESGLSDVSRPSFCHSSCGHVSEGKRRFTYDHAELERKIACCSPPPDYNSVVLYSTPPI

SEQ ID NO: 123253 - protein, 361 aa, Artificial Sequence
  derived and/or modified sequence
MNSDLLVDSDGFYKEPITMEDLISYSFQVARGMEFLSSRKCIHRDLAARNILLSENNVVKICDFGLARDIYKNPDYVRKGDTRLPLKWMAPESIFDKIYSTKSDVWSYGVLLWEIFSLGGSPYPGVQMDEDFCSRLREGMRMRAPEYSTPEIYQIMLDCWHRDPKERPRFAELVEKLGDLLQANVQQDGKDYIPINAILTGNSGFTYSTPAFSEDFFKESISAPKFNSGSSDDVRYVNAFKFMSLERIKTFEELLPNATSMFDDYQGDSSTLLASPMLKRFTWTDSKPKASLKIDLRVTSKSKESGLSDVSRPSFCHSSCGHVSEGKRRFTYDHAELERKIACCSPPPDYNSVVLYSTPPI

SEQ ID NO: 123254 - DNA, 4017 bp, Artificial Sequence
  derived and/or modified sequence
atggtgagctactgggacaccggcgtgctgctgtgcgccctgctgagctgcctgctgctgaccggcagcagcagcggcagcaagctgaaggaccccgagctgagcctgaagggcacccagcacatcatgcaggccggccagaccctgcacctgcagtgcagaggcgaggccgcccacaagtggagcctgcccgagatggtgagcaaggagagcgagagactgagcatcaccaagagcgcctgcggcagaaacggcaagcagttctgcagcaccctgaccctgaacaccgcccaggccaaccacaccggcttctacagctgcaagtacctggccgtgcccaccagcaagaagaaggagaccgagagcgccatctacatcttcatcagcgacaccggcagacccttcgtggagatgtacagcgagatccccgagatcatccacatgaccgagggcagagagctggtgatcccctgcagagtgaccagccccaacatcaccgtgaccctgaagaagttccccctggacaccctgatccccgacggcaagagaatcatctgggacagcagaaagggcttcatcatcagcaacgccacctacaaggagatcggcctgctgacctgcgaggccaccgtgaacggccacctgtacaagaccaactacctgacccacagacagaccaacaccatcatcgacgtgcagatcagcacccccagacccgtgaagctgctgagaggccacaccctggtgctgaactgcaccgccaccacccccctgaacaccagagtgcagatgacctggagctaccccgacgagaagaacaagagagccagcgtgagaagaagaatcgaccagagcaacagccacgccaacatcttctacagcgtgctgaccatcgacaagatgcagaacaaggacaagggcctgtacacctgcagagtgagaagcggccccagcttcaagagcgtgaacaccagcgtgcacatctacgacaaggccttcatcaccgtgaagcacagaaagcagcaggtgctggagaccgtggccggcaagagaagctacagactgagcatgaaggtgaaggccttccccagccccgaggtggtgtggctgaaggacggcctgcccgccaccgagaagagcgccagatacctgaccagaggctacagcctgatcatcaaggacgtgaccgaggaggacgccggcaactacaccatcctgctgagcatcaagcagagcaacgtgttcaagaacctgaccgccaccctgatcgtgaacgtgaagccccagatctacgagaaggccgtgagcagcttccccgaccccgccctgtaccccctgggcagcagacagatcctgacctgcaccgcctacggcatcccccagcccaccatcaagtggttctggcacccctgcaaccacaaccacagcgaggccagatgcgacttctgcagcaacaacgaggagagcttcatcctggacgccgacagcaacatgggcaacagaatcgagagcatcacccagagaatggccatcatcgagggcaagaacaagatggccagcaccctggtggtggccgacagcagaatcagcggcatctacatctgcatcgccagcaacaaggtgggcaccgtgggcagaaacatcagcttctacatcaccgacgtgcccaacggcttccacgtgaacctggagaagatgcccaccgagggcgaggacctgaagctgagctgcaccgtgaacaagttcctgtacagagacgtgacctggatcctgctgagaaccgtgaacaacagaaccatgcactacagcatcagcaagcagaagatggccatcaccaaggagcacagcatcaccctgaacctgaccatcatgaacgtgagcctgcaggacagcggcacctacgcctgcagagccagaaacgtgtacaccggcgaggagatcctgcagaagaaggagatcaccatcagagaccaggaggccccctacctgctgagaaacctgagcgaccacaccgtggccatcagcagcagcaccaccctggactgccacgccaacggcgtgcccgagccccagatcacctggttcaagaacaaccacaagatccagcaggagcccggcatcatcctgggccccggcagcagcaccctgttcatcgagagagtgaccgaggaggacgagggcgtgtaccactgcaaggccaccaaccagaagggcagcgtggagagcagcgcctacctgaccgtgcagggcaccagcgacaagagcaacctggagctgatcaccctgacctgcacctgcgtggccgccaccctgttctggctgctgctgaccctgttcatcagaaagatgaagagaagcagcagcgagatcaagaccgactacctgagcatcatcatggaccccgacgaggtgcccctggacgagcagtgcgagagactgccctacgacgccagcaagtgggagttcgccagagagagactgaagctgggcaagagcctgggcagaggcgccttcggcaaggtggtgcaggccagcgccttcggcatcaagaagagccccacctgcagaaccgtggccgtgaagatgctgaaggagggcgccaccgccagcgagtacaaggccctgatgaccgagctgaagatcctgacccacatcggccaccacctgaacgtggtgaacctgctgggcgcctgcaccaagcagggcggccccctgatggtgatcgtggagtactgcaagtacggcaacctgagcaactacctgaagagcaagagagacctgttcttcctgaacaaggacgccgccctgcacatggagcccaagaaggagaagatggagcccggcctggagcagggcaagaagcccagactggacagcgtgaccagcagcgagagcttcgccagcagcggcttccaggaggacaagagcctgagcgacgtggaggaggaggaggacagcgacggcttctacaaggagcccatcaccatggaggacctgatcagctacagcttccaggtggccagaggcatggagttcctgagcagcagaaagtgcatccacagagacctggccgccagaaacatcctgctgagcgagaacaacgtggtgaagatctgcgacttcggcctggccagagacatctacaagaaccccgactacgtgagaaagggcgacaccagactgcccctgaagtggatggcccccgagagcatcttcgacaagatctacagcaccaagagcgacgtgtggagctacggcgtgctgctgtgggagatcttcagcctgggcggcagcccctaccccggcgtgcagatggacgaggacttctgcagcagactgagagagggcatgagaatgagagcccccgagtacagcacccccgagatctaccagatcatgctggactgctggcacagagaccccaaggagagacccagattcgccgagctggtggagaagctgggcgacctgctgcaggccaacgtgcagcaggacggcaaggactacatccccatcaacgccatcctgaccggcaacagcggcttcacctacagcacccccgccttcagcgaggacttcttcaaggagagcatcagcgcccccaagttcaacagcggcagcagcgacgacgtgagatacgtgaacgccttcaagttcatgagcctggagagaatcaagaccttcgaggagctgctgcccaacgccaccagcatgttcgacgactaccagggcgacagcagcaccctgctggccagccccatgctgaagagattcacctggaccgacagcaagcccaaggccagcctgaagatcgacctgagagtgaccagcaagagcaaggagagcggcctgagcgacgtgagcagacccagcttctgccacagcagctgcggccacgtgagcgagggcaagagaagattcacctacgaccacgccgagctggagagaaagatcgcctgctgcagccccccccccgactacaacagcgtggtgctgtacagcaccccccccatctag

SEQ ID NO: 123255 - DNA, 1671 bp, Artificial Sequence
  derived and/or modified sequence
atgaagagaagcagcagcgagatcaagaccgactacctgagcatcatcatggaccccgacgaggtgcccctggacgagcagtgcgagagactgccctacgacgccagcaagtgggagttcgccagagagagactgaagctgggcaagagcctgggcagaggcgccttcggcaaggtggtgcaggccagcgccttcggcatcaagaagagccccacctgcagaaccgtggccgtgaagatgctgaaggagggcgccaccgccagcgagtacaaggccctgatgaccgagctgaagatcctgacccacatcggccaccacctgaacgtggtgaacctgctgggcgcctgcaccaagcagggcggccccctgatggtgatcgtggagtactgcaagtacggcaacctgagcaactacctgaagagcaagagagacctgttcttcctgaacaaggacgccgccctgcacatggagcccaagaaggagaagatggagcccggcctggagcagggcaagaagcccagactggacagcgtgaccagcagcgagagcttcgccagcagcggcttccaggaggacaagagcctgagcgacgtggaggaggaggaggacagcgacggcttctacaaggagcccatcaccatggaggacctgatcagctacagcttccaggtggccagaggcatggagttcctgagcagcagaaagtgcatccacagagacctggccgccagaaacatcctgctgagcgagaacaacgtggtgaagatctgcgacttcggcctggccagagacatctacaagaaccccgactacgtgagaaagggcgacaccagactgcccctgaagtggatggcccccgagagcatcttcgacaagatctacagcaccaagagcgacgtgtggagctacggcgtgctgctgtgggagatcttcagcctgggcggcagcccctaccccggcgtgcagatggacgaggacttctgcagcagactgagagagggcatgagaatgagagcccccgagtacagcacccccgagatctaccagatcatgctggactgctggcacagagaccccaaggagagacccagattcgccgagctggtggagaagctgggcgacctgctgcaggccaacgtgcagcaggacggcaaggactacatccccatcaacgccatcctgaccggcaacagcggcttcacctacagcacccccgccttcagcgaggacttcttcaaggagagcatcagcgcccccaagttcaacagcggcagcagcgacgacgtgagatacgtgaacgccttcaagttcatgagcctggagagaatcaagaccttcgaggagctgctgcccaacgccaccagcatgttcgacgactaccagggcgacagcagcaccctgctggccagccccatgctgaagagattcacctggaccgacagcaagcccaaggccagcctgaagatcgacctgagagtgaccagcaagagcaaggagagcggcctgagcgacgtgagcagacccagcttctgccacagcagctgcggccacgtgagcgagggcaagagaagattcacctacgaccacgccgagctggagagaaagatcgcctgctgcagccccccccccgactacaacagcgtggtgctgtacagcaccccccccatctag

SEQ ID NO: 123256 - DNA, 1086 bp, Artificial Sequence
  derived and/or modified sequence
atgaacagcgacctgctggtggacagcgacggcttctacaaggagcccatcaccatggaggacctgatcagctacagcttccaggtggccagaggcatggagttcctgagcagcagaaagtgcatccacagagacctggccgccagaaacatcctgctgagcgagaacaacgtggtgaagatctgcgacttcggcctggccagagacatctacaagaaccccgactacgtgagaaagggcgacaccagactgcccctgaagtggatggcccccgagagcatcttcgacaagatctacagcaccaagagcgacgtgtggagctacggcgtgctgctgtgggagatcttcagcctgggcggcagcccctaccccggcgtgcagatggacgaggacttctgcagcagactgagagagggcatgagaatgagagcccccgagtacagcacccccgagatctaccagatcatgctggactgctggcacagagaccccaaggagagacccagattcgccgagctggtggagaagctgggcgacctgctgcaggccaacgtgcagcaggacggcaaggactacatccccatcaacgccatcctgaccggcaacagcggcttcacctacagcacccccgccttcagcgaggacttcttcaaggagagcatcagcgcccccaagttcaacagcggcagcagcgacgacgtgagatacgtgaacgccttcaagttcatgagcctggagagaatcaagaccttcgaggagctgctgcccaacgccaccagcatgttcgacgactaccagggcgacagcagcaccctgctggccagccccatgctgaagagattcacctggaccgacagcaagcccaaggccagcctgaagatcgacctgagagtgaccagcaagagcaaggagagcggcctgagcgacgtgagcagacccagcttctgccacagcagctgcggccacgtgagcgagggcaagagaagattcacctacgaccacgccgagctggagagaaagatcgcctgctgcagccccccccccgactacaacagcgtggtgctgtacagcaccccccccatctag

SEQ ID NO: 123257 - DNA, 4017 bp, Artificial Sequence
  derived and/or modified sequence
atggtgagctattgggataccggggttctgctttgtgccctactgagctgtctgttgctaactggatcatcaagtggaagcaagctcaaagacccggagttatcacttaaaggcacacagcacattatgcaggctggccagactcttcatcttcagtgccgaggagaggcggcacacaagtggtctctaccagaaatggtttctaaagagagcgagagactctcaatcaccaagtccgcttgcggtcgcaatggaaaacaattctgctcaaccctaaccctcaacacagcgcaagctaatcatacaggcttctattcatgtaagtatctcgccgtgcctactagcaaaaagaaggaaacggagagcgctatttacatctttatctctgacaccggccgcccttttgtggaaatgtactcagaaatccctgagatcattcacatgactgagggtcgcgaacttgtgatcccctgccgcgtaacctccccgaacatcactgtgaccttgaagaagttccctctcgacaccttgattcctgacggcaaacggattatatgggattcccgaaaaggatttattatatctaatgccacatataaggagatagggctcttaacctgcgaggctaccgtcaacggccatctgtataaaacaaattatttgacccatagacaaacgaatacaattattgacgtgcagattagtacccctcgccccgtgaaactgttgcgcggacacactctagttctgaactgtaccgcaactacacctttgaacacccgcgtgcaaatgacttggagttatcctgacgagaaaaataagcgggccagcgtacggcggaggattgaccaatctaacagccatgcaaatattttctacagcgtgctcaccatcgataaaatgcaaaacaaggataagggtctatacacctgtcgggtccgatcagggccatccttcaagagcgttaatactagcgtgcacatatacgacaaggctttcataacagtgaaacaccggaaacagcaggtactggaaaccgtcgctggcaagcgctcatatcggctgtccatgaaggtcaaggccttcccctccccagaggtcgtgtggctaaaggacggtctacctgccacagagaaaagcgcacggtacctgacccgcggatactctttgattattaaggatgtaaccgaagaagatgccggcaattacacgattctcctgtccataaaacagtcgaatgtatttaaaaacctgaccgcaacattgattgtcaacgtgaagccccaaatctacgaaaaggctgtctccagttttcccgaccccgctctgtatcctctcggctcacgccagatcttaacctgtaccgcctatggcattccccaacctaccatcaagtggttttggcatccttgtaaccataatcattccgaagccagatgtgacttttgtagtaataatgaggagagtttcatcctagacgccgattccaatatgggtaatcggatcgaatccatcacgcaacggatggctattatcgagggcaagaataagatggcatctaccttagtagtggcagattctcggatatcagggatatacatttgcattgcatctaataaggtgggcaccgtgggaaggaacatcagtttctatatcacggatgtccccaacggttttcacgtcaacctcgaaaaaatgcctactgagggagaagacctgaaactgagctgcactgttaacaaattcttgtatcgcgatgttacttggattctgctccgcacagtgaacaacaggactatgcattactccatttccaaacagaagatggcaatcaccaaggaacactccataaccttaaacctcacaatcatgaatgtctcgctccaggatagtggtacgtatgcatgtagagctagaaacgtctataccggggaggagatactgcagaaaaaagaaattaccatccgggatcaggaggcaccttatctcctgcggaacctctctgatcatacagtggccattagtagcagcaccacgctggattgtcatgccaatggggtcccagaacctcaaatcacatggttcaagaataaccacaaaattcagcaggagccagggattatactcggtccaggaagctcaacactgttcatcgagcgcgttaccgaggaagatgagggcgtctatcactgcaaggctaccaaccaaaagggctccgtcgagtccagcgcatacctgaccgtgcaaggcacctccgataaaagcaatctggaattaatcactttgacctgtacatgcgtcgccgccactctgttctggctgctgttgacactgtttattcggaagatgaaaaggagtagtagcgagattaagaccgactatctatcgataataatggaccccgatgaggtgcccctcgatgaacagtgtgaaaggctcccatacgacgcatctaagtgggaatttgctagagagcgactgaagctcggaaagagtctcgggaggggggcattcgggaaggttgtacaggcgagtgcttttgggattaagaagagccctacctgcagaaccgttgccgtgaaaatgttgaaagaaggcgccactgcttcggaatataaagcccttatgaccgagctgaagatccttacacatattggccatcatttaaacgtggttaacctactcggcgcttgcactaagcaggggggccctctcatggtcattgtggagtactgtaagtatgggaacctgagcaattatctcaaatcaaagagggacctcttcttcctgaataaagatgcagccttgcatatggagcccaaaaaggaaaagatggagcccgggctggaacaggggaaaaaaccccggcttgattctgttactagtagcgaatcatttgcttctagcgggtttcaggaggataaatcacttagtgacgtcgaggaggaagaagacagcgatggcttttataaggaaccaattacaatggaggaccttatctcctatagctttcaggtcgctcggggcatggaatttctaagcagccgcaaatgtatccaccgtgaccttgccgctcggaacatccttctttcagagaacaatgtggtgaagatctgtgatttcggtctcgctagggatatatacaaaaaccctgactatgtcagaaagggagatacacgcttgccactgaagtggatggctccagagtccatatttgataaaatatacagtaccaaatccgatgtctggtcatatggcgtcctgttatgggagattttctccttgggtggatctccatacccaggagtccaaatggacgaagacttttgctctcggttaagggagggcatgcggatgagagcacccgagtatagcaccccagagatctaccaaattatgctagactgttggcacagggacccgaaggaacgcccaagatttgctgaattggtggagaaactcggagatctactgcaggcaaacgtccagcaagacggcaaggactacattcctataaatgccattctgactggtaactctgggttcacttattctaccccagccttctcagaggactttttcaaagagagtatcagcgcaccgaagttcaacagtggaagtagtgatgatgtgcggtacgtgaacgcgtttaaattcatgtcgctggagcgcataaaaacatttgaagaactgcttcccaacgcgacttctatgttcgatgattatcagggagattcctctacactccttgcctctcccatgctgaaacggtttacttggaccgatagtaagcccaaggcctctctgaagatcgacctgcgcgttacttctaagtctaaggagtcaggcctgagtgacgtctcacggcccagtttctgccactcctcctgcgggcacgtcagcgaggggaaacggcgattcacctacgatcacgccgaactcgaaaggaagatcgcttgctgcagtccgccacccgattacaacagtgtggttctgtacagtactccccctatatag

SEQ ID NO: 123258 - DNA, 1671 bp, Artificial Sequence
  derived and/or modified sequence
atgaagcgctcatcctctgagataaagaccgattatctctcaattattatggatcccgatgaggtacccctcgacgagcaatgcgagcgcctgccctatgacgccagtaaatgggaatttgcccgtgagagactgaagctcggaaagtcactcggaagaggcgcgtttgggaaggtagtccaggccagcgcctttgggattaagaagtcacctacctgtcggaccgtcgccgtgaaaatgctcaaggagggggccactgcttcagagtacaaggctctgatgaccgagctcaagattctgacgcatataggtcatcatctcaatgttgtgaatctgctgggcgcctgtaccaaacaaggcggccccctgatggtgatcgtggagtattgtaaatatggaaacctgtccaactatctcaaatctaaaagagacttgttcttcctgaacaaggatgccgccctccacatggaacccaaaaaggaaaagatggagccggggctggagcagggcaagaagccccgtctggattccgtcacttcaagtgaatcttttgccagcagcggattccaggaagacaaaagcctgagcgatgtggaagaagaggaagattccgacggcttctataaggagcccatcactatggaagaccttatttcttatagctttcaggtggcaagaggcatggagttcctgagcagcaggaaatgcatccacagagatttagcagcccggaacattcttctgtctgaaaacaacgttgttaagatatgcgacttcggactggcccgggacatctacaaaaaccccgattatgtccggaagggcgacacccggctcccacttaagtggatggcgcccgaatcaatcttcgacaagatttacagcacgaagtccgacgtgtggtcttatggagtccttctatgggagatattttctttaggcgggtctccctatcctggtgtccagatggatgaggatttttgctcccggctcagggagggaatgcgcatgcgtgcgccagagtacagcacccccgagatctatcagataatgttggactgttggcatcgggaccccaaagagagaccacgatttgctgagctagtggaaaagctgggtgacttgctgcaggcaaacgtccagcaagatggcaaagattatatccctattaacgcaatcctcacagggaacagtgggtttacctatagcactcccgcattttctgaagacttctttaaggagagtatctcagcgcctaagttcaacagtggaagctccgatgacgttagatatgtaaacgcattcaaatttatgagtcttgagagaattaagacctttgaggaattgctccccaatgctaccagcatgttcgatgattatcaaggtgacagcagcactttgttagcctcccccatgttgaaacgatttacctggaccgactccaaaccaaaagctagtctgaaaatcgatctccgggttaccagtaaaagcaaggagagcggactgagcgacgtttctagaccctccttttgtcattctagttgcggtcacgtgtccgaggggaagagaagattcacctacgatcacgcggagctagagcgcaagattgcatgctgcagcccaccgcctgattataactccgtggtattgtatagtacaccccctatctag

SEQ ID NO: 123259 - DNA, 1086 bp, Artificial Sequence
  derived and/or modified sequence
atgaactcagacctacttgttgatagcgatggcttctataaagagccaataacaatggaagatctcatatcttattcttttcaggtagcaaggggaatggagttcttgagttctcggaaatgcatccatcgggatttggctgctaggaatatcctgttgtctgaaaacaatgttgtgaagatatgtgacttcgggctggctagggatatctacaagaaccccgactatgtacggaagggggacacaagactccccctgaagtggatggcccccgagagcatctttgacaaaatttatagcacaaagtctgacgtatggagctacggagtgctcctttgggagatcttcagccttggggggagcccgtatcctggcgtgcagatggatgaggacttttgctccagattgagagaaggtatgcgtatgcgggcccccgagtattcgacacctgagatttatcagatcatgctggactgctggcatagggacccaaaggagcggccccgttttgccgagctagtagagaagctcggcgatcttctgcaggcgaatgtgcagcaggacggcaaagattacattcctatcaacgcaatactgaccggcaattccgggtttacgtattccactccagccttctctgaagacttttttaaggagagcataagcgcccccaaattcaattcaggctcaagcgatgatgtccgatacgtgaatgccttcaaattcatgagcttagagcgaatcaagacctttgaagagctactcccaaacgcaaccagcatgtttgacgattatcagggtgactcctccactctgttagcaagtccgatgctgaagcgctttacctggactgacagtaagccaaaagccagtctcaagattgacctccgagtgacttccaaatccaaggagtctggcctttctgatgtcagtcgtcccagcttctgtcatagtagttgcggccacgtctcagagggaaaacgccgcttcacttacgaccacgcggaattagaaaggaaaatcgcttgctgttccccaccacctgattataattccgtggttctctactccacccctccaatttag

SEQ ID NO: 123260 - DNA, 7084 bp, Artificial Sequence
  derived and/or modified sequence
gcggacactcctctcggctcctccccggcagcggcggcggctcggagcgggctccggggctcgggtgcagcggccagcgggcgcctggcggcgaggattacccggggaagtggttgtctcctggctggagccgcgagacgggcgctcagggcgcggggccggcggcggcgaacgagaggacggactctggcggccgggtcgttggccgcggggagcgcgggcaccgggcgagcaggccgcgtcgcgctcaccatggtcagctactgggacaccggggtcctgctgtgcgcgctgctcagctgtctgcttctcacaggatctagttcaggttcaaaattaaaagatcctgaactgagtttaaaaggcacccagcacatcatgcaagcaggccagacactgcatctccaatgcaggggggaagcagcccataaatggtctttgcctgaaatggtgagtaaggaaagcgaaaggctgagcataactaaatctgcctgtggaagaaatggcaaacaattctgcagtactttaaccttgaacacagctcaagcaaaccacactggcttctacagctgcaaatatctagctgtacctacttcaaagaagaaggaaacagaatctgcaatctatatatttattagtgatacaggtagacctttcgtagagatgtacagtgaaatccccgaaattatacacatgactgaaggaagggagctcgtcattccctgccgggttacgtcacctaacatcactgttactttaaaaaagtttccacttgacactttgatccctgatggaaaacgcataatctgggacagtagaaagggcttcatcatatcaaatgcaacgtacaaagaaatagggcttctgacctgtgaagcaacagtcaatgggcatttgtataagacaaactatctcacacatcgacaaaccaatacaatcatagatgtccaaataagcacaccacgcccagtcaaattacttagaggccatactcttgtcctcaattgtactgctaccactcccttgaacacgagagttcaaatgacctggagttaccctgatgaaaaaaataagagagcttccgtaaggcgacgaattgaccaaagcaattcccatgccaacatattctacagtgttcttactattgacaaaatgcagaacaaagacaaaggactttatacttgtcgtgtaaggagtggaccatcattcaaatctgttaacacctcagtgcatatatatgataaagcattcatcactgtgaaacatcgaaaacagcaggtgcttgaaaccgtagctggcaagcggtcttaccggctctctatgaaagtgaaggcatttccctcgccggaagttgtatggttaaaagatgggttacctgcgactgagaaatctgctcgctatttgactcgtggctactcgttaattatcaaggacgtaactgaagaggatgcagggaattatacaatcttgctgagcataaaacagtcaaatgtgtttaaaaacctcactgccactctaattgtcaatgtgaaaccccagatttacgaaaaggccgtgtcatcgtttccagacccggctctctacccactgggcagcagacaaatcctgacttgtaccgcatatggtatccctcaacctacaatcaagtggttctggcacccctgtaaccataatcattccgaagcaaggtgtgacttttgttccaataatgaagagtcctttatcctggatgctgacagcaacatgggaaacagaattgagagcatcactcagcgcatggcaataatagaaggaaagaataagatggctagcaccttggttgtggctgactctagaatttctggaatctacatttgcatagcttccaataaagttgggactgtgggaagaaacataagcttttatatcacagatgtgccaaatgggtttcatgttaacttggaaaaaatgccgacggaaggagaggacctgaaactgtcttgcacagttaacaagttcttatacagagacgttacttggattttactgcggacagttaataacagaacaatgcactacagtattagcaagcaaaaaatggccatcactaaggagcactccatcactcttaatcttaccatcatgaatgtttccctgcaagattcaggcacctatgcctgcagagccaggaatgtatacacaggggaagaaatcctccagaagaaagaaattacaatcagagatcaggaagcaccatacctcctgcgaaacctcagtgatcacacagtggccatcagcagttccaccactttagactgtcatgctaatggtgtccccgagcctcagatcacttggtttaaaaacaaccacaaaatacaacaagagcctggaattattttaggaccaggaagcagcacgctgtttattgaaagagtcacagaagaggatgaaggtgtctatcactgcaaagccaccaaccagaagggctctgtggaaagttcagcatacctcactgttcaaggaacctcggacaagtctaatctggagctgatcactctaacatgcacctgtgtggctgcgactctcttctggctcctattaaccctctttatccgaaaaatgaaaaggtcttcttctgaaataaagactgactacctatcaattataatggacccagatgaagttcctttggatgagcagtgtgagcggctcccttatgatgccagcaagtgggagtttgcccgggagagacttaaactgggcaaatcacttggaagaggggcttttggaaaagtggttcaagcatcagcatttggcattaagaaatcacctacgtgccggactgtggctgtgaaaatgctgaaagagggggccacggccagcgagtacaaagctctgatgactgagctaaaaatcttgacccacattggccaccatctgaacgtggttaacctgctgggagcctgcaccaagcaaggagggcctctgatggtgattgttgaatactgcaaatatggaaatctctccaactacctcaagagcaaacgtgacttattttttctcaacaaggatgcagcactacacatggagcctaagaaagaaaaaatggagccaggcctggaacaaggcaagaaaccaagactagatagcgtcaccagcagcgaaagctttgcgagctccggctttcaggaagataaaagtctgagtgatgttgaggaagaggaggattctgacggtttctacaaggagcccatcactatggaagatctgatttcttacagttttcaagtggccagaggcatggagttcctgtcttccagaaagtgcattcatcgggacctggcagcgagaaacattcttttatctgagaacaacgtggtgaagatttgtgattttggccttgcccgggatatttataagaaccccgattatgtgagaaaaggagatactcgacttcctctgaaatggatggctcctgaatctatctttgacaaaatctacagcaccaagagcgacgtgtggtcttacggagtattgctgtgggaaatcttctccttaggtgggtctccatacccaggagtacaaatggatgaggacttttgcagtcgcctgagggaaggcatgaggatgagagctcctgagtactctactcctgaaatctatcagatcatgctggactgctggcacagagacccaaaagaaaggccaagatttgcagaacttgtggaaaaactaggtgatttgcttcaagcaaatgtacaacaggatggtaaagactacatcccaatcaatgccatactgacaggaaatagtgggtttacatactcaactcctgccttctctgaggacttcttcaaggaaagtatttcagctccgaagtttaattcaggaagctctgatgatgtcagatacgtaaatgctttcaagttcatgagcctggaaagaatcaaaacctttgaagaacttttaccgaatgccacctccatgtttgatgactaccagggcgacagcagcactctgttggcctctcccatgctgaagcgcttcacctggactgacagcaaacccaaggcctcgctcaagattgacttgagagtaaccagtaaaagtaaggagtcggggctgtctgatgtcagcaggcccagtttctgccattccagctgtgggcacgtcagcgaaggcaagcgcaggttcacctacgaccacgctgagctggaaaggaaaatcgcgtgctgctccccgcccccagactacaactcggtggtcctgtactccaccccacccatctagagtttgacacgaagccttatttctagaagcacatgtgtatttatacccccaggaaactagcttttgccagtattatgcatatataagtttacacctttatctttccatgggagccagctgctttttgtgatttttttaatagtgcttttttttttttgactaacaagaatgtaactccagatagagaaatagtgacaagtgaagaacactactgctaaatcctcatgttactcagtgttagagaaatccttcctaaacccaatgacttccctgctccaacccccgccacctcagggcacgcaggaccagtttgattgaggagctgcactgatcacccaatgcatcacgtaccccactgggccagccctgcagcccaaaacccagggcaacaagcccgttagccccagggatcactggctggcctgagcaacatctcgggagtcctctagcaggcctaagacatgtgaggaggaaaaggaaaaaaagcaaaaagcaagggagaaaagagaaaccgggagaaggcatgagaaagaatttgagacgcaccatgtgggcacggagggggacggggctcagcaatgccatttcagtggcttcccagctctgacccttctacatttgagggcccagccaggagcagatggacagcgatgaggggacattttctggattctgggaggcaagaaaaggacaaatatcttttttggaactaaagcaaattttagaactttacctatggaagtggttctatgtccattctcattcgtggcatgttttgatttgtagcactgagggtggcactcaactctgagcccatacttttggctcctctagtaagatgcactgaaaacttagccagagttaggttgtctccaggccatgatggccttacactgaaaatgtcacattctattttgggtattaatatatagtccagacacttaactcaatttcttggtattattctgttttgcacagttagttgtgaaagaaagctgagaagaatgaaaatgcagtcctgaggagaggagttttctccatatcaaaacgagggctgatggaggaaaaaggtcaataaggtcaagggaaaaccccgtctctataccaaccaaaccaattcaccaacacagttgggacccaaaacacaggaagtcagtcacgtttccttttcatttaatggggattccactatctcacactaatctgaaaggatgtggaagagcattagctggcgcatattaagcactttaagctccttgagtaaaaaggtggtatgtaatttatgcaaggtatttctccagttgggactcaggatattagttaatgagccatcactagaagaaaagcccattttcaactgctttgaaacttgcctggggtctgagcatgatgggaatagggagacagggtaggaaagggcgcctactcttcagggtctaaagatcaagtgggccttggatcgctaagctggctctgtttgatgctatttatgcaagttagggtctatgtatttatgatgtctgcaccttctgcagccagtcagaagctggagaggcaacagtggattgctgcttcttggggagaagagtatgcttccttttatccatgtaatttaactgtagaacctgagctctaagtaaccgaagaatgtatgcctctgttcttatgtgccacatccttgtttaaaggctctctgtatgaagagatgggaccgtcatcagcacattccctagtgagcctactggctcctggcagcggcttttgtggaagactcactagccagaagagaggagtgggacagtcctctccaccaagatctaaatccaaacaaaagcaggctagagccagaagagaggacaaatctttgttcttcctcttctttacatacgcaaaccacctgtgacagctggcaattttataaatcaggtaactggaaggaggttaaacacagaaaaaagaagacctcagtcaattctctacttttttttttttttccaaatcagataatagcccagcaaatagtgataacaaataaaaccttagctattcatgtcttgatttcaataattaattcttaatcattaagagaccataataaatactccttttcaagagaaaagcaaaaccattagaattgttactcagctccttcaaactcaggtttgtagcatacatgagtccatccatcagtcaaagaatggttccatctggagtcttaatgtagaaagaaaaatggagacttgtaataatgagctagttacaaagtgcttgttcattaaaatagcactgaaaattgaaacatgaattaactgataatattccaatcatttgccatttatgacaaaaatggttggcactaacaaagaacgagcacttcctttcagagtttctgagataatgtacgtggaacagtctgggtggaatggggctgaaaccatgtgcaagtctgtgtcttgtcagtccaagaagtgacaccgagatgttaattttagggacccgtgccttgtttcctagcccacaagaatgcaaacatcaaacagatactcgctagcctcatttaaattgattaaaggaggagtgcatctttggccgacagtggtgtaactgtatgtgtgtgtgtgtgtgtgtgtgtgtgtgtgtgtgtgggtgtatgtgtgttttgtgcataactatttaaggaaactggaattttaaagttacttttatacaaaccaagaatatatgctacagatataagacagacatggtttggtcctatatttctagtcatgatgaatgtattttgtataccatcttcatataataaacttccaaa

SEQ ID NO: 123261 - DNA, 1927 bp, Artificial Sequence
  derived and/or modified sequence
actttaagtcttttccttttggtcttggaggaacagtgctcagcttttgatctctgtgattctgatagagaagctgtttctggaattacaaagtttgcaaacttgacagcaaaatttctggaaagccttttctatgaacctcggacaagtctaatctggagctgatcactctaacatgcacctgtgtggctgcgactctcttctggctcctattaaccctctttatccgaaaaatgaaaaggtcttcttctgaaataaagactgactacctatcaattataatggacccagatgaagttcctttggatgagcagtgtgagcggctcccttatgatgccagcaagtgggagtttgcccgggagagacttaaactgggcaaatcacttggaagaggggcttttggaaaagtggttcaagcatcagcatttggcattaagaaatcacctacgtgccggactgtggctgtgaaaatgctgaaagagggggccacggccagcgagtacaaagctctgatgactgagctaaaaatcttgacccacattggccaccatctgaacgtggttaacctgctgggagcctgcaccaagcaaggagggcctctgatggtgattgttgaatactgcaaatatggaaatctctccaactacctcaagagcaaacgtgacttattttttctcaacaaggatgcagcactacacatggagcctaagaaagaaaaaatggagccaggcctggaacaaggcaagaaaccaagactagatagcgtcaccagcagcgaaagctttgcgagctccggctttcaggaagataaaagtctgagtgatgttgaggaagaggaggattctgacggtttctacaaggagcccatcactatggaagatctgatttcttacagttttcaagtggccagaggcatggagttcctgtcttccagaaagtgcattcatcgggacctggcagcgagaaacattcttttatctgagaacaacgtggtgaagatttgtgattttggccttgcccgggatatttataagaaccccgattatgtgagaaaaggagatactcgacttcctctgaaatggatggctcctgaatctatctttgacaaaatctacagcaccaagagcgacgtgtggtcttacggagtattgctgtgggaaatcttctccttaggtgggtctccatacccaggagtacaaatggatgaggacttttgcagtcgcctgagggaaggcatgaggatgagagctcctgagtactctactcctgaaatctatcagatcatgctggactgctggcacagagacccaaaagaaaggccaagatttgcagaacttgtggaaaaactaggtgatttgcttcaagcaaatgtacaacaggatggtaaagactacatcccaatcaatgccatactgacaggaaatagtgggtttacatactcaactcctgccttctctgaggacttcttcaaggaaagtatttcagctccgaagtttaattcaggaagctctgatgatgtcagatacgtaaatgctttcaagttcatgagcctggaaagaatcaaaacctttgaagaacttttaccgaatgccacctccatgtttgatgactaccagggcgacagcagcactctgttggcctctcccatgctgaagcgcttcacctggactgacagcaaacccaaggcctcgctcaagattgacttgagagtaaccagtaaaagtaaggagtcggggctgtctgatgtcagcaggcccagtttctgccattccagctgtgggcacgtcagcgaaggcaagcgcaggttcacctacgaccacgctgagctggaaaggaaaatcgcgtgctgctccccgcccccagactacaactcggtggtcctgtactccaccccacccatctagagtttgacacgaagccttatttc

SEQ ID NO: 123262 - DNA, 1275 bp, Artificial Sequence
  derived and/or modified sequence
acagagttactaattttgacagggaactgtaccgttttctcccctcagggattttcatcttaatggatcatccccctgcccccatgcttggataaagtgggctggaggcctggaaaaatctctggtgttcatgttgaaactcaaatactcttaaaaatgaactctgatctacttgttgattctgacggtttctacaaggagcccatcactatggaagatctgatttcttacagttttcaagtggccagaggcatggagttcctgtcttccagaaagtgcattcatcgggacctggcagcgagaaacattcttttatctgagaacaacgtggtgaagatttgtgattttggccttgcccgggatatttataagaaccccgattatgtgagaaaaggagatactcgacttcctctgaaatggatggctcctgaatctatctttgacaaaatctacagcaccaagagcgacgtgtggtcttacggagtattgctgtgggaaatcttctccttaggtgggtctccatacccaggagtacaaatggatgaggacttttgcagtcgcctgagggaaggcatgaggatgagagctcctgagtactctactcctgaaatctatcagatcatgctggactgctggcacagagacccaaaagaaaggccaagatttgcagaacttgtggaaaaactaggtgatttgcttcaagcaaatgtacaacaggatggtaaagactacatcccaatcaatgccatactgacaggaaatagtgggtttacatactcaactcctgccttctctgaggacttcttcaaggaaagtatttcagctccgaagtttaattcaggaagctctgatgatgtcagatacgtaaatgctttcaagttcatgagcctggaaagaatcaaaacctttgaagaacttttaccgaatgccacctccatgtttgatgactaccagggcgacagcagcactctgttggcctctcccatgctgaagcgcttcacctggactgacagcaaacccaaggcctcgctcaagattgacttgagagtaaccagtaaaagtaaggagtcggggctgtctgatgtcagcaggcccagtttctgccattccagctgtgggcacgtcagcgaaggcaagcgcaggttcacctacgaccacgctgagctggaaaggaaaatcgcgtgctgctccccgcccccagactacaactcggtggtcctgtactccaccccacccatctagagtttgacacgaagccttatttctagaagcaca

SEQ ID NO: 123263 - DNA, 4017 bp, Artificial Sequence
  derived and/or modified sequence
atggtgtcctactgggacacaggagtgctgctgtgtgccctgctgagctgcctgctgctgaccggcagcagcagcggcagcaagctgaaggaccctgagctgagcctgaagggcacccagcacatcatgcaggccggccagaccctgcacctgcagtgccgcggggaggccgcccacaagtggagcctgcctgagatggtgtccaaggagagcgagcggctgagcatcaccaagagcgcctgtggcagaaatggcaagcagttctgcagcaccctgaccctgaacacagcccaggccaaccacacaggcttctacagctgcaagtacctggccgtgcccaccagcaagaagaaggagacagagagcgccatctacatcttcatcagtgacaccggccggccctttgtggagatgtacagcgagatccctgagatcatccacatgacagagggccgggagctggtgatcccctgccgggtgaccagccccaacatcaccgtgaccctgaagaagttccccctggacaccctcatcccagatggcaagaggatcatctgggacagcaggaagggcttcatcatcagcaatgccacctacaaggagatcggcctgctgacctgtgaggccaccgtgaatggccacctgtacaagaccaactacctgacccaccggcagaccaacaccatcattgatgtgcagatcagcacccccaggcctgtgaagctgctgcggggccacaccctggtgctgaactgcacagccaccacccccctgaacaccagggtgcagatgacctggagctacccagatgagaagaacaagagggcctctgtgagaagaagaattgaccagagcaacagccacgccaacatcttctacagcgtgctgaccatcgacaagatgcagaacaaggacaagggcctgtacacctgccgggtgcgcagcggccccagcttcaagtctgtgaacacctctgtgcacatctatgacaaggccttcatcaccgtgaagcacaggaagcagcaggtgctggagaccgtggccggcaagaggagctaccgcctgtccatgaaggtgaaggccttccccagccctgaggtggtgtggctgaaggatggcctgcctgccacagagaagagcgcccgctacctgacccggggctacagcctcatcatcaaggatgtgacagaggaggatgctggcaactacaccatcctgctgagcatcaagcagagcaatgtgttcaagaacctgacagccaccctgattgtgaatgtgaagccccagatctatgagaaggctgtgtcctccttcccagaccctgccctgtaccccctgggcagccggcagatcctgacctgcacagcctacggcatcccccagcccaccatcaagtggttctggcacccctgcaaccacaaccacagcgaggcccgctgtgacttctgcagcaacaatgaggagagcttcatcctggatgctgacagcaacatgggcaaccgcatcgagagcatcacccagaggatggccatcatcgagggcaagaacaagatggccagcaccctggtggtggccgacagccgcatcagcggcatctacatctgcatcgccagcaacaaggtgggcaccgtgggcaggaacatctccttctacatcacagatgtgcccaacggcttccacgtgaacctggagaagatgcccacagaaggagaggacctgaagctgagctgcaccgtgaacaagttcctgtacagagatgtgacctggatcctgctgaggacagtgaacaacagaaccatgcactacagcatcagcaagcagaagatggccatcaccaaggagcacagcatcaccctgaacctgaccatcatgaatgtgtccctgcaggacagcggcacctacgcctgccgggccagaaatgtgtacacaggagaggagatcctgcagaagaaggagatcaccatccgggaccaggaggccccctacctgctgaggaacctgagtgaccacacagtggccatcagcagcagcaccaccctggactgccacgccaatggagtgcctgagccccagatcacctggttcaagaacaaccacaagatccagcaggagcccggcatcatcctgggccctggcagcagcaccctcttcatcgagcgggtgacagaggaggatgaaggagtgtaccactgcaaggccaccaaccagaagggctctgtggagagcagcgcctacctgactgtgcagggcaccagtgacaagagcaacctggagctgatcaccctgacctgcacctgtgtggccgccaccctcttctggctgctgctgaccctcttcatcaggaagatgaagaggagcagcagcgagatcaagacagactacctgagcatcatcatggaccctgatgaggtgcccctggatgagcagtgtgagcggctgccctatgatgccagcaagtgggagtttgcccgggagcggctgaagctgggcaagagcctgggccgcggggccttcggcaaggtggtgcaggccagcgccttcggcatcaagaagagccccacctgcaggacagtggccgtgaagatgctgaaggagggcgccacagccagcgagtacaaggccctgatgacagagctgaagatcctgacccacatcggccaccacctgaatgtggtgaacctgctgggcgcctgcaccaagcagggcggccccctgatggtgattgtggagtactgcaagtatggcaacctgagcaactacctgaagagcaagagggacctcttcttcctgaacaaggatgctgccctgcacatggagcccaagaaggagaagatggagcccggcctggagcagggcaagaagccccggctggacagcgtgaccagcagcgagagctttgccagcagcggcttccaggaggacaagagcctgagtgatgtggaggaggaggaggacagtgatggcttctacaaggagcccatcaccatggaggacctgatctcctacagcttccaggtggcccggggcatggagttcctgagcagcaggaagtgcatccaccgggacctggccgccaggaacatcctgctgtctgagaacaacgtggtgaagatctgtgactttggcctggcccgggacatctacaagaacccagactatgtgaggaagggggacacccggctgcccctgaagtggatggcccctgagagcatctttgacaagatctacagcaccaagagtgatgtgtggagctatggagtgctgctgtgggagatcttcagcctgggcggcagcccctacccaggagtgcagatggatgaggacttctgcagccggctgcgggagggcatgaggatgagggcccctgagtacagcaccccagagatctaccagatcatgctggactgctggcaccgggaccccaaggagcggcccaggtttgctgagctggtggagaagctgggggacctgctgcaggccaacgtgcagcaggacggcaaggactacatccccatcaatgccatcctgactggaaacagcggcttcacctacagcaccccagccttcagcgaggacttcttcaaggagagcatcagcgcccccaagttcaacagcggcagcagtgatgatgtgcgctacgtgaatgccttcaagttcatgagcctggagcgcatcaagacctttgaggagctgctgcccaatgccacctccatgtttgatgactaccagggcgacagcagcaccctgctggccagccccatgctgaagcgcttcacctggacagacagcaagcccaaggccagcctgaagattgacctgcgggtgaccagcaagagcaaggagagcggcctgagtgatgtgtcccggcccagcttctgccacagcagctgtggccacgtgtctgagggcaagaggcgcttcacctatgaccacgccgagctggagaggaagatcgcctgctgcagccccccaccagactacaacagcgtggtgctgtacagcaccccacccatctag

SEQ ID NO: 123264 - DNA, 1671 bp, Artificial Sequence
  derived and/or modified sequence
atgaagaggagcagcagcgagatcaagacagactacctgagcatcatcatggaccctgatgaggtgcccctggatgagcagtgtgagcggctgccctatgatgccagcaagtgggagtttgcccgggagcggctgaagctgggcaagagcctgggccgcggggccttcggcaaggtggtgcaggccagcgccttcggcatcaagaagagccccacctgcaggacagtggccgtgaagatgctgaaggagggcgccacagccagcgagtacaaggccctgatgacagagctgaagatcctgacccacatcggccaccacctgaatgtggtgaacctgctgggcgcctgcaccaagcagggcggccccctgatggtgattgtggagtactgcaagtatggcaacctgagcaactacctgaagagcaagagggacctcttcttcctgaacaaggatgctgccctgcacatggagcccaagaaggagaagatggagcccggcctggagcagggcaagaagccccggctggacagcgtgaccagcagcgagagctttgccagcagcggcttccaggaggacaagagcctgagtgatgtggaggaggaggaggacagtgatggcttctacaaggagcccatcaccatggaggacctgatctcctacagcttccaggtggcccggggcatggagttcctgagcagcaggaagtgcatccaccgggacctggccgccaggaacatcctgctgtctgagaacaacgtggtgaagatctgtgactttggcctggcccgggacatctacaagaacccagactatgtgaggaagggggacacccggctgcccctgaagtggatggcccctgagagcatctttgacaagatctacagcaccaagagtgatgtgtggagctatggagtgctgctgtgggagatcttcagcctgggcggcagcccctacccaggagtgcagatggatgaggacttctgcagccggctgcgggagggcatgaggatgagggcccctgagtacagcaccccagagatctaccagatcatgctggactgctggcaccgggaccccaaggagcggcccaggtttgctgagctggtggagaagctgggggacctgctgcaggccaacgtgcagcaggacggcaaggactacatccccatcaatgccatcctgactggaaacagcggcttcacctacagcaccccagccttcagcgaggacttcttcaaggagagcatcagcgcccccaagttcaacagcggcagcagtgatgatgtgcgctacgtgaatgccttcaagttcatgagcctggagcgcatcaagacctttgaggagctgctgcccaatgccacctccatgtttgatgactaccagggcgacagcagcaccctgctggccagccccatgctgaagcgcttcacctggacagacagcaagcccaaggccagcctgaagattgacctgcgggtgaccagcaagagcaaggagagcggcctgagtgatgtgtcccggcccagcttctgccacagcagctgtggccacgtgtctgagggcaagaggcgcttcacctatgaccacgccgagctggagaggaagatcgcctgctgcagccccccaccagactacaacagcgtggtgctgtacagcaccccacccatctag

SEQ ID NO: 123265 - DNA, 1086 bp, Artificial Sequence
  derived and/or modified sequence
atgaacagcgacctgctggtggacagtgatggcttctacaaggagcccatcaccatggaggacctgatctcctacagcttccaggtggcccggggcatggagttcctgagcagcaggaagtgcatccaccgggacctggccgccaggaacatcctgctgtctgaaaataatgtggtgaagatctgtgactttggcctggcccgggacatctacaagaacccagactatgtgaggaaaggagacacccggctgcccctgaagtggatggcccctgagagcatctttgacaagatctacagcaccaagagtgatgtgtggagctatggagtgctgctgtgggagatcttcagcctgggcggcagcccctacccaggagtgcagatggatgaggacttctgcagccggctgcgggagggcatgaggatgagggcccctgagtacagcaccccagagatctaccagatcatgctggactgctggcaccgggaccccaaggagcggcccaggtttgctgagctggtggagaagctgggggacctgctgcaggccaacgtgcagcaggacggcaaggactacatccccatcaatgccatcctgaccggcaacagcggcttcacctacagcaccccagccttcagcgaggacttcttcaaggagagcatcagcgcccccaagttcaacagcggcagcagtgatgatgtgcgctacgtgaatgccttcaagttcatgagcctggagcgcatcaagacctttgaggagctgctgcccaatgccacctccatgtttgatgactaccagggcgacagcagcaccctgctggccagccccatgctgaagcgcttcacctggacagacagcaagcccaaggccagcctgaagattgacctgcgggtgaccagcaagagcaaggagagcggcctgagtgatgtgtcccggcccagcttctgccacagcagctgtggccacgtgtctgagggcaagaggcgcttcacctatgaccatgctgagctggagaggaagatcgcctgctgcagccccccaccagactacaacagcgtggtgctgtacagcaccccacccatctag

SEQ ID NO: 123266 - DNA, 4017 bp, Artificial Sequence
  derived and/or modified sequence
atggtgagctactgggacaccggcgtgctgctgtgcgccctgctgagttgtctgctgcttacaggatcttcttcgggatctaagctgaaagaccccgagctgtcactcaaaggcacacagcacattatgcaagcaggacagacgttgcacttgcaatgccgaggcgaagcagcccataaatggagcctgccagaaatggtgtccaaggagagcgaacggctctctatcaccaagtccgcatgtggccggaacggtaagcaattttgttccactttgaccctgaacacggcccaggccaaccacacggggttttacagttgcaaatatctggccgtgcccaccagcaaaaaaaaagagactgaaagtgcaatatacatttttatcagcgataccgggcgcccatttgttgagatgtacagtgagattcccgaaataatccatatgaccgaaggaagggaactggtcatcccgtgcagggtcaccagtccgaatataacagtgactctcaagaaatttcccttggataccctcatcccagatggaaagagaataatctgggactctcggaagggctttatcatctctaatgccacctacaaagagataggcctcctcacctgtgaagcgacagtcaatggacatctgtataagacaaactaccttacccatcgccagacaaatacaatcatagatgtgcagattagcaccccccgccctgtcaaattgctgcgtgggcacaccctggtcctcaactgcaccgcaactactcccctcaatactagagtccagatgacatggtcctaccctgatgagaaaaataagcgggctagtgtaagaagacgaatcgatcagtctaatagccacgctaacatcttctacagcgtgctgaccatcgataaaatgcagaacaaggacaaaggactctatacctgccgagtcagatccgggccatcattcaaatcggttaatacgtctgtgcatatttatgacaaggcgtttataactgtgaagcataggaagcagcaagtgctggagactgtggcaggcaagagaagttacagactctccatgaaggtcaaggcgttcccctcccctgaagtggtgtggctgaaggatggtctccccgccaccgagaagtctgctcgctatctgacgcgaggctatagcctgattatcaaagacgtgactgaagaagacgctgggaactatactatactgctgtcgatcaagcagagtaacgtcttcaagaacttgactgccaccctgatcgtgaatgtcaaaccacagatctatgagaaggcagttagttccttccccgacccagccctctacccactcgggtctcgccagattttgacctgcacggcatatgggataccgcagccaacaattaaatggttttggcatccttgtaatcataatcacagcgaggcacggtgcgacttctgcagtaacaatgaagagagttttattctggacgctgattcgaatatgggtaatagaattgagtctattacccagaggatggccatcatagagggaaaaaacaagatggcatctacactcgttgtcgccgatagtagaataagcggaatatatatctgcatagctagcaacaaggtcggcaccgtggggcgtaatataagcttctacatcacggatgtgcctaacgggttccacgtaaatctggaaaaaatgcctaccgaaggggaggatctcaagttgagttgtaccgtgaataagttcctgtatcgtgacgtgacgtggatcctcttaaggaccgtcaacaataggacaatgcattacagtatctctaagcaaaagatggccattactaaggaacactccattacgctgaatctgacgatcatgaatgtatctcttcaggactcaggaacctatgcctgcagagcaagaaatgtatacaccggagaggagatccttcaaaaaaaagagattacaattcgagaccaggaggccccctatttactgcgtaatctctccgaccataccgtggccatatcatcctccaccactctcgactgccacgccaacggagtacctgaaccccagattacttggtttaaaaacaatcacaagatacaacaggagcctgggataattttggggcctggaagctctacactgttcatcgaaagggtgactgaagaagatgagggagtgtatcattgtaaagctaccaaccagaaaggcagtgtcgaatctagcgcatacctgactgttcaaggaaccagcgataagtcaaacttggaattgattaccctcacttgcacatgtgttgcggcaacgctcttttggctgctgctgaccctcttcatcaggaagatgaagcggagctccagcgaaattaaaaccgattatctgtccattataatggacccagacgaggtccctcttgacgagcagtgtgagcgcctgccctatgatgcctccaaatgggaattcgccagagaaagacttaaactgggcaaaagtttggggcgaggcgcctttggcaaagtcgtgcaggcttccgccttcggcataaaaaagtctcccacctgtcgaacagttgcagtgaaaatgctgaaggagggggctaccgctagcgagtacaaggctcttatgactgaactgaagatcctgacacacatcggccaccatctgaacgtggtgaacctccttggtgcatgcaccaaacaggggggacctcttatggttattgttgaatactgtaagtacggaaacctgtccaattatctcaagagtaaaagggacctgtttttcctgaacaaggacgcagccctgcacatggaaccaaagaaagaaaagatggagcctggcctggagcagggtaagaaacctagactggattccgtgacttccagcgagtcctttgcctcttctgggttccaagaggataagtcactctcggatgtggaggaagaagaggactccgacggattctataaggaacccatcacaatggaggaccttatttcatactcatttcaggtcgcacgcggaatggagttcctgagttctcgcaaatgcattcaccgcgatctggctgcgcggaacatactcctaagcgagaacaacgttgtgaagatctgtgattttggcctcgccagagatatttacaagaatccagattacgttcggaagggggacaccagactacctctaaaatggatggcccctgagtccatttttgataagatatatagcaccaagtcagacgtctggtcctatggggtgctgctctgggaaattttctctcttggcggctctccttaccctggagtgcagatggacgaggacttctgttcgaggctaagggagggcatgcgaatgcgagcccccgaatactctacacccgagatctatcagataatgctggattgttggcacagggaccctaaagaacgcccccggttcgccgagcttgtcgaaaagttaggggatcttttgcaggctaacgtgcagcaagacggcaaggactacatccccataaacgccatactgaccggaaattccggttttacttattctacaccggcttttagcgaagatttttttaaagaatccatttccgcaccaaaattcaatagcggaagctccgacgacgtgcgctacgtgaacgcgttcaagtttatgagccttgaaaggatcaagacatttgaggagttgctgcccaacgccacttcaatgttcgatgactaccaaggtgattcctcgacgttgctggcatctccgatgctgaagaggtttacatggactgatagcaagccaaaggctagccttaaaatagatctgagggtgacctcaaagagcaaagaaagcggactttccgacgttagtaggccatccttttgccatagttcttgcgggcatgtttccgaggggaagcgcaggtttacttatgaccatgcggaactagaaaggaagatcgcttgttgcagcccacctcctgactacaatagcgtcgtgttgtactccacacctccaatctag

SEQ ID NO: 123267 - DNA, 1671 bp, Artificial Sequence
  derived and/or modified sequence
atgaagcggagcagcagcgagatcaagaccgactacctgagcatcatcatggacccagatgaagtaccgctcgacgagcaatgcgagagactcccctatgatgcatcgaagtgggagttcgccagggagcgcctgaaactgggcaagagtctaggtaggggggctttcggcaaggtggttcaagcttctgccttcgggattaaaaagtccccgacatgtcgaaccgtggctgtgaaaatgctgaaggaaggggctacggccagtgaatacaaggctctcatgacggaactgaagatattaacacacatcggtcaccatctcaacgtcgtgaacctcttgggagcttgcactaaacagggaggtcccctgatggtgattgtggagtactgcaagtacggcaatcttagcaattacctgaaatccaagagagatctgttttttttaaacaaggacgccgcactgcatatggagcccaaaaaagagaagatggaacccggcctggagcaaggtaaaaaacccaggctggacagcgtgaccagcagtgagtcttttgctagctctggatttcaggaggataaatccttgtccgatgtcgaggaagaagaagattccgacgggttttacaaagagcctataacaatggaggacctgattagctatagcttccaggttgcccgcgggatggagtttctctcctctaggaagtgcatccacagggacctcgcagctagaaatatcctactcagcgagaataacgtagtgaagatctgtgacttcggccttgcacgggacatttacaagaatcctgattatgtccgaaaaggcgacacccgtctccccctcaaatggatggcccccgaaagcattttcgataaaatctattcgacaaagtctgacgtgtggagttatggcgtcctcctgtgggagattttttctcttggaggctccccatatcccggggtgcagatggatgaagatttctgttccaggcttcgcgagggaatgaggatgagagccccggagtattccacccccgagatatatcaaatcatgctagattgttggcacagagatcccaaagagcgaccccgctttgccgaactggtggaaaagttgggcgatctcctgcaggctaacgtacagcaggatggcaaggactacatcccaatcaatgccatcttgactggtaatagcggatttacttattcaactccagcattttctgaagacttctttaaggagtctatttcggcgccaaagttcaactcagggtcttccgacgacgtgcgctatgtgaatgcctttaagtttatgtccctcgagagaatcaagacctttgaggagcttctcccaaacgcgacctctatgttcgacgattatcagggcgactcttcgaccttgttagcctctcctatgctgaagaggttcacttggaccgacagcaagccaaaggcatccctgaagatcgacctgcgcgttacttccaagtcgaaagaaagcggtctttctgacgtaagcaggcccagtttctgtcacagttcttgtggacacgtctcagagggcaagcgacgcttcacttatgatcacgccgaactggaaaggaagattgcatgctgcagtccccctcccgactacaattccgttgtgctgtactccacaccgcccatctag

SEQ ID NO: 123268 - DNA, 1086 bp, Artificial Sequence
  derived and/or modified sequence
atgaacagcgacctgctggtggacagcgacggcttctacaaggagcccatcactatggaggacctcattagctactcgttccaagtagcccggggcatggaatttctttccagtaggaagtgcatccatagagacctggccgcacgcaatatactgctgagcgaaaacaacgttgtcaaaatttgcgatttcgggctggctagggatatatataagaatcccgactacgtcaggaaaggggacactcgtcttccgcttaaatggatggctcctgaaagtatatttgataagatatactcaaccaagtccgacgtgtggagctatggtgtcctcctgtgggaaatttttagtttagggggatccccttaccctggggtgcagatggatgaggatttttgcagccgtctgagggagggcatgaggatgcgggcaccagaatacagcacaccagagatctaccagatcatgctcgactgttggcatagagacccaaaggagagacctcgattcgcagagctcgtagaaaaattaggcgatttgcttcaagcaaacgtacaacaggacggtaaagactatataccgatcaacgccattctgacaggcaactcagggtttacttactccacgcctgcatttagcgaggatttttttaaggagagtattagtgctccaaaattcaactccgggagttcggacgatgttagatacgtgaatgccttcaaattcatgtccctggaacgcatcaagacgttcgaagaattattgccaaatgctaccagtatgtttgacgactaccagggagattccagcacgttactagcatccccaatgctcaagaggtttacctggactgattcaaagcctaaggcgtctctcaaaatcgacctacgggtgaccagcaagtctaaggagtcaggtctgtcagacgttagcaggccctcattttgccatagttcatgtggccatgttagcgaaggaaagcgacgtttcacgtacgatcacgcagagctagaaaggaaaatcgcgtgctgttcacctcctccggattataactccgttgtgctgtattctaccccgcccatctag

SEQ ID NO: 123269 - DNA, 4017 bp, Artificial Sequence
  derived and/or modified sequence
atggtaagctactgggataccggcgttctcctgtgtgctcttctttcctgtttgctgttgaccggatcttcttcaggatccaaactgaaagatcccgagctatccttgaagggcacccaacacattatgcaagccggacaaaccctgcaccttcaatgtaggggcgaggcagcacataaatggtcgctaccagagatggtttctaaagagagcgagaggctgagtatcactaagtcagcctgcggtaggaacggcaagcagttctgttccacgttaacgcttaacacggcacaggctaatcacactggattttactcttgcaagtatttggcagtgcccaccagcaaaaagaaagagactgagagcgcaatttacatttttatctctgacactgggcgaccattcgtagaaatgtactctgaaatccccgagatcattcacatgacagaagggcgagaactcgtgatcccttgccgcgtgacttccccgaatatcacagtaactcttaaaaagttcccactcgacactctaattcccgacggtaagagaatcatctgggacagccgcaagggttttattatcagcaacgccacctataaggaaataggactcctgacttgtgaggctacggtcaatggccacctttataagactaactatctcactcacaggcagacgaacaccatcattgatgttcaaatttccacgccacgccctgttaaattgctacggggacacaccctcgtgctaaattgtaccgccactacgcccctgaacactagagtccagatgacatggagctatcctgacgaaaaaaataagcgtgcatccgtgagacgcaggattgaccagtccaactcccacgctaacattttttatagtgtgctcaccattgacaaaatgcaaaataaggacaaagggctgtatacctgcagagtgcgatccggcccttccttcaaaagtgtgaacacctcggtacacatctacgacaaagcatttattaccgtgaagcatcgaaaacagcaagtgcttgagacagtggcagggaagcgcagctacagactgtcaatgaaagtaaaggcctttccgtcccctgaagtggtttggctgaaggatggactcccggcaacagagaaatcggccaggtacctcacccggggatactctctgattatcaaagacgttaccgaagaggacgctggcaattacacaatcctcttatccattaagcagagtaacgtttttaagaatttgactgcgacactgatagtgaacgtcaagccgcagatttatgagaaggcagtcagttcctttccggatcccgcactgtacccattgggctcccgccagatactaacctgtactgcctacggaatacctcagcctacaatcaaatggttttggcatccttgtaaccacaaccattctgaggctcgctgtgacttttgcagtaacaatgaagagtcatttattctggatgctgactctaacatgggaaacagaattgaaagcattacacagcgtatggctatcattgaggggaaaaacaagatggcaagcactctggtggttgcagattctcgaatatcaggcatctacatttgcattgccagcaacaaggttggtacagttggtagaaatatttctttttacataacggacgtaccaaatgggttccacgtaaacctggagaagatgcctacagaaggcgaggacctcaagctctcttgtaccgtgaataaattcctttacagggacgtgacatggatcctcctccgaactgtgaacaatcgcacaatgcattactccatcagtaaacagaagatggcaattacgaaggaacactccataaccctgaacctgacgattatgaacgtgagcctccaggactcagggacatatgcttgcagagcgcgaaatgtctacactggggaagagatccttcaaaaaaaagaaattaccatcagagatcaagaggctccctacttactcagaaatctatcagaccacaccgtggccatcagctcatctacaacccttgactgccatgccaacggggtgcctgagccacaaataacgtggttcaaaaacaaccataagatacagcaggaaccaggcatcatccttggcccagggagttccaccctgttcattgagcgcgtgactgaggaggatgagggagtgtaccattgtaaggcaactaatcagaagggctctgtggaatcatccgcctacctgactgtgcagggtacatccgacaaatctaaccttgagctaataacgctcacttgcacgtgtgtcgccgcaaccctcttctggctgttacttaccctcttcattcgtaagatgaaacgaagcagcagcgagattaagactgattacctgtccatcattatggatcccgacgaagtcccactggatgaacagtgtgagagactgccttatgatgcatcgaagtgggagttcgccagagaacgattgaaactgggcaaaagtctgggtcgaggggcatttggcaaagttgtacaggcatctgcctttgggatcaagaaatctccaacatgtcgaactgttgccgtgaagatgctaaaagaaggcgctaccgcgtcagagtacaaggccctgatgactgaactgaaaattctgacccacattggacatcacctgaacgttgtgaacttactgggcgcttgtactaaacaggggggacctcttatggtgatcgtagaatattgtaaatacggcaacctcagcaattaccttaagagcaaacgggatctgtttttcctaaataaggatgccgctctgcacatggagcccaaaaaggaaaagatggaacccggattggagcaggggaagaaaccaagactagactcggtaaccagcagtgagtcgttcgcctccagtgggtttcaggaagacaagagcttgtccgatgtggaggaagaggaagactccgatgggttctacaaagagcccataaccatggaggacctcatctcttactccttccaggtggcccgaggcatggaatttctctcatcccggaagtgcattcaccgcgacttggcagccaggaatattttactaagcgagaacaacgtcgtcaagatttgtgatttcggtctggctcgcgacatttacaagaatcctgactacgttcggaaaggggacactagattgccactgaagtggatggcccctgaatctattttcgataaaatttattctacaaaatcggatgtctggagctacggtgtcctcctctgggagatcttcagtctgggtggctctccttatcctggcgtgcagatggacgaagatttctgttctaggctcagagagggaatgcgtatgagggctcctgagtactcaacgcccgaaatctaccaaatcatgttagactgctggcatcgcgaccccaaggagcggcctagattcgcggagctggtagaaaaactgggtgatctactgcaggcaaatgtgcagcaggacggcaaagactacatccccattaacgctatccttacgggcaactccggttttacttattcgacccccgctttcagtgaggatttctttaaagagtccatctcggctcccaaatttaacagcgggagctcagacgatgtgcggtatgttaacgctttcaaatttatgtccctggagcggatcaaaacctttgaggaactgcttcccaatgcgacctccatgttcgatgactaccagggagacagtagtacattgttggcttcacctatgctgaaaagatttacctggactgattctaaacccaaggcatctttgaaaatagatctgagggtcacaagcaaaagcaaagagtcaggtttgagcgacgtgagccgcccaagcttctgccacagttcatgcggccacgtgtcagaaggaaagcggagatttacctatgatcacgctgaactggagaggaagatagcctgctgctcacctcccccagattacaactctgtcgtcctatactcaactcccccaatctag

SEQ ID NO: 123270 - DNA, 1671 bp, Artificial Sequence
  derived and/or modified sequence
atgaaaaggagcagcagtgaaattaaaactgactacctctctatcattatggaccccgacgaagtgcctctggatgagcagtgcgaacgcctgccctacgacgcctccaaatgggaatttgcccgtgaacgcctcaagttgggaaagtctctaggtaggggtgccttcgggaaggtggttcaagcctcggcattcgggattaagaaatcacccacttgtcgaactgtagccgtgaaaatgctgaaggagggagccaccgcctctgaatacaaggcactaatgacagaactgaagatacttacccacataggccatcacctgaatgtcgttaatctcctgggcgcttgtaccaagcaaggcggtcccctgatggtgatcgttgagtattgtaaatacggaaatttgtctaattacctgaagagtaaacgagacctgttctttctgaacaaagatgcagccctgcatatggagccaaagaaggagaaaatggagcctggcctggagcaggggaagaaacccaggctggactccgtgacaagctcagagtcctttgcatcctcaggttttcaggaagacaaaagccttagcgacgtagaggaggaggaagattccgacggcttctataaggagcccatcacaatggaggacctgatttcgtattcttttcaggttgcgagaggaatggaattcctgagctcccgcaaatgcatccatagggatcttgctgcacggaacattctgctgtcggaaaataatgtggtgaagatttgcgactttggcttagcaagggatatttataagaatccggactacgttcgtaaaggggacacgagactgccattgaagtggatggctcccgagagtattttcgataagatctacagtaccaagtccgacgtctggagctacggcgtgcttctctgggagattttctcgctcggaggtagcccctaccccggtgtgcagatggatgaagacttttgttcccgtctgagggaagggatgagaatgagggcaccagagtactcaactccggagatctaccaaattatgctcgactgctggcatagagatccaaaagagagaccgcgattcgctgagctcgtggaaaagctgggcgatttgcttcaggccaatgtccagcaggacggaaaagactacatccctatcaacgccatcctcacggggaatagcggattcacatactcaacacccgcattttccgaggatttttttaaggagtctatctctgcacctaaattcaactcaggatcttcggacgacgttagatacgtgaatgccttcaagttcatgtctttggagagaatcaagacctttgaggaattgctcccaaacgccacttccatgttcgacgactatcagggtgactcctccactttgctcgcctctccaatgttgaaaaggttcacctggaccgactccaaacctaaagccagcctgaaaatcgatctgcgggtgacgtccaaaagtaaagagtccggcttgagcgacgtatctcggccatcgttctgccatagctcttgcgggcacgtctcagagggaaaacgcagatttacctacgatcatgcagaactcgaaaggaagatcgcctgttgttctccacctcccgactacaattcagtggtcctttacagtacgccacctatttag

SEQ ID NO: 123271 - DNA, 1086 bp, Artificial Sequence
  derived and/or modified sequence
atgaattcagacctgctggtcgattccgacggcttctataaagagcccataactatggaggacctcatctcctactcctttcaagtggcacgaggcatggagtttttatctagtaggaagtgcatccatcgtgatctggctgccagaaacattttgttgtcagaaaataacgttgttaaaatttgcgacttcggactcgcaagagatatatacaagaaccccgactatgtgcgcaaaggcgacacacgactgcctctgaagtggatggccccagaatctatattcgataagatttattctacaaaaagcgatgtctggtcttacggtgtattgctgtgggagattttcagcctggggggatctccttacccaggcgtgcagatggacgaagacttctgtagcaggctgcgagaggggatgcgcatgagagctccagagtatagtacgcctgagatttatcagattatgctggactgttggcaccgagatccaaaggagagaccgagattcgcagagttggtcgaaaagctcggcgaccttctgcaagcgaacgtgcagcaagacggcaaagattatatacctattaacgcaatccttaccggaaacagcgggttcacctatagcacccccgctttcagtgaagatttctttaaggaatccatcagtgctcccaaattcaattcggggtcctctgatgatgtcagatacgtgaatgccttcaaatttatgtctcttgagaggatcaagacgttcgaagagttattacccaacgctactagcatgttcgacgactaccaaggagactcctccaccctgctggcctctcctatgctgaagcgattcacgtggacagactctaagccaaaggcgagtcttaagattgatctgcgcgtcacctcaaaatctaaagagagtggcctgagtgatgtgagccgcccttcattttgtcactcgagttgcgggcacgttagcgaaggtaaacggagatttacgtacgaccatgccgagctggagagaaagattgcctgctgcagccccccacccgattacaactctgtagtgctctattcaacccctccgatctag

SEQ ID NO: 123272 - protein, 1298 aa, Artificial Sequence
  derived and/or modified sequence
MQRGAALCLRLWLCLGLLDGLVSGYSMTPPTLNITEESHVIDTGDSLSISCRGQHPLEWAWPGAQEAPATGDKDSEDTGVVRDCEGTDARPYCKVLLLHEVHANDTGSYVCYYKYIKARIEGTTAASSYVFVRDFEQPFINKPDTLLVNRKDAMWVPCLVSIPGLNVTLRSQSSVLWPDGQEVVWDDRRGMLVSTPLLHDALYLQCETTWGDQDFLSNPFLVHITGNELYDIQLLPRKSLELLVGEKLVLNCTVWAEFNSGVTFDWDYPGKQAERGKWVPERRSQQTHTELSSILTIHNVSQHDLGSYVCKANNGIQRFRESTEVIVHENPFISVEWLKGPILEATAGDELVKLPVKLAAYPPPEFQWYKDGKALSGRHSPHALVLKEVTEASTGTYTLALWNSAAGLRRNISLELVVNVPPQIHEKEASSPSIYSRHSRQALTCTAYGVPLPLSIQWHWRPWTPCKMFAQRSLRRRQQQDLMPQCRDWRAVTTQDAVNPIESLDTWTEFVEGKNKTVSKLVIQNANVSAMYKCVVSNKVGQDERLIYFYVTTIPDGFTIESKPSEELLEGQPVLLSCQADSYKYEHLRWYRLNLSTLHDAHGNPLLLDCKNVHLFATPLAASLEEVAPGARHATLSLSIPRVAPEHEGHYVCEVQDRRSHDKHCHKKYLSVQALEAPRLTQNLTDLLVNVSDSLEMQCLVAGAHAPSIVWYKDERLLEEKSGVDLADSNQKLSIQRVREEDAGRYLCSVCNAKGCVNSSASVAVEGSEDKGSMEIVILVGTGVIAVFFWVLLLLIFCNMRRPAHADIKTGYLSIIMDPGEVPLEEQCEYLSYDASQWEFPRERLHLGRVLGYGAFGKVVEASAFGIHKGSSCDTVAVKMLKEGATASEHRALMSELKILIHIGNHLNVVNLLGACTKPQGPLMVIVEFCKYGNLSNFLRAKRDAFSPCAEKSPEQRGRFRAMVELARLDRRRPGSSDRVLFARFSKTEGGARRASPDQEAEDLWLSPLTMEDLVCYSFQVARGMEFLASRKCIHRDLAARNILLSESDVVKICDFGLARDIYKDPDYVRKGSARLPLKWMAPESIFDKVYTTQSDVWSFGVLLWEIFSLGASPYPGVQINEEFCQRLRDGTRMRAPELATPAIRRIMLNCWSGDPKARPAFSELVEILGDLLQGRGLQEEEEVCMAPRSSQSSEEGSFSQVSTMALHIAQADAEDSPPSLQRHSLAARYYNWVSFPGCLARGAETRGSSRMKTFEEFPMTPTTYKGSVDNQTDSGMVLASEEFEQIESRHRQESGFR

SEQ ID NO: 123273 - protein, 1306 aa, Artificial Sequence
  derived and/or modified sequence
MQRGAALCLRLWLCLGLLDGLVSGYSMTPPTLNITEESHVIDTGDSLSISCRGQHPLEWAWPGAQEAPATGDKDSEDTGVVRDCEGTDARPYCKVLLLHEVHANDTGSYVCYYKYIKARIEGTTAASSYVFVRDFEQPFINKPDTLLVNRKDAMWVPCLVSIPGLNVTLRSQSSVLWPDGQEVVWDDRRGMLVSTPLLHDALYLQCETTWGDQDFLSNPFLVHITGNELYDIQLLPRKSLELLVGEKLVLNCTVWAEFNSGVTFDWDYPGKQAERGKWVPERRSQQTHTELSSILTIHNVSQHDLGSYVCKANNGIQRFRESTEVIVHENPFISVEWLKGPILEATAGDELVKLPVKLAAYPPPEFQWYKDGKALSGRHSPHALVLKEVTEASTGTYTLALWNSAAGLRRNISLELVVNVPPQIHEKEASSPSIYSRHSRQALTCTAYGVPLPLSIQWHWRPWTPCKMFAQRSLRRRQQQDLMPQCRDWRAVTTQDAVNPIESLDTWTEFVEGKNKTVSKLVIQNANVSAMYKCVVSNKVGQDERLIYFYVTTIPDGFTIESKPSEELLEGQPVLLSCQADSYKYEHLRWYRLNLSTLHDAHGNPLLLDCKNVHLFATPLAASLEEVAPGARHATLSLSIPRVAPEHEGHYVCEVQDRRSHDKHCHKKYLSVQALEAPRLTQNLTDLLVNVSDSLEMQCLVAGAHAPSIVWYKDERLLEEKSGVDLADSNQKLSIQRVREEDAGRYLCSVCNAKGCVNSSASVAVEGSEDKGSMEIVILVGTGVIAVFFWVLLLLIFCNMRRPAHADIKTGYLSIIMDPGEVPLEEQCEYLSYDASQWEFPRERLHLGRVLGYGAFGKVVEASAFGIHKGSSCDTVAVKMLKEGATASEHRALMSELKILIHIGNHLNVVNLLGACTKPQGPLMVIVEFCKYGNLSNFLRAKRDAFSPCAEKSPEQRGRFRAMVELARLDRRRPGSSDRVLFARFSKTEGGARRASPDQEAEDLWLSPLTMEDLVCYSFQVARGMEFLASRKCIHRDLAARNILLSESDVVKICDFGLARDIYKDPDYVRKGSARLPLKWMAPESIFDKVYTTQSDVWSFGVLLWEIFSLGASPYPGVQINEEFCQRLRDGTRMRAPELATPAIRRIMLNCWSGDPKARPAFSELVEILGDLLQGRGLQEEEEVCMAPRSSQSSEEGSFSQVSTMALHIAQADAEDSPPSLQRHSLAARYYNWVSFPGCLARGAETRGSSRMKTFEEFPMTPTTYKGSVDNQTDSGMVLASEEFEQIESRHRQESGFRGTRRTRGA

SEQ ID NO: 123274 - DNA, 3897 bp, Artificial Sequence
  derived and/or modified sequence
atgcagagaggcgccgccctgtgcctgagactgtggctgtgcctgggcctgctggacggcctggtgagcggctacagcatgaccccccccaccctgaacatcaccgaggagagccacgtgatcgacaccggcgacagcctgagcatcagctgcagaggccagcaccccctggagtgggcctggcccggcgcccaggaggcccccgccaccggcgacaaggacagcgaggacaccggcgtggtgagagactgcgagggcaccgacgccagaccctactgcaaggtgctgctgctgcacgaggtgcacgccaacgacaccggcagctacgtgtgctactacaagtacatcaaggccagaatcgagggcaccaccgccgccagcagctacgtgttcgtgagagacttcgagcagcccttcatcaacaagcccgacaccctgctggtgaacagaaaggacgccatgtgggtgccctgcctggtgagcatccccggcctgaacgtgaccctgagaagccagagcagcgtgctgtggcccgacggccaggaggtggtgtgggacgacagaagaggcatgctggtgagcacccccctgctgcacgacgccctgtacctgcagtgcgagaccacctggggcgaccaggacttcctgagcaaccccttcctggtgcacatcaccggcaacgagctgtacgacatccagctgctgcccagaaagagcctggagctgctggtgggcgagaagctggtgctgaactgcaccgtgtgggccgagttcaacagcggcgtgaccttcgactgggactaccccggcaagcaggccgagagaggcaagtgggtgcccgagagaagaagccagcagacccacaccgagctgagcagcatcctgaccatccacaacgtgagccagcacgacctgggcagctacgtgtgcaaggccaacaacggcatccagagattcagagagagcaccgaggtgatcgtgcacgagaaccccttcatcagcgtggagtggctgaagggccccatcctggaggccaccgccggcgacgagctggtgaagctgcccgtgaagctggccgcctaccccccccccgagttccagtggtacaaggacggcaaggccctgagcggcagacacagcccccacgccctggtgctgaaggaggtgaccgaggccagcaccggcacctacaccctggccctgtggaacagcgccgccggcctgagaagaaacatcagcctggagctggtggtgaacgtgcccccccagatccacgagaaggaggccagcagccccagcatctacagcagacacagcagacaggccctgacctgcaccgcctacggcgtgcccctgcccctgagcatccagtggcactggagaccctggaccccctgcaagatgttcgcccagagaagcctgagaagaagacagcagcaggacctgatgccccagtgcagagactggagagccgtgaccacccaggacgccgtgaaccccatcgagagcctggacacctggaccgagttcgtggagggcaagaacaagaccgtgagcaagctggtgatccagaacgccaacgtgagcgccatgtacaagtgcgtggtgagcaacaaggtgggccaggacgagagactgatctacttctacgtgaccaccatccccgacggcttcaccatcgagagcaagcccagcgaggagctgctggagggccagcccgtgctgctgagctgccaggccgacagctacaagtacgagcacctgagatggtacagactgaacctgagcaccctgcacgacgcccacggcaaccccctgctgctggactgcaagaacgtgcacctgttcgccacccccctggccgccagcctggaggaggtggcccccggcgccagacacgccaccctgagcctgagcatccccagagtggcccccgagcacgagggccactacgtgtgcgaggtgcaggacagaagaagccacgacaagcactgccacaagaagtacctgagcgtgcaggccctggaggcccccagactgacccagaacctgaccgacctgctggtgaacgtgagcgacagcctggagatgcagtgcctggtggccggcgcccacgcccccagcatcgtgtggtacaaggacgagagactgctggaggagaagagcggcgtggacctggccgacagcaaccagaagctgagcatccagagagtgagagaggaggacgccggcagatacctgtgcagcgtgtgcaacgccaagggctgcgtgaacagcagcgccagcgtggccgtggagggcagcgaggacaagggcagcatggagatcgtgatcctggtgggcaccggcgtgatcgccgtgttcttctgggtgctgctgctgctgatcttctgcaacatgagaagacccgcccacgccgacatcaagaccggctacctgagcatcatcatggaccccggcgaggtgcccctggaggagcagtgcgagtacctgagctacgacgccagccagtgggagttccccagagagagactgcacctgggcagagtgctgggctacggcgccttcggcaaggtggtggaggccagcgccttcggcatccacaagggcagcagctgcgacaccgtggccgtgaagatgctgaaggagggcgccaccgccagcgagcacagagccctgatgagcgagctgaagatcctgatccacatcggcaaccacctgaacgtggtgaacctgctgggcgcctgcaccaagccccagggccccctgatggtgatcgtggagttctgcaagtacggcaacctgagcaacttcctgagagccaagagagacgccttcagcccctgcgccgagaagagccccgagcagagaggcagattcagagccatggtggagctggccagactggacagaagaagacccggcagcagcgacagagtgctgttcgccagattcagcaagaccgagggcggcgccagaagagccagccccgaccaggaggccgaggacctgtggctgagccccctgaccatggaggacctggtgtgctacagcttccaggtggccagaggcatggagttcctggccagcagaaagtgcatccacagagacctggccgccagaaacatcctgctgagcgagagcgacgtggtgaagatctgcgacttcggcctggccagagacatctacaaggaccccgactacgtgagaaagggcagcgccagactgcccctgaagtggatggcccccgagagcatcttcgacaaggtgtacaccacccagagcgacgtgtggagcttcggcgtgctgctgtgggagatcttcagcctgggcgccagcccctaccccggcgtgcagatcaacgaggagttctgccagagactgagagacggcaccagaatgagagcccccgagctggccacccccgccatcagaagaatcatgctgaactgctggagcggcgaccccaaggccagacccgccttcagcgagctggtggagatcctgggcgacctgctgcagggcagaggcctgcaggaggaggaggaggtgtgcatggcccccagaagcagccagagcagcgaggagggcagcttcagccaggtgagcaccatggccctgcacatcgcccaggccgacgccgaggacagcccccccagcctgcagagacacagcctggccgccagatactacaactgggtgagcttccccggctgcctggccagaggcgccgagaccagaggcagcagcagaatgaagaccttcgaggagttccccatgacccccaccacctacaagggcagcgtggacaaccagaccgacagcggcatggtgctggccagcgaggagttcgagcagatcgagagcagacacagacaggagagcggcttcagatag

SEQ ID NO: 123275 - DNA, 3897 bp, Artificial Sequence
  derived and/or modified sequence
atgcagagaggggccgcactctgcttgaggctgtggctatgcttgggccttctcgatggcctggtcagtggctactctatgaccccacctactctaaacattaccgaggagtcacatgtaatcgacacgggggattcactgagcatctcgtgcagaggacaacatcctctggagtgggcctggcccggagcccaagaagcaccagctaccggggataaagatagtgaggatacaggggtagttagggactgcgaaggcacggatgcacggccctactgtaaagtcctattgcttcatgaggtgcacgcaaacgacactggttcctatgtctgctactataagtacatcaaggccagaattgagggcaccacagccgctagttcttatgtgtttgtgcgcgactttgagcaacccttcatcaataagcccgacactctccttgttaatcgcaaagacgcgatgtgggtgccttgcttggtcagtattcccgggttgaacgtgacgcttagatcacagagctctgttctgtggcctgacgggcaggaagtcgtgtgggacgatagaagaggaatgctcgtttctacacctctgctgcacgacgctctgtacctgcaatgtgaaaccacgtggggtgatcaagacttcttgtcgaacccatttctggtgcacattaccggaaatgagctctacgacattcagctactccctaggaaaagcctggaattgctagtcggagaaaaattggtgttgaactgtaccgtgtgggctgaatttaattctggagtgacatttgattgggattacccagggaagcaggcagaaagaggaaagtgggtgccagagagacgaagtcaacagacacataccgagctctcttccattctaaccattcacaatgttagccagcacgacttgggttcctacgtgtgtaaggcaaataacgggatccagcgctttcgggaaagtaccgaggtcattgttcatgaaaacccattcataagcgtcgaatggttaaagggcccaattctggaggcaaccgctggagacgagctcgtgaaactacctgtcaagttggcggcctatccacctcctgaatttcagtggtacaaagacggcaaggccctgagcggcagacactcaccccacgccctcgtcctcaaggaggtgacagaggccagcacggggacctataccctggccctatggaactccgctgctggcctacgtagaaatatttcgctcgagctcgtcgtcaacgtgcctccacaaatccacgagaaagaagcatcaagcccaagtatctatagcagacattcacgacaggctctcacgtgtacagcctacggggtcccattgcctctgtccatccagtggcactggaggccttggaccccatgcaagatgttcgcacagcggagcctgagacgccggcagcaacaggaccttatgcctcagtgtcgcgactggcgagccgtcactactcaggacgcggttaatccaatcgaaagcctcgacacctggaccgagttcgtggaagggaagaacaaaacagtgagcaagctggtaatccagaacgccaatgtgtcggcaatgtacaaatgtgttgtgtccaataaggtgggacaagatgaaagactgatctacttttacgtgactaccatccctgacggatttaccatcgagtcaaagccaagcgaggagctcctggaaggtcaaccagtgctcctttcctgtcaggctgactcctacaagtatgagcacctcagatggtacaggttaaatctgagcacgttgcatgacgcgcatggcaacccccttcttctggattgcaaaaatgtccatctattcgcaaccccattggccgcttcgctggaggaagtagccccaggcgccagacatgccactctaagcctatccattcccagagttgcccccgaacatgagggtcactatgtgtgcgaggtgcaggatcggcgctcgcacgacaagcattgccacaagaagtatctctccgtacaggcattggaggcaccccggctgacacagaatctgaccgatctcctggtaaacgtatctgacagccttgagatgcagtgtctcgtggcaggggctcacgcgccgtccatcgtatggtacaaagacgaaagattacttgaggagaaaagcggtgtggatctggctgattctaatcagaagctctctatacagcgggttcgggaagaggatgccgggaggtacctctgtagcgtgtgtaacgctaagggttgcgtgaacagtagcgcgtcagtggcagtggagggctcagaggacaagggaagtatggaaatcgttattctggtggggacgggggtgatagcagtttttttttgggtcttgctgctgcttatcttctgcaacatgcgacggccggcccacgcagatataaagacaggctatctgtcaattatcatggatcccggtgaagtgcccctggaggaacagtgtgaatatctgtcctacgatgcttctcagtgggagtttccacgagagcggctgcacttggggcgagttctaggatacggagcgttcggaaaggtggtggaggctagcgcgtttggcatacacaaagggagtagttgcgacaccgtcgccgttaaaatgttgaaggagggagcgactgcttccgagcacagggcgttgatgtcggaattaaagatactgatccatatcggcaatcatctcaatgtcgtgaatctcctgggggcttgtaccaaaccccaaggtcccctgatggttattgttgaattttgtaagtacggcaatctgagcaactttctgagagctaagagggacgctttctcgccttgcgccgagaaatcaccagagcagcgaggccgcttcagagcgatggtggagttagcccggctagatcggcgcaggccaggatcgtctgacagagtgctgttcgcccgtttctcaaagaccgagggcggcgctcggcgagccagtcccgaccaggaagccgaagacttgtggttgtctccccttactatggaggacttggtatgctactcctttcaagtggccaggggaatggagttcttggcatcaaggaagtgcatccatcgtgatttggcagcaagaaatatcctcctgtccgaaagtgacgtcgtgaaaatctgtgacttcggcctggctagagacatatataaggatccagattacgtgcgcaagggcagcgcaaggctacctctgaagtggatggcgcccgagagcatctttgacaaggtctatacaacgcagagcgacgtgtggagcttcggggtcctgttatgggagatattttcccttggtgcttctccatatcctggcgttcagatcaatgaggagttttgtcagcgcttaagagacggtactagaatgagggcacccgaactcgctacccccgccatacgccgtattatgcttaattgttggagcggggacccaaaggcccgacccgctttctccgaactcgtggagatcctcggggatttacttcagggaagaggactgcaggaggaagaagaggtctgcatggcccctaggtcctcccagagctctgaggaaggttccttttctcaggtaagtaccatggcactccatattgcacaggctgacgccgaggactcaccacctagtctgcagaggcacagtttagcggcgaggtattataactgggtctcattccctggctgcctcgctcgcggagccgaaaccaggggttctagcaggatgaagacatttgaggagtttccaatgaccccaacgacatataaaggtagcgtcgataaccagacggacagcggtatggtgctcgcaagcgaggagttcgaacagattgagtctcggcataggcaagaatctggattcaggtag

SEQ ID NO: 123276 - DNA, 4292 bp, Artificial Sequence
  derived and/or modified sequence
aggccagccggcgcccgcgcggacactttcagccccgagccgcggccgctcgggtcggacccacgcgcagcggccggagatgcagcggggcgccgcgctgtgcctgcgactgtggctctgcctgggactcctggacggcctggtgagtggctactccatgacccccccgaccttgaacatcacggaggagtcacacgtcatcgacaccggtgacagcctgtccatctcctgcaggggacagcaccccctcgagtgggcttggccaggagctcaggaggcgccagccaccggagacaaggacagcgaggacacgggggtggtgcgagactgcgagggcacagacgccaggccctactgcaaggtgttgctgctgcacgaggtacatgccaacgacacaggcagctacgtctgctactacaagtacatcaaggcacgcatcgagggcaccacggccgccagctcctacgtgttcgtgagagactttgagcagccattcatcaacaagcctgacacgctcttggtcaacaggaaggacgccatgtgggtgccctgtctggtgtccatccccggcctcaatgtcacgctgcgctcgcaaagctcggtgctgtggccagacgggcaggaggtggtgtgggatgaccggcggggcatgctcgtgtccacgccactgctgcacgatgccctgtacctgcagtgcgagaccacctggggagaccaggacttcctttccaaccccttcctggtgcacatcacaggcaacgagctctatgacatccagctgttgcccaggaagtcgctggagctgctggtaggggagaagctggtcctgaactgcaccgtgtgggctgagtttaactcaggtgtcacctttgactgggactacccagggaagcaggcagagcggggtaagtgggtgcccgagcgacgctcccagcagacccacacagaactctccagcatcctgaccatccacaacgtcagccagcacgacctgggctcgtatgtgtgcaaggccaacaacggcatccagcgatttcgggagagcaccgaggtcattgtgcatgaaaatcccttcatcagcgtcgagtggctcaaaggacccatcctggaggccacggcaggagacgagctggtgaagctgcccgtgaagctggcagcgtaccccccgcccgagttccagtggtacaaggatggaaaggcactgtccgggcgccacagtccacatgccctggtgctcaaggaggtgacagaggccagcacaggcacctacaccctcgccctgtggaactccgctgctggcctgaggcgcaacatcagcctggagctggtggtgaatgtgcccccccagatacatgagaaggaggcctcctcccccagcatctactcgcgtcacagccgccaggccctcacctgcacggcctacggggtgcccctgcctctcagcatccagtggcactggcggccctggacaccctgcaagatgtttgcccagcgtagtctccggcggcggcagcagcaagacctcatgccacagtgccgtgactggagggcggtgaccacgcaggatgccgtgaaccccatcgagagcctggacacctggaccgagtttgtggagggaaagaataagactgtgagcaagctggtgatccagaatgccaacgtgtctgccatgtacaagtgtgtggtctccaacaaggtgggccaggatgagcggctcatctacttctatgtgaccaccatccccgacggcttcaccatcgaatccaagccatccgaggagctactagagggccagccggtgctcctgagctgccaagccgacagctacaagtacgagcatctgcgctggtaccgcctcaacctgtccacgctgcacgatgcgcacgggaacccgcttctgctcgactgcaagaacgtgcatctgttcgccacccctctggccgccagcctggaggaggtggcacctggggcgcgccacgccacgctcagcctgagtatcccccgcgtcgcgcccgagcacgagggccactatgtgtgcgaagtgcaagaccggcgcagccatgacaagcactgccacaagaagtacctgtcggtgcaggccctggaagcccctcggctcacgcagaacttgaccgacctcctggtgaacgtgagcgactcgctggagatgcagtgcttggtggccggagcgcacgcgcccagcatcgtgtggtacaaagacgagaggctgctggaggaaaagtctggagtcgacttggcggactccaaccagaagctgagcatccagcgcgtgcgcgaggaggatgcgggacgctatctgtgcagcgtgtgcaacgccaagggctgcgtcaactcctccgccagcgtggccgtggaaggctccgaggataagggcagcatggagatcgtgatccttgtcggtaccggcgtcatcgctgtcttcttctgggtcctcctcctcctcatcttctgtaacatgaggaggccggcccacgcagacatcaagacgggctacctgtccatcatcatggaccccggggaggtgcctctggaggagcaatgcgaatacctgtcctacgatgccagccagtgggaattcccccgagagcggctgcacctggggagagtgctcggctacggcgccttcgggaaggtggtggaagcctccgctttcggcatccacaagggcagcagctgtgacaccgtggccgtgaaaatgctgaaagagggcgccacggccagcgagcaccgcgcgctgatgtcggagctcaagatcctcattcacatcggcaaccacctcaacgtggtcaacctcctcggggcgtgcaccaagccgcagggccccctcatggtgatcgtggagttctgcaagtacggcaacctctccaacttcctgcgcgccaagcgggacgccttcagcccctgcgcggagaagtctcccgagcagcgcggacgcttccgcgccatggtggagctcgccaggctggatcggaggcggccggggagcagcgacagggtcctcttcgcgcggttctcgaagaccgagggcggagcgaggcgggcttctccagaccaagaagctgaggacctgtggctgagcccgctgaccatggaagatcttgtctgctacagcttccaggtggccagagggatggagttcctggcttcccgaaagtgcatccacagagacctggctgctcggaacattctgctgtcggaaagcgacgtggtgaagatctgtgactttggccttgcccgggacatctacaaagaccccgactacgtccgcaagggcagtgcccggctgcccctgaagtggatggcccctgaaagcatcttcgacaaggtgtacaccacgcagagtgacgtgtggtcctttggggtgcttctctgggagatcttctctctgggggcctccccgtaccctggggtgcagatcaatgaggagttctgccagcggctgagagacggcacaaggatgagggccccggagctggccactcccgccatacgccgcatcatgctgaactgctggtccggagaccccaaggcgagacctgcattctcggagctggtggagatcctgggggacctgctccagggcaggggcctgcaagaggaagaggaggtctgcatggccccgcgcagctctcagagctcagaagagggcagcttctcgcaggtgtccaccatggccctacacatcgcccaggctgacgctgaggacagcccgccaagcctgcagcgccacagcctggccgccaggtattacaactgggtgtcctttcccgggtgcctggccagaggggctgagacccgtggttcctccaggatgaagacatttgaggaattccccatgaccccaacgacctacaaaggctctgtggacaaccagacagacagtgggatggtgctggcctcggaggagtttgagcagatagagagcaggcatagacaagaaagcggcttcaggtagctgaagcagagagagagaaggcagcatacgtcagcattttcttctctgcacttataagaaagatcaaagactttaagactttcgctatttcttctactgctatctactacaaacttcaaagaggaaccaggaggacaagaggagcatgaaagtggacaaggagtgtgaccactgaagcaccacagggaggggttaggcctccggatgactgcgggcaggcctggataatatccagcctcccacaagaagctggtggagcagagtgttccctgactcctccaaggaaagggagacgccctttcatggtctgctgagt

SEQ ID NO: 123277 - DNA, 3897 bp, Artificial Sequence
  derived and/or modified sequence
atgcagagaggagctgccctgtgcctgcggctgtggctgtgcctgggcctgctggatggcctggtgtctggctacagcatgaccccacccaccctgaacatcacagaggagagccacgtgattgacacaggagacagcctgagcatcagctgccggggccagcaccccctggagtgggcctggccaggggcccaggaggccccagccaccggggacaaggacagcgaggacaccggggtggtgcgggactgtgagggcacagatgcccggccctactgcaaggtgctgctgctgcacgaggtgcacgccaatgacaccggcagctatgtgtgctactacaagtacatcaaggcccgcatcgagggcaccacagctgccagcagctatgtgtttgtgcgggactttgagcagcccttcatcaacaagccagacaccctgctggtgaacaggaaggatgccatgtgggtgccctgcctggtgtccatccctggcctgaatgtgaccctgcggagccagagctctgtgctgtggccagatggccaggaggtggtgtgggatgaccggcggggcatgctggtgtccacccccctgctgcatgatgccctgtacctgcagtgtgagaccacctggggagaccaggacttcctgagcaaccccttcctggtgcacatcactggaaatgagctgtatgacatccagctgctgcccaggaagagcctggagctgctggtgggggagaagctggtgctgaactgcaccgtgtgggccgagttcaacagcggcgtgacctttgactgggactacccaggcaagcaggccgagcggggcaagtgggtgcctgagcggcgcagccagcagacccacacagagctgagcagcatcctgaccatccacaacgtgtcccagcacgacctgggcagctatgtgtgcaaggccaacaacggcatccagcgcttccgggagagcacagaggtgattgtgcatgagaaccccttcatctctgtggagtggctgaagggccccatcctggaggccacagctggagatgagctggtgaagctgcctgtgaagctggccgcctacccacctcctgagttccagtggtacaaggatggcaaggccctgagcggccgccacagcccccacgccctggtgctgaaggaggtgacagaggccagcacaggcacctacaccctggccctgtggaacagcgctgctggcctgcggaggaacatcagcctggagctggtggtgaatgtgcccccccagatccacgagaaggaggccagcagccccagcatctacagccgccacagccggcaggccctgacctgcacagcctacggcgtgcccctgcccctgagcatccagtggcactggaggccctggaccccctgcaagatgtttgcccagaggagcctgcggcggcggcagcagcaggacctgatgccccagtgccgggactggagggctgtgaccacccaggatgctgtgaaccccatcgagagcctggacacctggacagaatttgtggagggcaagaacaagacagtgtccaagctggtgatccagaatgccaacgtgtctgccatgtacaagtgtgtggtgagcaacaaggtgggccaggatgagcggctcatctacttctacgtgaccaccatcccagatggcttcaccatcgagagcaagcccagcgaggagctgctggagggccagcctgtgctgctgagctgccaggccgacagctacaagtatgagcacctgcgctggtaccgcctgaacctgagcaccctgcatgatgcccacggcaaccccctgctgctggactgcaagaatgtgcacctgtttgccacccccctggccgccagcctggaggaggtggcccctggggcccggcatgccaccctgagcctgagcatcccccgggtggcccctgagcacgagggccactacgtgtgtgaggtgcaggaccggcgcagccatgacaagcactgccacaagaagtacctgtctgtgcaggccctggaggccccccggctgacccagaacctgacagacctgctggtgaatgtgtctgacagcctggagatgcagtgcctggtggccggggcccacgcccccagcatcgtgtggtacaaggatgagcggctgctggaggagaagagcggcgtggacctggccgacagcaaccagaagctgagcatccagagggtgcgggaggaggatgctggccgctacctgtgcagcgtgtgcaatgccaagggctgtgtgaacagcagcgcctctgtggccgtggagggctctgaagataaaggctccatggagatcgtcatcctggtgggcaccggggtgattgctgtgttcttctgggtgctgctgctgctgatcttctgcaacatgagaagacctgcccacgccgacatcaagacaggctacctgagcatcatcatggaccctggagaggtgcccctggaggagcagtgtgagtacctgtcctatgatgccagccagtgggagttcccccgggagcggctgcacctgggccgggtgctgggctatggagccttcggcaaggtggtggaggccagcgccttcggcatccacaagggcagcagctgtgacacagtggccgtgaagatgctgaaggagggcgccacagccagcgagcaccgggccctgatgtctgagctgaagatcctgatccacatcggcaaccacctgaatgtggtgaacctgctgggcgcctgcaccaagccccagggccccctgatggtgattgtggagttctgcaagtatggcaacctgagcaacttcctgcgggccaagagagatgccttcagcccctgtgccgagaagagccctgagcagaggggccgcttccgggccatggtggagctggcccggctggacagaagaagacctggcagcagtgacagagtgctgtttgcccgcttcagcaagacagagggcggggcccggcgggccagcccagaccaggaggccgaggacctgtggctgagccccctgaccatggaggacctggtgtgctacagcttccaggtggcccggggcatggagttcctggccagcaggaagtgcatccaccgggacctggccgccaggaacatcctgctgtctgagagtgatgtggtgaagatctgtgactttggcctggcccgggacatctacaaggaccctgactatgtgaggaaaggaagtgcccggctgcccctgaagtggatggcccctgagagcatctttgacaaggtgtacaccacccagagtgatgtgtggagctttggagtgctgctgtgggagatcttcagcctgggcgccagcccctacccaggagtgcagatcaatgaggagttctgccagaggctgagagatggcaccaggatgagggcccctgagctggccaccccagccatccgccgcatcatgctgaactgctggagcggggaccccaaggcccggcctgccttcagcgagctggtggagatcctgggggacctgctgcagggccggggcctgcaggaggaggaggaggtgtgcatggcccccaggagcagccagagcagcgaggagggcagcttcagccaggtgtccaccatggccctgcacatcgcccaggctgatgctgaggacagcccccccagcctgcagaggcacagcctggccgcccgctactacaactgggtgtccttccctggctgcctggcccggggagctgagacccggggcagcagcaggatgaagacctttgaggagttccccatgacccccaccacctacaagggctctgtggacaaccagacagattctggcatggtgctggccagcgaggagtttgagcagatcgagagccgccaccggcaggagagcggcttcagatag

SEQ ID NO: 123278 - DNA, 3897 bp, Artificial Sequence
  derived and/or modified sequence
atgcagcggggcgccgccctgtgcctgcggctgtggctgtgcctggggctgctcgacggcctggtgtcaggctactcaatgacgccccctacactgaacattaccgaggaatcccatgtgatagatacgggagacagcctgtccatatcatgcaggggccagcaccctttggaatgggcctggcccggcgcgcaggaggcacccgccacaggagacaaagacagcgaggatacaggagtggtgcgtgattgcgaaggaaccgatgcgcggccctactgtaaggtgcttcttctgcatgaggtgcatgctaatgacacagggtcttatgtgtgttattataagtatattaaagcccgcatcgaaggtactaccgcagccagcagctacgtcttcgtgagggatttcgaacagccctttattaacaaaccagacaccctcctcgtgaatagaaaggatgcgatgtgggttccttgtttggtctccatcccgggccttaacgtcaccctgaggtctcaatcatcggtgctgtggcctgatgggcaggaggtcgtatgggatgacagacgagggatgctcgtgagcactcctctgctgcatgacgccctgtacttgcagtgtgaaacaacctggggggatcaggatttcctatctaaccccttcctggtgcacataacaggaaatgagctctacgatattcaattgttgccccgaaagagtctggagctgctggtgggagagaaactggtacttaattgtaccgtgtgggctgagttcaacagtggcgtgactttcgactgggattaccctggcaagcaagccgaacggggcaagtgggttccagaacgcaggtcacagcagacacacacggagctgagttctattcttacaatccataacgtgagccagcacgatctgggcagctacgtctgtaaggcgaataatgggattcaacgcttcagagaaagcacagaggtgatcgtgcacgagaatccattcatttcagtggagtggctcaagggccctatccttgaggccaccgcaggcgatgagctagttaagctgcccgtgaaactcgcggcctatcctccccccgagttccagtggtacaaggatgggaaagcccttagcgggagacattccccccacgctctggtccttaaggaggtgaccgaggcatccacaggcacctatacattggccttgtggaattcagcagccggcttacggcgtaacataagtctcgaacttgtggtgaatgtgcctccccaaatccacgagaaagaggctagttctccttctatatactccagacactcgcgccaagctttgacctgcaccgcctacggggtcccactcccactgagcattcagtggcactggcgcccctggaccccctgcaagatgttcgcacaacgcagtcttcgcaggagacagcaacaggacctaatgccccaatgccgagactggcgggctgtgactacacaggacgcggtcaatccaattgaatcactcgatacttggactgagttcgtggagggtaaaaataagacagtttctaagctagtaattcagaatgctaatgtttccgctatgtacaagtgtgtggtgagcaacaaagtcgggcaggacgaacgcctaatttatttctacgtgactacaatccccgatggttttacaattgagagcaaaccaagcgaggagctcctcgagggacagcctgttctgttgtcctgccaggcggatagctacaaatatgagcacttgagatggtatagactgaatctgtctacattgcatgacgcccatggaaaccccctcctgttggactgtaaaaatgtgcatcttttcgcaacaccactggcagcatcattggaggaggttgctccgggggctaggcacgcaactctttcactttcaatccctagggtggccccagagcacgagggccactacgtatgcgaggtacaggatcgtcggtctcatgacaaacactgccataaaaaatatttatccgttcaggctctggaagctccccgactgacccagaacctaactgatttgctggtgaatgtgtcagacagcttggagatgcagtgcctcgttgcaggcgcccacgccccaagcatcgtctggtataaagacgaaaggctacttgaggagaagagcggagtcgacctagccgacagcaaccagaagttaagtatacagagagtgcgggaggaagacgctgggcgatatctatgtagcgtctgtaacgctaagggttgcgttaacagcagtgcaagtgtagctgtagagggatcggaggacaaaggatctatggagatcgtcattttagttggcacgggtgtgattgccgtctttttttgggtattactactgcttatcttttgtaatatgcgcaggccagcccacgccgatatcaagactggctacttgagcataattatggatcccggagaagtcccgctggaagaacagtgtgaatacctcagttatgatgcttcgcaatgggagttccccagggaacggcttcacctcggtcgtgttctgggatacggtgcctttggaaaagttgtggaggctagcgcatttggaattcacaaaggttcctcctgtgacaccgtcgctgtcaagatgctgaaagagggagccacagcctcagaacatagagctctgatgagcgagctgaagatcctcattcatatcggcaaccatttgaacgtcgttaacctgctgggcgcttgcaccaagcctcagggcccattgatggtcatagttgagttttgcaaatatggaaatcttagcaattttctgcgggccaagcgggacgccttcagcccttgcgcagagaagtcccctgaacagcgggggagattcagagctatggttgagttggcaagactggatcgtagacggcctggaagcagtgaccgcgtgctgttcgccagattctcaaagaccgagggaggtgccagacgggccagccccgaccaggaggccgaggacttgtggctttcaccactgacaatggaagacctggtgtgctatagcttccaggttgccaggggcatggagttcctggcaagccgcaagtgcatacacagagatctggcagctcgcaacattctcttaagtgaaagcgacgtagtcaaaatttgtgacttcgggctggcccgggacatatataaggacccagactatgtccgaaaagggtctgcgaggctgcctctgaagtggatggctccagagtccatctttgataaggtttatacaacccagtccgacgtgtggtccttcggagttctcctctgggagatctttagtctgggagcctcaccatatcctggagtgcagattaacgaggaattctgtcagaggttacgcgacgggacacgcatgcgagctcctgaacttgccactccggctattcgccgaatcatgctcaactgttggagcggagacccaaaagcccggcccgctttttctgagctggtagaaatcctcggggatctgttacagggaaggggcctgcaggaggaagaggaggtctgcatggcccctagaagctctcagagctctgaggagggctcgttctctcaggtgtcaaccatggcactccatattgcccaggccgacgcggaagacagtccaccaagcctccagcgacatagcctcgccgcaaggtactataactgggtgagttttcctggttgcctggctcgcggagctgagaccaggggcagttcccgaatgaagacctttgaagaatttcctatgaccccgactacttacaaagggagcgtggataatcagaccgatagtggaatggtcctcgcttccgaagagtttgaacaaatcgaatcacgacaccgccaagagtctgggtttcgctag

SEQ ID NO: 123279 - DNA, 3897 bp, Artificial Sequence
  derived and/or modified sequence
atgcagcggggagcagctttgtgccttcgactctggttgtgtctgggcctcttggacggcttagtctcaggatacagcatgaccccccctacattaaacattacagaggaatcacatgtgatagataccggggactctctcagcataagctgtaggggccagcatcccctggagtgggcatggcccggagctcaggaggccccagcaacaggagataaagacagtgaagatacaggggtcgtaagggactgtgaaggaactgatgcgagaccttattgcaaagtgctcctgctgcatgaggtgcacgccaatgacaccggaagctatgtttgttattataaatatatcaaagccaggatcgagggcactacagccgcatcatcatacgtgtttgtgcgcgatttcgaacagccatttattaacaaacctgacacattgctggtgaatagaaaggacgcaatgtgggtgccatgtttggtttcgatccccggactgaatgtcacactacgcagccagtcttcagtcttgtggccagacgggcaggaagtggtgtgggatgatcgtagggggatgctcgtctccacccctctcctgcacgacgctctgtacctgcagtgcgagaccacatggggggaccaggatttcttgtcaaatccatttttggtacatatcaccggcaatgaactgtacgatatccaattactgccacgcaagagcttggagcttctggttggcgaaaagctcgtgttgaattgcacagtctgggcggaatttaactctggcgtgacctttgactgggactaccccggtaagcaggccgagcggggaaagtgggtcccagagagacggagccagcagactcacaccgaactgagttcaatcctgacaatacacaacgtgtcacagcatgatcttggaagttacgtttgcaaggctaataacggcatacagagattccgggaaagcacagaggtgatcgtgcacgagaatccctttatttctgtggagtggttaaaagggcctatcctggaggctactgcgggagacgagctagtgaagctaccggtgaaactggctgcctacccgccacccgaattccagtggtataaagacggcaaggccctgagcggtcgccactctcctcatgctctggtcctgaaggaagtaacagaggctagcacagggacctacacccttgcactctggaattccgcagccggactgcgacggaacatcagcctcgaactggtggtgaacgtccctccccagatccacgagaaggaagcttcctcccccagcatttatagtcgccacagtagacaagcacttacttgcaccgcctacggcgtaccactgccgctgtcgatccagtggcactggcgtccttggacaccgtgtaagatgttcgcgcagaggagcctgcggcgtcggcagcaacaggatcttatgccacaatgcagggactggcgagccgtgacaactcaggatgccgtgaaccctattgagagcctggatacttggaccgaattcgtcgaggggaaaaataagaccgtgtctaagcttgttattcaaaacgctaatgtctctgccatgtataagtgcgtagtctcgaacaaggtgggccaggacgaacgcctgatttatttttacgttaccaccattccagacggatttaccatcgagagtaaaccttctgaagaactgctcgaaggtcagcctgttttgctctcatgccaggccgatagttacaaatacgaacaccttcgatggtaccggttaaatttgtcaactctccatgatgcacacgggaatccactcctccttgactgcaaaaatgttcatctgttcgcgacacctttggcagcaagtttagaggaggtcgcccctggtgcccgtcacgcaactctttccttgtccatccctcgggtcgcgcctgagcacgagggccattacgtatgcgaggtccaggatcgaaggtcccacgataagcattgccacaaaaaatatctgtcagtgcaggccctggaagcacccaggctcacacagaacctcaccgacctcctcgtgaacgtttctgattctctggaaatgcagtgcctcgtggccggagcacacgccccaagtatcgtctggtacaaggatgagagattgcttgaagagaagtccggtgtcgacttggctgactccaatcaaaagctttccatccaaagggtccgcgaagaagatgccggaagatacctctgtagcgtatgcaacgcgaagggctgcgtcaactcctcagcaagcgtggctgtggagggttcagaggataaggggagcatggaaatcgtgatcttagtcggtacaggcgtgatcgccgtctttttttgggtgctcctgctgcttatcttttgcaacatgcgcagaccagcacatgcggatattaaaacgggctacctgtcgatcattatggaccctggagaagtgcccctggaagaacaatgtgaatacttgtcgtatgacgcctcccaatgggagtttccaagggagagactgcacctgggcagggtgttaggctacggggctttcgggaaggtggttgaagctagtgcctttggcatccataaaggaagctcctgtgatactgtggcagtgaagatgctgaaagagggagccacagcctcagagcaccgggctctgatgtcagagttaaaaatacttattcacatcggcaatcatctgaacgtcgtgaatctgctcggggcttgcaccaagccgcagggccctctcatggtgatcgtcgagttctgtaagtacgggaacctgtcaaacttcctccgcgcaaagcgggacgctttcagcccgtgcgcggagaagagccccgagcagcggggtcgcttccgggctatggtcgaactggctcgccttgatcgccgaagacctggatcgagtgaccgggttctttttgctagattctccaagactgagggtggggcacgcagagctagtccggaccaggaggcggaggacctttggttaagccctcttacaatggaagatctagtgtgctacagctttcaggttgctagaggtatggagtttctcgcgagcagaaagtgcatccaccgcgacctggccgcacggaacatcctcctgagtgaatcagatgttgtgaaaatttgcgatttcggcctggctagagacatctacaaggaccctgattatgtgcggaaaggaagtgctaggctcccactaaagtggatggcccctgagtccattttcgacaaggtttacacaactcaatctgatgtgtggtcattcggggtgctgctgtgggaaatcttctccctgggggcatcgccataccccggagttcagataaacgaggagttctgccagcggctgcgcgatgggacacgtatgcgtgccccagagctggctacgcccgctatccggagaataatgttgaattgctggagcggggaccccaaggcacgtccagccttcagcgaactcgtggaaatcctgggcgacctgctgcaaggtcggggtctgcaggaagaggaagaagtgtgtatggcgcctcgctcaagccagagtagcgaggagggatctttctcgcaggtcagcacgatggccctccatatagcacaggcagatgccgaagattcgcccccaagcctgcagcgtcactcattagcagccaggtactacaattgggtgtctttccccggatgtcttgcgaggggcgcagaaacccgagggtccagtcggatgaaaacctttgaagagtttcccatgacaccaacgacatacaagggttccgtcgacaatcagacagatagcggtatggtgctcgcctccgaggagtttgaacagatcgaatcaagacaccggcaagaatccggatttcgttag

SEQ ID NO: 123280 - protein, 168 aa, Artificial Sequence
  derived and/or modified sequence
MEEQLVLKGGQHPHQPVWHDGRAVAGQPLHPHWAPQPRPRGSLGQHLLRGSLLAESLQPLSAGQVCSRKPRSRLRKCPSRSLRSEPISVPTLWTGHAERGQCPLLPPAPTHGPLLDDCYSFFRRLGLSQVKPFVPRLHLKGCRLAWESLFQVLTCRQCSLTGPSQLLN

SEQ ID NO: 123281 - protein, 558 aa, Artificial Sequence
  derived and/or modified sequence
MAKKVAVIGAGVSGLSSIKCCVDEDLEPTCFERSDDIGGLWKFTESSKDGMTRVYKSLVTNVCKEMSCYSDFPFHEDYPNFMNHEKFWDYLQEFAEHFDLLKYIQFKTTVCSITKRPDFSETGQWDVVTETEGKQNRAVFDAVMVCTGHFLNPHLPLEAFPGIHKFKGQILHSQEYKIPEGFQGKRVLVIGLGNTGGDIAVELSRTAAQVLLSTRTGTWVLGRSSDWGYPYNMMVTRRCCSFIAQVLPSRFLNWIQERKLNKRFNHEDYGLSITKGKKAKFIVNDELPNCILCGAITMKTSVIEFTETSAVFEDGTVEENIDVVIFTTGYTFSFPFFEEPLKSLCTKKIFLYKQVFPLNLERATLAIIGLIGLKGSILSGTELQARWVTRVFKGLCKIPPSQKLMMEATEKEQLIKRGVFKDTSKDKFDYIAYMDDIAACIGTKPSIPLLFLKDPRLAWEVFFGPCTPYQYRLMGPGKWDGARNAILTQWDRTLKPLKTRIVPDSSKPASMSHYLKAWGAPVLLASLLLICKSSLFLKLVRDKLQDRMSPYLVSLWRG

SEQ ID NO: 123282 - DNA, 2252 bp, Artificial Sequence
  derived and/or modified sequence
agaaaagacgaatggcttttgttttaaactgagggcacttttacaaaagtcatctttccatttatttttctttcagaaaaaagaatttgggttttgagcttttttaaaaaaaaaagacaaacactttccttgactttgagaaataatttaagtcaaagaatctgctctatgctaaccaagagatagagcacagcaaagatctgccagccccaggcctctacctagtggcctggaaattcaagtattcttattggtggaggccatttgtttctgattagaagctgtctaaacctcctactcctcaactcaaaggaaaacacagagcataccatggccaagaaagttgcagtgattggagctggtgtgagtggcctctcctccatcaaatgctgtgtggatgaggacctggagcccacctgctttgagagaagtgatgacattgggggattatggaagtttactgaatcttccaaagatgggatgaccagggtctataagtcattagtgacaaatgtctgtaaggaaatgtcatgttacagtgacttccctttccacgaagattatcctaatttcatgaaccatgaaaaattttgggactatctccaagaatttgctgagcactttgacctcctgaaatacattcagtttaagaccactgtgtgcagcataacgaagcgtccagacttctccgaaactggtcagtgggatgttgtcacagagacagagggcaagcaaaatagagctgtctttgatgctgttatggtttgcactggacatttcctgaatccccatttacctttggaagcctttcctggaattcataagtttaaaggtcagatcctgcatagtcaagagtacaagatcccagaaggctttcagggcaaacgcgtcttggtgattggtcttgggaacactggaggagacattgctgtggaactcagtcgaacggcagctcaggtacttctcagtactagaactggtacctgggttcttgggcgctcttcagattggggctatccttataatatgatggttacaagaagatgctgtagttttattgcacaagttctgccttcacgttttctaaactggattcaagaaaggaagttgaataagagatttaatcatgaggattatggattaagtattaccaaagggaaaaaagcaaaattcattgtgaatgatgagctgccaaactgtatcctctgtggggcaatcactatgaaaaccagcgtgattgaatttacagaaacctctgctgtctttgaagatgggacagtggaagaaaacattgatgttgtgatcttcactacaggatatacattttcttttccattttttgaagaacctcttaaaagcctctgtacaaagaagatatttctatacaagcaagtctttcccttaaacctagagagagcgacattagccatcatcggccttatcggccttaaaggatccatcttatcaggcacagagctccaagcacgatgggtcacaagagtattcaaaggactctgtaagatacctccatcccaaaaattgatgatggaggctactgaaaaggaacagctcattaaaaggggagtgtttaaagacaccagcaaagacaaatttgactacattgcctacatggatgatatcgctgcctgcataggcacaaagcccagcatcccacttctgttcctcaaggatcccagactagcttgggaagttttctttggaccatgtactccttatcagtaccgcctcatgggccctggaaaatgggatggagccagaaatgccatcctgacccagtgggacagaacattgaaacctttaaaaactcgaattgtccctgattcctccaagcctgcctccatgtcacattatttaaaagcctggggggcacctgtcctacttgcctctcttctacttatctgtaaatcttcacttttcttgaaattggtgagagataaactacaggacagaatgtccccttacctagtaagtctttggcgaggatgaacctgattgttacaagggttacacaaagtcatgctaattctatctccaagtatcttgtgcatccctcctctgctctccatcataactgctattagccaaattcaggcccagtcatctcctatctgaattattgtattatcttcttctttgttttcagtaccctctttcttgccaccctttccaatgcatcttctaccctgctacctcagtgattattctaaaataaatatatatgatatggttta

SEQ ID NO: 123283 - DNA, 1677 bp, Artificial Sequence
  derived and/or modified sequence
atggccaagaaagtggcagttatcggcgcaggggtctctgggctttctagtattaaatgctgcgtggatgaggacctggaacccacgtgttttgaacgatctgacgacatcgggggtctctggaaattcacagagtcgtcaaaggatgggatgactagagtgtacaagagtctggttaccaatgtgtgcaaggagatgtcatgctacagtgactttccctttcatgaggattatcccaactttatgaaccacgagaaattttgggactaccttcaggaattcgctgaacacttcgacctgctgaaatacattcagtttaagacaacggtgtgctccattactaaaaggccagacttcagtgagactgggcagtgggacgtggtgacagagacggagggcaagcaaaatagggcagtctttgacgctgtgatggtgtgcacaggtcatttcttgaatcctcacttgccgctggaggcattcccagggatccataagtttaaaggccaaatcctgcactcacaggagtacaagatcccagaggggttccaaggcaagagggtcctggtcattggcctgggcaacacgggcggagacattgcggtcgaattaagccgaacagcagcacaagtgctgctgtccacacgtacgggaacctgggtgttagggagaagtagcgattggggatatccttataacatgatggtgaccagacgttgctgctcgttcatcgctcaagtgttgcctagtcggtttcttaactggattcaggagcggaagctcaataagagatttaaccacgaggattatggcttaagcatcaccaaaggcaaaaaagctaaattcatagtcaacgacgaactccctaactgtatcctctgtggggcgataaccatgaagacctccgttattgagtttactgagacctccgccgtcttcgaagacgggacagtagaagagaatatagatgtagtgattttcacaactgggtacactttttcatttccgtttttcgaagagccccttaaaagcctgtgcacaaagaagatctttctctataaacaggtctttcccctcaacctggagcgtgctaccctggccatcattggcttgattggccttaaaggaagcattctgagtgggacggaattgcaggctcgctgggtcactcgcgtattcaaaggactgtgtaagataccacctagtcagaagctgatgatggaggctactgagaaggagcaactcataaaacgaggcgtattcaaggacactagcaaagacaagttcgactatatcgcatacatggacgacattgcagcttgcatcggaacgaaaccttcgataccactcctttttctaaaggaccccaggctagcctgggaggtcttcttcggcccttgcaccccctatcagtaccgattgatgggacctggaaaatgggatggagccagaaacgcaattctgacacaatgggatcggacactcaaacctctcaaaacacggatagtgccggacagcagtaagcccgctagcatgagtcattacctgaaagcatggggggcaccggtgctgctcgcttctttgttgctcatttgtaaaagctcgcttttccttaagctcgtgagagacaaactgcaggacaggatgtctccatatttagttagcctgtggcgaggctag

SEQ ID NO: 123284 - DNA, 1677 bp, Artificial Sequence
  derived and/or modified sequence
atggccaagaaggtggccgtcatcggggccggcgtgtctggcctgagcagcatcaagtgctgcgtggatgaggacctggagcccacctgctttgagaggagtgatgacattggaggcctgtggaagttcacagagagcagcaaggatggcatgaccagggtgtacaagagcctggtgaccaacgtgtgcaaggagatgagctgctacagcgacttccccttccacgaggactaccccaacttcatgaaccacgagaagttctgggactacctgcaggagtttgctgagcactttgacctgctgaagtacatccagttcaagaccaccgtgtgcagcatcaccaagaggccagacttcagcgagaccggccagtgggatgtggtgacagaaacagagggcaagcagaacagagctgtgtttgatgctgtgatggtgtgcaccggccacttcctgaacccccacctgcccctggaggccttccctggcatccacaagttcaagggccagatcctgcacagccaggagtacaagatccctgagggcttccagggcaagagggtgctggtgattggcctgggcaacacaggaggagacattgctgtggagctgagcaggacagctgcccaggtgctgctgagcaccaggacaggcacctgggtgctgggccgcagcagtgactggggctacccctacaacatgatggtgacccggcgctgctgcagcttcatcgcccaggtgctgcccagccgcttcctgaactggatccaggagaggaagctgaacaagcgcttcaaccatgaagattatggcctgagcatcaccaagggcaagaaggccaagttcatcgtgaatgatgagctgcccaactgcatcctgtgtggggccatcaccatgaagacctctgtgattgagttcacagagaccagcgctgtgtttgaagatggcaccgtggaggagaacattgatgtggtgatcttcaccaccggctacaccttctccttccccttctttgaggagcccctgaagagcctgtgcaccaagaagatcttcctgtacaagcaggtgttccccctgaacctggagcgggccaccctggccatcatcggcctgattggcctgaagggcagcatcctgtctggaacagagctgcaggcccgctgggtgaccagggtcttcaagggcctgtgcaagatcccccccagccagaagctgatgatggaggccacagagaaggagcagctgatcaagaggggcgtcttcaaggacaccagcaaggacaagtttgactacatcgcctacatggatgacattgctgcctgcatcggcaccaagcccagcatccccctgctcttcctgaaggacccccggctggcctgggaggtgttcttcggcccctgcaccccctaccagtaccgcctgatgggccctgggaagtgggatggagccagaaatgccatcctgacccagtgggacaggaccctgaagcccctgaagaccagaattgtgcctgacagcagcaagccagcctccatgagccactacctgaaggcctggggcgcccctgtgctgctggccagcctgctgctgatctgcaagagcagcctcttcctgaagctggtgcgggacaagctgcaggacaggatgagcccctacctggtgtccctgtggaggggctag

SEQ ID NO: 123285 - DNA, 1677 bp, Artificial Sequence
  derived and/or modified sequence
atggccaagaaggtggccgtgatcggcgccggcgtgagcggcctgtcgagtatcaaatgttgcgttgacgaggacttagagcctacctgcttcgaaagaagcgacgacatcggtggactgtggaagttcacggagagtagcaaggatgggatgaccagggtgtataaatcattagtcacaaatgtctgtaaggaaatgagctgctactcagattttccttttcacgaagattaccccaatttcatgaaccatgaaaagttctgggactacttacaggagtttgctgagcatttcgatctgttaaagtacatccaattcaaaactacagtctgcagtatcactaagcgacccgactttagtgaaaccggccagtgggacgtggttactgagactgaagggaagcaaaaccgtgccgtcttcgatgccgtgatggtgtgtacagggcatttcctgaacccccacctccctttggaggcctttcccggcatccacaagttcaagggccagatcttgcacagccaggaatacaagatcccggagggattccagggaaagcgggttctcgttataggcctgggcaacacaggcggcgacatagcagtagaactgagtcgaactgcagcccaggtgctcctctcaaccaggactggcacctgggtgctcggccgctcttccgattggggttatccttacaatatgatggtgacgcgaagatgctgctctttcattgcccaggtgcttcctagcaggttcctgaactggattcaagagagaaaactgaacaagaggttcaaccatgaagactacgggcttagtattacaaagggtaaaaaagccaagtttattgtaaatgatgagcttcctaactgcatcttgtgtggcgccattacgatgaagacaagcgttatagagtttactgaaactagtgcagtctttgaggacggaacggtggaagaaaacatagacgtggtcatttttacgacagggtatacattttctttccccttcttcgaggagcccctcaaaagtctgtgcacaaagaagatcttcctgtacaagcaggttttcccactgaatctcgagcgcgccaccctggctattattggcctgattggtctgaaagggtctattctttcagggacggagcttcaagccagatgggtgacacgtgtctttaagggcctctgtaagatcccgccatcccagaagttgatgatggaagcaacagagaaagagcagttgatcaaaagaggcgtctttaaagatactagcaaagacaagttcgactacattgcttacatggatgatatcgcagcctgcatcggaactaaaccgtcaatcccacttctattcttgaaggatccacgcctcgcttgggaagtcttcttcggcccctgtactccctaccaatatcgcctcatgggccctggtaagtgggatggcgcaagaaacgcaattctgactcaatgggatcgaacgctcaaaccactgaagaccagaatcgttccggattcttctaaaccagcgtccatgtctcactacctcaaggcctggggcgcacccgtgctgctagcgtcccttctgctgatatgcaagagctccctgtttctgaaactggtgcgggacaaattacaggataggatgtctccctacctcgtcagtctgtggcgggggtag

SEQ ID NO: 123286 - DNA, 1677 bp, Artificial Sequence
  derived and/or modified sequence
atggccaagaaggttgccgtcattggagccggtgtttctgggctgtcctcaattaagtgttgtgttgatgaggatctggaacctacatgttttgaaaggtccgatgacatcggcggtctgtggaaatttactgagagttcaaaagatgggatgacaagggtgtataaatctttagtaaccaatgtgtgtaaagaaatgtcgtgctattcagattttccgttccatgaagactatcccaatttcatgaaccatgaaaaattctgggattaccttcaggaatttgccgaacattttgatttgcttaaatacattcagttcaagacaaccgtgtgcagtataaccaagcgtcctgattttagcgagactggacaatgggacgtcgtgactgaaaccgagggaaaacagaatcgggctgtcttcgacgctgtgatggtctgtactggccactttcttaatccccacctccccctggaagcctttccaggcatccataagttcaaggggcaaatcctgcactcccaggaatacaagattcccgagggattccagggcaaaagagtgcttgtgattggtctggggaacactggtggagacatagccgtggaactgtccagaactgccgctcaagtgctgttatcaacgcggaccggcacttgggtcctaggcaggtcatcggactggggatatccgtacaacatgatggtgacccggagatgctgtagcttcattgcccaggtgctgccgagcagatttctgaactggatccaggagaggaaactcaacaaacgcttcaaccatgaggactacgggctgagcataacaaaaggcaaaaaggctaaatttatagttaatgatgaactgccaaactgcatcctctgtggagccataacaatgaagacaagtgttatagagtttaccgagacctccgctgtctttgaggatgggaccgtggaggagaatatagacgttgtgatctttaccaccggatatacgttctccttcccgttctttgaagaacccctaaagtctctctgcaccaaaaagatctttttgtacaagcaggtgtttcctctgaacctcgaaagggccaccttggccattatcgggttaatcggcctgaaagggagcattttatctggaacagaacttcaggcccgatgggtgacaagggtcttcaaaggcctttgtaaaatccccccttcccaaaagctgatgatggaagccacggagaaggagcaactcattaaacggggagtgtttaaggatacatctaaagataagttcgattatattgcatatatggatgacattgctgcctgcatcggtacaaagccctcaattcctttgctgtttttgaaagacccacgcctggcctgggaggtgttcttcgggccttgcaccccctatcagtaccggctgatgggccctggaaaatgggatggcgcaagaaatgccatacttacgcagtgggatcgaacactgaaacctttgaagacaagaattgtgcccgactcctcaaagcctgcatcaatgagccattacttgaaggcttggggagcgccagttctgttagcctcactgctacttatatgtaagagtagtcttttccttaaattggtcagggataagctgcaagataggatgtctccatatctggtttccctatggcgtgggtag

SEQ ID NO: 123287 - DNA, 1677 bp, Artificial Sequence
  derived and/or modified sequence
atggccaagaaggtggccgtgatcggcgccggcgtgagcggcctgagcagcatcaagtgctgcgtggacgaggacctggagcccacctgcttcgagagaagcgacgacatcggcggcctgtggaagttcaccgagagcagcaaggacggcatgaccagagtgtacaagagcctggtgaccaacgtgtgcaaggagatgagctgctacagcgacttccccttccacgaggactaccccaacttcatgaaccacgagaagttctgggactacctgcaggagttcgccgagcacttcgacctgctgaagtacatccagttcaagaccaccgtgtgcagcatcaccaagagacccgacttcagcgagaccggccagtgggacgtggtgaccgagaccgagggcaagcagaacagagccgtgttcgacgccgtgatggtgtgcaccggccacttcctgaacccccacctgcccctggaggccttccccggcatccacaagttcaagggccagatcctgcacagccaggagtacaagatccccgagggcttccagggcaagagagtgctggtgatcggcctgggcaacaccggcggcgacatcgccgtggagctgagcagaaccgccgcccaggtgctgctgagcaccagaaccggcacctgggtgctgggcagaagcagcgactggggctacccctacaacatgatggtgaccagaagatgctgcagcttcatcgcccaggtgctgcccagcagattcctgaactggatccaggagagaaagctgaacaagagattcaaccacgaggactacggcctgagcatcaccaagggcaagaaggccaagttcatcgtgaacgacgagctgcccaactgcatcctgtgcggcgccatcaccatgaagaccagcgtgatcgagttcaccgagaccagcgccgtgttcgaggacggcaccgtggaggagaacatcgacgtggtgatcttcaccaccggctacaccttcagcttccccttcttcgaggagcccctgaagagcctgtgcaccaagaagatcttcctgtacaagcaggtgttccccctgaacctggagagagccaccctggccatcatcggcctgatcggcctgaagggcagcatcctgagcggcaccgagctgcaggccagatgggtgaccagagtgttcaagggcctgtgcaagatcccccccagccagaagctgatgatggaggccaccgagaaggagcagctgatcaagagaggcgtgttcaaggacaccagcaaggacaagttcgactacatcgcctacatggacgacatcgccgcctgcatcggcaccaagcccagcatccccctgctgttcctgaaggaccccagactggcctgggaggtgttcttcggcccctgcaccccctaccagtacagactgatgggccccggcaagtgggacggcgccagaaacgccatcctgacccagtgggacagaaccctgaagcccctgaagaccagaatcgtgcccgacagcagcaagcccgccagcatgagccactacctgaaggcctggggcgcccccgtgctgctggccagcctgctgctgatctgcaagagcagcctgttcctgaagctggtgagagacaagctgcaggacagaatgagcccctacctggtgagcctgtggagaggctag

SEQ ID NO: 123288 - protein, 376 aa, Artificial Sequence
  derived and/or modified sequence
MQWTSLLLLAGLFSLSQAQYEDDPHWWFHYLRSQQSTYYDPYDPYPYETYEPYPYGVDEGPAYTYGSPSPPDPRDCPQECDCPPNFPTAMYCDNRNLKYLPFVPSRMKYVYFQNNQITSIQEGVFDNATGLLWIALHGNQITSDKVGRKVFSKLRHLERLYLDHNNLTRMPGPLPRSLRELHLDHNQISRVPNNALEGLENLTALYLQHNEIQEVGSSMRGLRSLILLDLSYNHLRKVPDGLPSALEQLYMEHNNVYTVPDSYFRGAPKLLYVRLSHNSLTNNGLASNTFNSSSLLELDLSYNQLQKIPPVNTNLENLYLQGNRINEFSISSFCTVVDVVNFSKLQVLRLDGNEIKRSAMPADAPLCLRLASLIEI

SEQ ID NO: 123289 - protein, 363 aa, Artificial Sequence
  derived and/or modified sequence
MQWTSLLLLAGLFSLSQAQYEDDPHWWFHYLRSQQSTYYDPYDPYPYETYEPYPYGVDEGPAYTYGSPSPPDPRDCPQECDCPPNFPPFVPSRMKYVYFQNNQITSIQEGVFDNATGLLWIALHGNQITSDKVGRKVFSKLRHLERLYLDHNNLTRMPGPLPRSLRELHLDHNQISRVPNNALEGLENLTALYLQHNEIQEVGSSMRGLRSLILLDLSYNHLRKVPDGLPSALEQLYMEHNNVYTVPDSYFRGAPKLLYVRLSHNSLTNNGLASNTFNSSSLLELDLSYNQLQKIPPVNTNLENLYLQGNRINEFSISSFCTVVDVVNFSKLQVLRLDGNEIKRSAMPADAPLCLRLASLIEI

SEQ ID NO: 123290 - protein, 197 aa, Artificial Sequence
  derived and/or modified sequence
MKMTLIGGSTTSAASSPPTTIPMTLTRMRPTSLTPMGWMKGQPTPTALHPLQIPATAPRSATAHPTSTAMYCDNRNLKYLPFVPSRMKYVYFQNNQITSIQEGVFDNATGLLWIALHGNQITSDKVGRKVFSKLRHLERLYLDHNNLTRMPGPLPRSLRELHLDHNQISRVPNNALEGRTSRPCTSNTMRSRKWAVP

SEQ ID NO: 123291 - DNA, 3310 bp, Artificial Sequence
  derived and/or modified sequence
ttaagatgtctcttaccaaaccctggccctccccatccctgcatctgcctttgtggctttaatgagaaatccaggcgcttcataagagactgtacaaataacttctagggcgccactaactcattcagcagaaagggacccagggctgccaatgtttcagggaagataagtgagtggaaaaaaggtggtttttatagcgtcaggcggaccgaaggatttgcgtggttgagcgtgaactccgcccctgcagcagagctgaaaaaaaccaggatccgggttcctcagccccttttcacaatatttgattaggaatttggggcgggaccctggtctggcacaggcacgcacactctcagtagactctttcactcctctctctcttcctctctcacacgttctccaacccaaggaggccagacagagggacgtggtcactctctgaaaagttcaacttgagagacaaaatgcagtggacctccctcctgctgctggcagggctcttctccctctcccaggcccagtatgaagatgaccctcattggtggttccactacctccgcagccagcagtccacctactacgatccctatgacccttacccgtatgagacctacgagccttacccctatggggtggatgaagggccagcctacacctacggctctccatcccctccagatccccgcgactgcccccaggagtgcgactgcccacccaacttccccacggccatgtactgtgacaatcgcaacctcaagtacctgcccttcgttccctcccgcatgaagtatgtgtacttccagaacaaccagatcacctccatccaggaaggcgtctttgacaatgccacagggctgctctggattgctctccacggcaaccagatcaccagtgataaggtgggcaggaaggtcttctccaagctgaggcacctggagaggctgtacctggaccacaacaacctgacccggatgcccggtcccctgcctcgatccctgagagagctccatctcgaccacaaccagatctcacgggtccccaacaatgctctggaggggctggagaacctcacggccttgtacctccaacacaatgagatccaggaagtgggcagttccatgaggggcctccggtcactgatcttgctggacctgagttataaccaccttcggaaggtgcctgatgggctgccctcagctcttgagcagctgtacatggagcacaacaatgtctacaccgtccccgatagctacttccggggggcgcccaagctgctgtatgtgcggctgtcccacaacagtctaaccaacaatggcctggcctccaacaccttcaattccagcagcctccttgagctagacctctcctacaaccagctgcagaagatccccccagtcaacaccaacctggagaacctctacctccaaggcaataggatcaatgagttctccatcagcagcttctgcaccgtggtggacgtcgtgaacttctccaagctgcaggtgctgcgcctggacgggaacgagatcaagcgcagcgccatgcctgccgacgcgcccctctgcctgcgccttgccagcctcatcgagatctgagcagccctggcaccgggtactgggcggagagcccccgtggcatttggcttgatggtttggtttggcttttgctggaaggtccaggatggaccatgtgacagaagtccacgggcaccctctgtagtcttctttcctgtaggtggggttagggggggcgatcagggacaggcagccttctgctgaggacataggcagaagctcactcttttccagggacagaagtggtggtagatggaaggatccctggatgttccaaccccataaatctcacggctcttaagttcttcccaatgatctgaggtcatggaacttcaaaagtggcatgggcaatagtatataaccatacttttctaacaatccctggctgtctgtgagcagcacttgacagctctccctctgtgctgggctggtcgtgcagttactctgggctcccatttgttgcttctcaaaatatacctcttgcccagctgcctcttctgaaatccacttcacccactccactttcctccacagatgcctcttctgtgccttaagcagagtcaggagaccccaaggcatgtgagcatctgcccagcaacctgtggagacaacccacactgtgtctgagggtgaaaggacaccaggagtcacttctatacctccctaacctcacccctggaaagccaccagattggaggtcaccagcatgatgataatattcatgacctgatgtgggaggagacagccaacctcaggcttagatcaatgtatagggctatattttggcagctgggtagctctttgaaggtggataagacttcagaagaggaaaggccagactttgcttaccatcagcatctgcaatgggccaaacacacctcaaattggctgagttgagaaagcagccccagtagttccattcttgcccagcactttctgcattccaaacagcatcctacctgggtttttatccacaaaggtagcggccacatggtttttaaagtatgagaaacacagtttgtcctctccttttatccaagcaggaagattctatatcctgatggtagagacagactccaggcagccctggacttgctagcccaaagaaggaggatgtggttaatctgtttcacctggtttgtcctaaggccatagttaaaaagtaccagctctggctggggtccgtgaagcccaggccaggcagccaaatcttgcctgtgctgggcatacaaccctctgctttcacatctctgagctatatcctcattagtgaaggtggcttttgctttatagtttggctggggagcacttaattcttcccatttcaaaaggtaatgttgcctggggcttaacccacctgccctttgggcaaggttgggacaaagccatctgggcagtcaggggcaaggactgttggaggagagttagcccaagtataggctctgcccagatgccatcacatccctgatactgtgtatgctttgaagcaccttccctgagaagggaagaggggatctttggactacgttcttggctccagacctggaatccacaaaagccaaaccagctcatttcaacaaaggagctccgatgtgaggggcaaggctgccccctgccccagggctcttcagaaagcatctgcatgtgaacaccatcatgcctttataaaggatccttattacaggaaaagcatgagtggtggctaacctgaccaataaagttattttatgattgca

SEQ ID NO: 123292 - DNA, 2810 bp, Artificial Sequence
  derived and/or modified sequence
atgcagtggacctccctcctgctgctggcagggctcttctccctctcccaggcccagtatgaagatgaccctcattggtggttccactacctccgcagccagcagtccacctactacgatccctatgacccttacccgtatgagacctacgagccttacccctatggggtggatgaagggccagcctacacctacggctctccatcccctccagatccccgcgactgcccccaggagtgcgactgcccacccaacttcccccccttcgttccctcccgcatgaagtatgtgtacttccagaacaaccagatcacctccatccaggaaggcgtctttgacaatgccacagggctgctctggattgctctccacggcaaccagatcaccagtgataaggtgggcaggaaggtcttctccaagctgaggcacctggagaggctgtacctggaccacaacaacctgacccggatgcccggtcccctgcctcgatccctgagagagctccatctcgaccacaaccagatctcacgggtccccaacaatgctctggaggggctggagaacctcacggccttgtacctccaacacaatgagatccaggaagtgggcagttccatgaggggcctccggtcactgatcttgctggacctgagttataaccaccttcggaaggtgcctgatgggctgccctcagctcttgagcagctgtacatggagcacaacaatgtctacaccgtccccgatagctacttccggggggcgcccaagctgctgtatgtgcggctgtcccacaacagtctaaccaacaatggcctggcctccaacaccttcaattccagcagcctccttgagctagacctctcctacaaccagctgcagaagatccccccagtcaacaccaacctggagaacctctacctccaaggcaataggatcaatgagttctccatcagcagcttctgcaccgtggtggacgtcgtgaacttctccaagctgcaggtgctgcgcctggacgggaacgagatcaagcgcagcgccatgcctgccgacgcgcccctctgcctgcgccttgccagcctcatcgagatctgagcagccctggcaccgggtactgggcggagagcccccgtggcatttggcttgatggtttggtttggcttttgctggaaggtccaggatggaccatgtgacagaagtccacgggcaccctctgtagtcttctttcctgtaggtggggttagggggggcgatcagggacaggcagccttctgctgaggacataggcagaagctcactcttttccagggacagaagtggtggtagatggaaggatccctggatgttccaaccccataaatctcacggctcttaagttcttcccaatgatctgaggtcatggaacttcaaaagtggcatgggcaatagtatataaccatacttttctaacaatccctggctgtctgtgagcagcacttgacagctctccctctgtgctgggctggtcgtgcagttactctgggctcccatttgttgcttctcaaaatatacctcttgcccagctgcctcttctgaaatccacttcacccactccactttcctccacagatgcctcttctgtgccttaagcagagtcaggagaccccaaggcatgtgagcatctgcccagcaacctgtggagacaacccacactgtgtctgagggtgaaaggacaccaggagtcacttctatacctccctaacctcacccctggaaagccaccagattggaggtcaccagcatgatgataatattcatgacctgatgtgggaggagacagccaacctcaggcttagatcaatgtatagggctatattttggcagctgggtagctctttgaaggtggataagacttcagaagaggaaaggccagactttgcttaccatcagcatctgcaatgggccaaacacacctcaaattggctgagttgagaaagcagccccagtagttccattcttgcccagcactttctgcattccaaacagcatcctacctgggtttttatccacaaaggtagcggccacatggtttttaaagtatgagaaacacagtttgtcctctccttttatccaagcaggaagattctatatcctgatggtagagacagactccaggcagccctggacttgctagcccaaagaaggaggatgtggttaatctgtttcacctggtttgtcctaaggccatagttaaaaagtaccagctctggctggggtccgtgaagcccaggccaggcagccaaatcttgcctgtgctgggcatacaaccctctgctttcacatctctgagctatatcctcattagtgaaggtggcttttgctttatagtttggctggggagcacttaattcttcccatttcaaaaggtaatgttgcctggggcttaacccacctgccctttgggcaaggttgggacaaagccatctgggcagtcaggggcaaggactgttggaggagagttagcccaagtataggctctgcccagatgccatcacatccctgatactgtgtatgctttgaagcaccttccctgagaagggaagaggggatctttggactacgttcttggctccagacctggaatccacaaaagccaaaccagctcatttcaacaaaggagctccgatgtgaggggcaaggctgccccctgccccagggctcttcagaaagcatctgcatgtgaacaccatcatgcctttataaaggatccttattacaggaaaagcatgagtggtggctaacctgaccaataaagttattttatgattgcatct

SEQ ID NO: 123293 - DNA, 594 bp, Artificial Sequence
  derived and/or modified sequence
atgaagatgaccctcattggtggttccactacctccgcagccagcagtccacctactacgatccctatgacccttacccgtatgagacctacgagccttacccctatggggtggatgaagggccagcctacacctacggctctccatcccctccagatccccgcgactgcccccaggagtgcgactgcccacccaacttccacggccatgtactgtgacaatcgcaacctcaagtacctgcccttcgttccctcccgcatgaagtatgtgtacttccagaacaaccagatcacctccatccaggaaggcgtctttgacaatgccacagggctgctctggattgctctccacggcaaccagatcaccagtgataaggtgggcaggaaggtcttctccaagctgaggcacctggagaggctgtacctggaccacaacaacctgacccggatgcccggtcccctgcctcgatccctgagagagctccatctcgaccacaaccagatctcacgggtccccaacaatgctctggaggggagaacctcacggccttgtacctccaacacaatgagatccaggaagtgggcagttccatga

SEQ ID NO: 123294 - DNA, 1131 bp, Artificial Sequence
  derived and/or modified sequence
atgcagtggacatcattactcttgctggcgggcttgttctcacttagtcaggctcagtatgaagacgacccacactggtggttccactatctccggtcccaacagagcacgtattatgacccatatgacccgtacccatatgagacatacgagccttatccctacggcgtagatgaaggtcccgcctatacctatggaagtccatcccccccggatccccgagactgtccacaggagtgtgattgtccaccgaatttcccaaccgcgatgtactgtgataaccgaaatctcaagtatctccctttcgttccttctaggatgaaatatgtttactttcaaaataatcaaataacgtcgatacaggaaggggtgttcgacaatgctacaggactgttgtggattgcacttcatggaaaccaaatcaccagcgataaggtgggacgcaaagtgttctcaaagctgcgccacctagaaagactgtatttagaccataataatcttacccggatgccaggccctctgccacggagcctccgggagctgcatttagatcataatcagatctcacgggtccccaataacgctttggaaggcttggaaaatctgactgccctgtacctccaacataacgagattcaggaggtcgggagctccatgagaggactgagatctctgattctgctggacctttcctataaccacttgcgaaaggtcccggatggtctgcctagcgctctcgagcagctgtacatggaacataacaatgtgtataccgtgcccgatagctactttcgcggcgcgcccaaactgctatacgtgagattaagtcacaacagcctgaccaacaacggtttggcttccaacactttcaacagtagttccttgctggagctggacttatcctacaaccagctccagaaaatacctcctgtgaatacgaatctcgagaatctttatctccaggggaacagaataaacgaattcagtatctcttcattttgtaccgtcgtggacgtagtgaatttcagcaagctccaggtgctccgcctggacggaaacgagatcaagcggtccgcaatgcccgcggatgcccccctgtgtttgcggctcgctagtctgattgaaatctag

SEQ ID NO: 123295 - DNA, 1092 bp, Artificial Sequence
  derived and/or modified sequence
atgcagtggacctctctgctgctgctggccgggctgttctccctgagtcaggctcagtatgaggatgatccacactggtggtttcattacctcagaagccagcagtctacttattacgacccatatgacccctacccatacgagacgtatgagccgtatccttacggagtggatgagggacctgcatatacttacggctcgccatctccccccgatcctcgcgactgtccccaggagtgtgattgcccccccaatttcccccctttcgtcccgagcaggatgaaatacgtgtacttccaaaacaaccagattacatctatccaggagggggtatttgacaatgcaaccgggctgctttggattgccctccacggtaaccagattacgagcgataaggtgggaaggaaggtgttctctaagttgcgacacttagagcgtctatacctggaccacaataacctaactagaatgcccggtcccctcccgagaagccttagagagctgcacctggaccataaccagattagtagagtcccgaacaacgcgctagaaggcctggagaatctgactgccctgtatctgcagcacaacgaaatccaggaggtgggaagttccatgcgaggcctgagatccttaattttactcgatttgagctacaaccacctgcgaaaggtgcctgacgggttaccatcagccctcgagcagctctacatggagcacaataacgtgtacacagttcctgattcttactttcggggcgcgcccaaactcctctatgttagactttcacataattcacttaccaataatggtctggccagtaataccttcaactcttcctctcttttggagctggatctgtcttataatcaactgcagaagattcctccagttaacactaacctggagaacctctacttgcaggggaaccgaataaacgagtttagtatatcctccttctgcacagtcgtcgacgtagtgaattttagtaagcttcaggtactcaggctggacggtaatgaaattaaaaggtcggccatgccggccgatgcaccactgtgtttacgcctcgcttccctcatcgagatctag

SEQ ID NO: 123296 - DNA, 594 bp, Artificial Sequence
  derived and/or modified sequence
atgaagatgaccctgatcgggggcagtaccacttccgccgctagttcgccgccgacgacaatccccatgactctcacccgtatgcgaccgactagcctgactcccatgggctggatgaaaggccagccgactcccacagcactacacccgctgcagattcctgcaacagcaccccgttctgccaccgcccatcctacttcaacagctatgtattgcgataaccgcaacctgaaatacctgccattcgtcccctctagaatgaagtatgtgtacttccaaaacaatcagattactagcatccaagagggagtttttgacaacgcaactggcttgctgtggatcgccctacatggaaaccagatcacatctgacaaagttgggagaaaggtgttctcgaaactcaggcacctggaacgtctttacttggatcataacaaccttacccgtatgcccggaccccttccacgatccctgagggagctgcatctggatcacaaccagatctcccgtgtgcccaacaatgcactggagggaagaacctccagaccatgtacgagcaatacgatgcggagcagaaagtgggctgtgccctag

SEQ ID NO: 123297 - DNA, 1131 bp, Artificial Sequence
  derived and/or modified sequence
atgcagtggaccagcctgctgctgctggccggcctcttcagcctgagccaggcccagtatgaagatgacccccactggtggttccactacctgcggagccagcagagcacctactatgacccctatgacccctacccctatgagacctatgagccctacccctatggagtggatgagggccctgcctacacctacggcagccccagccccccagacccccgggactgcccccaggagtgtgactgcccccccaacttccccacagccatgtactgtgacaacagaaacctgaagtacctgccctttgtgcccagcaggatgaagtatgtgtacttccagaacaaccagatcaccagcatccaggagggcgtgtttgacaatgccaccggcctgctgtggatcgccctgcacggcaaccagatcaccagtgacaaggtgggcaggaaggtgttcagcaagctgcggcacctggagcggctgtacctggaccacaacaacctgaccaggatgcctggccccctgcccaggagcctgcgggagctgcacctggaccacaaccagatcagccgggtgcccaacaatgccctggagggcctggagaacctgacagccctgtacctgcagcacaatgagatccaggaggtgggcagctccatgaggggcctgcggagcctcatcctgctggacctgagctacaaccacctgaggaaggtgcctgatggcctgcccagcgccctggagcagctgtacatggagcacaacaacgtgtacacagtgcctgacagctacttccggggggcccccaagctgctgtatgtgcggctgagccacaacagcctgaccaacaacggcctggccagcaacaccttcaacagcagcagcctgctggagctggacctgagctacaaccagctgcagaagatcccccctgtgaacaccaacctggagaacctgtacctgcagggcaaccgcatcaatgagttcagcatcagcagcttctgcaccgtggtggatgtggtgaacttcagcaagctgcaggtgctgcggctggatggaaatgagatcaagaggtctgccatgccagcagatgcccccctgtgcctgcggctggccagcctcatcgagatctag

SEQ ID NO: 123298 - DNA, 1092 bp, Artificial Sequence
  derived and/or modified sequence
atgcagtggaccagcctgctgctgctggccggcctcttcagcctgagccaggcccagtatgaagatgacccccactggtggttccactacctgcggagccagcagagcacctactatgacccctatgacccctacccctatgagacctatgagccctacccctatggagtggatgagggccctgcctacacctacggcagccccagccccccagacccccgggactgcccccaggagtgtgactgcccccccaacttccccccatttgtgcccagcaggatgaagtatgtgtacttccagaacaaccagatcaccagcatccaggagggcgtgtttgacaatgccaccggcctgctgtggatcgccctgcacggcaaccagatcaccagtgacaaggtgggcaggaaggtgttcagcaagctgcggcacctggagcggctgtacctggaccacaacaacctgaccaggatgcctggccccctgcccaggagcctgcgggagctgcacctggaccacaaccagatcagccgggtgcccaacaatgccctggagggcctggagaacctgacagccctgtacctgcagcacaatgagatccaggaggtgggcagctccatgaggggcctgcggagcctcatcctgctggacctgagctacaaccacctgaggaaggtgcctgatggcctgcccagcgccctggagcagctgtacatggagcacaacaacgtgtacacagtgcctgacagctacttccggggggcccccaagctgctgtatgtgcggctgagccacaacagcctgaccaacaacggcctggccagcaacaccttcaacagcagcagcctgctggagctggacctgagctacaaccagctgcagaagatcccccctgtgaacaccaacctggagaacctgtacctgcagggcaaccgcatcaatgagttcagcatcagcagcttctgcaccgtggtggatgtggtgaacttcagcaagctgcaggtgctgcggctggatggaaatgagatcaagaggtctgccatgccagcagatgcccccctgtgcctgcggctggccagcctgattgagatctag

SEQ ID NO: 123299 - DNA, 594 bp, Artificial Sequence
  derived and/or modified sequence
atgaagatgaccctcatcggcggcagcaccaccagcgctgccagcagcccccccaccaccatccccatgaccctgaccaggatgaggcccaccagcctgacccccatgggctggatgaagggccagcccacccccacagccctgcaccccctgcagatcccagccacagcccccaggtctgccacagcccaccccaccagcacagccatgtactgtgacaacagaaacctgaagtacctgccctttgtgcccagcaggatgaagtatgtgtacttccagaacaaccagatcaccagcatccaggagggcgtgtttgacaatgccaccggcctgctgtggatcgccctgcacggcaaccagatcaccagtgacaaggtgggcaggaaggtgttcagcaagctgcggcacctggagcggctgtacctggaccacaacaacctgaccaggatgcctggccccctgcccaggagcctgcgggagctgcacctggaccacaaccagatcagccgggtgcccaacaatgccctggagggccgcaccagccggccctgcaccagcaacaccatgaggagcaggaagtgggccgtgccctag

SEQ ID NO: 123300 - DNA, 1131 bp, Artificial Sequence
  derived and/or modified sequence
atgcagtggaccagcctgctgctgctggccggcctgttcagcctgagtcaggcacagtatgaagacgatccccactggtggtttcactatctgcgaagtcagcagtcgacttattatgatccttacgatccgtacccatacgagacgtatgagccgtacccatacggagttgatgagggcccagcctacacttacggaagtccctctcctcccgatcctcgggattgtccacaagagtgtgactgtccgccaaacttccctaccgccatgtattgcgataacagaaatttgaaatacctccctttcgtcccttcaaggatgaagtacgtgtatttccaaaataatcagataactagcatccaggagggggtgtttgacaatgccacagggctgctgtggatcgctctgcacggtaaccagatcaccagtgacaaggtcggtcggaaagtgtttagcaagttgagacacctcgaacggctgtatctcgaccacaacaatcttaccagaatgcccggaccactccctcgctcgctccgggaacttcacctggaccacaatcaaatttctcgcgtgcccaacaacgccctggaaggcctggagaatctgactgcactatatctgcagcataacgaaatccaagaggtgggctcctcgatgagagggctacgatccttgatcctgctggacctgtcgtataaccacctgcgcaaagtgcccgacggattacccagcgcccttgaacagttgtacatggagcacaataatgtgtacacagtcccagactcctattttcggggggctcctaagctgctgtacgtcaggctctcccataactcattaaccaacaatggcctcgcctccaatactttcaattccagcagtctgctggagcttgatctgtcctacaaccagttgcagaagataccaccggtgaataccaacctggagaacctctacctacaaggcaacagaatcaatgagttcagcatttcctctttctgtacagtggtcgatgttgtgaattttagtaaactccaagtcctccgcctggacgggaacgaaattaaaagatccgccatgccagccgacgcccccttatgcctgaggcttgcatccctgatcgaaatttag

SEQ ID NO: 123301 - DNA, 1092 bp, Artificial Sequence
  derived and/or modified sequence
atgcagtggaccagcctgctgctgctggccggcctgttcagcctgtcccaggcccagtatgaggatgacccccattggtggttccattatttaagatcgcagcaatccacctattacgatccttacgatccatacccctacgaaacctatgagccatacccctacggggtcgatgagggccccgcttatacctacggaagtccctcaccacccgatcctagagactgcccccaggaatgtgactgccctccaaacttcccaccttttgtgccatcccggatgaagtacgtgtatttccaaaacaaccaaatcacatctattcaagaaggcgtgttcgacaacgcgaccggcctcctgtggatagctctgcacgggaaccagatcacgtctgataaagtgggaaggaaggttttctccaagcttcgccatttagaacgtctgtaccttgatcacaataacttgacaaggatgccgggccctctgccacgctccttgcgcgagcttcatctggaccacaaccaaatcagcagggtacccaacaatgccttggagggtctggaaaacttaactgcgttgtacctacagcataacgaaattcaggaggtaggttcaagcatgcggggcttacgaagtctgattttactcgaccttagctataaccatctgaggaaagttccggacggtttaccctccgcactcgagcagttgtatatggaacataataacgtgtacacggtgcccgactcctactttcggggcgctcccaaactgctatatgtccgactgagccataatagcttgactaataacggcctcgcgtcaaacacgtttaactccagctccctgctagaattagacctttcttataaccagctgcagaagatcccaccagtgaataccaacctagagaacctgtacctgcagggaaaccgtattaatgagttcagcatcagcagcttttgtaccgtggtggatgtcgtgaacttttcgaaactgcaagtgctgaggctcgatgggaatgagattaagcggagtgccatgccggcagatgccccactttgtctcagattagcctcattgatcgagatttag

SEQ ID NO: 123302 - DNA, 594 bp, Artificial Sequence
  derived and/or modified sequence
atgaagatgaccctgatcggcggcagcaccaccagcgccgccagctctccccccaccactattccgatgacattgacacggatgcggcccaccagtctaacgcccatggggtggatgaagggtcagcccacaccaactgccctgcatcctctacagatccctgctacagcaccaaggagcgctactgcgcatcctacctctacagcaatgtactgcgacaataggaacttaaaatacctgccattcgttcccagccgaatgaaatatgtgtacttccaaaataatcagattactagtattcaggagggagttttcgacaacgctactggcctgctgtggatcgctctgcatgggaatcagatcacctccgacaaggtgggtcggaaagtcttctccaaattgagacacttagagagactctacctggaccataataatctgacccgcatgcccggacccttgccaagatccctgcgcgagctgcatttggaccacaatcagatttcacgcgtcccaaacaacgcgctggagggccgtacaagccggccatgcacctccaatactatgagaagtaggaagtgggctgtcccctag

SEQ ID NO: 123303 - DNA, 1131 bp, Artificial Sequence
  derived and/or modified sequence
atgcagtggaccagccttctcctgctagccggattattttccctatcacaagcacaatatgaggacgacccacactggtggttccactacttgcgcagtcagcagtctacctattacgacccatatgacccttatccatacgagacatatgagccttatccctatggagtcgacgaaggtcctgcatatacatatggctccccttccccacccgaccccagggactgtcctcaggagtgcgactgtccacctaattttccaacggcaatgtattgtgacaatcggaatctgaagtatctccctttcgtcccaagtaggatgaagtacgtttacttccagaataatcaaatcactagcatccaggaaggggtctttgataatgctaccgggcttctctggattgccctgcacgggaaccagattacttccgataaggtcgggaggaaggtcttttcaaaattgcgacacttggagaggctttacttggaccacaataatttaactcggatgcccggaccactgcctcggagtctcagagagttgcacctagaccacaatcagatatctagagtccccaacaacgcccttgaagggctggaaaacctcactgcactatatcttcagcacaacgaaatccaggaagtgggtagttcaatgcggggactgagatcactgatccttctggacctgagttacaatcatcttcgaaaggtgccagacgggctgcccagtgcgctcgaacagttgtatatggaacacaacaacgtgtacaccgtcccggattcctattttcgcggagccccaaagcttctgtatgttcgactgtcacataacagcctgactaataacggtctcgccagcaacactttcaatagtagcagcctgctggaattggacctgtcttacaaccagctgcagaagatcccacctgtgaataccaacctggagaacttatatctccagggaaaccgtattaacgaattttccataagcagcttctgcacagtagtcgacgtggtcaacttttcaaagttgcaagtgcttaggctggatggcaatgaaatcaaacgctctgcgatgccagcagacgccccactctgcctccgcctggcctcactgatcgagatctag

SEQ ID NO: 123304 - DNA, 1092 bp, Artificial Sequence
  derived and/or modified sequence
atgcagtggacatcattactcctgctcgccggactgttctccttatcacaggctcagtacgaggacgacccccactggtggtttcattacttgcggtctcaacagtctacatactatgacccctatgatccctacccctacgagacatatgaaccctatccatatggcgtcgatgagggcccagcgtacacgtatggttcgccttcccctccggatccacgtgactgcccgcaggaatgtgactgccccccaaacttcccacccttcgtgcccagcaggatgaaatacgtgtacttccagaataaccagataactagtatccaagagggcgtgtttgataatgccaccggcctgctttggatcgcactacacggtaatcaaataacatccgacaaagtcgggagaaaggtgttttctaaactgcggcacttggaacggctgtacctagaccacaataacttaacacgcatgcctgggcctctgcctaggtcccttagggagttacacctagatcataatcaaatcagtcgagtcccaaacaatgcgctcgaggggctcgagaacctgaccgctctctatctgcagcataacgagatccaggaagtgggaagctccatgcgaggcttgaggagccttattctgctggacctctcgtacaatcacctacgcaaagttcctgatggtttgccaagcgccctagagcagttatacatggagcacaacaatgtgtacacagtgcctgatagctactttcgaggagcacccaagcttctatatgtccgccttagccataactctctgaccaataacggcctggcctcgaatacgttcaattcttctagtttgctggaacttgacttgtcttataatcagctgcagaagataccacctgttaatactaatttagagaacctctatctccagggcaaccgcatcaacgaattcagcatttcaagcttctgcaccgtggtagacgtagtgaacttctctaaactgcaggtgctgagacttgacggcaatgagattaaaagatcagcaatgcccgctgacgcaccgttgtgcctgcggctggcatctcttatcgagatctag

SEQ ID NO: 123305 - DNA, 594 bp, Artificial Sequence
  derived and/or modified sequence
atgaagatgaccctaataggcggttcgacgacgtcggccgcttccagtccacccactaccatccccatgacactgactagaatgagaccgaccagtctgactcccatggggtggatgaaggggcagcccaccccgactgctttgcacccccttcaaatccccgctaccgcacccaggtccgccactgcccatccaacatctaccgctatgtactgtgacaataggaatttgaaatatttgccctttgtgccctcgcgaatgaagtatgtgtactttcagaataaccagataacatccatccaagagggtgttttcgataacgctactggcttgctgtggatagcgttacatggaaatcagataactagcgataaggttggcaggaaagtgttctccaaacttagacacttggagaggttatacttggaccacaataacctgacccgcatgccgggacctctgccacgcagtttgcgcgagttacatcttgaccacaaccagatctcacgggtgccaaataacgcgttggaaggcaggacctcacggccatgcacttccaacaccatgagatctcggaagtgggcagtgccctag

SEQ ID NO: 123306 - DNA, 1131 bp, Artificial Sequence
  derived and/or modified sequence
atgcagtggaccagcctgctgctgctggccggcctgttcagcctgagccaggcccagtacgaggacgacccccactggtggttccactacctgagaagccagcagagcacctactacgacccctacgacccctacccctacgagacctacgagccctacccctacggcgtggacgagggccccgcctacacctacggcagccccagcccccccgaccccagagactgcccccaggagtgcgactgcccccccaacttccccaccgccatgtactgcgacaacagaaacctgaagtacctgcccttcgtgcccagcagaatgaagtacgtgtacttccagaacaaccagatcaccagcatccaggagggcgtgttcgacaacgccaccggcctgctgtggatcgccctgcacggcaaccagatcaccagcgacaaggtgggcagaaaggtgttcagcaagctgagacacctggagagactgtacctggaccacaacaacctgaccagaatgcccggccccctgcccagaagcctgagagagctgcacctggaccacaaccagatcagcagagtgcccaacaacgccctggagggcctggagaacctgaccgccctgtacctgcagcacaacgagatccaggaggtgggcagcagcatgagaggcctgagaagcctgatcctgctggacctgagctacaaccacctgagaaaggtgcccgacggcctgcccagcgccctggagcagctgtacatggagcacaacaacgtgtacaccgtgcccgacagctacttcagaggcgcccccaagctgctgtacgtgagactgagccacaacagcctgaccaacaacggcctggccagcaacaccttcaacagcagcagcctgctggagctggacctgagctacaaccagctgcagaagatcccccccgtgaacaccaacctggagaacctgtacctgcagggcaacagaatcaacgagttcagcatcagcagcttctgcaccgtggtggacgtggtgaacttcagcaagctgcaggtgctgagactggacggcaacgagatcaagagaagcgccatgcccgccgacgcccccctgtgcctgagactggccagcctgatcgagatctag

SEQ ID NO: 123307 - DNA, 1092 bp, Artificial Sequence
  derived and/or modified sequence
atgcagtggaccagcctgctgctgctggccggcctgttcagcctgagccaggcccagtacgaggacgacccccactggtggttccactacctgagaagccagcagagcacctactacgacccctacgacccctacccctacgagacctacgagccctacccctacggcgtggacgagggccccgcctacacctacggcagccccagcccccccgaccccagagactgcccccaggagtgcgactgcccccccaacttcccccccttcgtgcccagcagaatgaagtacgtgtacttccagaacaaccagatcaccagcatccaggagggcgtgttcgacaacgccaccggcctgctgtggatcgccctgcacggcaaccagatcaccagcgacaaggtgggcagaaaggtgttcagcaagctgagacacctggagagactgtacctggaccacaacaacctgaccagaatgcccggccccctgcccagaagcctgagagagctgcacctggaccacaaccagatcagcagagtgcccaacaacgccctggagggcctggagaacctgaccgccctgtacctgcagcacaacgagatccaggaggtgggcagcagcatgagaggcctgagaagcctgatcctgctggacctgagctacaaccacctgagaaaggtgcccgacggcctgcccagcgccctggagcagctgtacatggagcacaacaacgtgtacaccgtgcccgacagctacttcagaggcgcccccaagctgctgtacgtgagactgagccacaacagcctgaccaacaacggcctggccagcaacaccttcaacagcagcagcctgctggagctggacctgagctacaaccagctgcagaagatcccccccgtgaacaccaacctggagaacctgtacctgcagggcaacagaatcaacgagttcagcatcagcagcttctgcaccgtggtggacgtggtgaacttcagcaagctgcaggtgctgagactggacggcaacgagatcaagagaagcgccatgcccgccgacgcccccctgtgcctgagactggccagcctgatcgagatctag

SEQ ID NO: 123308 - DNA, 594 bp, Artificial Sequence
  derived and/or modified sequence
atgaagatgaccctgatcggcggcagcaccaccagcgccgccagcagcccccccaccaccatccccatgaccctgaccagaatgagacccaccagcctgacccccatgggctggatgaagggccagcccacccccaccgccctgcaccccctgcagatccccgccaccgcccccagaagcgccaccgcccaccccaccagcaccgccatgtactgcgacaacagaaacctgaagtacctgcccttcgtgcccagcagaatgaagtacgtgtacttccagaacaaccagatcaccagcatccaggagggcgtgttcgacaacgccaccggcctgctgtggatcgccctgcacggcaaccagatcaccagcgacaaggtgggcagaaaggtgttcagcaagctgagacacctggagagactgtacctggaccacaacaacctgaccagaatgcccggccccctgcccagaagcctgagagagctgcacctggaccacaaccagatcagcagagtgcccaacaacgccctggagggcagaaccagcagaccctgcaccagcaacaccatgagaagcagaaagtgggccgtgccctag

SEQ ID NO: 123309 - protein, 297 aa, Artificial Sequence
  derived and/or modified sequence
MEELVVEVRGSNGAFYKAFVKDVHEDSITVAFENNWQPDRQIPFHDVRFPPPVGYNKDINESDEVEVYSRANEKEPCCWWLAKVRMIKGEFYVIEYAACDATYNEIVTIERLRSVNPNKPATKDTFHKIKLDVPEDLRQMCAKEAAHKDFKKAVGAFSVTYDPENYQLVILSINEVTSKRAHMLIDMHFRSLRTKLSLIMRNEEASKQLESSRQLASRFHEQFIVREDLMGLAIGTHGANIQQARKVPGVTAIDLDEDTCTFHIYGEDQDAVKKARSFLEFAEDVIQVPRNLVGLKI

SEQ ID NO: 123310 - protein, 590 aa, Artificial Sequence
  derived and/or modified sequence
MEELVVEVRGSNGAFYKAFVKDVHEDSITVAFENNWQPDRQIPFHDVRFPPPVGYNKDINESDEVEVYSRANEKEPCCWWLAKVRMIKGEFYVIEYAACDATYNEIVTIERLRSVNPNKPATKDTFHKIKLDVPEDLRQMCAKEAAHKDFKKAVGAFSVTYDPENYQLVILSINEVTSKRAHMLIDMHFRSLRTKLSLIMRNEEASKQLESSRQLASRFHEQFIVREDLMGLAIGTHGANIQQARKVPGVTAIDLDEDTCTFHIYGEDQDAVKKARSFLEFAEDVIQVPRNLVGKVIGKNGKLIQEIVDKSGVVRVRIEAENEKNVPQEEEIMPPNSLPSNNSRVGPNAPEEKKHLDIKENSTHFSQPNSTKVQRVLVASSVVAGESQKPELKAWQGMVPFVFVGTKDSIANATVLLDYHLNYLKEVDQLRLERLQIDEQLRQIGASSRPPPNRTDKEKSYVTDDGQGMGRGSRPYRNRGHGRRGPGYTSAPTEEERESFLRRGDGRRRGGGGRGQGGRGRGGGFKGNDDHSRTDNRPRNPREAKGRTTDGSLQNTSSEGSRLRTGKDRNQKKEKPDSVDGQQPLVNGVP

SEQ ID NO: 123311 - protein, 632 aa, Artificial Sequence [sequence omitted]

SEQ ID NO: 123312 - DNA, 1774 bp, Artificial Sequence
  derived and/or modified sequence
atggaggagctggtggtggaagtgcggggctccaatggcgctttctacaaggcatttgtaaaggatgttcatgaagattcaataacagttgcatttgaaaacaactggcagcctgataggcagattccatttcatgatgtcagattcccacctcctgtaggttataataaagatataaatgaaagtgatgaagttgaggtgtattccagagcaaatgaaaaagagccttgctgttggtggttagctaaagtgaggatgataaagggtgagttttatgtgatagaatatgcagcatgtgatgcaacttacaatgaaattgtcacaattgaacgtctaagatctgttaatcccaacaaacctgccacaaaagatactttccataagatcaagctggatgtgccagaagacttacggcaaatgtgtgccaaagaggcggcacataaggattttaaaaaggcagttggtgccttttctgtaacttatgatccagaaaattatcagcttgtcattttgtccatcaatgaagtcacctcaaagcgagcacatatgctgattgacatgcactttcggagtctgcgcactaagttgtctctgataatgagaaatgaagaagctagtaagcagctggagagttcaaggcagcttgcctcgagatttcatgaacagtttatcgtaagagaagatctgatgggtctagctattggtactcatggtgctaatattcagcaagctagaaaagtacctggggtcactgctattgatctagatgaagatacctgcacatttcatatttatggagaggatcaggatgcagtgaaaaaagctagaagctttctcgaatttgctgaagatgtaatacaagttccaaggaacttagtaggcaaagtaataggaaaaaatggaaagctgattcaggagattgtggacaagtcaggagttgtgagggtgaggattgaggctgaaaatgagaaaaatgttccacaagaagaggaaattatgccaccaaattcccttccttccaataattcaagggttggacctaatgccccagaagaaaaaaaacatttagatataaaggaaaacagcacccatttttctcaacctaacagtacaaaagtccagagggtgttagtggcttcatcagttgtagcaggggaatcccagaaacctgaactcaaggcttggcagggtatggtaccatttgtttttgtgggaacaaaggacagcatcgctaatgccactgttcttttggattatcacctgaactatttaaaggaagtagaccagttgcgtttggagagattacaaattgatgagcagttgcgacagattggagctagttctagaccaccaccaaatcgtacagataaggaaaaaagctatgtgactgatgatggtcaaggaatgggtcgaggtagtagaccttacagaaatagggggcacggcagacgcggtcctggatatacttcagctccaacagaggaagagagggagagcttcctgcgcagaggagacggacggcggcgtggagggggaggaagaggacaaggaggaagaggacgtggaggaggcttcaaaggaaacgacgatcactcccgaacagataatcgtccacgtaatccaagagaggctaaaggaagaacaacagatggatcccttcagaatacctccagtgaaggtagtcggctgcgcacgggtaaagatcgtaaccagaagaaagagaagccagacagcgtggatggtcagcaaccactcgtgaatggagtaccctaaa

SEQ ID NO: 123313 - DNA, 4308 bp, Artificial Sequence
  derived and/or modified sequence
ggcggcggcggcggcggcggcggcggcggaggcggcggcggcggcggcggcggcggcggctgggcctcgagcgcccgcagcccacctctcgggggcgggctcccggcgctagcagggctgaagagaagatggaggagctggtggtggaagtgcggggctccaatggcgctttctacaaggcatttgtaaaggatgttcatgaagattcaataacagttgcatttgaaaacaactggcagcctgataggcagattccatttcatgatgtcagattcccacctcctgtaggttataataaagatataaatgaaagtgatgaagttgaggtgtattccagagcaaatgaaaaagagccttgctgttggtggttagctaaagtgaggatgataaagggtgagttttatgtgatagaatatgcagcatgtgatgcaacttacaatgaaattgtcacaattgaacgtctaagatctgttaatcccaacaaacctgccacaaaagatactttccataagatcaagctggatgtgccagaagacttacggcaaatgtgtgccaaagaggcggcacataaggattttaaaaaggcagttggtgccttttctgtaacttatgatccagaaaattatcagcttgtcattttgtccatcaatgaagtcacctcaaagcgagcacatatgctgattgacatgcactttcggagtctgcgcactaagttgtctctgataatgagaaatgaagaagctagtaagcagctggagagttcaaggcagcttgcctcgagatttcatgaacagtttatcgtaagagaagatctgatgggtctagctattggtactcatggtgctaatattcagcaagctagaaaagtacctggggtcactgctattgatctagatgaagatacctgcacatttcatatttatggagaggatcaggatgcagtgaaaaaagctagaagctttctcgaatttgctgaagatgtaatacaagttccaaggaacttagtaggcaaagtaataggaaaaaatggaaagctgattcaggagattgtggacaagtcaggagttgtgagggtgaggattgaggctgaaaatgagaaaaatgttccacaagaagaggaaattatgccaccaaattcccttccttccaataattcaagggttggacctaatgccccagaagaaaaaaaacatttagatataaaggaaaacagcacccatttttctcaacctaacagtacaaaagtccagagggtgttagtggcttcatcagttgtagcaggggaatcccagaaacctgaactcaaggcttggcagggtatggtaccatttgtttttgtgggaacaaaggacagcatcgctaatgccactgttcttttggattatcacctgaactatttaaaggaagtagaccagttgcgtttggagagattacaaattgatgagcagttgcgacagattggagctagttctagaccaccaccaaatcgtacagataaggaaaaaagctatgtgactgatgatggtcaaggaatgggtcgaggtagtagaccttacagaaatagggggcacggcagacgcggtcctggatatacttcaggaactaattctgaagcatcaaatgcttctgaaacagaatctgaccacagagacgaactcagtgattggtcattagctccaacagaggaagagagggagagcttcctgcgcagaggagacggacggcggcgtggagggggaggaagaggacaaggaggaagaggacgtggaggaggcttcaaaggaaacgacgatcactcccgaacagataatcgtccacgtaatccaagagaggctaaaggaagaacaacagatggatcccttcagatcagagttgactgcaataatgaaaggagtgtccacactaaaacattacagaatacctccagtgaaggtagtcggctgcgcacgggtaaagatcgtaaccagaagaaagagaagccagacagcgtggatggtcagcaaccactcgtgaatggagtaccctaaactgcataattctgaagttatatttcctataccatttccgtaattcttattccatattagaaaactttgttaggccaaagacaaatagtaggcaagatggcacagggcatgaaatgaacacaaattatgctaagaattttttattttttggtattggccataagcaacaattttcagatttgcacaaaaagataccttaaaatttgaaacattgcttttaaaactacttagcacttcagggcagattttagttttattttctaaagtactgagcagtgatattctttgttaatttggaccattttcctgcattgggtgatcattcaccagtacattctcagtttttcttaatatatagcatttatggtaatcatattagacttctgttttcaatctcgtatagaagtcttcatgaaatgctatgtcatttcatgtcctgtgtcagtttatgttttggtccacttttccagtattttagtggaccctgaaatgtgtgtgatgtgacatttgtcattttcattagcaaaaaaagttgtatgatctgtgccttttttatatcttggcaggtaggaatattatatttggatgcagagttcagggaagataagttggaaacactaaatgttaaagatgtagcaaaccctgtcaaacattagtactttatagaagaatgcatgctttccatatttttttccttacataaacatcaggttaggcagtataaagaataggacttgtttttgtttttgttttgttgcactgaagtttgataaatagtgttattgagagagatgtgtaatttttctgtatagacaggagaagaaagaactatcttcatctgagagaggctaaaatgttttcagctaggaacaaatcttcctggtcgaaagttagtaggatatgcctgctctttggcctgatgaccaattttaacttagagctttttttttttaattttgtctgccccaagttttgtgaaatttttcatattttaatttcaagcttattttggagagataggaaggtcatttccatgtatgcataataatcctgcaaagtacaggtactttgtctaagaaacattggaagcaggttaaatgttttgtaaactttgaaatatatggtctaatgtttaagcagaattggaaaagactaagatcggttaacaaataacaacttttttttctttttttcttttgttttttgaagtgttggggtttggttttgttttttgagtcttttttttttaagtgaaatttattgaggaaaaatatgtgaaggaccttcactctaagatgttatatttttcttaaaaagtaactcctagtaggggtaccactgaatctgtacagagccgtaaaaactgaagttctgcctctgatgtattttgtgagtttgtttctttgaattttcattttacagttacttttccttgcatacaaacaagcatataaaatggcaacaaactgcacatgatttcacaaatattaaaaagtcttttaaaaagtattgccaaacattaatgttgatttctagttatttattctgggaatgtatagtatttgaaaacagaaattggtaccttgcacacatcatctgtaagctgtttggttttaaaatactgtagataattaaccaaggtagaatgaccttgtaatgtaactgctcttgggcaatattctctgtacatattagcgacaacagattggattttatgttgacatttgtttggttatagtgcaatatattttgtatgcaagcagtttcaataaagtttgatcttcctctgctaaattgatgttgatgcaatccttacaaatgattgcttttaaaattttaagctaggaaaagaaatctatagaaagtgttctgttacaaaatgtaactgttaccattggaaatttcacgtcataggaagttagcctttatctaccaactttcaagaacttgtttaataaagcgaaaaactcaaccaaatggtacaaaaccacagtgtaccattaaaatatgcactaagtctcttttttacaaaggctgtattcagcaaggcgctaacttgcttaaatgtgaattactaacttctaaaactgtactttgattcacatgttttcaaatggagttggagttcattcatattacaatatttgtgtgctaaacgtgtatgtttttcagttcaaagtcatgatgtttttaaaatcttattaaagtttcaaaaatctgaagattgtttatctagatgtaaatttttattaaaaagttgcacttatgaaaaagcaaaaaa

SEQ ID NO: 123314 - DNA, 1773 bp, Artificial Sequence
  derived and/or modified sequence
atggaggagctggtagtcgaggttaggggttctaatggagcattttacaaggcttttgtcaaggatgtgcatgaggattcaattacggtggccttcgagaacaattggcaacctgaccgtcagattcctttccatgatgtgaggttcccgccacccgtgggttacaacaaggatattaatgaatccgatgaagtggaagtatattcaagagcaaatgagaaagagccatgttgctggtggctggccaaggtgcggatgatcaagggcgagttttacgtgattgagtacgccgcctgtgacgccacctacaatgaaatcgttaccattgaacgccttcggagcgtgaatccaaacaagcctgcaacaaaggatacatttcacaagattaagcttgacgttcccgaggatctgcggcaaatgtgcgctaaggaggccgctcacaaggactttaaaaaagctgtcggtgcattcagtgtcacgtacgatcccgaaaattatcagctggtcatactgtctatcaacgaagtgaccagtaagagagcccatatgttgatcgacatgcactttagatctcttcggacaaagctatctcttatcatgcgaaacgaagaggctagcaagcagctggagtcatccaggcagctggcctctaggttccacgaacaattcattgtgagggaggacctcatgggcctcgcgatcggtacacatggagctaacatacagcaagcccgcaaagtgccaggcgtgaccgctattgatctggatgaagacacgtgcactttccatatctacggcgaggaccaggacgccgtaaaaaaagcccgaagtttcctggagtttgcagaagacgttattcaggtcccgaggaatctagtgggtaaagtgatcgggaaaaacgggaagctcatacaggagatcgtggacaaatccggcgtggttcgggtccgtatcgaggccgagaatgaaaaaaatgtacctcaggaggaggaaataatgccaccaaattcactcccttctaataatagtcgggtggggcccaacgcaccggaggagaaaaagcacctggacataaaggagaatagtacccacttctcgcagcccaattccactaaggtgcaaagggtgctggtggcctcatcagttgttgctggggagtcgcagaagcccgagctgaaagcgtggcaagggatggtgccttttgtgtttgtcgggacaaaagattcgatcgcaaatgctacagttctcctagactaccacctcaactacctgaaggaagtggaccagttgcggctcgagcgactgcagattgatgaacagctaagacagatcggagcttcctccaggccaccgccaaacaggactgataaagagaagagctacgtgaccgatgatggccaagggatggggcggggcagccggccgtataggaaccgcgggcacggacggaggggtcctggatatacttcagcgccaaccgaggaggagagagagtcattcctgagaaggggcgatggtcgcaggagaggtggtggcggccgaggacaggggggtcggggcagagggggcggcttcaagggaaatgatgatcacagccgaacagacaataggccacgaaatcctcgtgaggccaagggtaggaccaccgatggaagcttgcaaaatacctcttctgagggatctcgcctgaggactggcaaggatcgcaaccagaagaaggagaagccagactctgtagatggccagcagcccttggttaatggagttccttag

SEQ ID NO: 123315 - DNA, 1899 bp, Artificial Sequence
  derived and/or modified sequence
atggaagaattagtcgtcgaggtgaggggatctaacggcgccttttacaaagctttcgtgaaggacgttcatgaggactcaatcaccgtggcttttgaaaacaactggcagcccgatagacagatccccttccacgatgtgaggtttcctcctcctgttggctataataaggatatcaacgaatcagacgaagttgaagtctattcccgagcaaacgagaaagaaccctgttgctggtggttggctaaagtccggatgataaaaggagaattttatgtaatcgagtacgcagcttgcgacgcgacttacaatgagatagtcaccatcgaacgactccgatctgtgaatccgaacaaaccagcaacaaaagacacatttcacaaaatcaaactggacgtgccggaagaccttcggcaaatgtgtgccaaggaggcggcccacaaagatttcaagaaagcagtaggagctttctccgtgacatacgatcctgaaaattatcaactcgtaatcttgtccattaatgaagtgacttctaaaagagcccacatgcttatcgacatgcacttcagatcgttacgcacaaagctttccctcataatgcggaacgaagaggccagcaaacaattggagtcctcccggcagctggcgagcagatttcacgaacagtttatcgtgcgcgaggatctgatgggcctggccattgggactcatggtgcgaatattcagcaggctcgcaaagtaccaggcgtgactgcgattgacctggatgaggatacttgtacttttcatatctatggagaggatcaagacgcagtaaagaaggctcgctccttcctagaattcgccgaggacgtgatacaggtcccccgcaacctggtcggcaaagtgatcggtaagaatggcaaactgatccaagagatcgtggacaagagtggtgtagtgagggtccgcatcgaagctgagaacgaaaaaaatgtgccgcaagaagaggaaattatgccacctaactccttaccatctaacaattccagagtcggcccgaacgcaccagaggagaagaaacatttagacatcaaagagaattctacccatttctcccagcccaacagcacaaaggtgcagcgtgttctggttgcttcatcagtggtcgccggcgagagtcaaaaaccagagctgaaagcctggcagggaatggtgccattcgtattcgtggggaccaaagacagtatcgccaatgccacagtcctgcttgattaccatcttaattatctgaaagaagtcgaccagctcagattggaacggctacaaattgacgagcagctgaggcagatcggggccagcagtaggcccccgcctaatcgcaccgacaaagaaaagtcttacgtgactgatgacggccagggcatgggtcggggatcaaggccttacagaaatagggggcacggccgccgggggcccgggtacacctccggcacaaactccgaagcttcgaacgcatcggagaccgaaagtgaccacagggatgagctctcagattggagtttggcccctaccgaagaggagagggaaagtttcctgaggcgaggcgatggccggagacgagggggcggcggcaggggccagggcgggaggggccgcggcgggggctttaaggggaatgatgaccacagccggactgataataggcctcggaacccccgcgaagcaaaagggagaaccaccgacggatccctgcagattcgcgttgattgcaacaacgagcgcagtgtgcatacgaaaaccctgcaaaacactagcagcgaaggtagccggttacgaactggcaaagaccgcaatcaaaagaaggagaaacctgacagtgttgacggtcaacaaccgctcgtaaacggcgtgccttag

SEQ ID NO: 123316 - DNA, 1773 bp, Artificial Sequence
  derived and/or modified sequence
atggaggagctggtggtggaggtgcggggcagcaatggagccttctacaaggcctttgtgaaggatgtgcatgaagattccatcaccgtggcctttgagaacaactggcagcctgaccggcagatccccttccatgatgtgcgcttccccccacctgtgggctacaacaaggacatcaatgaaagtgatgaggtggaggtgtacagccgggccaatgagaaggagccctgctgctggtggctggccaaggtgaggatgatcaagggggagttctacgtgattgaatatgctgcctgtgatgccacctacaatgagatcgtgaccatcgagcggctgcggtctgtgaaccccaacaagccagccaccaaggacaccttccacaagatcaagctggatgtgcctgaggacctgcggcagatgtgtgccaaggaggccgcccacaaggacttcaagaaggctgtgggcgccttctctgtgacctatgaccctgagaactaccagctggtgatcctgagcatcaatgaggtgaccagcaagagggcccacatgctgattgacatgcacttccgcagcctgcggaccaagctgagcctcatcatgagaaatgaggaggccagcaagcagctggagagcagccggcagctggccagccgcttccacgagcagttcatcgtgcgggaggacctgatgggcctggccatcggcacccatggagccaacatccagcaggccaggaaggtgcctggggtgacagccatcgacctggatgaggacacctgcaccttccacatctatggagaggaccaggatgctgtgaagaaggcccgctccttcctggagtttgctgaagatgtgatccaggtgcccaggaacctggtgggcaaggtgattggcaagaatggcaagctgatccaggagatcgtggacaagtctggagtggtgcgggtgcgcatcgaggctgaaaatgagaagaatgtgccccaggaggaggagatcatgccacccaacagcctgcccagcaacaacagccgggtgggccccaatgcccctgaggagaagaagcacctggacatcaaggagaacagcacccacttcagccagcccaacagcaccaaggtgcagagggtgctggtggccagctctgtggtggccggggagagccagaagccagagctgaaggcctggcagggcatggtgccctttgtgtttgtgggcaccaaggacagcatcgccaatgccaccgtgctgctggactaccacctgaactacctgaaggaggtggaccagctgcggctggagcggctgcagattgatgagcagctgcggcagatcggggccagcagccggcccccacccaacagaacagacaaggagaagagctatgtgacagatgatggccagggcatgggccggggcagccggccctacagaaacagaggacatggaagaagaggccctggctacaccagcgcccccacagaggaggagcgggagagcttcctgcggagaggagatggaagaagaagaggaggcggcggccggggccagggcggccggggccggggcggcggcttcaagggaaatgatgaccacagcaggacagacaaccggcccaggaacccccgggaggccaagggccgcaccacagatggcagcctgcagaacaccagcagcgagggcagccggctgaggacaggcaaggacaggaaccagaagaaggagaagccagacagcgtggatggccagcagcccctggtgaatggagtgccctag

SEQ ID NO: 123317 - DNA, 1899 bp, Artificial Sequence
  derived and/or modified sequence
atggaggagctggtggtggaggtgcggggcagcaatggagccttctacaaggcctttgtgaaggatgtgcatgaagattccatcaccgtggcctttgagaacaactggcagcctgaccggcagatccccttccatgatgtgcgcttccccccacctgtgggctacaacaaggacatcaatgaaagtgatgaggtggaggtgtacagccgggccaatgagaaggagccctgctgctggtggctggccaaggtgaggatgatcaagggggagttctacgtgattgaatatgctgcctgtgatgccacctacaatgagatcgtgaccatcgagcggctgcggtctgtgaaccccaacaagccagccaccaaggacaccttccacaagatcaagctggatgtgcctgaggacctgcggcagatgtgtgccaaggaggccgcccacaaggacttcaagaaggctgtgggcgccttctctgtgacctatgaccctgagaactaccagctggtgatcctgagcatcaatgaggtgaccagcaagagggcccacatgctgattgacatgcacttccgcagcctgcggaccaagctgagcctcatcatgagaaatgaggaggccagcaagcagctggagagcagccggcagctggccagccgcttccacgagcagttcatcgtgcgggaggacctgatgggcctggccatcggcacccatggagccaacatccagcaggccaggaaggtgcctggggtgacagccatcgacctggatgaggacacctgcaccttccacatctatggagaggaccaggatgctgtgaagaaggcccgctccttcctggagtttgctgaagatgtgatccaggtgcccaggaacctggtgggcaaggtgattggcaagaatggcaagctgatccaggagatcgtggacaagtctggagtggtgcgggtgcgcatcgaggctgaaaatgagaagaatgtgccccaggaggaggagatcatgccacccaacagcctgcccagcaacaacagccgggtgggccccaatgcccctgaggagaagaagcacctggacatcaaggagaacagcacccacttcagccagcccaacagcaccaaggtgcagagggtgctggtggccagctctgtggtggccggggagagccagaagccagagctgaaggcctggcagggcatggtgccctttgtgtttgtgggcaccaaggacagcatcgccaatgccaccgtgctgctggactaccacctgaactacctgaaggaggtggaccagctgcggctggagcggctgcagattgatgagcagctgcggcagatcggggccagcagccggcccccacccaacagaacagacaaggagaagagctatgtgacagatgatggccagggcatgggccggggcagccggccctacagaaacagaggacatggaagaagaggccctggctacaccagcggcaccaacagcgaggccagcaatgccagcgagacagaaagtgaccacagagatgagctgagtgactggagcctggcccccacagaggaggagcgggagagcttcctgcggagaggagatggaagaagaagaggaggcggcggccggggccagggcggccggggccggggcggcggcttcaagggaaatgatgaccacagcaggacagacaaccggcccaggaacccccgggaggccaagggccgcaccacagatggcagcctgcagatccgggtggactgcaacaatgaaagatctgtgcacaccaagaccctgcagaacaccagcagcgagggcagccggctgaggacaggcaaggacaggaaccagaagaaggagaagccagacagcgtggatggccagcagcccctggtgaatggagtgccctag

SEQ ID NO: 123318 - DNA, 1773 bp, Artificial Sequence
  derived and/or modified sequence
atggaggagctggtggtggaggtgcggggcagcaacggcgccttctacaaggcattcgtcaaagatgtgcacgaagatagcatcactgtggccttcgagaataactggcagcctgacaggcagataccttttcacgacgtacggtttcctcctccagtaggttacaataaggacatcaacgagagcgatgaggtggaagtctacagtagagccaacgaaaaggagccttgttgctggtggcttgcaaaggtgcgaatgatcaagggggaattttatgtaattgagtatgcggcctgtgacgcgacttacaacgagatcgttaccatcgagagactaaggtcagtcaacccgaataagcctgccaccaaagacaccttccacaaaataaagctcgacgttccagaggatctccggcagatgtgtgccaaggaggccgcccacaaggatttcaagaaggctgtgggagcttttagcgttacctacgatccggaaaactaccagttggtgatcctctctattaatgaagtcacttctaagagagcacacatgcttatcgacatgcactttcggtccctccgcacaaaactgagtctgataatgaggaatgaggaggccagcaagcagctggagagctccagacagttagcatcgcgatttcatgaacagtttatcgtacgagaggacctcatgggtttggctatcggcacacacggagctaatattcaacaggccaggaaggtgccaggggtgaccgctattgatctcgacgaggatacatgtacgttccatatctatggcgaggatcaagacgccgtaaaaaaggccagaagtttcttggagttcgcagaagacgtcatccaggttccgcgcaacctcgtcgggaaagtgatcggaaaaaatggtaagctaatccaagaaatcgtggataagtccggggtggttcgtgtacggattgaggccgaaaatgagaaaaacgtcccacaagaggaagagattatgccacccaatagcctgcctagtaataactcacgggttggccctaacgcacctgaggagaaaaaacatctcgacatcaaggagaatagcacccatttttcgcagcccaactcaacaaaagtacagcgggttctggtggcatcctcagtggtcgctggcgaaagccagaaacccgagttgaaagcttggcagggcatggtgcctttcgtgtttgtggggaccaaggattctattgccaacgctacagtcctcttggattaccacctaaactaccttaaggaagtggaccagctgagacttgaacgcctgcaaatagacgagcagctccgacagatcggggcatcaagtcgacctccccccaacagaacagacaaggagaagtcctacgtaactgacgacggccaaggcatgggacggggctcgagaccctatcgtaatagaggtcatggaagacgtggacctgggtatacaagcgccccaaccgaagaggaaagagaaagtttcctgagaaggggagatggccggcggagaggagggggaggacgaggccaggggggtcggggacgcggcggaggctttaaggggaatgacgaccacagcaggactgacaatcgacccagaaaccctagggaggccaaaggcagaacgacagatggctccttgcaaaatactagctccgagggatccagacttcggacaggaaaagacagaaatcagaagaaggagaaacctgactccgtcgatggacaacagcccttggtgaatggagtcccctag

SEQ ID NO: 123319 - DNA, 1899 bp, Artificial Sequence
  derived and/or modified sequence
atggaggagctggtggtggaggtgcggggcagcaacggcgccttctacaaggctttcgtcaaggatgtgcatgaggattctatcacagtggccttcgagaataactggcagccagatagacaaatccctttccatgacgtgagattccctccccctgtgggatacaataaggatataaacgagtcagatgaggtggaggtctacagccgtgccaacgaaaaagaaccatgttgttggtggctggccaaggtccgcatgatcaagggagagttctatgtcatcgaatatgcagcttgcgatgcaacctataacgagattgtgacaatcgagaggttacgatctgtcaaccctaataaaccagcaactaaagacacctttcacaagatcaagctggatgtccctgaagatctaaggcagatgtgtgcaaaggaagccgcacacaaagactttaaaaaggctgtgggcgcatttagtgtgacctatgatcctgagaattaccagctagtgatactttccataaacgaagtcacgagcaagcgcgcccatatgctgatcgacatgcactttcgatccttgcgtaccaaattgagtcttattatgcgcaacgaggaggccagcaagcagctggagtcttctaggcagctggcctcgagattccatgagcaatttatcgtgcgcgaggatcttatgggcctggcaattggaactcatggggcaaacatacaacaggcgcggaaggtgcccggcgttaccgccatagatctggatgaggacacgtgtaccttccatatctatggggaggatcaggatgccgttaagaaggctcggtctttcttagagttcgcagaggacgttatccaggtcccaaggaacctcgtcggcaaggttattggtaaaaacggtaaactgatacaggaaatcgtggataagtcaggggtggtgcgtgtaaggatcgaagctgagaacgaaaaaaatgttcctcaggaagaggaaatcatgcccccaaacagtcttccctctaacaacagtcgcgtgggccccaatgctccagaggagaagaaacatctggatatcaaagaaaacagcacacacttctcccagcctaatagcacgaaagtgcaacgagtgctggtggctagctctgtggtggccggtgaatctcagaagcccgagttaaaggcctggcaggggatggttccatttgtgttcgtgggtaccaaggactccatagcaaatgccacagtgttattggactaccatcttaattaccttaaggaggtcgatcagctccgactggagcggctgcagatcgatgagcagctgcgccagattggtgcatcgagccggcccccacccaacagaaccgacaaggaaaaatcatatgtgacagacgatggccagggcatgggaaggggaagccgcccataccgaaacagggggcatggacgtcggggtcccgggtacacatccggtacaaatagcgaggcatctaatgcctctgaaacagaatcagatcaccgtgacgaattgtcggactggagtctcgcaccaactgaggaagagagggaaagtttcctgcggcggggggatggaaggcgtcgcgggggtggaggtaggggccagggaggacgtggaagaggaggggggttcaaaggcaacgacgatcacagtcggactgacaacaggcctcggaacccacgcgaagcgaaaggcaggacaaccgacggttctctgcagataagggtcgactgcaacaacgagcggagcgtgcacaccaagaccctgcagaatacctcaagcgagggctctagactacgtactggcaaagatagaaaccagaagaaagagaagcctgactctgtggacgggcagcagccactagtgaacggagtgccatag

SEQ ID NO: 123320 - DNA, 1773 bp, Artificial Sequence
  derived and/or modified sequence
atggaggagctggtcgtagaagtgagagggagcaatggggctttctacaaggcatttgttaaagatgtgcatgaagattctatcacagtggcctttgaaaataattggcagcctgatcgccagataccctttcatgatgttaggtttccccctcccgtgggctacaacaaggatatcaatgagtccgatgaagtcgaggtgtactctcgagctaatgagaaagagccatgttgttggtggctggcgaaagttcgcatgattaagggagaattttacgtaatcgaatacgccgcatgtgacgccacatacaatgaaatcgtcacaattgagcgcctgagaagcgtgaaccccaataaacccgcaactaaggatacttttcataagatcaagcttgacgtacccgaagacctcaggcagatgtgtgcaaaagaggccgctcacaaagattttaagaaggccgttggcgctttctcggtgacatacgacccggaaaactaccagttagtgatactcagcatcaacgaggtgacatctaaacgcgcacacatgcttatagacatgcattttagatcgctccggacaaagctttcattaatcatgagaaacgaagaagccagcaaacagctcgagagcagccggcaacttgccagccgcttccatgaacaattcatcgttcgagaggatttgatggggcttgctattggcacacacggggctaatattcagcaagcaaggaaggtgccgggtgtcacagcaattgacctcgacgaagatacctgtacctttcacatatacggagaggaccaggacgccgtgaaaaaagcacgaagctttctcgaattcgccgaggacgtaatacaggtgccacgaaacctggtgggtaaggttattggcaagaatggcaaactaattcaagagatcgtggataaatctggcgtagtacgggtgcgcattgaagccgaaaacgagaagaacgtgcctcaggaggaagagattatgcctccaaatagcctccctagcaacaattcacgtgttgggccaaacgccccagaagagaaaaagcacctcgatatcaaagagaattctacacacttttcacagccaaattctacaaaggtacagcgggtcctagtggccagcagcgtggtcgcgggagaaagccaaaaaccagaactgaaggcctggcagggcatggtgccgttcgtcttcgtgggcaccaaggattccatcgcaaatgctacagtgcttctggattaccacttaaactatctcaaagaggtcgatcaactaaggctggagagattgcagatcgacgaacagctgcgccagatcggcgctagcagccggccaccacccaataggaccgataaagagaaatcttatgtaactgatgacggacaggggatgggcaggggaagtcgcccttaccggaaccgaggacacggcaggaggggccctggttacaccagcgcgcctaccgaagaggaacgcgaaagtttcctgcgcaggggtgacggtaggagaaggggtggtgggggtcggggacaagggggtcgcggacggggtggcggattcaaaggaaatgacgatcattcccgcactgataacaggccgcgaaaccctagagaagccaaaggcagaacaactgatggtagcctgcagaatacatcaagcgaaggctcaagactcagaacaggcaaggatcgaaatcagaagaaagagaagccggactctgtggatggacaacagcccctggtaaatggggtcccatag

SEQ ID NO: 123321 - DNA, 1899 bp, Artificial Sequence
  derived and/or modified sequence
atggaggagctagtcgtggaagttcgaggctccaatggtgccttctataaggccttcgtcaaggacgtccatgaagatagtattaccgtggcttttgaaaataactggcagccggatcggcagatacctttccacgatgtgcggttccctccacctgttggctacaacaaggatattaatgaatccgatgaggtggaagtgtacagccgcgcaaacgaaaaagaaccctgttgttggtggctggctaaagtgaggatgattaagggcgaattctatgtaattgaatacgccgcttgcgatgccacatataatgagatcgtgactattgagcgcttgagatccgtcaaccccaacaagcccgctacgaaggatactttccataagattaaactcgatgtacccgaggacctgagacagatgtgtgccaaggaagcagcccataaggactttaagaaagccgttggggcttttagcgtaacctatgacccagagaattatcagctcgtgattttatctatcaatgaagtaactagtaagagggcgcatatgctcatcgacatgcattttagaagtctgcgaacaaaactgagtctgataatgcgaaacgaagaggcctctaagcagctggagtcctcaaggcaactggcatccagatttcacgagcagtttattgtacgggaggatctgatggggctggccatcggcactcacggagccaacattcagcaggcacgaaaagtccctggcgtgactgctattgatctggatgaggatacttgcacattccatatttatggcgaagatcaagatgctgtaaaaaaggctagaagcttcctggaattcgccgaagatgtgattcaggtgcctcgaaaccttgttggaaaagtgattggcaaaaacggaaaattgattcaggaaatagtcgacaaatcaggagtagtccgagtgcggatcgaggctgaaaatgagaagaacgtgcctcaggaagaagagattatgccacccaattctctcccgtctaacaatagtagggtcggacccaacgcccctgaggagaagaaacaccttgacattaaagagaacagcacccatttcagccagcctaatagcaccaaggttcagcgggtattagtggcaagttccgtggtagccggtgaatctcagaaaccagaactcaaggcttggcaagggatggttcctttcgtgtttgtgggcacaaaggatagcatcgcaaacgccacagtgttgcttgattaccacctgaactatcttaaagaggtcgaccagctgcgcttggagagattacagattgacgaacagctccgtcagattggagctagttctcgaccacctccaaatcgcacagacaaagagaaatcatatgtcaccgatgacgggcaaggcatggggcgagggtcccgaccctaccggaatcgcggacacggaaggagaggtccaggttacacatcgggcaccaattctgaggccagtaacgccagcgaaaccgaaagcgaccaccgcgacgagctgagcgactggtcactcgcccctacagaagaggaacgtgaatcatttctgagaaggggcgacggcaggcgtagagggggagggggaagaggccaggggggtcgcggtcgcggaggtggttttaaaggcaatgatgaccattccagaactgataataggccaagaaacccaagagaagctaagggccgaactactgatggctctctgcagatcagagttgactgcaacaacgagcggtccgtacatacaaaaaccctgcagaacaccagctccgaggggtccagactgagaactggcaaagaccggaaccagaaaaaggaaaaaccagactcagtcgatggccaacagcctctagttaatggagtcccctag

SEQ ID NO: 123322 - DNA, 1773 bp, Artificial Sequence
  derived and/or modified sequence
atggaggagctggtggtggaggtgagaggcagcaacggcgccttctacaaggccttcgtgaaggacgtgcacgaggacagcatcaccgtggccttcgagaacaactggcagcccgacagacagatccccttccacgacgtgagattccccccccccgtgggctacaacaaggacatcaacgagagcgacgaggtggaggtgtacagcagagccaacgagaaggagccctgctgctggtggctggccaaggtgagaatgatcaagggcgagttctacgtgatcgagtacgccgcctgcgacgccacctacaacgagatcgtgaccatcgagagactgagaagcgtgaaccccaacaagcccgccaccaaggacaccttccacaagatcaagctggacgtgcccgaggacctgagacagatgtgcgccaaggaggccgcccacaaggacttcaagaaggccgtgggcgccttcagcgtgacctacgaccccgagaactaccagctggtgatcctgagcatcaacgaggtgaccagcaagagagcccacatgctgatcgacatgcacttcagaagcctgagaaccaagctgagcctgatcatgagaaacgaggaggccagcaagcagctggagagcagcagacagctggccagcagattccacgagcagttcatcgtgagagaggacctgatgggcctggccatcggcacccacggcgccaacatccagcaggccagaaaggtgcccggcgtgaccgccatcgacctggacgaggacacctgcaccttccacatctacggcgaggaccaggacgccgtgaagaaggccagaagcttcctggagttcgccgaggacgtgatccaggtgcccagaaacctggtgggcaaggtgatcggcaagaacggcaagctgatccaggagatcgtggacaagagcggcgtggtgagagtgagaatcgaggccgagaacgagaagaacgtgccccaggaggaggagatcatgccccccaacagcctgcccagcaacaacagcagagtgggccccaacgcccccgaggagaagaagcacctggacatcaaggagaacagcacccacttcagccagcccaacagcaccaaggtgcagagagtgctggtggccagcagcgtggtggccggcgagagccagaagcccgagctgaaggcctggcagggcatggtgcccttcgtgttcgtgggcaccaaggacagcatcgccaacgccaccgtgctgctggactaccacctgaactacctgaaggaggtggaccagctgagactggagagactgcagatcgacgagcagctgagacagatcggcgccagcagcagacccccccccaacagaaccgacaaggagaagagctacgtgaccgacgacggccagggcatgggcagaggcagcagaccctacagaaacagaggccacggcagaagaggccccggctacaccagcgcccccaccgaggaggagagagagagcttcctgagaagaggcgacggcagaagaagaggcggcggcggcagaggccagggcggcagaggcagaggcggcggcttcaagggcaacgacgaccacagcagaaccgacaacagacccagaaaccccagagaggccaagggcagaaccaccgacggcagcctgcagaacaccagcagcgagggcagcagactgagaaccggcaaggacagaaaccagaagaaggagaagcccgacagcgtggacggccagcagcccctggtgaacggcgtgccctag

SEQ ID NO: 123323 - DNA, 1899 bp, Artificial Sequence
  derived and/or modified sequence
atggaggagctggtggtggaggtgagaggcagcaacggcgccttctacaaggccttcgtgaaggacgtgcacgaggacagcatcaccgtggccttcgagaacaactggcagcccgacagacagatccccttccacgacgtgagattccccccccccgtgggctacaacaaggacatcaacgagagcgacgaggtggaggtgtacagcagagccaacgagaaggagccctgctgctggtggctggccaaggtgagaatgatcaagggcgagttctacgtgatcgagtacgccgcctgcgacgccacctacaacgagatcgtgaccatcgagagactgagaagcgtgaaccccaacaagcccgccaccaaggacaccttccacaagatcaagctggacgtgcccgaggacctgagacagatgtgcgccaaggaggccgcccacaaggacttcaagaaggccgtgggcgccttcagcgtgacctacgaccccgagaactaccagctggtgatcctgagcatcaacgaggtgaccagcaagagagcccacatgctgatcgacatgcacttcagaagcctgagaaccaagctgagcctgatcatgagaaacgaggaggccagcaagcagctggagagcagcagacagctggccagcagattccacgagcagttcatcgtgagagaggacctgatgggcctggccatcggcacccacggcgccaacatccagcaggccagaaaggtgcccggcgtgaccgccatcgacctggacgaggacacctgcaccttccacatctacggcgaggaccaggacgccgtgaagaaggccagaagcttcctggagttcgccgaggacgtgatccaggtgcccagaaacctggtgggcaaggtgatcggcaagaacggcaagctgatccaggagatcgtggacaagagcggcgtggtgagagtgagaatcgaggccgagaacgagaagaacgtgccccaggaggaggagatcatgccccccaacagcctgcccagcaacaacagcagagtgggccccaacgcccccgaggagaagaagcacctggacatcaaggagaacagcacccacttcagccagcccaacagcaccaaggtgcagagagtgctggtggccagcagcgtggtggccggcgagagccagaagcccgagctgaaggcctggcagggcatggtgcccttcgtgttcgtgggcaccaaggacagcatcgccaacgccaccgtgctgctggactaccacctgaactacctgaaggaggtggaccagctgagactggagagactgcagatcgacgagcagctgagacagatcggcgccagcagcagacccccccccaacagaaccgacaaggagaagagctacgtgaccgacgacggccagggcatgggcagaggcagcagaccctacagaaacagaggccacggcagaagaggccccggctacaccagcggcaccaacagcgaggccagcaacgccagcgagaccgagagcgaccacagagacgagctgagcgactggagcctggcccccaccgaggaggagagagagagcttcctgagaagaggcgacggcagaagaagaggcggcggcggcagaggccagggcggcagaggcagaggcggcggcttcaagggcaacgacgaccacagcagaaccgacaacagacccagaaaccccagagaggccaagggcagaaccaccgacggcagcctgcagatcagagtggactgcaacaacgagagaagcgtgcacaccaagaccctgcagaacaccagcagcgagggcagcagactgagaaccggcaaggacagaaaccagaagaaggagaagcccgacagcgtggacggccagcagcccctggtgaacggcgtgccctag

SEQ ID NO: 123324 - protein, 1311 aa, Artificial Sequence
  derived and/or modified sequence
MDLFDFFRDWDLEQQCHYEQDRSALKKREWERRNQEVQQEDDLFSSGFDLFGEPYKVAEYTNKGDALANRVQNTLGNYDEMKNLLTNHSNQNHLVGIPKNSVPQNPNNKNEPSFFPEQKNRIIPPHQDNTHPSAPMPPPSVVILNSTLIHSNRKSKPEWSRDSHNPSTVLASQASGQPNKMQTLTQDQSQAKLEDFFVYPAEQPQIGEVEESNPSAKEDSNPNSSGEDAFKEIFQSNSPEESEFAVQAPGSPLVASSLLAPSSGLSVQNFPPGLYCKTSMGQQKPTAYVRPMDGQDQAPDISPTLKPSIEFENSFGNLSFGTLLDGKPSAASSKTKLPKFTILQTSEVSLPSDPSCVEEILREMTHSWPTPLTSMHTAGHSEQSTFSIPGQESQHLTPGFTLQKWNDPTTRASTKSVSFKSMLEDDLKLSSDEDDLEPVKTLTTQCTATELYQAVEKAKPRNNPVNPPLATPQPPPAVQASGGSGSSSESESSSESDSDTESSTTDSESNEAPRVATPEPEPPSTNKWQLDKWLNKVTSQNKSFICGQNETPMETISLPPPIIQPMEVQMKVKTNASQVPAEPKERPLLSLIREKARPRPTQKIPETKALKHKLSTTSETVSQRTIGKKQPKKVEKNTSTDEFTWPKPNITSSTPKEKESVELHDPPRGRNKATAHKPAPRKEPRPNIPLAPEKKKYRGPGKIVPKSREFIETDSSTSDSNTDQEETLQIKVLPPCIISGGNTAKSKEICGASLTLSTLMSSSGSNNNLSISNEEPTFSPIPVMQTEILSPLRDHENLKNLWVKIDLDLLSRVPGHSSLHAAPAKPDHKETATKPKRQTAVTAVEKPAPKGKRKHKPIEVAEKIPEKKQRLEEATTICLLPPCISPAPPHKPPNTRENNSSRRANRRKEEKLFPPPLSPLPEDPPRRRNVSGNNGPFGQDKNIAMTGQITSTKPKRTEGKFCATFKGISVNEGDTPKKASSATITVTNTAIATATVTATAIVTTTVTATATATATTTTTTTTISTITSTITTGLMDSSHLEMTSWAALPLLSSSSTNVRRPKLTFDDSVHNADYYMQEAKKLKHKADALFEKFGKAVNYADAALSFTECGNAMERDPLEAKSPYTMYSETVELLRYAMRLKNFASPLASDGDKKLAVLCYRCLSLLYLRMFKLKKDHAMKYSRSLMEYFKQNASKVAQIPSPWVSNGKNTPSPVSLNNVSPINAMGNCNNGPVTIPQRIHHMAASHVNITSNVLRGYEHWDMADKLTRENKEFFGDLDTLMGPLTQHSSMTNLVRYVRQGLCWLRIDAHLL

SEQ ID NO: 123325 - DNA, 13746 bp, Artificial Sequence
  derived and/or modified sequence
cgccgcctgtgcagccgctgccgccgccgccgccgccgccgccgccgccgccgccgccgccgccgctgccgccccggctgccgcgccgcgccgctgcctctgccccggccgcccccgccgccgctgccgccgccggcccgcagccagccaggcgggcggcccagcccgcctgagcccgcagcggctgccgccgcagcgtcgggtcgctgggtgcgcgggctaccgcggaccgagcggacccgagtgggcgaccaggcgcttgcccgcccagtgccactgccgccgcttcctcgccggagcacaggaccagacacctccagcgcccgctgctgctgccgatgcggcccggacacttttagctgggcgggagggctggagagccgggggccgccgagaaccgccagcgagctgtgccgagagccgcgccgacccgctgcgatcagggacaggcgcccgcccgccgccgccgcctggccgctatggatctattcgactttttcagagactgggacttggagcagcagtgtcactatgaacaagaccgtagtgcacttaaaaaaagggaatgggagcggaggaatcaagaagtccagcaagaagacgatctcttttcttcaggctttgatctttttggggagccatacaaggtagctgaatatacaaacaaaggtgatgcacttgccaaccgagtccagaacacgcttggaaactatgatgaaatgaagaatttgctaactaaccattctaatcagaatcacctagtgggaattccaaagaattctgtgccccagaatcccaacaacaaaaatgaaccaagcttttttccagaacaaaagaacagaataattccacctcaccaggataatacccatccttcagcaccaatgcctccaccttctgttgtgatactgaattcaactctaatacacagcaacagaaaatcaaaacctgagtggtcacgtgatagtcataaccctagcactgtactggcaagccaggccagtggtcagccaaacaagatgcagactttgacacaggaccagtctcaagccaaactggaagacttctttgtctacccagctgaacagccccagattggagaagttgaagagtcaaacccatctgcaaaggaagacagtaaccctaattctagtggagaagatgctttcaaagaaatctttcaatccaattcaccggaagaatctgaattcgccgtgcaagcgcctgggtctcccctagtggcttcctctttattagctcctagcagtggcctttcagttcaaaacttcccaccagggctttactgcaaaacaagcatggggcagcaaaagccaactgcatacgtcagacccatggatggccaggaccaggcaccggacatctcaccaacactgaaaccttcaattgaatttgagaacagctttgggaatctgtcatttggaacactcttggatggaaaacccagtgcagccagttcaaagactaaactgccaaagttcaccatcctccaaacaagtgaagtaagccttcccagtgatccaagctgtgttgaagaaatcttgcgggagatgacccattcctggcctactcctctcacttccatgcatactgctggacactctgagcagagcaccttttccatcccaggacaggaatcgcagcatctgaccccaggattcaccttacaaaagtggaatgacccaaccaccagagcttctacaaagtcagtgtctttcaaatcgatgcttgaggatgacctgaagctgagcagtgatgaagatgaccttgagcctgtgaagaccttgaccactcagtgcactgccactgagctctaccaggctgttgaaaaggcaaaacctaggaataatcctgtgaacccacccttggccactccccagcccccacctgcagtgcaagccagcgggggttctggcagctccagcgaatcggagagcagctctgagtcggattcagacactgaaagtagcaccactgacagcgaatctaatgaggcacctcgtgtggcaactccagagcctgagccaccctcaaccaacaagtggcaactggataaatggcttaacaaagtgacatcccagaacaagtcttttatttgtggccaaaatgaaacacccatggagactatttctctgcctcctccaatcatccaaccaatggaagtccagatgaaagtgaagacgaatgccagtcaggtcccagctgaacccaaagaaaggcctctcctcagtctcattagggagaaagcccgtccacggcccactcagaaaattccagaaacaaaggctttgaagcataagttgtcaacaactagtgagacagtgtctcaaaggacaattgggaaaaaacagcccaaaaaagttgagaagaacaccagcactgacgagtttacctggcccaaaccaaatattaccagcagcactcccaaagaaaaagaaagtgtggagcttcatgacccaccaagaggccgcaacaaagccactgcccacaaaccagcccctaggaaagaaccaagacctaacatccctttggctcccgagaagaagaagtacagagggcctggcaagattgtgccaaagtctcgggaattcattgaaacagattcatctacatctgactccaacacagatcaggaagagaccctgcaaatcaaagtcctgcctccgtgcattatttctggaggtaatactgccaaatccaaggaaatctgtggtgccagcctgaccctcagcaccttaatgagtagcagtggcagcaacaacaacttatccatcagtaatgaagagccaacattttcacctattcctgtcatgcaaactgaaatcctgtcccctctgcgagatcatgagaacctgaaaaacctctgggtgaagattgaccttgacttactctctagagtacctggccacagctcactccatgcagcacctgccaagccagaccacaaggagactgccacaaaacccaagcgtcagacagctgtcacagctgtggagaaaccagcccctaagggcaaacgtaagcacaagccaatagaagttgcagagaagatccctgagaagaagcagcgcctggaggaggccacaactatctgcttgctccctccttgcatctcaccagccccaccccacaagcctcccaacactagagaaaataattcatccaggagagcaaatagaagaaaggaagaaaaactatttcctcctccactttccccactgccagaggaccctccacgccgcagaaatgtcagtggcaataatggtccctttggtcaagacaaaaacatcgccatgactggacaaatcacatctaccaaacctaagagaactgaaggcaaattctgtgctactttcaaagggatatcggtaaatgagggagacactccaaaaaaggcatcctctgccaccatcactgtcaccaatactgctattgccactgctactgtcactgctactgccattgtcaccaccactgtcacagctactgccaccgccacggccaccaccacaactactaccactaccatttccaccatcacctctaccatcactactggcctcatggatagcagtcacctggagatgacgtcctgggcggctctgccccttctatccagcagcagcactaatgtccggagacccaagctcacttttgatgactcggttcacaatgctgattattacatgcaagaagctaagaagctgaagcacaaagctgatgcactgttcgagaaatttggcaaagctgtgaattatgctgatgccgccctctccttcactgaatgtggcaatgccatggaacgcgaccctctggaagcaaagtccccatacaccatgtactctgagactgtggagctcctcaggtatgcaatgaggctgaagaactttgcaagtcccttggcttcggatggggacaaaaagctagcagtactatgctaccgatgtttatcactcctctatttgagaatgtttaagctgaagaaggaccatgctatgaagtactccagatcactgatggaatattttaagcaaaatgcttcaaaagtcgcacagataccctctccatgggtaagcaatggaaagaacactccatccccagtgtctctcaacaacgtctcccccatcaacgcaatggggaactgtaacaatggcccagtcaccattccccagcgcattcaccacatggctgccagccacgtcaacatcactagcaatgtgttacggggctatgaacactgggatatggccgacaaactgacaagagaaaacaaagaattctttggtgatctggacacgctgatggggcctctgacccagcacagcagcatgaccaatcttgtccgctacgttcgccaaggactgtgttggctgcgcatcgatgcccacttgttgtagtgggtgttctcagatctctagcatcacgacccatcactctacctctaccagcgcactgatggtcactggtggaactccactcactggggaacgttctctttggttatgtttgtttttatgcttcttttgttatctgtaaaaaacagaagtcattgtaagttgacactacaacttaagggcagtgtacgttttattacttagtcattttttttcttttagcatttgatatgcatttctcagattccaccatctttttgtgctttatggaatgacagtccctacaatattgttttaagcccacactacccaaaacaaagaatgggaagcacttgtgataaagacaggctcctgagaaatgcaacaagtggtcttacatatacatgagaacttagacacaagggaccatcccccaaactctactcttatacccagaaaagaacatatttcagaatctgtcaaacttttgtgtatcccacagattcaatcttcaggtgagaattttcattgtcaaaacccactggttagatgttgtagcaacatcataaaatcaagagtatcaagaaaataaatgagcatagcaatgctactcttaaaaagatgctatgccacacaaccagaggactttcttgttagcatccctttcctgattccctattttgttaattttaatgataagaagaaagggtgacatttattttgacaagttttaggcatcagctggcatcagtgtttttcaactccattatttgaagtgtaaatcctcacctggggttctctgtgtgcaaagctgtccttttgaagaacagtttggttgatgcatgccttagtagccaaaatgctacactctagacttacaagtgggagttaagagaggtctggaaagtgtccaacaaggaattcacacctctgcctcctttgcaacaacaacatttacacagttggtaagtgggtccataactggcaggatttttaaattgtattttgctcaaatctatgggaacaaaagtcaaggtatcactacctagaagtaatgatatacagttttcttcctagtggcttgaaaatctggacttcctcaattattattcacattttctctcttataggttttctgttttctactttcttttttctcttatctgtgtttccctttcctttgtttggctcattaacttttgactgaattacaattactccttttattaaagtccatattattgtgaatcatttccatgaaaatttctaagaaaactccaaactctctaaatagtagctaacttttatttttttaaaatgagtcgtggggtagtgcttcaccttgagatgctttgaaagagccctaaacattgggaaccattcacctaatttggagacatttctcactggttgtgactacccccttatgatccttcacattcattttatgtccctaaacatcacaatgtaaatatcatttttgatgttccagctcaccagaagattcttacacttggggtaaacactatccatgcattacttactggtaattacctgctggtatataattccatgtagcctttaatatgctgggttatcaaattctgttcactgagttatgaccagataaataatagatatgcacatgaaagatgcaaacttgtgtgattattaaagccagccatgcaggtccatgatagaaacagcaggtgatgactctgcactctcattgtcaaggttagatatatccccagttgcaaaacagccagacttgagctgtgctctggtcatctttgagtttaaggccttttgttgtataaggctgtggaagttgtactccaatggctgaagccatgttgttaatatggctgatgggagcatccctgcagctgaacccagcactttttatgctcccactgtggttgagctttatgtttacagtctcagcaacaacacttatgcatccaaacactcacaaatgaaacctgaaagaatcttttctgagcctcttaaaagaggaaaatgatgataacattaaagactctgaacacccaaggttggtgtcacatataaaaattaagctgatgactttgcagtgactcaagttgtctctttatcatggtttaccaggtagagtgcctggctattactatataatgaagcccactggcttgacttgtaagttcaacctaaaccacaatcctagaccatcatggatttaggagtagattcttcttgaaatcccacatccagaaactagacattagaatgttgaggcagtttcccagagaaacaagcatattgcctcatggatgaaagacttgtagttctagtttcagtgacttgttatatctacttacatacaacagggaggcaagaggattctctgtcatctctggtgactgagtgtaaaatatgtgccaagtctgcagcacagtgaccaaatctgacaatcgagctctggatcaccacttgattatgtagtagactcatttataaagcagcttaggaactaattaaacatggaggatgaattaccttcctatcccttgagataagacatctttcagtttcatgattaaggattgttgctgttttatagttactctgttcatcacagtgtaaatggtgatgcgtgtcgtaggtgtgcagctatttgagggactaagggatggagatattctgtcaaatgaatctcttcagtataccagtttgtgggagggatatgagacatgtggatggcagtgagagatcgtgcctctagatcttgatggaggcttggtgagacacacttaaataagcacgtggaggttagaatagagggcagagtaaaaggaagctccatctgagcaagtacaccaaatgatctcagccctgcaacttgacccaggtagggccaccactacgccttcacttgtcacccaagctccaaccacagagagtttgacaagtttgtgttatgatgttggcttggctttgtatttttaattaactttggatttttagtggttttgtcatataactgtctgagtttggtaggtaggattactttgaaaagggtttactagtgtggtcctccgggtagaatttagctgtaagcatgttgttagccagcctgtagactgttaattacttaataatctcattgggaaaatactagtagttttatatttggatgacataattggaaaagcagattagctgctactacttttaaaagacttaaggtcgggatgcctttttttccatgtaaggaaatgaaaagaccaaaatcttcaggcaaaaagcaagttgcaaaattagaaaccattggctaaaaatgtgttttgttgagtttccaaatggatgaattttcatttggacattacatcactaaattcattagattttgtctgcattggaaagatactcttctagcatatctttcccaaagatatctaatttggattctgtttcatgcaaatttgcatcccggaggttgaagttggagtttgaggttggaaaatatctttgaaggcagaatcagttgagttgtgagggtgaagcctcacatacttctcaacagacatgataaaattcacctgcatgagttggcaggtgggagaaccaaactggatcactgggtaagactactcagtaaagcaatgaactgcttgcttagagaagcatcactatccccattgagaaaaatgtgtggcaagatgatacagctacacagtatcaaatgaatgggtcaattcagcacccccaaatttaattctgtggggaaaaattattgagccagttgtcagtgttctgttacatgactggcagactaaattcttcatcgttgttgttattgttgttgttgtttctcattttcactcgcacggccttattctcataattaaaatctaattcattttctctttagtgttagtagactccaacaacagaagtggcatctgtgtattcataatcagcatttaccctggcaggagactaatcagataggccggtctcagacattaatcctaccatctgatatttttggtgaaggaaaaagtattaattctctttccatcctcctcctcagaaatatagaagccctctttaccaaaatcatcacattttactctgtaatctaccagctaaaagaaaattgcattgtggggagggcagaaagggggtgggggtgggggcgggggggtggggggtggggaagccccacaaagccagattgcagttcttgcccctttttgcgtctgacatgagatgttaaagaattattcatagtgctcacattgggttaggggacactgaactgctttttagatccatgatcagtcatcattcttctaagagattggagctttgctgtttcattaactgtgcagtgtagactaatggtgtttaataaaaatcattcaaaatttcaaactcttttgccagtgacctcaattttgttggctctgtgatttgtatcagactttgaggagggaagggggaagtgaaggaagcctacgtccaggcccctgacaggatgctgcagtagcaagctcaagctcgcctgcctgccagcagttgctggtgagcagcagcatgcagaccagctgtgggaagcctcctgaagaatgccccagctgatgctttcagctgggaatagtttgttcctattggggaactcattgttctccagtctctgcagcaggaagccagctgtcatattcggagggaatttcagatgctttacctttttggttttgtcctgcatcactcatgtggctacgaaagtgtctctgagaatagagcccaatgtggtgacaatgggtagtcaaatgcaccccagatgctcaagccctgttgtggttctgcagtgtttatgaaattgggaggaaggagaccctggacagtaagcaaaattggagacactccaacgaggctaagttaatgccgtgttgcccagaacaagatctagcttctcatttggtcagcctagcatgcaaccagtggtgtgctggtaaaatgtttaacaaccagctcgctgagaatagaaagcacctggtttgcaccatttgccaatttccatggcataaatactaccactttagatgattttaagctaccaactgtgatgtcactgaacacatggttggaaagagatgcacgcagttggctcttgcaagcctgggcaaaaatgcttcaacacgccactggatgcagccagtcagagggttcatatttaatatatgtgttcatgtggacacacacagacacacacacacaaactcacccttacacacacacttcgatgactaaaacaattacatagttttaagatatgaatcaatgtgtgaatgtagaaagcttatgataaggccctagaggtatgggttgccctggaagcctaggttttaagcaggagaatagctgagaagaatgaagccctcctgagctgaaaggagagatggatcaatggagatggttccatcatctccttccatatctcacaggtaaaatgggcactcagaaaaccctcacgattgattttttaaaaagataagtgagtgttttttattttattattattgtcatcattattttgatttacaaatgctatttgtaacttttacatgtaactaggataaagtatttacgggaactctatggagaatagcacaatccagaatttactgtgtttttcttttatgtgacgtggaaactcagtaattctcccaccttcacattgttgttcataagaattttactttagttattagggaatctaagttttttgttaacatttgtttttagttaaaagtatctacttactgttttagctctgaactcaaaccagaatatctctgtatcaattgcatgactattcagaaacaataatccaaaccaaaataattctttttccacccagtacgaagaaaactaagctcagtaacaagaaggcataaactaaagtatataatgaggctttcattaaatacacacacacacacactcacacacacacacatacactttttaaatttttaaattaggcctccacacataaatcattttgaaagtagaatagaaaatctcaaagaattcattctcctggtcctgtgcatcttctgcagttaataagaggtttgtatctggaaagatggaagaacttgttctaaaatcttatttttcaaaaaaaaatttccattttctctctgggcctgtatccatggttgaatgttagccctggaggagatccatgtcttactcgctctttctggcccttctgtcttttgcctctgcaattctttttgtagctggcacgatagcagggactgggggtctatcctttcatggtattgctacaatatttgtccttactggaaaatggtaacatccgggtctgatttaattggcattacacttacacagggactctgagcacccccgtcaccacaccagacagtggaccagttttcacagctacaaagagctagaaatgtgtttaacatcatccagtgcatcccctaattcaaaaccatcctcactaatcaatcatattcacccataaatattacaaatgagattgattccatctcaagacaatttgtcaaatacttaattttcttcctggatgattctacttactggatattttagaaagagaaatgtctgagataaaatccctcacatttactcaatataacaaattactgtttctactcctattctgagtagtgcttctgaagattgtttgctgtagtgttgtctttgataaaatgaatgtcagtagtgagccttttagagataccatgctcagaaatcctctttgggatcagaagatacctaaaattctccccttttgcccacttggttagatgagtgatatattctttggatcctgcaaagaagagattggtttattttcttttctggtggtggtagtggttgtatctgtggctgtgatggttgttgttacttgtctctctctctctctggctctggcttttgctttcctgctagtgttctttctctttccaaacaaatagttaaattaaatgtgagcttctgaattgtacttgttcatactttcaaaacataacagattaataaaaatagatgtgtcctgatttaaaacatgccccctggaaaggcatgctgtattatgaaatcgtgataatataactgcattattacatggcagtataaatattagtctgttgaattcatttgtccaattgtataactttgtggagcagtgttttgacctttgatacataattctggagcaagtggagtggttgcaggcagatgagacagtgttatatcaggatttttcaatcaactttagttggaggcctggcaattacaaacatcttcagatgtttctgtaaccattataaatatgaaaaaaacctcttcaaaaaatttcccatagtacttcagtcaagactttttaggtttatcttttttttttcatttctccttttccttttccattatttttcgatgggggggttgttatcattgactgaagaaatattttgattgcaatggtctctctctctctccccctctctctctctctcctctattctttcctccttccctctgtccatcacccctcattaaaatattgaaatctggagtctttgataaatctgcattagaccaggctatatgctaggaatgaaatctgggcaaatatcgatgggttttcaaagaatgctccatgttcattgggccctttcacaccccacagtgataaatgaaaaggatagaggtagttttttcaaaagagcactttaataatatcctctgagacctaatgcagtttaacaaatgactccacctatttttccagtaggtaaattgactgagacttgcaaaatacccctgagagttgtcaggggtgtcttctgcctggtctatagcgtgtgtgtttgctttgtatctaacaggcacattcacgtctcgtgtactcatatgaagtatttcctaacattcccattagcctgtatataagaatcagaaagataatcccaacatgttgtaaatgaagatgtgactctataacctttctcttcttcctggaaaaaaaaggacattttcatgcatattttaaacagaaattttgtatatttaagtgtcatagaaaatatttattgagtaactgggacacaaatgggaatttaattgtcatcatatgctttgtgtgtggggatgcttaccaacaccatgtcgctggaccattgtggcaagccataactgcacaaagagtacacatcgtcagtgtgtgtgtgtgtgtgtgtgtgcgcgcacacacgtgcgtgtgtgtgtccctgcatgtgcaacatgtctagcttgctgtccttcatgggattttagctttcccttcttgaaaaacattattttacagttccaggaggccctggttacattactatatgaaggcagtgatttgaaatgaaaattcctttcctcttggaagctttggtcataatatcatggttcaattaaacggattccaccggactttgtgatgaaaaaggctctgttaaaatccaattgagtttccaagaggaaattgtagtaggtcaagatgcatgagagggaagatggaggccacctcaactggagaacatgagctgagttgagccctcagtgttgaagttgacttgctccaagctgcagtctaaaaccctggggcccgtgcctggcctatgctccctcccaagtaagtagaggagcagaaccatcaggaacagcctgcctggctcctatgaagaaaacttcctgacgtcctgtccccaaaggaagaccctttccccaagggcaccccaggtggccattaaattgtgatgatcattcagaaagtgcccccttggctttatgagaatccaattagtcttctgaaccaccttttcttgggtgcagatttccaacattcatgctcattgcagatccaccaactgtcactgttcttaacaagcatgctcgtcttgtcagaatttcagtaagttccaatttcctgtacagaccagggtaaactgttctaaaatcaatcaattaatgaaatgttatctggtttttaaaagctggtttcatgtgctttatgtgtataaaactatatctgcctgtgtggctttgcatttcaaatgtgtggcgcacaagcgttttgttggtgctttgttctcagtacagtaactctgtgtacaaacattttaatgtggttttgttgttttccaacaagatgtctctgtaaaaatgatattggctgagctggtgcgttggtttctctcatagaggcattaactatactgccaatgcattgaattatttaaaaatgcaaaataaaatttttatgaaaatctca

SEQ ID NO: 123326 - DNA, 3936 bp, Artificial Sequence
  derived and/or modified sequence
atggacctgttcgacttcttcagagactgggacctggagcagcagtgccactacgagcaggacagaagcgccctgaagaagagagagtgggagagaagaaaccaggaggtgcagcaggaggacgacctgttcagcagcggcttcgacctgttcggcgagccctacaaggtggccgagtacaccaacaagggcgacgccctggccaacagagtgcagaacaccctgggcaactacgacgagatgaagaacctgctgaccaaccacagcaaccagaaccacctggtgggcatccccaagaacagcgtgccccagaaccccaacaacaagaacgagcccagcttcttccccgagcagaagaacagaatcatccccccccaccaggacaacacccaccccagcgcccccatgcccccccccagcgtggtgatcctgaacagcaccctgatccacagcaacagaaagagcaagcccgagtggagcagagacagccacaaccccagcaccgtgctggccagccaggccagcggccagcccaacaagatgcagaccctgacccaggaccagagccaggccaagctggaggacttcttcgtgtaccccgccgagcagccccagatcggcgaggtggaggagagcaaccccagcgccaaggaggacagcaaccccaacagcagcggcgaggacgccttcaaggagatcttccagagcaacagccccgaggagagcgagttcgccgtgcaggcccccggcagccccctggtggccagcagcctgctggcccccagcagcggcctgagcgtgcagaacttcccccccggcctgtactgcaagaccagcatgggccagcagaagcccaccgcctacgtgagacccatggacggccaggaccaggcccccgacatcagccccaccctgaagcccagcatcgagttcgagaacagcttcggcaacctgagcttcggcaccctgctggacggcaagcccagcgccgccagcagcaagaccaagctgcccaagttcaccatcctgcagaccagcgaggtgagcctgcccagcgaccccagctgcgtggaggagatcctgagagagatgacccacagctggcccacccccctgaccagcatgcacaccgccggccacagcgagcagagcaccttcagcatccccggccaggagagccagcacctgacccccggcttcaccctgcagaagtggaacgaccccaccaccagagccagcaccaagagcgtgagcttcaagagcatgctggaggacgacctgaagctgagcagcgacgaggacgacctggagcccgtgaagaccctgaccacccagtgcaccgccaccgagctgtaccaggccgtggagaaggccaagcccagaaacaaccccgtgaacccccccctggccaccccccagcccccccccgccgtgcaggccagcggcggcagcggcagcagcagcgagagcgagagcagcagcgagagcgacagcgacaccgagagcagcaccaccgacagcgagagcaacgaggcccccagagtggccacccccgagcccgagccccccagcaccaacaagtggcagctggacaagtggctgaacaaggtgaccagccagaacaagagcttcatctgcggccagaacgagacccccatggagaccatcagcctgcccccccccatcatccagcccatggaggtgcagatgaaggtgaagaccaacgccagccaggtgcccgccgagcccaaggagagacccctgctgagcctgatcagagagaaggccagacccagacccacccagaagatccccgagaccaaggccctgaagcacaagctgagcaccaccagcgagaccgtgagccagagaaccatcggcaagaagcagcccaagaaggtggagaagaacaccagcaccgacgagttcacctggcccaagcccaacatcaccagcagcacccccaaggagaaggagagcgtggagctgcacgacccccccagaggcagaaacaaggccaccgcccacaagcccgcccccagaaaggagcccagacccaacatccccctggcccccgagaagaagaagtacagaggccccggcaagatcgtgcccaagagcagagagttcatcgagaccgacagcagcaccagcgacagcaacaccgaccaggaggagaccctgcagatcaaggtgctgcccccctgcatcatcagcggcggcaacaccgccaagagcaaggagatctgcggcgccagcctgaccctgagcaccctgatgagcagcagcggcagcaacaacaacctgagcatcagcaacgaggagcccaccttcagccccatccccgtgatgcagaccgagatcctgagccccctgagagaccacgagaacctgaagaacctgtgggtgaagatcgacctggacctgctgagcagagtgcccggccacagcagcctgcacgccgcccccgccaagcccgaccacaaggagaccgccaccaagcccaagagacagaccgccgtgaccgccgtggagaagcccgcccccaagggcaagagaaagcacaagcccatcgaggtggccgagaagatccccgagaagaagcagagactggaggaggccaccaccatctgcctgctgcccccctgcatcagccccgcccccccccacaagccccccaacaccagagagaacaacagcagcagaagagccaacagaagaaaggaggagaagctgttccccccccccctgagccccctgcccgaggacccccccagaagaagaaacgtgagcggcaacaacggccccttcggccaggacaagaacatcgccatgaccggccagatcaccagcaccaagcccaagagaaccgagggcaagttctgcgccaccttcaagggcatcagcgtgaacgagggcgacacccccaagaaggccagcagcgccaccatcaccgtgaccaacaccgccatcgccaccgccaccgtgaccgccaccgccatcgtgaccaccaccgtgaccgccaccgccaccgccaccgccaccaccaccaccaccaccaccaccatcagcaccatcaccagcaccatcaccaccggcctgatggacagcagccacctggagatgaccagctgggccgccctgcccctgctgagcagcagcagcaccaacgtgagaagacccaagctgaccttcgacgacagcgtgcacaacgccgactactacatgcaggaggccaagaagctgaagcacaaggccgacgccctgttcgagaagttcggcaaggccgtgaactacgccgacgccgccctgagcttcaccgagtgcggcaacgccatggagagagaccccctggaggccaagagcccctacaccatgtacagcgagaccgtggagctgctgagatacgccatgagactgaagaacttcgccagccccctggccagcgacggcgacaagaagctggccgtgctgtgctacagatgcctgagcctgctgtacctgagaatgttcaagctgaagaaggaccacgccatgaagtacagcagaagcctgatggagtacttcaagcagaacgccagcaaggtggcccagatccccagcccctgggtgagcaacggcaagaacacccccagccccgtgagcctgaacaacgtgagccccatcaacgccatgggcaactgcaacaacggccccgtgaccatcccccagagaatccaccacatggccgccagccacgtgaacatcaccagcaacgtgctgagaggctacgagcactgggacatggccgacaagctgaccagagagaacaaggagttcttcggcgacctggacaccctgatgggccccctgacccagcacagcagcatgaccaacctggtgagatacgtgagacagggcctgtgctggctgagaatcgacgcccacctgctgtag

SEQ ID NO: 123327 - DNA, 3936 bp, Artificial Sequence
  derived and/or modified sequence
atggatctgtttgattttttcagggactgggatcttgagcagcagtgtcattacgaacaggataggtccgccttgaagaagcgtgagtgggagaggaggaaccaggaggtgcaacaggaagacgacctctttagctccggcttcgacctgtttggggagccgtacaaggtggccgagtatacaaacaagggcgacgctctagcaaaccgcgtccagaatactttagggaactacgatgaaatgaaaaacctgctgactaaccacagtaaccaaaaccatctcgtaggaatccccaaaaactctgtcccccaaaacccaaataacaaaaatgagccgagtttctttcctgaacagaagaatagaatcataccaccccaccaggacaatactcatccatccgcgcccatgcccccaccatctgtggtcatactgaactcaactttgatccactctaacaggaaatcaaagcccgaatggtcacgcgattcacataacccatccactgttctcgcctcgcaggccagcggtcagccaaacaagatgcagaccctgactcaagaccagtcgcaagcaaaacttgaggactttttcgtgtaccctgctgaacagccccagattggggaagtggaagagtcgaatccgtccgcaaaggaggactcaaacccaaacagttccggcgaggacgccttcaaagagatcttccagtctaactcgcccgaggaatcagaatttgccgtgcaggctcccggctcacccttagttgcatcatccctcctagctccgtcatccggtctgtctgtgcagaactttccacccgggctttattgcaagaccagcatggggcaacaaaagccaacagcctatgttaggccaatggacggacaggaccaggcacctgacatctcccccacactgaaaccctctattgagtttgagaactctttcggtaacctgtccttcgggactctgttagacggcaagccgagtgctgcaagttctaagacaaaactgccaaagttcacgattcttcagacatccgaggtaagtctcccatcagatccatcctgcgtggaagaaattctgagggagatgacccactcttggcctaccccattgacatctatgcataccgctggccattctgagcagtcgacgttcagcattcccggacaggagtctcagcacctgactcccggcttcactctacagaagtggaacgacccaacaacacgagccagtacgaagtccgtgtccttcaagagcatgctcgaagacgatctgaagctctcatcagatgaagatgaccttgaacctgtgaagaccctgacaacccaatgtacagccacagagctgtatcaagctgtcgagaaggccaaaccaagaaataaccccgttaatccccctcttgccaccccacaaccccccccagcggttcaagcctccggcggcagcgggtctagttctgagtccgagtctagctctgagtcagactcagataccgagtcatcaactaccgactctgaatcgaacgaagcgcccagagtagccacacctgaaccggagccccctagcactaataagtggcagctggataagtggctcaacaaagtgactagccagaataagtcatttatttgtgggcagaatgagacccctatggagacaatatcccttccgccacctattattcagccaatggaggtacaaatgaaagtcaaaaccaatgcatcacaggtccctgctgagccaaaggaacgaccattactttctctcatccgtgagaaggctcgacctcgcccgacacagaaaattcccgagaccaaagctcttaaacataagctcagcaccacctctgagacagtcagtcagaggacgattggaaagaagcaacctaaaaaggtggaaaaaaacacctcaaccgacgaatttacgtggccaaagcctaacattacttccagcacccccaaagagaaagagagcgtggagttgcacgacccaccgagagggcgtaacaaggcgacggctcacaaacccgctcctcgtaaggaacctcgaccgaatatccctctggcccctgaaaaaaaaaaatacagaggcccggggaagatcgtgcccaaaagccgagagtttatcgagaccgacagcagcacaagtgacagtaacaccgaccaagaggagaccttacagatcaaggtgctgcccccttgcattatttccggaggcaacaccgctaagtctaaggaaatctgtggcgccagcctgacgctgtctacccttatgtcaagctccgggtccaataacaacctcagtatcagtaatgaagaaccgactttctctcccatccccgtgatgcagacggagattctatctccacttcgagaccatgagaacctgaaaaacctctgggtcaagatcgacctggacctcctgtccagggtgcctgggcactcttcgctccatgccgcccctgccaagcctgatcacaaagagacagccactaagccaaaaaggcagactgccgttacagcggtggaaaaacctgcccccaaggggaagaggaagcataaaccgattgaggtggccgagaaaatacctgagaaaaaacagcgacttgaggaggcgacgacgatttgcctcctgccaccttgtatttctcctgccccaccccacaagccgcccaacacccgtgagaataattcttcacgcagagcgaacaggcgcaaagaggagaaattgtttcctccccccctgagtcccctccccgaggatcctccccgtagacggaatgttagtgggaataatggccctttcggacaggacaagaatattgcgatgaccggccagattaccagtactaagcccaagagaactgaaggcaaattctgtgctactttcaaggggatctccgtcaatgaaggagacacacctaagaaagcttcctctgccaccatcactgtcaccaatacggctatagctacagcgacggtgactgccaccgccattgtgaccacaactgtgactgccactgccactgccactgccaccacaactacaactactacaaccattagcacaatcacctcaaccatcaccaccggacttatggatagcagtcacctggaaatgacgtcctgggccgctctgcctctgctttcctctagctctaccaacgttcggcgcccaaaactgaccttcgacgatagcgtgcacaatgcagactattacatgcaggaagccaagaagctcaaacataaagctgacgccttgtttgaaaagtttggcaaagccgttaactacgctgatgcagccttgtccttcaccgaatgcggaaacgctatggagcgcgatcctctggaggccaaatcaccttataccatgtacagcgagacagtagagctacttcggtacgccatgcggctcaaaaactttgctagcccactggcctctgacggcgacaagaaactggccgtgctctgttataggtgcctttcactgctctacctgcggatgttcaagctcaaaaaggaccacgctatgaaatatagccgcagcctgatggaatactttaagcaaaatgcctccaaagtcgcccaaatacctagcccctgggtgtcaaacggaaagaatacccccagccccgtgagcctcaataatgtgagcccaataaatgctatgggcaactgtaataacggtccagtgaccatccctcagcggattcaccacatggcagcttctcacgtgaacataacttccaacgtcttgcggggatacgaacattgggacatggctgacaagctgacacgcgaaaataaggaatttttcggcgatttggacactctgatgggcccacttacacaacactcatccatgaccaatctcgtgagatatgtgagacaggggctttgttggctccgaattgacgcccatctactttag

SEQ ID NO: 123328 - DNA, 3936 bp, Artificial Sequence
  derived and/or modified sequence
atggacctgtttgacttcttccgggactgggacctggagcagcagtgccactatgagcaggacagaagtgccctgaagaagcgggagtgggagaggaggaaccaggaggtgcagcaggaggatgacctcttcagcagcggctttgacctgtttggagagccctacaaggtggccgagtacaccaacaagggagatgccctggccaacagagtgcagaacaccctgggcaactatgatgagatgaagaacctgctgaccaaccacagcaaccagaaccacctggtgggcatccccaagaacagcgtgccccagaaccccaacaacaagaatgagcccagcttcttccctgagcagaagaaccgcatcatccccccccaccaggacaacacccaccccagcgcccccatgcccccacccagcgtggtgatcctgaacagcaccctcatccacagcaacaggaagagcaagccagagtggagccgggacagccacaaccccagcacagtgctggccagccaggccagcggccagcccaacaagatgcagaccctgacccaggaccagagccaggccaagctggaggacttctttgtgtacccagctgagcagccccagatcggggaggtggaggagagcaaccccagcgccaaggaggacagcaaccccaacagcagtggagaagatgccttcaaggagatcttccagagcaacagccctgaggagagcgagtttgctgtgcaggcccctggcagccccctggtggccagcagcctgctggcccccagcagcggcctgtctgtgcagaacttccccccaggcctgtactgcaagacctccatgggccagcagaagcccacagcctacgtgcggcccatggatggccaggaccaggccccagacatcagccccaccctgaagcccagcattgaatttgagaacagctttggaaacctgagctttggcaccctgctggatggcaagcccagcgctgccagcagcaagaccaagctgcccaagttcaccatcctgcagaccagcgaggtgtccctgcccagcgaccccagctgtgtggaggagatcctgcgggagatgacccacagctggcccacccccctgacctccatgcacacagctggccacagcgagcagagcaccttcagcatccctggccaggagagccagcacctgaccccaggcttcaccctgcagaagtggaatgaccccaccacccgggccagcaccaagtctgtgtccttcaagtccatgctggaggatgacctgaagctgagcagtgatgaagatgacctggagcctgtgaagaccctgaccacccagtgcacagccacagagctgtaccaggccgtggagaaggccaagcccaggaacaaccctgtgaacccccccctggccaccccccagcccccacctgctgtgcaggccagcggcggcagcggcagcagcagcgagagcgagagcagcagcgagagtgacagcgacacagagagcagcaccacagattctgagagcaatgaggccccccgggtggccaccccagagcctgagccccccagcaccaacaagtggcagctggacaagtggctgaacaaggtgaccagccagaacaagagcttcatctgtggccagaatgagacccccatggagaccatcagcctgcccccacccatcatccagcccatggaggtgcagatgaaggtgaagaccaatgccagccaggtgcctgctgagcccaaggagcggcccctgctgagcctcatccgggagaaggcccggccccggcccacccagaagatccctgagaccaaggccctgaagcacaagctgagcaccaccagcgagaccgtgtcccagaggaccatcggcaagaagcagcccaagaaggtggagaagaacaccagcacagatgagttcacctggcccaagcccaacatcaccagcagcacccccaaggagaaggagagcgtggagctgcatgaccccccccggggcaggaacaaggccacagcccacaagccagcccccaggaaggagccccggcccaacatccccctggcccctgagaagaagaagtaccggggccctgggaagatcgtgcccaagagccgggagttcattgaaacagacagcagcaccagtgacagcaacacagaccaggaggagaccctgcagatcaaggtgctgcccccctgcatcatcagcggcggcaacacagccaagagcaaggagatctgtggggccagcctgaccctgagcaccctgatgagcagcagcggcagcaacaacaacctgagcatcagcaatgaggagcccaccttcagccccatccctgtgatgcagacagagatcctgagccccctgcgggaccacgagaacctgaagaacctgtgggtgaagattgacctggacctgctgagccgggtgcccggccacagcagcctgcatgctgccccagccaagccagaccacaaggagacagccaccaagcccaagaggcagacagctgtgacagctgtggagaagccagcccccaagggcaagaggaagcacaagcccatcgaggtggccgagaagatccctgagaagaagcagaggctggaggaggccaccaccatctgcctgctgcccccctgcatcagccctgccccaccccacaagccacccaacacccgggagaacaacagcagccggcgggccaacagaaggaaggaggagaagctgttccccccacccctgagccccctgcctgaggacccccccaggagaagaaatgtgtctggcaacaacggccccttcggccaggacaagaacatcgccatgacaggccagatcaccagcaccaagcccaagaggacagagggcaagttctgtgccaccttcaagggcatctctgtgaatgaaggagacacccccaagaaggccagcagcgccaccatcaccgtgaccaacacagccatcgccacagccaccgtgacagccacagccatcgtgaccaccaccgtgacagccacagccacagccacagccaccaccaccaccaccaccaccaccatcagcaccatcaccagcaccatcaccaccggcctgatggacagcagccacctggagatgacctcctgggccgccctgcccctgctgagcagcagcagcaccaacgtgagaagacccaagctgacctttgatgacagcgtgcacaatgctgactactacatgcaggaggccaagaagctgaagcacaaggcagatgccctgtttgagaagtttgggaaggctgtgaactatgcagatgctgccctgtccttcacagaatgtggaaatgccatggagcgggaccccctggaggccaagagcccctacaccatgtacagcgagaccgtggagctgctgcgctatgccatgaggctgaagaactttgccagccccctggccagtgatggagacaagaagctggccgtgctgtgctaccgctgcctgagcctgctgtacctgaggatgttcaagctgaagaaggaccacgccatgaagtacagccgcagcctgatggagtacttcaagcagaatgccagcaaggtggcccagatccccagcccctgggtgtccaatggcaagaacacccccagccctgtgtccctgaacaacgtgagccccatcaatgccatgggcaactgcaacaacggccctgtgaccatcccccagaggatccaccacatggccgccagccacgtgaacatcaccagcaatgtgctgcggggctatgagcactgggacatggctgacaagctgacccgggagaacaaggagttcttcggggacctggacaccctgatgggccccctgacccagcacagctccatgaccaacctggtgcgctacgtgcggcagggcctgtgctggctgagaattgatgcccacctgctgtag

SEQ ID NO: 123329 - DNA, 3936 bp, Artificial Sequence
  derived and/or modified sequence
atggacctgttcgacttcttccgggactgggacctggagcagcagtgtcactacgagcaggaccgctctgcactgaaaaaacgcgagtgggagagacgcaatcaagaagtacagcaggaagacgacctctttagttctggctttgatctgttcggcgagccgtacaaagtagccgagtacacaaacaaaggggacgccctggccaatcgagtgcagaatactctgggaaattacgatgaaatgaaaaatctgctgacaaaccatagtaaccagaaccacctggtgggcattcccaagaactctgtgccacagaatcctaacaataaaaatgaaccgagcttctttcctgaacagaagaatcgaattattcctccccaccaggataatacgcatcctagcgcgcccatgccgcctccctccgtcgtgatccttaattctacgctcattcacagtaataggaaatctaaaccagagtggtccagagactcccacaatccatctacggtgctcgcaagtcaggcatcagggcaacccaataaaatgcagaccctgactcaggatcagtctcaagccaagctggaagatttttttgtatatccagctgaacagcctcaaattggcgaggtcgaggagtcaaacccttccgcaaaagaagactctaatcccaattcgtcaggcgaagacgctttcaaagaaattttccagagtaatagtccggaagaatccgagttcgccgtccaggctccaggttccccgcttgtagccagctctctcctcgccccaagtagcgggctgtccgtgcagaactttccaccaggattgtactgcaagacaagcatggggcaacagaaaccaactgcctatgtacgacccatggacggccaagatcaggctccagacatcagccccaccttgaaacctagtatcgaattcgaaaactccttcgggaatctcagcttcgggacgttactcgacggtaagccctctgccgcgtctagcaagactaagttacccaagtttactatcctgcagacaagcgaagtgtcactgccatcagacccctcgtgtgttgaggagattttgcgggaaatgacacattcatggcccacccctctgacaagcatgcataccgctgggcatagcgaacagtctacgtttagcattccaggacaagagtcgcaacatctgacaccaggcttcacccttcagaaatggaatgatcccaccaccagagcgtccaccaaaagcgttagttttaaaagtatgttggaggacgatttgaaactgtctagtgacgaagacgacctggagcccgtcaagaccttaactactcagtgtactgccaccgagctgtaccaggctgtggaaaaagctaagcccagaaataaccccgtcaatcccccattggctacaccacagcctccccctgccgttcaggcatcaggtggtagtggttccagctccgagtcagaatcatccagcgagagcgactcagacacggagagctctacaactgacagcgagagtaacgaggctccccgtgtggctactccagagccggagcctccttccaccaacaagtggcaactggacaagtggctgaacaaggtaacatcgcagaacaagagtttcatttgcggccagaacgagaccccaatggagaccatctccctgccgcctcccataatacagcccatggaggttcagatgaaagtcaaaactaatgcctctcaggtgccagcagaacccaaggagaggccattgctgtctctcatccgcgagaaggcccgtcctcgcccgacccagaaaattcccgagactaaagctctcaaacataaactatcaaccacaagcgagactgtgtcccagcgcacaatcggcaagaagcagcccaagaaagtagagaagaacactagcacagacgaattcacgtggcccaagcctaacattacttctagtacccccaaagagaaagagagcgtcgaactacatgatccccccagaggacgcaataaagctaccgcccataaacccgcgcctcgcaaagagcctaggcctaatatccctctggcacctgagaagaaaaaataccggggccccgggaaaatcgtgcctaagtcccgcgagttcattgagacggattcttcgacctccgacagtaatactgaccaggaagagacactgcaaataaaagtcctgcctccttgtatcatcagcggcggaaataccgctaagtccaaagagatctgcggtgcctcactcactttgtccactttgatgtcctcgtctgggagcaataacaacttatctatctccaatgaagagcccaccttttcgcctatccccgtaatgcagaccgagatcctaagtcccttgcgcgatcacgaaaatctaaaaaatctgtgggtcaagatagatctggacctgctgtcccgggtcccgggtcactcgtcgctgcacgccgccccagctaaacctgaccacaaagaaaccgcaactaaacctaagaggcagacggccgtgacggccgtagagaagcccgctcctaagggtaagcgcaaacacaagcctattgaagtggccgagaaaatacctgaaaaaaagcagcgtttagaggaggctacaacaatttgtctgttacctccctgcatctcccccgccccccctcataagccgcctaacaccagagaaaataatagttcccgccgcgcaaacaggcgtaaagaggaaaagctgtttcccccacctctctccccacttcccgaggatccccctcgaaggaggaatgtgtcggggaataatggtcctttcgggcaagacaaaaatatcgctatgacaggccaaattacctctaccaagcccaagcgcacagaggggaagttttgcgcaacttttaagggcataagtgtgaacgaaggcgatacccctaagaaagccagttccgccacaattaccgtcacgaataccgctattgcaactgcgacagtgaccgccaccgccatcgtgacaactaccgtcacggctaccgcaaccgctacagccaccaccacaaccactacaacaacaatttctaccatcacatccactattactaccggcctcatggattcttcgcacctggaaatgacgagctgggctgctctccccctcctcagtagtagctccactaatgttagacggcccaagctgaccttcgatgattcagtgcataatgccgactattatatgcaggaggccaaaaagctgaaacataaggctgatgccctattcgaaaagttcgggaaggcagtcaattatgccgacgcggctctctcgtttacagagtgtggcaacgctatggaaagggacccgctcgaggccaagtcgccatacacaatgtacagcgaaacagttgagctgctacgatatgccatgcggctgaagaacttcgcatcccccctggcttccgatggcgacaagaagctggcggtgttgtgttaccggtgcctgtcactgctatacttgcggatgtttaaactgaagaaagatcatgccatgaagtattccaggtcactcatggaatattttaagcaaaacgccagtaaggtggcccaaattcccagcccttgggtgtccaacgggaaaaatacccccagccctgtgagtctcaataatgtgtcacccattaatgcgatgggtaattgtaacaatggccccgttaccatccctcagagaattcatcacatggcagcttcccatgtaaacattacttccaatgttctgcgtggctacgagcactgggacatggccgacaaactgacacgggaaaacaaggaattttttggcgatcttgatacgctgatgggacccctcactcaacatagcagcatgacaaatctggtgaggtacgtgagacaaggtttgtgctggctacggatcgacgcacacctgctgtag

SEQ ID NO: 123330 - DNA, 3935 bp, Artificial Sequence
  derived and/or modified sequence
atggatctgtttgatttttttcgtgattgggacctggagcaacaatgccattacgagcaggacaggtctgccctcaaaaaacgcgaatgggagcggaggaaccaggaggtgcaacaggaagacgatcttttttctagtggctttgacctgttcggcgagccatacaaggtggctgagtacacgaacaagggtgatgctcttgcaaatcgggtgcagaacacactgggaaactacgacgaaatgaaaaacctccttaccaatcatagtaatcagaatcatttagtgggaattcctaaaaatagtgtgccccagaatccaaacaacaagaatgaaccctctttttttcctgagcagaagaataggatcattccccctcatcaggacaatacgcacccttctgcccctatgcccccaccgagtgtggtgatccttaatagtacgctgattcactctaaccgtaagtcaaaaccagaatggtcccgagattctcataatccatccaccgtcctggcttctcaggctagcggccagccaaacaaaatgcagaccctcactcaagaccagagtcaggcaaagctagaggatttttttgtctaccctgccgagcagccgcagattggcgaggtcgaggagtccaacccctcagccaaggaggattcaaatccaaattcctcaggcgaggacgcgttcaaggagatatttcagtccaactctccagaagagtctgagttcgccgtacaggccccaggaagccccttggtagcaagttcactgttggcacccagtagtggtctgtctgtgcagaatttcccacctgggctgtattgcaagacctccatggggcagcagaagccgaccgcctacgtgagacccatggacgggcaggatcaggccccagatatctcaccaaccctgaaaccctcaattgaatttgagaattcattcggtaaccttagttttgggaccctcctagacgggaaaccctccgccgcatcctcgaagacaaagttgccaaaattcacaatccttcagaccagtgaagtctctctgcctagtgatccctcatgcgtagaggagattctcagagaaatgactcactcctggcccacccctctgacctctatgcacacagctggccactccgagcagtctaccttttcaatacccggacaagagagccagcacctcactcctggcttcactctgcaaaaatggaacgacccaactaccagagcttcgactaaaagcgttagcttcaagtctatgttagaggacgacctgaaactcagcagcgacgaggatgacttggaaccggtgaagactctgacaactcagtgcaccgccactgagctttaccaggcggtggagaaggctaagccacggaacaatccggtcaacccacccctggccacaccccagcctcccccagctgtgcaggccagtggcggtagcggcagtagcagcgagtctgaatctagtagtgaatctgactctgataccgaatcttctactacagatagcgagtctaatgaggcccctagagttgcaacaccagagccagagccccctagcaccaataaatggcagctggataaatggcttaataaggtgaccagccaaaataaaagctttatctgcgggcagaatgagacgcctatggagactatatctctgccaccgccaatcatacaacctatggaagttcagatgaaggtgaaaaccaatgcctcccaagtgcccgctgaaccgaaagagaggccgctgttatccctaataagagagaaggccaggcccagacctacccagaagattcccgagaccaaagccctgaagcataaactttccacgacaagtgagacggtgagccagcgcaccatcggtaaaaagcagccgaagaaagttgagaaaaatacatccacggacgagtttacctggcctaagcccaatataacctcctcaaccccaaaggaaaaagaaagcgttgagctgcacgatccgccaagaggccgaaataaggccaccgcacacaagcctgctcctcgtaaagaaccccgaccaaatatccccctggctcctgagaaaaagaagtaccgaggtccaggaaaaatagtgcccaagtctagggagttcatcgagaccgactcaagtactagcgactcaaacacagaccaggaggaaactctgcagatcaaagtgctacccccttgtatcatttccgggggaaacacagcaaagtctaaagagatctgcggagcgtctcttaccctttcaaccctgatgtctagctccggctccaataacaacttatccatttctaacgaagaacccaccttttcaccaattccggtcatgcagactgagatcctttcacctctcagggaccatgagaatctgaaaaatctgtgggtaaagatcgacttagacctgctgagtcgggtccctgggcactccagtctccatgctgcacctgctaaacccgatcataaagaaactgcaacaaagcctaagcgtcagaccgcagttactgctgttgaaaaacccgctcccaaaggaaagcggaaacataaacccatagaggtcgccgagaagatacctgagaagaaacagcgccttgaagaggcgactacgatctgtctgctgccaccatgcatctcgccagcgcctccccataaaccccctaacaccagggagaataattcttctcgcagagccaaccgaaggaaggaggaaaaactcttcccaccacctctcagcccccttcccgaggaccctccgaggaggcgcaacgtcagcggaaataacggaccatttggccaggacaaaaacattgccatgacaggccagatcacaagcaccaagccaaaaaggaccgagggcaagttttgcgctaccttcaaagggattagtgttaatgagggcgacaccccgaagaaggcatcgtctgctacgataaccgtcacgaacacggctattgccacagctaccgtgactgcgaccgccatcgtgacgaccaccgtcacagcaacggcaacagcgactgctacaacaaccacaaccacaaccacaatttccaccatcacatccacaatcactactggacttatggattcctctcacctcgaaatgacaagttgggcagccttgcctctcttgtcatcttcttccactaatgttaggcgcccaaaactgacgtttgacgatagcgtccacaacgccgattattatatgcaggaggctaagaagctcaaacacaaagccgacgcactgtttgaaaaattcggcaaggcagttaactacgccgacgccgctctgtcatttaccgagtgcggcaacgctatggaaagggaccccctggaagcaaaatccccttacaccatgtattctgaaacagtggagttgctccggtacgccatgagacttaagaactttgcgagcccactcgcttccgatggcgataagaaactggccgtactgtgctatcgctgcctcagcctgctgtacttgcgcatgtttaagctcaagaaagatcacgcaatgaaatatagtagatcattaatggagtattttaagcagaacgcatctaaggtcgcacaaattcccagcccttgggtcagtaatggcaaaaacacgccatcccctgtgtctctgaacaacgtgtcgcccattaatgcaatgggcaactgtaacaatggtcctgtaactatacctcagcgaatccaccatatggcagcaagccacgttaacatcacttccaatgtgctgagaggctatgagcattgggatatggctgacaaattgacccgcgagaacaaggagttctttggtgaccttgatacacttatgggtccattaacacagcatagctctatgactaacctggtaaggtacgtccgccagggcctgtgctggttgcgcatcgatgcccacctgttgta

SEQ ID NO: 123331 - DNA, 3936 bp, Artificial Sequence
  derived and/or modified sequence
atggacttattcgacttcttccgggattgggatctggagcaacagtgtcattatgaacaggatcgctccgcactgaagaagagagagtgggagagacgaaaccaggaagtgcagcaggaggacgatctgttctctagcgggttcgatctgtttggcgaaccgtacaaggttgccgaatataccaacaagggtgatgcccttgcaaacagagtccagaacacactaggaaattacgacgaaatgaaaaatctacttacaaaccactcaaaccagaatcacctagtaggcattcccaagaactctgtaccacaaaatccaaacaacaagaatgaaccctcattttttccagagcagaagaatcgcattattcctcctcaccaagataatacccatccttcagccccaatgcccccacctagcgtggtgattttaaatagcacactgattcatagcaatcgaaagtctaaacccgagtggtcccgggactcccacaaccccagcactgtgctagcatctcaggcttcagggcagccaaataagatgcagactcttactcaggaccagtcacaggcaaagttggaagacttttttgtgtatcccgccgaacaacctcagataggtgaagtggaggaatctaacccttcagcaaaggaagatagcaatcctaatagcagtggcgaggatgcgtttaaggaaatctttcagagcaatagcccagaggagtccgagtttgctgtccaggctcccggttcccccctggtcgccagtagcctgctcgctccttcttctggcctttctgtgcagaatttcccaccagggttgtattgtaaaacaagcatggggcagcaaaaacccacagcgtacgtgaggcccatggacggacaggaccaggcgcccgatatttctccgacgctaaaacccagcatcgagtttgaaaactccttcggcaatctgtcctttggcactctcctggatggaaagccttcagctgccagtagtaaaaccaagcttccaaaatttactatcctgcagacttctgaagtcagcctgcccagcgacccctcgtgcgtagaggaaatccttagagaaatgacccactcttggcctaccccactcaccagtatgcatacagcaggccattctgaacaatcaacttttagcattccgggacaggagagccaacacttgacccctggctttactcttcagaagtggaacgatccgacaactagagctagtacgaaatcagtttcctttaaaagtatgctggaggatgatctcaagctgagtagcgacgaggacgacctcgaaccagtgaagactcttacaacccaatgtaccgccacggaactgtatcaggcagtcgagaaggctaaaccacggaacaaccccgtgaatcctcccttagcaacaccccagccccctccggcagttcaggccagtggaggaagcggcagttcgtccgagagcgaatcttcatccgagtctgacagcgatactgagagttctaccaccgacagtgaaagcaatgaagctccaagagtggctacaccagagccagaaccccccagcaccaataagtggcagttagataaatggctgaataaggttacaagccaaaataagtcgttcatatgcggtcagaatgagactccaatggaaacgatcagtctcccgcctccaatcatccagcctatggaagtacaaatgaaggttaaaacaaatgccagccaagtccctgctgagcctaaagagagacccctgctttcgctgatccgtgaaaaagcacgccctcgcccaacccagaagatcccagaaaccaaggcactcaagcacaagctctccactacctccgagacagtgtcccaacggaccattgggaaaaagcagccaaaaaaagtggaaaaaaacactagtaccgatgagtttacatggcctaagcctaatatcactagtagtacccctaaagagaaagagtctgtggaattacacgacccgccacgtggtaggaacaaagcaaccgctcataaaccggcacctagaaaggagcctcgaccaaatatccccctggcaccggagaaaaagaaatacagaggcccaggaaagattgtgcccaaatctcgagagttcatagagactgactctagtactagcgacagcaacaccgaccaggaggagactctgcagatcaaagtgctgcctccttgtattatctccgggggcaatacggcaaagagtaaagagatctgtggagcaagcctgactttatctacgttaatgtcaagtagtggatccaataacaatttgagtattagtaacgaggaacctacatttagtcccattccagtgatgcagactgagatcttgtcccccctgagggaccacgagaatcttaagaacttatgggtcaaaatagacttggacctgctgagccgtgtccccggtcactcttcattacatgctgcccctgctaagcctgatcacaaggaaacggccaccaaacctaagcgccagacagctgtaactgcagtggagaagcctgctcccaaaggcaaacgtaaacataagcccatcgaggtcgccgagaagataccagaaaaaaagcagcgcctggaggaggccacaactatatgtcttttgccgccttgcattagtcctgcacccccacacaagcctccaaatacacgcgagaataattcttcacgccgggccaaccgaaggaaggaagagaagcttttcccgccccccctcagccccttacccgaggacccccccaggaggcgtaacgtttcagggaacaatggaccctttggtcaggataaaaatatcgcaatgacaggccagatcacatcaacaaagccaaagcggactgagggaaaattctgcgcaacctttaaaggcatttccgtcaacgaaggtgacactcctaagaaggcatcaagtgccactattacagtaaccaatactgctattgccacggccactgtgacagccaccgccatcgtgaccacaaccgtgactgcgaccgccacagcaaccgctactaccacgactacgaccacgactatcagcaccatcaccagcactataacgactgggctgatggactccagccacctggagatgacaagttgggcagcgttgcccctgctttctagctccagtactaacgtcaggagacctaagctcaccttcgacgacagcgtgcacaacgctgactactacatgcaggaggctaagaagctgaagcacaaagcagatgcactttttgaaaaattcggcaaggccgtcaactatgccgacgccgctctgtcctttactgagtgcggtaatgcaatggagcgggaccccttagaagcgaagtctccttacaccatgtattcagagactgtggaactgcttcgctacgctatgagattgaaaaactttgccagtcctctggcctctgacggggataagaaacttgccgtgctttgttacagatgtttaagcctgctgtatcttagaatgtttaaacttaaaaaagatcatgcaatgaagtattccaggagcctcatggagtacttcaagcagaacgcttcaaaggtcgcccagataccttctccttgggtcagtaatgggaagaatactccaagtcctgtctcgttgaataatgtgtcaccaataaacgcaatggggaattgcaataacgggcctgttacaatcccacagcggatccaccacatggccgctagtcatgtcaacatcacctccaatgtcctgcggggctatgagcattgggatatggccgacaagcttacacgggagaacaaagagttctttggggacctcgacacattgatgggacccctcactcagcacagctcaatgactaatctcgtgaggtacgtacgccaaggactatgttggctgaggattgatgcccatcttctctag

SEQ ID NO: 123332 - DNA, 3936 bp, Artificial Sequence
  derived and/or modified sequence
atggacctgttcgacttcttccgggactgggacctggagcagcagtgtcattacgagcaggaccggagcgcacttaagaaaagggaatgggaacgtcgcaatcaggaagtgcagcaggaggatgacctgttttccagcggctttgatttgttcggagagccttacaaagtcgccgaatataccaacaaaggggacgctctcgccaatagagtgcagaataccctgggtaattatgacgagatgaagaatctcctgactaaccattccaaccaaaatcatctcgtggggatccccaagaacagcgtcccccagaatccaaataataagaacgaacctagcttttttccggagcagaaaaataggatcattcccccacatcaggacaatacacacccttctgcaccaatgcccccccctagtgtggtgatcttaaacagtacactcattcatagcaatagaaagtcgaagcccgagtggtcacgcgattctcacaacccttcaacagtgttggcaagccaagcaagtggccagcccaacaaaatgcagactttaacacaggaccagagccaggctaaactagaagactttttcgtctaccccgcggagcagccacagattggcgaggttgaagaatctaacccttcggccaaggaggactccaatccgaatagctccggggaggatgccttcaaggaaatcttccaaagtaacagccccgaggagtccgaatttgcagtgcaggcccctggctcgccactggtggcatcgagtcttttggcgcctagcagtggactgtccgttcagaactttccacctgggctctactgcaagacgagtatgggacagcaaaaacctacagcttatgtgcgtccgatggacgggcaggatcaggccccggatatcagcccaacactcaagccgtctatagagtttgagaactcctttggtaatttatccttcggcaccttattggacggtaagcccagtgctgcttcttccaagacgaagctgcccaaatttacaattctgcaaacgtcggaagtgagcctgccaagcgatccctcctgtgtagaggagattctccgtgaaatgacccattcctggcccaccccgctgacctcaatgcatacagcaggccattctgagcaatcaactttctcaattcctggacaagaaagccagcatcttacaccaggattcacacttcaaaagtggaacgatccgacaacacgggcgtctacaaaaagtgtgtcatttaaaagcatgcttgaggacgaccttaagctgagcagtgacgaggatgacctggagcctgtcaaaactcttactactcagtgcactgctaccgaactatatcaggccgtggaaaaggccaaacctcgcaataacccggtgaatccacctttagcaactcctcaaccaccccctgcggtgcaggcatcaggaggatcaggctcgtcctccgagagtgagagtagctccgaaagcgattctgacaccgagagctctaccacagattctgagtcgaacgaggccccaagagtcgccacaccagaacccgaacccccaagtaccaacaagtggcagttagataaatggcttaacaaggtcacttcccaaaacaagagttttatctgtgggcagaatgagactccaatggagaccatcagtctaccgcccccaatcatccaacccatggaagttcaaatgaaggtcaagaccaatgcgagccaagtgcccgcagagcccaaggagcgaccgctgctgtcgctcattagggagaaagccagaccacgacccacacagaagatcccggagactaaagctctaaagcacaaactgtctacgacaagtgagaccgtgagccagcggacgatcggaaagaaacagcctaaaaaagtcgagaaaaacaccagcacagacgaattcacctggccaaaaccaaacattaccagcagtaccccaaaggagaaggaaagtgtggagctccacgatcccccccggggccgcaacaaagcgaccgctcacaaaccggctccacgcaaagagccgcggcccaacatacctctggcccctgaaaagaaaaagtacaggggaccaggcaaaatcgttcctaaatcccgcgaattcattgagacggacagcagtacttcagacagcaatactgatcaagaagaaacgctgcagattaaagtattaccgccctgtattatcagtgggggcaacacagccaagtccaaggaaatctgtggcgcgtcgttgaccctgtcgaccctgatgtctagttctggttctaacaataacctgagtatctccaacgaagagcccacattcagccccatccccgtcatgcagacggagattctatcccctttgcgcgaccacgagaacctgaagaatctgtgggttaagattgatttggacctgctttcgagagtaccagggcattcttcgctgcacgccgctcctgccaagccggaccataaggagacagcgacgaagcccaaacgacagacggcagtgaccgccgtggaaaagccggcccccaagggtaagcggaagcataagccaatagaagtggccgagaaaattcccgagaagaagcagaggctggaagaagcaaccaccatctgcctgctccccccgtgcatttcaccagcaccgccacacaaacctcccaatacaagagagaataactcatctaggcgtgcgaaccggcggaaagaggaaaagctgttcccaccccctctttctccactgcccgaagacccgcctagacgaagaaacgtgagcggtaataacgggccattcggccaagacaaaaacattgcaatgaccggccaaatcacctccacgaagccaaaaaggactgagggtaaattctgtgccacctttaaaggtatctcagtcaacgaaggcgatacacccaaaaaggcctcttccgccacgattactgtaacaaacaccgccatcgcaaccgcaactgtaactgcgactgctatcgtaacgaccacagtgactgccacagcaacagcaaccgctaccactaccaccacaactacaactatttcaacgattacctcaacaattacaacgggcctgatggattcctctcacctggaaatgacctcctgggcagccctcccccttctgtcaagtagcagcacaaacgtccggcgccccaagttaacattcgacgacagcgtccataatgcggactactacatgcaggaagcaaaaaagctcaagcacaaagctgacgccctgttcgagaagttcggaaaggccgtcaactatgctgacgcggccctgtccttcacagagtgcggcaacgctatggaaagggatccattagaggccaagtccccatacactatgtacagcgagaccgtggaactattgcgatacgccatgcgtttgaaaaacttcgccagcccactcgccagtgatggcgataagaaactggctgtattgtgttaccgttgtttatcacttttgtacctgcgtatgttcaaactgaagaaagaccatgccatgaagtattctcgttccctaatggaatacttcaaacagaacgcttccaaggtggctcagatcccctccccctgggttagcaatggcaaaaatacccccagtccagtgtccttgaataatgtgtcccctattaacgcgatgggcaactgtaataacggtcctgtgactattccccagaggatccaccatatggctgcaagccatgtcaatatcacatctaatgtgctgagaggttatgagcactgggacatggcagacaaacttacaagagagaacaaagaattcttcggagaccttgataccctgatggggccactgacccagcacagttccatgacaaatcttgtaaggtacgtgcgacaaggactctgctggctgcgcatcgatgctcacttactgtag

SEQ ID NO: 123333 - DNA, 3935 bp, Artificial Sequence
  derived and/or modified sequence
atggacttgtttgacttctttagggactgggatctggaacagcaatgtcattacgagcaggaccgctcagccctcaaaaagagagaatgggaacggcgtaaccaggaggtgcagcaggaggatgacctgttctcaagcggtttcgatctgtttggcgagccttataaagtcgccgagtatactaacaagggtgacgcgctggccaacagggtgcagaatactctgggcaattatgatgaaatgaagaacctcctcacaaatcattccaaccaaaatcaccttgtcgggattcccaaaaattctgtgccgcagaatccgaacaataagaatgaacccagcttcttcccggagcagaaaaacaggataatcccaccacaccaggacaacacccaccctagtgcccctatgcccccaccctccgttgttattctgaacagcacactgattcacagcaatagaaagtctaaacctgagtggagccgggattctcacaacccctcaacagttctcgcttctcaggcttctggccagcccaacaagatgcagaccctgacccaggaccagtcccaggcgaagctagaagacttttttgtgtaccctgctgagcagccacagatcggcgaagtcgaagagtcgaatcccagcgctaaggaggactccaaccctaattcttccggcgaagacgcctttaaggaaatatttcagtccaacagccccgaagagtcggaattcgctgtgcaggcccctgggagccctctggtggcaagttccctgctggccccttcttctggactcagtgttcagaactttccaccaggactctactgtaaaacatctatgggacagcaaaagcccaccgcctatgtcaggcctatggacggccaggatcaggctcccgatatctcccctacactcaaaccctcaattgagttcgagaattcttttggcaacctaagcttcggcactctcctggacggtaaaccatctgcagccagctcaaagaccaaactccccaagtttactattttacagacaagtgaagtctcgctgccttctgatccaagttgtgtcgaggaaattctgcgcgaaatgactcactcgtggcccactcctctgacctccatgcacaccgccggacacagtgaacagtccaccttctcaataccaggtcaagaatcacagcacctgacacccggatttaccctgcaaaaatggaatgatcccactacacgcgcttccactaaatcagtgagtttcaaatccatgcttgaggacgatttgaaattatcgtcagatgaagacgacctagagccagtcaagacattgactacccagtgcacagccaccgaactgtaccaagctgtcgagaaggccaaaccacgtaacaatcctgtgaacccccctctagccacaccacagccaccaccagctgtgcaggcttctggagggagcggaagctcaagcgaaagcgagagtagcagcgagagtgactctgacacagaaagttctactacagatagcgaatctaatgaggctcccagagtggcaacccccgagccggagcctccgtctaccaacaaatggcagctcgataaatggctcaataaggtgacgagtcaaaacaagagtttcatatgcggtcagaacgagacccctatggagaccatcagcttacccccaccgatcatccagcctatggaggttcagatgaaagtgaagacgaacgcatctcaggtacctgctgaacctaaagaacgccctctcctgagtctgattcgcgagaaggcgagaccacggcctacccagaaaattcctgagacgaaggcgctgaagcataagctgtccacgacttcagagacagtgtcacagcgaactattggaaaaaaacaacctaagaaggtggaaaagaacacgtccactgatgaattcacctggcctaagcctaatataacaagctccaccccaaaggagaaagagagtgtagagcttcacgatcctccgcgagggcgtaacaaagcaactgcccataaacctgccccacgaaaagaacccagacccaatatcccgctggcacccgagaaaaaaaagtatcggggtccgggaaaaatcgtgcctaagtctagggagttcatagagactgacagcagcaccagcgacagtaatactgaccaagaagaaacattgcagattaaggttctgcctccctgcataatcagcggaggaaacacagctaagagcaaggagatatgtggcgcaagccttacactttcaacgttaatgtctagctctgggagcaacaataatctgtcaatctcaaatgaggagccaactttttctcccatccccgtgatgcagacagaaattcttagcccccttagagaccatgagaatctgaagaatctctgggtgaagatcgacctcgacctccttagtagagtgcctggtcactcctccctacatgccgctcctgcaaagccagatcacaaagagacagccactaagcctaagcgccagacagccgtcaccgcagtcgagaaaccggcaccaaaaggcaagaggaagcataagcccattgaagtggccgaaaagattcccgagaagaaacagcggctggaagaggccacaacaatctgcctgctcccaccctgcataagccccgctccgcctcataagcctcctaatacaagggagaacaatagcagtaggcgagccaatcggaggaaggaggaaaagctgtttcccccacccctgtctcctcttcccgaagaccccccaaggcgcaggaatgtgtctggaaacaatgggcctttcggccaggacaagaacatcgctatgaccggccaaattacatccacaaagcccaagagaacagagggtaaattctgtgccacatttaaaggcatttcagtgaacgaaggcgatacacccaagaaagcctcctccgccaccatcacagttacaaatactgccatcgccaccgcaactgtgacagcgactgccatagttaccaccactgtgacagctacagcgaccgccactgctaccactaccactaccaccactaccataagtacaatcacctcgactattacaaccgggctgatggactctagccatcttgagatgacatcctgggccgctctgcccctgctgagttcttcttcaacaaacgtgaggcgacccaaactaacatttgatgattcagtgcacaacgctgactattacatgcaggaggcaaagaaactgaaacataaagctgatgccctgtttgagaaatttggcaaggccgttaactatgccgacgccgctttatccttcacagagtgcgggaatgccatggaacgcgatcctctggaggctaaatctccgtacaccatgtattcagaaaccgtggagctgctgcggtacgcgatgcgtctcaaaaattttgcctccccgttggccagtgacggggataaaaagttggccgtgttgtgttatcgttgtctgtctctgctatatctgcgtatgtttaagctgaaaaaggatcatgctatgaagtattcacgaagcctgatggaatacttcaagcaaaacgcaagcaaggtggcgcagataccttctccatgggtgtccaacggaaaaaatactccctctcctgtctctttaaacaacgtctcccctataaatgcgatgggcaattgcaacaacgggcctgtgactataccccagagaatacaccatatggccgcatctcatgtcaacattactagtaatgttttgcgtggatatgaacactgggacatggccgacaaattaacgcgggaaaacaaagaattctttggagatctagatactctgatgggcccactgacccagcacagttctatgactaatcttgtccggtacgtgcggcaggggctctgctggctgaggatagacgctcatttactgta

SEQ ID NO: 123334 - protein, 2355 aa, Artificial Sequence
  derived and/or modified sequence
MLRGPGPGLLLLAVQCLGTAVPSTGASKSKRQAQQMVQPQSPVAVSQSKPGCYDNGKHYQINQQWERTYLGNALVCTCYGGSRGFNCESKPEAEETCFDKYTGNTYRVGDTYERPKDSMIWDCTCIGAGRGRISCTIANRCHEGGQSYKIGDTWRRPHETGGYMLECVCLGNGKGEWTCKPIAEKCFDHAAGTSYVVGETWEKPYQGWMMVDCTCLGEGSGRITCTSRNRCNDQDTRTSYRIGDTWSKKDNRGNLLQCICTGNGRGEWKCERHTSVQTTSSGSGPFTDVRAAVYQPQPHPQPPPYGHCVTDSGVVYSVGMQWLKTQGNKQMLCTCLGNGVSCQETAVTQTYGGNSNGEPCVLPFTYNGRTFYSCTTEGRQDGHLWCSTTSNYEQDQKYSFCTDHTVLVQTRGGNSNGALCHFPFLYNNHNYTDCTSEGRRDNMKWCGTTQNYDADQKFGFCPMAAHEEICTTNEGVMYRIGDQWDKQHDMGHMMRCTCVGNGRGEWTCIAYSQLRDQCIVDDITYNVNDTFHKRHEEGHMLNCTCFGQGRGRWKCDPVDQCQDSETGTFYQIGDSWEKYVHGVRYQCYCYGRGIGEWHCQPLQTYPSSSGPVEVFITETPSQPNSHPIQWNAPQPSHISKYILRWRPKNSVGRWKEATIPGHLNSYTIKGLKPGVVYEGQLISIQQYGHQEVTRFDFTTTSTSTPVTSNTVTGETTPFSPLVATSESVTEITASSFVVSWVSASDTVSGFRVEYELSEEGDEPQYLDLPSTATSVNIPDLLPGRKYIVNVYQISEDGEQSLILSTSQTTAPDAPPDTTVDQVDDTSIVVRWSRPQAPITGYRIVYSPSVEGSSTELNLPETANSVTLSDLQPGVQYNITIYAVEENQESTPVVIQQETTGTPRSDTVPSPRDLQFVEVTDVKVTIMWTPPESAVTGYRVDVIPVNLPGEHGQRLPISRNTFAEVTGLSPGVTYYFKVFAVSHGRESKPLTAQQTTKLDAPTNLQFVNETDSTVLVRWTPPRAQITGYRLTVGLTRRGQPRQYNVGPSVSKYPLRNLQPASEYTVSLVAIKGNQESPKATGVFTTLQPGSSIPPYNTEVTETTIVITWTPAPRIGFKLGVRPSQGGEAPREVTSDSGSIVVSGLTPGVEYVYTIQVLRDGQERDAPIVNKVVTPLSPPTNLHLEANPDTGVLTVSWERSTTPDITGYRITTTPTNGQQGNSLEEVVHADQSSCTFDNLSPGLEYNVSVYTVKDDKESVPISDTIIPAVPPPTDLRFTNIGPDTMRVTWAPPPSIDLTNFLVRYSPVKNEEDVAELSISPSDNAVVLTNLLPGTEYVVSVSSVYEQHESTPLRGRQKTGLDSPTGIDFSDITANSFTVHWIAPRATITGYRIRHHPEHFSGRPREDRVPHSRNSITLTNLTPGTEYVVSIVALNGREESPLLIGQQSTVSDVPRDLEVVAATPTSLLISWDAPAVTVRYYRITYGETGGNSPVQEFTVPGSKSTATISGLKPGVDYTITVYAVTGRGDSPASSKPISINYRTEIDKPSQMQVTDVQDNSISVKWLPSSSPVTGYRVTTTPKNGPGPTKTKTAGPDQTEMTIEGLQPTVEYVVSVYAQNPSGESQPLVQTAVTNIDRPKGLAFTDVDVDSIKIAWESPQGQVSRYRVTYSSPEDGIHELFPAPDGEEDTAELQGLRPGSEYTVSVVALHDDMESQPLIGTQSTAIPAPTDLKFTQVTPTSLSAQWTPPNVQLTGYRVRVTPKEKTGPMKEINLAPDSSSVVVSGLMVATKYEVSVYALKDTLTSRPAQGVVTTLENVSPPRRARVTDATETTITISWRTKTETITGFQVDAVPANGQTPIQRTIKPDVRSYTITGLQPGTDYKIYLYTLNDNARSSPVVIDASTAIDAPSNLRFLATTPNSLLVSWQPPRARITGYIIKYEKPGSPPREVVPRPRPGVTEATITGLEPGTEYTIYVIALKNNQKSEPLIGRKKTDELPQLVTLPHPNLHGPEILDVPSTVQKTPFVTHPGYDTGNGIQLPGTSGQQPSVGQQMIFEEHGFRRTTPPTTATPIRHRPRPYPPNVGQEALSQTTISWAPFQDTSEYIISCHPVGTDEEPLQFRVPGTSTSATLTGLTRGATYNVIVEALKDQQRHKVREEVVTVGNSVNEGLNQPTDDSCFDPYTVSHYAVGDEWERMSESGFKLLCQCLGFGSGHFRCDSSRWCHDNGVNYKIGEKWDRQGENGQMMSCTCLGNGKGEFKCDPHEATCYDDGKTYHVGEQWQKEYLGAICSCTCFGGQRGWRCDNCRRPGGEPSPEGTTGQSYNQYSQRYHQRTNTNVNCPIECFMPLDVQADREDSRE

SEQ ID NO: 123335 - DNA, 7068 bp, Artificial Sequence
  derived and/or modified sequence
atgctgagaggccccggccccggcctgctgctgctggccgtgcagtgcctgggcaccgccgtgcccagcaccggcgccagcaagagcaagagacaggcccagcagatggtgcagccccagagccccgtggccgtgagccagagcaagcccggctgctacgacaacggcaagcactaccagatcaaccagcagtgggagagaacctacctgggcaacgccctggtgtgcacctgctacggcggcagcagaggcttcaactgcgagagcaagcccgaggccgaggagacctgcttcgacaagtacaccggcaacacctacagagtgggcgacacctacgagagacccaaggacagcatgatctgggactgcacctgcatcggcgccggcagaggcagaatcagctgcaccatcgccaacagatgccacgagggcggccagagctacaagatcggcgacacctggagaagaccccacgagaccggcggctacatgctggagtgcgtgtgcctgggcaacggcaagggcgagtggacctgcaagcccatcgccgagaagtgcttcgaccacgccgccggcaccagctacgtggtgggcgagacctgggagaagccctaccagggctggatgatggtggactgcacctgcctgggcgagggcagcggcagaatcacctgcaccagcagaaacagatgcaacgaccaggacaccagaaccagctacagaatcggcgacacctggagcaagaaggacaacagaggcaacctgctgcagtgcatctgcaccggcaacggcagaggcgagtggaagtgcgagagacacaccagcgtgcagaccaccagcagcggcagcggccccttcaccgacgtgagagccgccgtgtaccagccccagccccacccccagccccccccctacggccactgcgtgaccgacagcggcgtggtgtacagcgtgggcatgcagtggctgaagacccagggcaacaagcagatgctgtgcacctgcctgggcaacggcgtgagctgccaggagaccgccgtgacccagacctacggcggcaacagcaacggcgagccctgcgtgctgcccttcacctacaacggcagaaccttctacagctgcaccaccgagggcagacaggacggccacctgtggtgcagcaccaccagcaactacgagcaggaccagaagtacagcttctgcaccgaccacaccgtgctggtgcagaccagaggcggcaacagcaacggcgccctgtgccacttccccttcctgtacaacaaccacaactacaccgactgcaccagcgagggcagaagagacaacatgaagtggtgcggcaccacccagaactacgacgccgaccagaagttcggcttctgccccatggccgcccacgaggagatctgcaccaccaacgagggcgtgatgtacagaatcggcgaccagtgggacaagcagcacgacatgggccacatgatgagatgcacctgcgtgggcaacggcagaggcgagtggacctgcatcgcctacagccagctgagagaccagtgcatcgtggacgacatcacctacaacgtgaacgacaccttccacaagagacacgaggagggccacatgctgaactgcacctgcttcggccagggcagaggcagatggaagtgcgaccccgtggaccagtgccaggacagcgagaccggcaccttctaccagatcggcgacagctgggagaagtacgtgcacggcgtgagataccagtgctactgctacggcagaggcatcggcgagtggcactgccagcccctgcagacctaccccagcagcagcggccccgtggaggtgttcatcaccgagacccccagccagcccaacagccaccccatccagtggaacgccccccagcccagccacatcagcaagtacatcctgagatggagacccaagaacagcgtgggcagatggaaggaggccaccatccccggccacctgaacagctacaccatcaagggcctgaagcccggcgtggtgtacgagggccagctgatcagcatccagcagtacggccaccaggaggtgaccagattcgacttcaccaccaccagcaccagcacccccgtgaccagcaacaccgtgaccggcgagaccacccccttcagccccctggtggccaccagcgagagcgtgaccgagatcaccgccagcagcttcgtggtgagctgggtgagcgccagcgacaccgtgagcggcttcagagtggagtacgagctgagcgaggagggcgacgagccccagtacctggacctgcccagcaccgccaccagcgtgaacatccccgacctgctgcccggcagaaagtacatcgtgaacgtgtaccagatcagcgaggacggcgagcagagcctgatcctgagcaccagccagaccaccgcccccgacgccccccccgacaccaccgtggaccaggtggacgacaccagcatcgtggtgagatggagcagaccccaggcccccatcaccggctacagaatcgtgtacagccccagcgtggagggcagcagcaccgagctgaacctgcccgagaccgccaacagcgtgaccctgagcgacctgcagcccggcgtgcagtacaacatcaccatctacgccgtggaggagaaccaggagagcacccccgtggtgatccagcaggagaccaccggcacccccagaagcgacaccgtgcccagccccagagacctgcagttcgtggaggtgaccgacgtgaaggtgaccatcatgtggaccccccccgagagcgccgtgaccggctacagagtggacgtgatccccgtgaacctgcccggcgagcacggccagagactgcccatcagcagaaacaccttcgccgaggtgaccggcctgagccccggcgtgacctactacttcaaggtgttcgccgtgagccacggcagagagagcaagcccctgaccgcccagcagaccaccaagctggacgcccccaccaacctgcagttcgtgaacgagaccgacagcaccgtgctggtgagatggaccccccccagagcccagatcaccggctacagactgaccgtgggcctgaccagaagaggccagcccagacagtacaacgtgggccccagcgtgagcaagtaccccctgagaaacctgcagcccgccagcgagtacaccgtgagcctggtggccatcaagggcaaccaggagagccccaaggccaccggcgtgttcaccaccctgcagcccggcagcagcatccccccctacaacaccgaggtgaccgagaccaccatcgtgatcacctggacccccgcccccagaatcggcttcaagctgggcgtgagacccagccagggcggcgaggcccccagagaggtgaccagcgacagcggcagcatcgtggtgagcggcctgacccccggcgtggagtacgtgtacaccatccaggtgctgagagacggccaggagagagacgcccccatcgtgaacaaggtggtgacccccctgagcccccccaccaacctgcacctggaggccaaccccgacaccggcgtgctgaccgtgagctgggagagaagcaccacccccgacatcaccggctacagaatcaccaccacccccaccaacggccagcagggcaacagcctggaggaggtggtgcacgccgaccagagcagctgcaccttcgacaacctgagccccggcctggagtacaacgtgagcgtgtacaccgtgaaggacgacaaggagagcgtgcccatcagcgacaccatcatccccgccgtgcccccccccaccgacctgagattcaccaacatcggccccgacaccatgagagtgacctgggcccccccccccagcatcgacctgaccaacttcctggtgagatacagccccgtgaagaacgaggaggacgtggccgagctgagcatcagccccagcgacaacgccgtggtgctgaccaacctgctgcccggcaccgagtacgtggtgagcgtgagcagcgtgtacgagcagcacgagagcacccccctgagaggcagacagaagaccggcctggacagccccaccggcatcgacttcagcgacatcaccgccaacagcttcaccgtgcactggatcgcccccagagccaccatcaccggctacagaatcagacaccaccccgagcacttcagcggcagacccagagaggacagagtgccccacagcagaaacagcatcaccctgaccaacctgacccccggcaccgagtacgtggtgagcatcgtggccctgaacggcagagaggagagccccctgctgatcggccagcagagcaccgtgagcgacgtgcccagagacctggaggtggtggccgccacccccaccagcctgctgatcagctgggacgcccccgccgtgaccgtgagatactacagaatcacctacggcgagaccggcggcaacagccccgtgcaggagttcaccgtgcccggcagcaagagcaccgccaccatcagcggcctgaagcccggcgtggactacaccatcaccgtgtacgccgtgaccggcagaggcgacagccccgccagcagcaagcccatcagcatcaactacagaaccgagatcgacaagcccagccagatgcaggtgaccgacgtgcaggacaacagcatcagcgtgaagtggctgcccagcagcagccccgtgaccggctacagagtgaccaccacccccaagaacggccccggccccaccaagaccaagaccgccggccccgaccagaccgagatgaccatcgagggcctgcagcccaccgtggagtacgtggtgagcgtgtacgcccagaaccccagcggcgagagccagcccctggtgcagaccgccgtgaccaacatcgacagacccaagggcctggccttcaccgacgtggacgtggacagcatcaagatcgcctgggagagcccccagggccaggtgagcagatacagagtgacctacagcagccccgaggacggcatccacgagctgttccccgcccccgacggcgaggaggacaccgccgagctgcagggcctgagacccggcagcgagtacaccgtgagcgtggtggccctgcacgacgacatggagagccagcccctgatcggcacccagagcaccgccatccccgcccccaccgacctgaagttcacccaggtgacccccaccagcctgagcgcccagtggaccccccccaacgtgcagctgaccggctacagagtgagagtgacccccaaggagaagaccggccccatgaaggagatcaacctggcccccgacagcagcagcgtggtggtgagcggcctgatggtggccaccaagtacgaggtgagcgtgtacgccctgaaggacaccctgaccagcagacccgcccagggcgtggtgaccaccctggagaacgtgagcccccccagaagagccagagtgaccgacgccaccgagaccaccatcaccatcagctggagaaccaagaccgagaccatcaccggcttccaggtggacgccgtgcccgccaacggccagacccccatccagagaaccatcaagcccgacgtgagaagctacaccatcaccggcctgcagcccggcaccgactacaagatctacctgtacaccctgaacgacaacgccagaagcagccccgtggtgatcgacgccagcaccgccatcgacgcccccagcaacctgagattcctggccaccacccccaacagcctgctggtgagctggcagccccccagagccagaatcaccggctacatcatcaagtacgagaagcccggcagcccccccagagaggtggtgcccagacccagacccggcgtgaccgaggccaccatcaccggcctggagcccggcaccgagtacaccatctacgtgatcgccctgaagaacaaccagaagagcgagcccctgatcggcagaaagaagaccgacgagctgccccagctggtgaccctgccccaccccaacctgcacggccccgagatcctggacgtgcccagcaccgtgcagaagacccccttcgtgacccaccccggctacgacaccggcaacggcatccagctgcccggcaccagcggccagcagcccagcgtgggccagcagatgatcttcgaggagcacggcttcagaagaaccaccccccccaccaccgccacccccatcagacacagacccagaccctacccccccaacgtgggccaggaggccctgagccagaccaccatcagctgggcccccttccaggacaccagcgagtacatcatcagctgccaccccgtgggcaccgacgaggagcccctgcagttcagagtgcccggcaccagcaccagcgccaccctgaccggcctgaccagaggcgccacctacaacgtgatcgtggaggccctgaaggaccagcagagacacaaggtgagagaggaggtggtgaccgtgggcaacagcgtgaacgagggcctgaaccagcccaccgacgacagctgcttcgacccctacaccgtgagccactacgccgtgggcgacgagtgggagagaatgagcgagagcggcttcaagctgctgtgccagtgcctgggcttcggcagcggccacttcagatgcgacagcagcagatggtgccacgacaacggcgtgaactacaagatcggcgagaagtgggacagacagggcgagaacggccagatgatgagctgcacctgcctgggcaacggcaagggcgagttcaagtgcgacccccacgaggccacctgctacgacgacggcaagacctaccacgtgggcgagcagtggcagaaggagtacctgggcgccatctgcagctgcacctgcttcggcggccagagaggctggagatgcgacaactgcagaagacccggcggcgagcccagccccgagggcaccaccggccagagctacaaccagtacagccagagataccaccagagaaccaacaccaacgtgaactgccccatcgagtgcttcatgcccctggacgtgcaggccgacagagaggacagcagagagtag

SEQ ID NO: 123336 - DNA, 7068 bp, Artificial Sequence
  derived and/or modified sequence
atgctgcgcggccccggacctgggctactcctgctcgccgtccagtgtctcgggactgctgtgccctcaacaggagcctctaagtccaaaaggcaggcccaacagatggtgcagccacagagccctgtcgctgtgtcccaatctaagcctggctgctacgacaacggtaagcattatcaaataaatcagcagtgggagcgtacatatctcggaaatgccctagtctgcacctgctacggggggtcaaggggatttaactgcgagagtaagccagaagctgaggagacctgctttgacaagtataccggtaacacatatcgtgttggtgatacgtatgagaggcctaaggattcaatgatttgggattgcacgtgtataggtgccggccgaggcagaatcagctgcacaatcgcaaaccgctgtcacgagggaggccagagttacaagataggggacacttggaggagaccacatgaaactggcggctatatgctggagtgcgtgtgtctcgggaatggcaaaggcgaatggacctgtaagcccatagctgagaagtgcttcgaccacgctgcaggcactagttacgttgtaggagagacctgggagaagccataccagggctggatgatggtggattgcacctgtctgggggaggggagcggcagaataacttgtacatcacgtaaccgctgcaacgatcaggacacacgcacctcctacaggatcggggatacatggtctaaaaaagataatagaggcaatttattgcaatgcatctgtacgggaaacggtcgtggcgagtggaagtgcgagaggcataccagcgtgcagactactagtagtgggtctgggccgttcacagacgttagggccgcagtgtaccagccacaaccacacccccagcctccgccttacgggcattgtgttacagactcaggagttgtatacagtgtcgggatgcagtggcttaagacccagggaaacaaacagatgctctgtacttgccttggcaacggggtctcctgccaggaaacagctgtcacgcagacatacggaggtaacagtaatggagagccctgcgtactcccttttacatataatgggaggactttctacagctgtactacagagggccggcaggacgggcacttatggtgttctacaaccagcaactacgaacaggaccaaaaatacagcttttgtacggaccacaccgtcctggtgcagactcgaggagggaactccaacggggcactctgtcatttcccattcttatacaataaccacaattatactgactgtacatctgaaggaaggcgtgacaacatgaagtggtgcgggacgacgcagaattatgacgctgatcagaagtttggcttttgccccatggccgcccatgaggaaatttgcacaaccaacgagggagttatgtaccggattggcgatcaatgggacaagcaacatgacatgggccatatgatgagatgcacttgtgtgggaaacgggcggggtgaatggacctgcattgcctatagtcagcttcgggatcagtgcatcgtggacgacatcacctacaacgtcaatgacacctttcataagcggcacgaagaggggcatatgctgaactgcacatgttttgggcaaggcaggggacgttggaagtgcgaccccgttgaccaatgccaggatagcgaaacaggcacattttatcaaatcggagactcctgggagaaatatgtgcacggcgtgcggtaccaatgttattgctatgggagagggatcggcgaatggcactgtcagccattgcaaacctatccctctagtagcggccctgttgaagtcttcatcaccgagacccctagtcagcctaattcgcacccaatccagtggaacgcccctcagccttcccatatttcgaaatacattctgcgatggcggcctaaaaatagcgtcgggcggtggaaggaagccacaattcccggccatttgaattcctacacaattaaaggactaaagcccggggttgtgtatgaagggcagctgatttccatccagcagtacggacatcaagaagtgactaggtttgacttcaccacaacctcaacctctacacccgtgacgagtaatacagtgactggcgagacgactcccttttcccccctggtggcaacaagtgagagcgtgacagaaattaccgcttcctcatttgtggtttcttgggtctcagcttcagacaccgttagtggcttccgcgtcgaatatgaattgtctgaggaaggggacgagccccagtacctggatctgcctagcaccgctacctctgttaacattccagacctgcttccaggacggaagtatattgtgaacgtctatcagatctctgaagacggcgagcagagtttgatccttagcacaagccagacaactgcccccgacgcgccccctgacactacagtggaccaggtggacgataccagcatagtggtgcggtggtccagacctcaagcccccatcaccggatatcgtatagtctattctccatctgtagagggatcttctactgagcttaatcttcctgaaacggcgaactccgtgaccttaagcgatctacaacccggcgtacaatataatattacaatatacgcagtggaggagaatcaggaatccactccagtagttattcagcaagagactaccggcacccctcggagtgatactgtaccgagtcctagagacctccagtttgtcgaagtgaccgacgtgaaggtgaccattatgtggacacctccagagtccgcagtgaccggctatagagtagacgtgattccggtcaacctgcctggtgagcacggccagcgtcttcccatctcccgtaataccttcgccgaagtcaccggacttagccctggtgtcacatactactttaaggtctttgctgtgagccacggacgagagtctaaaccactgaccgcccaacagaccacgaagcttgacgcccctacaaacctgcagttcgtaaacgagaccgattcaacagtgctcgtgagatggaccccccctagggcccagataacagggtacagattgacagtcggtttgacgcggcgcgggcagcctcggcaatataacgttggccctagcgtgtcaaaatatccactgcggaacctgcagcctgcatccgaatacaccgtgagcttggttgctatcaaagggaaccaggagtctcccaaggcaaccggggtgttcacaacactccagcccggatcttctatccctccctataacactgaggtgaccgaaacaaccatagtgatcacatggacaccagcgccacgtattggatttaagctgggggtgcggcccagccaaggcggtgaggcacctcgcgaggttacttccgattccggtagcattgtcgtcagcggactcacccccggcgtggagtacgtgtacacaatccaggtgctgcgggatggccaggaacgggatgcaccgattgtgaacaaggtggtcacaccactgtcccctccaaccaacctgcatcttgaggcaaatcccgataccggggtgcttacagtgtcatgggagcggtccacgacacccgacattaccggctacagaatcaccacaactccaaccaatggacaacagggaaattccctcgaggaggtggtgcacgccgaccagtcatcatgtacttttgacaacctgtctcccggccttgaatataacgtgagtgtgtacacggtgaaggatgataaggagtctgttcccatttccgacacaattattcccgccgtgcccccgcctacagacttgcgattcaccaacattggccctgataccatgcgagtgacatgggcgccgcctccctcgatcgatttaactaacttcctcgtccgctacagtcccgttaaaaatgaagaagatgtggcagagctgtcgatttcaccatccgacaacgctgtggtgctgacaaatctgttgcctgggacagagtatgtcgtgtcggtgtcgtcggtctacgaacagcacgagagtactcctctgcgaggaaggcagaaaaccggcctggatagccccaccggtatcgatttttccgatatcactgccaattcatttactgttcattggatcgcgccaagagcaactatcactggttatcggattcgccatcatccggagcacttttcgggaaggccgagagaggatcgagtgcctcacagccgaaatagtattacactgactaacctcacaccaggcacagaatacgttgtcagtatcgtggctctcaatgggcgtgaagagtccccactgttgatcgggcagcagagtaccgtcagtgatgtgcctagagacttggaagtcgtggccgctactccgacctccctcctcatttcctgggacgcgcccgcggtgacagtgagatactacagaatcacatatggagaaaccggtggaaacagtcccgtgcaggaatttaccgtgcccggttccaagagtaccgcaacgatatctgggctgaagccaggagtggactatactatcactgtatacgccgtgacaggacgtggcgattcccccgcttccagtaaaccgatctccatcaattatcgcactgagattgacaaaccgtcccagatgcaggtgaccgacgtgcaggacaattccattagtgtaaagtggctgcctagctcatcccccgtgaccgggtacagagtaaccacgactccaaagaacgggccaggaccaacgaagacaaagaccgctggcccagatcagactgagatgaccatagagggcctgcagcccacagtggaatatgttgtctcagtgtatgctcagaaccctagcggtgaaagccagcccctcgtccagactgcggtgacaaacattgatcggcccaaaggactggcattcaccgatgttgacgtggactctattaagatcgcctgggagtccccacaggggcaagtaagccgttaccgggtcacgtattcgtctcctgaggatgggattcatgaactgtttcctgcccccgacggggaagaagacacagctgagcttcagggtctcagacctgggtcagaatacaccgtaagtgtggtggctctgcacgacgatatggagtctcagcctctgatcgggactcagtcaactgccatccccgcacctactgacctgaagtttactcaggtgaccccgacgtctttgtccgcacagtggactccccccaacgtgcagctaacggggtaccgcgtccgtgtgacacctaaggaaaaaacaggacctatgaaagagataaacctcgcccctgacagctcctctgtcgttgtctccggtcttatggttgcgacgaagtacgaagtgtcagtatatgctctcaaagacaccctgacttccaggccagctcaaggggtggtgaccactctcgaaaatgtgagcccaccgagaagggcaagggtgacagatgccactgagactacaatcactatctcctggcggaccaagactgaaactattacggggttccaggtggacgcagtcccagccaatgggcagactccaatacaacgaaccattaagccagacgttagaagttatacaatcaccggcttgcagcctgggactgactacaaaatttacctgtataccttgaatgacaatgccaggtctagccctgtcgtgattgacgctagcaccgcgattgacgccccctccaacctgcgctttctggcgaccacccccaattcgctgcttgtgtcttggcaaccccctcgggcccggatcaccggatatataatcaaatacgaaaagcccggctccccaccccgagaggtggtgccccgccccaggccgggcgtgactgaagcaaccattacaggtcttgaaccaggaacagaatacacaatctatgtgatcgccttaaagaacaaccaaaaatcggagccgctgatcggccggaaaaagacagatgaactccctcagctcgtcacgcttccacacccgaatctgcacgggcccgaaatcctggacgtgccttccactgttcagaaaactccctttgtgacccacccggggtacgatactggaaacggcatccagctgccagggacctctggccagcagcctagcgtgggacagcagatgatcttcgaggaacatggcttccggcggaccacgcctcctaccacagccacccctatccggcatcggccacgcccgtatccgccaaacgtgggacaggaggcgcttagccagactaccatctcctgggctccgttccaagatacaagcgaatatataatctcttgtcaccccgttgggacagacgaggaacctctccagttccgagtgcctggtacaagtacaagcgccacactgacgggactcacacggggtgctacatacaacgtcattgtcgaggcactgaaggatcaacagaggcacaaagtccgggaggaggtggtcaccgtggggaattctgtcaacgaagggctgaaccagcctacagacgactcctgctttgacccatataccgtaagccattatgccgttggcgacgagtgggagaggatgagcgagagtggctttaagttgttatgccaatgcttagggttcggctcagggcacttccgatgtgattcctcacggtggtgccacgacaatggcgtcaactacaagattggggaaaagtgggaccgccagggagagaatgggcagatgatgtcctgtacttgcctgggtaacggcaagggggagttcaaatgtgatccacacgaggctacatgctatgacgacgggaagacataccacgtgggagagcagtggcagaaggagtatttgggggccatatgctcttgcacttgctttgggggccagagaggttggagatgcgataactgtaggcgacctgggggagaaccttcacccgagggtactaccgggcagtcttacaaccagtactcacagcgctaccatcagcgaacaaacaccaatgttaattgcccaattgaatgcttcatgcccctggacgtccaggccgatcgcgaggactctcgggaatag

SEQ ID NO: 123337 - DNA, 8435 bp, Artificial Sequence
  derived and/or modified sequence
gcccgcgccggctgtgctgcacagggggaggagagggaaccccaggcgcgagcgggaagaggggacctgcagccacaacttctctggtcctctgcatcccttctgtccctccacccgtccccttccccaccctctggcccccaccttcttggaggcgacaacccccgggaggcattagaagggatttttcccgcaggttgcgaagggaagcaaacttggtggcaacttgcctcccggtgcgggcgtctctcccccaccgtctcaacatgcttaggggtccggggcccgggctgctgctgctggccgtccagtgcctggggacagcggtgccctccacgggagcctcgaagagcaagaggcaggctcagcaaatggttcagccccagtccccggtggctgtcagtcaaagcaagcccggttgttatgacaatggaaaacactatcagataaatcaacagtgggagcggacctacctaggcaatgcgttggtttgtacttgttatggaggaagccgaggttttaactgcgagagtaaacctgaagctgaagagacttgctttgacaagtacactgggaacacttaccgagtgggtgacacttatgagcgtcctaaagactccatgatctgggactgtacctgcatcggggctgggcgagggagaataagctgtaccatcgcaaaccgctgccatgaagggggtcagtcctacaagattggtgacacctggaggagaccacatgagactggtggttacatgttagagtgtgtgtgtcttggtaatggaaaaggagaatggacctgcaagcccatagctgagaagtgttttgatcatgctgctgggacttcctatgtggtcggagaaacgtgggagaagccctaccaaggctggatgatggtagattgtacttgcctgggagaaggcagcggacgcatcacttgcacttctagaaatagatgcaacgatcaggacacaaggacatcctatagaattggagacacctggagcaagaaggataatcgaggaaacctgctccagtgcatctgcacaggcaacggccgaggagagtggaagtgtgagaggcacacctctgtgcagaccacatcgagcggatctggccccttcaccgatgttcgtgcagctgtttaccaaccgcagcctcacccccagcctcctccctatggccactgtgtcacagacagtggtgtggtctactctgtggggatgcagtggctgaagacacaaggaaataagcaaatgctttgcacgtgcctgggcaacggagtcagctgccaagagacagctgtaacccagacttacggtggcaactcaaatggagagccatgtgtcttaccattcacctacaatggcaggacgttctactcctgcaccacagaagggcgacaggacggacatctttggtgcagcacaacttcgaattatgagcaggaccagaaatactctttctgcacagaccacactgttttggttcagactcgaggaggaaattccaatggtgccttgtgccacttccccttcctatacaacaaccacaattacactgattgcacttctgagggcagaagagacaacatgaagtggtgtgggaccacacagaactatgatgccgaccagaagtttgggttctgccccatggctgcccacgaggaaatctgcacaaccaatgaaggggtcatgtaccgcattggagatcagtgggataagcagcatgacatgggtcacatgatgaggtgcacgtgtgttgggaatggtcgtggggaatggacatgcattgcctactcgcagcttcgagatcagtgcattgttgatgacatcacttacaatgtgaacgacacattccacaagcgtcatgaagaggggcacatgctgaactgtacatgcttcggtcagggtcggggcaggtggaagtgtgatcccgtcgaccaatgccaggattcagagactgggacgttttatcaaattggagattcatgggagaagtatgtgcatggtgtcagataccagtgctactgctatggccgtggcattggggagtggcattgccaacctttacagacctatccaagctcaagtggtcctgtcgaagtatttatcactgagactccgagtcagcccaactcccaccccatccagtggaatgcaccacagccatctcacatttccaagtacattctcaggtggagacctaaaaattctgtaggccgttggaaggaagctaccataccaggccacttaaactcctacaccatcaaaggcctgaagcctggtgtggtatacgagggccagctcatcagcatccagcagtacggccaccaagaagtgactcgctttgacttcaccaccaccagcaccagcacacctgtgaccagcaacaccgtgacaggagagacgactcccttttctcctcttgtggccacttctgaatctgtgaccgaaatcacagccagtagctttgtggtctcctgggtctcagcttccgacaccgtgtcgggattccgggtggaatatgagctgagtgaggagggagatgagccacagtacctggatcttccaagcacagccacttctgtgaacatccctgacctgcttcctggccgaaaatacattgtaaatgtctatcagatatctgaggatggggagcagagtttgatcctgtctacttcacaaacaacagcgcctgatgcccctcctgacacgactgtggaccaagttgatgacacctcaattgttgttcgctggagcagaccccaggctcccatcacagggtacagaatagtctattcgccatcagtagaaggtagcagcacagaactcaaccttcctgaaactgcaaactccgtcaccctcagtgacttgcaacctggtgttcagtataacatcactatctatgctgtggaagaaaatcaagaaagtacacctgttgtcattcaacaagaaaccactggcaccccacgctcagatacagtgccctctcccagggacctgcagtttgtggaagtgacagacgtgaaggtcaccatcatgtggacaccgcctgagagtgcagtgaccggctaccgtgtggatgtgatccccgtcaacctgcctggcgagcacgggcagaggctgcccatcagcaggaacacctttgcagaagtcaccgggctgtcccctggggtcacctattacttcaaagtctttgcagtgagccatgggagggagagcaagcctctgactgctcaacagacaaccaaactggatgctcccactaacctccagtttgtcaatgaaactgattctactgtcctggtgagatggactccacctcgggcccagataacaggataccgactgaccgtgggccttacccgaagaggacagcccaggcagtacaatgtgggtccctctgtctccaagtacccactgaggaatctgcagcctgcatctgagtacaccgtatccctcgtggccataaagggcaaccaagagagccccaaagccactggagtctttaccacactgcagcctgggagctctattccaccttacaacaccgaggtgactgagaccaccattgtgatcacatggacgcctgctccaagaattggttttaagctgggtgtacgaccaagccagggaggagaggcaccacgagaagtgacttcagactcaggaagcatcgttgtgtccggcttgactccaggagtagaatacgtctacaccatccaagtcctgagagatggacaggaaagagatgcgccaattgtaaacaaagtggtgacaccattgtctccaccaacaaacttgcatctggaggcaaaccctgacactggagtgctcacagtctcctgggagaggagcaccaccccagacattactggttatagaattaccacaacccctacaaacggccagcagggaaattctttggaagaagtggtccatgctgatcagagctcctgcacttttgataacctgagtcccggcctggagtacaatgtcagtgtttacactgtcaaggatgacaaggaaagtgtccctatctctgataccatcatcccagctgttcctcctcccactgacctgcgattcaccaacattggtccagacaccatgcgtgtcacctgggctccacccccatccattgatttaaccaacttcctggtgcgttactcacctgtgaaaaatgaggaagatgttgcagagttgtcaatttctccttcagacaatgcagtggtcttaacaaatctcctgcctggtacagaatatgtagtgagtgtctccagtgtctacgaacaacatgagagcacacctcttagaggaagacagaaaacaggtcttgattccccaactggcattgacttttctgatattactgccaactcttttactgtgcactggattgctcctcgagccaccatcactggctacaggatccgccatcatcccgagcacttcagtgggagacctcgagaagatcgggtgccccactctcggaattccatcaccctcaccaacctcactccaggcacagagtatgtggtcagcatcgttgctcttaatggcagagaggaaagtcccttattgattggccaacaatcaacagtttctgatgttccgagggacctggaagttgttgctgcgacccccaccagcctactgatcagctgggatgctcctgctgtcacagtgagatattacaggatcacttacggagagacaggaggaaatagccctgtccaggagttcactgtgcctgggagcaagtctacagctaccatcagcggccttaaacctggagttgattataccatcactgtgtatgctgtcactggccgtggagacagccccgcaagcagcaagccaatttccattaattaccgaacagaaattgacaaaccatcccagatgcaagtgaccgatgttcaggacaacagcattagtgtcaagtggctgccttcaagttcccctgttactggttacagagtaaccaccactcccaaaaatggaccaggaccaacaaaaactaaaactgcaggtccagatcaaacagaaatgactattgaaggcttgcagcccacagtggagtatgtggttagtgtctatgctcagaatccaagcggagagagtcagcctctggttcagactgcagtaaccaacattgatcgccctaaaggactggcattcactgatgtggatgtcgattccatcaaaattgcttgggaaagcccacaggggcaagtttccaggtacagggtgacctactcgagccctgaggatggaatccatgagctattccctgcacctgatggtgaagaagacactgcagagctgcaaggcctcagaccgggttctgagtacacagtcagtgtggttgccttgcacgatgatatggagagccagcccctgattggaacccagtccacagctattcctgcaccaactgacctgaagttcactcaggtcacacccacaagcctgagcgcccagtggacaccacccaatgttcagctcactggatatcgagtgcgggtgacccccaaggagaagaccggaccaatgaaagaaatcaaccttgctcctgacagctcatccgtggttgtatcaggacttatggtggccaccaaatatgaagtgagtgtctatgctcttaaggacactttgacaagcagaccagctcagggagttgtcaccactctggagaatgtcagcccaccaagaagggctcgtgtgacagatgctactgagaccaccatcaccattagctggagaaccaagactgagacgatcactggcttccaagttgatgccgttccagccaatggccagactccaatccagagaaccatcaagccagatgtcagaagctacaccatcacaggtttacaaccaggcactgactacaagatctacctgtacaccttgaatgacaatgctcggagctcccctgtggtcatcgacgcctccactgccattgatgcaccatccaacctgcgtttcctggccaccacacccaattccttgctggtatcatggcagccgccacgtgccaggattaccggctacatcatcaagtatgagaagcctgggtctcctcccagagaagtggtccctcggccccgccctggtgtcacagaggctactattactggcctggaaccgggaaccgaatatacaatttatgtcattgccctgaagaataatcagaagagcgagcccctgattggaaggaaaaagacagacgagcttccccaactggtaacccttccacaccccaatcttcatggaccagagatcttggatgttccttccacagttcaaaagacccctttcgtcacccaccctgggtatgacactggaaatggtattcagcttcctggcacttctggtcagcaacccagtgttgggcaacaaatgatctttgaggaacatggttttaggcggaccacaccgcccacaacggccacccccataaggcataggccaagaccatacccgccgaatgtaggacaagaagctctctctcagacaaccatctcatgggccccattccaggacacttctgagtacatcatttcatgtcatcctgttggcactgatgaagaacccttacagttcagggttcctggaacttctaccagtgccactctgacaggcctcaccagaggtgccacctacaacgtcatagtggaggcactgaaagaccagcagaggcataaggttcgggaagaggttgttaccgtgggcaactctgtcaacgaaggcttgaaccaacctacggatgactcgtgctttgacccctacacagtttcccattatgccgttggagatgagtgggaacgaatgtctgaatcaggctttaaactgttgtgccagtgcttaggctttggaagtggtcatttcagatgtgattcatctagatggtgccatgacaatggtgtgaactacaagattggagagaagtgggaccgtcagggagaaaatggccagatgatgagctgcacatgtcttgggaacggaaaaggagaattcaagtgtgaccctcatgaggcaacgtgttatgatgatgggaagacataccacgtaggagaacagtggcagaaggaatatctcggtgccatttgctcctgcacatgctttggaggccagcggggctggcgctgtgacaactgccgcagacctgggggtgaacccagtcccgaaggcactactggccagtcctacaaccagtattctcagagataccatcagagaacaaacactaatgttaattgcccaattgagtgcttcatgcctttagatgtacaggctgacagagaagattcccgagagtaaatcatctttccaatccagaggaacaagcatgtctctctgccaagatccatctaaactggagtgatgttagcagacccagcttagagttcttctttctttcttaagccctttgctctggaggaagttctccagcttcagctcaactcacagcttctccaagcatcaccctgggagtttcctgagggttttctcataaatgagggctgcacattgcctgttctgcttcgaagtattcaataccgctcagtattttaaatgaagtgattctaagatttggtttgggatcaataggaaagcatatgcagccaaccaagatgcaaatgttttgaaatgatatgaccaaaattttaagtaggaaagtcacccaaacacttctgctttcacttaagtgtctggcccgcaatactgtaggaacaagcatgatcttgttactgtgatattttaaatatccacagtactcactttttccaaatgatcctagtaattgcctagaaatatctttctcttacctgttatttatcaatttttcccagtatttttatacggaaaaaattgtattgaaaacacttagtatgcagttgataagaggaatttggtataattatggtgggtgattattttttatactgtatgtgccaaagctttactactgtggaaagacaactgttttaataaaagatttacattccacaacttgaagttcatctatttgatataagacaccttcgggggaaataattcctgtgaatattctttttcaattcagcaaacatttgaaaatctatgatgtgcaagtctaattgttgatttcagtacaagattttctaaatcagttgctacaaaaactgattggtttttgtcacttcatctcttcactaatggagatagctttacactttctgctttaatagatttaagtggaccccaatatttattaaaattgctagtttaccgttcagaagtataatagaaataatctttagttgctcttttctaaccattgtaattcttcccttcttccctccacctttccttcattgaataaacctctgttcaaagagattgcctgcaagggaaataaaaatgactaagatattaaaa

SEQ ID NO: 123338 - DNA, 7068 bp, Artificial Sequence
  derived and/or modified sequence
atgctgcggggccctggccctggcctgctgctgctggccgtgcagtgcctgggcacagctgtgcccagcactggagccagcaagagcaagaggcaggcccagcagatggtgcagccccagagccctgtggccgtgtcccagagcaagccaggctgctatgacaatggcaagcactaccagatcaaccagcagtgggagaggacctacctgggcaatgccctggtgtgcacctgctatggaggcagccggggcttcaactgtgagagcaagccagaggccgaggagacctgctttgacaagtacacaggcaacacctacagagtgggggacacctatgaaagacccaaggacagcatgatctgggactgcacctgcatcggggccggccggggccgcatcagctgcaccatcgccaaccgctgccacgagggcggccagagctacaagatcggggacacctggaggcggccccatgagaccggcggctacatgctggagtgtgtgtgcctgggcaatggcaagggggagtggacctgcaagcccatcgccgagaagtgctttgaccacgccgccggcaccagctatgtggtgggggagacctgggagaagccctaccagggctggatgatggtggactgcacctgcctgggggagggcagcggccgcatcacctgcaccagcaggaaccgctgcaatgaccaggacaccaggaccagctaccgcatcggggacacctggagcaagaaggacaacagaggcaacctgctgcagtgcatctgcacaggaaatggccgcggggagtggaagtgtgagcggcacacctctgtgcagaccaccagcagcggcagcggccccttcacagatgtgcgggctgctgtgtaccagccccagccccacccccagcccccaccctacggccactgtgtgacagacagcggcgtggtgtacagcgtgggcatgcagtggctgaagacccagggcaacaagcagatgctgtgcacctgcctgggcaatggagtgtcctgccaggagacagctgtgacccagacctatggaggcaacagcaatggagagccctgtgtgctgcccttcacctacaatggaagaaccttctacagctgcaccacagagggccggcaggacggccacctgtggtgcagcaccaccagcaactatgagcaggaccagaagtacagcttctgcacagaccacacagtgctggtgcagacccggggcggcaacagcaatggagccctgtgccacttccccttcctgtacaacaaccacaactacacagactgcaccagcgagggcagaagagacaacatgaagtggtgtggcaccacccagaactatgatgctgaccagaagtttggcttctgccccatggccgcccacgaggagatctgcaccaccaatgaaggagtgatgtaccgcatcggggaccagtgggacaagcagcacgacatgggccacatgatgcgctgcacctgtgtgggcaatggccgcggggagtggacctgcatcgcctacagccagctgcgggaccagtgcatcgtggatgacatcacctacaacgtgaatgacaccttccacaagagacatgaggagggccacatgctgaactgcacctgcttcggccagggccggggccgctggaagtgtgaccctgtggaccagtgccaggacagcgagaccggcaccttctaccagatcggggacagctgggagaagtatgtgcatggagtgcgctaccagtgctactgctacggccggggcatcggggagtggcactgccagcccctgcagacctaccccagcagcagcggccctgtggaggtgttcatcacagagacccccagccagcccaacagccaccccatccagtggaatgccccccagcccagccacatcagcaagtacatcctgcgctggaggcccaagaacagcgtgggccgctggaaggaggccaccatccctggccacctgaacagctacaccatcaagggcctgaagccaggagtggtgtatgagggccagctgatcagcatccagcagtatggccaccaggaggtgaccaggtttgacttcaccaccaccagcaccagcacccctgtgaccagcaacacagtgactggagagaccacccccttcagccccctggtggccaccagcgagagcgtgacagagatcacagccagcagctttgtggtgtcctgggtgtctgccagtgacacagtgtctggcttccgggtggagtatgagctgtctgaggagggagatgagccccagtacctggacctgcccagcacagccacctctgtgaacatcccagacctgctgcccggcaggaagtacatcgtgaatgtgtaccagatcagtgaagatggagagcagagcctcatcctgagcaccagccagaccacagccccagatgcccccccagacaccaccgtggaccaggtggatgacaccagcatcgtggtgcgctggagccggccccaggcccccatcaccggctacagaattgtgtacagccccagcgtggagggcagcagcacagagctgaacctgcctgagacagccaacagcgtgaccctgagtgacctgcagcccggggtgcagtacaacatcaccatctatgctgtggaggagaaccaggagagcacccctgtggtgatccagcaggagaccaccggcacccccaggagtgacacagtgcccagcccccgggacctgcagtttgtggaggtgacagatgtgaaggtgaccatcatgtggaccccacctgagagcgctgtgacaggctacagagtggatgtgattcctgtgaacctgcctggagagcacggccagaggctgcccatcagcaggaacacctttgctgaggtgacaggcctgagccctggggtgacctactacttcaaggtgtttgctgtgagccacggccgggagagcaagcccctgacagcccagcagaccaccaagctggatgcccccaccaacctgcagtttgtgaatgaaacagacagcacagtgctggtgcgctggaccccaccccgggcccagatcaccggctaccgcctgactgtgggcctgacccggcggggccagccccggcagtacaacgtgggccccagcgtgtccaagtaccccctgaggaacctgcagcctgccagcgagtacacagtgtccctggtggccatcaagggcaaccaggagagccccaaggccactggagtcttcaccaccctgcagcccggcagcagcatccccccctacaacacagaggtgacagagaccaccatcgtcatcacctggaccccagcccccagaattggcttcaagctgggcgtgcggcccagccagggcggggaggccccccgggaggtgaccagtgacagcggcagcatcgtggtgtctggcctgaccccaggagtggagtatgtgtacaccatccaggtgctgagagatggccaggagagagatgcccccatcgtgaacaaggtggtgacccccctgagcccccccaccaacctgcacctggaggccaacccagacaccggggtgctgactgtgtcctgggagaggagcaccaccccagacatcaccggctaccgcatcaccaccacccccaccaacggccagcagggcaacagcctggaggaggtggtgcatgctgaccagagcagctgcacctttgacaacctgagccctggcctggagtacaacgtgtctgtgtacacagtgaaggatgacaaggagagcgtgcccatcagtgacaccatcatcccagctgtgcccccacccacagacctgcgcttcaccaacatcggccctgacaccatgagggtgacctgggcccccccacccagcattgacctgaccaacttcctggtgcgctacagccctgtgaagaatgaagaagatgtggccgagctgagcatcagccccagcgacaatgctgtggtgctgaccaacctgctgcccggcacagaatatgtggtgtctgtgtcctctgtgtatgagcagcacgagagcacccccctgcggggccggcagaagacaggcctggacagccccaccggcatcgacttcagtgacatcacagccaacagcttcaccgtgcactggatcgccccccgggccaccatcaccggctaccgcatccgccaccaccctgagcacttcagcggccggcccagagaagatagagtgccccacagcaggaacagcatcaccctgaccaacctgaccccaggcacagaatatgtggtgtccatcgtggccctgaatggccgggaggagagccccctgctgattggccagcagagcacagtgtctgatgtgccccgggacctggaggtggtggccgccacccccaccagcctgctgatctcctgggatgccccagctgtgacagtgcgctactaccgcatcacctacggggagactggaggcaacagccctgtgcaggagttcaccgtgcccggcagcaagagcacagccaccatcagcggcctgaagccaggagtggactacaccatcaccgtgtatgctgtgacaggccgcggggacagccctgccagcagcaagcccatcagcatcaactacagaacagaaattgacaagcccagccagatgcaggtgacagatgtgcaggacaacagcatctctgtgaagtggctgcccagcagcagccctgtgacaggctacagagtgaccaccacccccaagaatggacctggccccaccaagaccaagacagctggccctgaccagacagagatgaccatcgagggcctgcagcccaccgtggagtatgtggtgtctgtgtatgcccagaaccccagcggggagagccagcccctggtgcagacagctgtgaccaacatcgaccggcccaagggcctggccttcacagatgtggatgtggacagcatcaagatcgcctgggagagcccccagggccaggtgagccgctacagagtgacctacagcagcccagaagatggcatccacgagctgtttcctgccccagatggagaggaggacacagctgagctgcagggcctgcggcccggcagcgagtacacagtgtctgtggtggccctgcatgatgacatggagagccagcccctgattggcacccagagcacagccatcccagcccccacagacctgaagttcacccaggtgacccccaccagcctgagcgcccagtggaccccacccaacgtgcagctgaccggctacagagtgcgggtgacccccaaggagaagacaggccccatgaaggagatcaacctggccccagacagcagctctgtggtggtgtctggcctgatggtggccaccaagtatgaggtgtctgtgtatgccctgaaggacaccctgaccagcaggcctgcccagggcgtggtgaccaccctggagaatgtgagccccccccggcgggcccgggtgacagatgccacagagaccaccatcaccatctcctggaggaccaagacagagaccatcaccggcttccaggtggatgctgtgcctgccaacggccagacccccatccagaggaccatcaagccagatgtgcgcagctacaccatcaccggcctgcagcctggaacagactacaagatctacctgtacaccctgaatgacaatgcccggagcagccctgtggtgattgatgccagcacagccattgatgcccccagcaacctgcgcttcctggccaccacccccaacagcctgctggtgtcctggcagcccccccgggcccgcatcaccggctacatcatcaagtatgagaagccaggcagccccccccgggaggtggtgccccggcccaggcctggggtgacagaggccaccatcaccggcctggagcctggaacagagtacaccatctacgtgattgccctgaagaacaaccagaagtctgagcccctcatcggcaggaagaagacagatgagctgccccagctggtgaccctgccccaccccaacctgcacggccctgagatcctggatgtgcccagcacagtgcagaagaccccatttgtgacccaccctggctatgacacaggaaatggcatccagctgcccggcaccagcggccagcagcccagcgtgggccagcagatgatctttgaggagcacggcttccggaggaccaccccacccaccacagccacccccatccgccaccggccccggccctaccccccaaatgtgggccaggaggccctgagccagaccaccatctcctgggcccccttccaggacaccagcgagtacatcatcagctgccaccctgtgggcacagatgaggagcccctgcagttccgggtgcccggcaccagcaccagcgccaccctgaccggcctgaccaggggggccacctacaacgtcatcgtggaggccctgaaggaccagcagaggcacaaggtgcgggaggaggtggtgacagtgggcaacagcgtgaatgaaggcctgaaccagcccacagatgacagctgctttgacccctacacagtgagccactatgctgtgggagatgagtgggagaggatgtctgagagcggcttcaagctgctgtgccagtgcctgggctttggaagtggccacttccgctgtgacagcagccgctggtgccacgacaatggagtgaactacaagattggagagaagtgggaccggcagggagaaaatggccagatgatgagctgcacctgcctgggcaatggcaagggggagttcaagtgtgacccccatgaggccacctgctatgatgatggcaagacctaccacgtgggggagcagtggcagaaggagtacctgggcgccatctgcagctgcacctgctttggaggccagaggggctggaggtgtgacaactgcagaagacctggaggagagcccagccctgagggcaccaccggccagagctacaaccagtacagccagcgctaccaccagaggaccaacaccaacgtgaactgccccatcgagtgcttcatgcccctggatgtgcaggccgaccgggaggacagccgggagtag

SEQ ID NO: 123339 - DNA, 7068 bp, Artificial Sequence
  derived and/or modified sequence
atgctgcggggccccggccccggcctgctgctgctggccgtgcagtgcttgggcactgccgtgcctagtacaggcgcgtccaaatcaaagcggcaggcccagcaaatggttcagcctcagagcccagtggccgtttcccagtcgaagcctgggtgctacgacaacggaaagcattatcagattaatcagcaatgggaaaggacatacttggggaacgctctcgtgtgcacatgttatggaggttcgagggggtttaactgtgaatccaaaccagaggccgaggagacctgctttgataagtacacaggaaatacctacagggtcggagatacatacgagagaccaaaggactcgatgatctgggactgcacttgcattggagcagggaggggtaggatatcttgtactatcgcgaaccgatgccatgagggaggacagtcgtacaaaattggcgacacctggcgcaggccacacgaaactggcggctatatgctagaatgcgtctgtctcggtaatgggaaaggcgagtggacctgcaaaccaattgctgagaagtgttttgaccatgctgctgggactagttacgtggtaggagagacatgggaaaagccataccaggggtggatgatggtggattgtacttgcttgggtgaagggtcaggtcgcataacctgcacatctcgaaatcgctgcaatgaccaagatacaaggacgagctatcggattggggacacatggagcaagaaggacaaccgcggcaatcttcttcagtgcatctgtacaggaaatgggcgcggcgagtggaaatgtgagagacatacaagcgtccagacaacatcctcaggctctggcccctttaccgatgtacgggccgccgtctatcaaccccagccccacccgcagccaccaccttacgggcactgcgtcacggattccggcgtggtctatagcgttgggatgcagtggctgaagacacagggaaacaaacaaatgctctgtacatgcctaggaaacggtgtatcatgccaggaaactgcagtgacccagacgtatgggggaaattctaatggtgaaccgtgcgtgctgccttttacctataatggaaggacattctacagctgcacaacagaaggccgacaggacgggcacctttggtgcagtactaccagtaattatgaacaggatcagaagtacagcttctgcactgatcacacagtactggtgcagacacgtggggggaactcgaacggagctctatgtcactttcccttcctgtacaacaaccataactatacagactgtacatctgaaggcaggcgggacaacatgaagtggtgtggcacgacccaaaactacgacgccgaccaaaaattcggcttttgtcctatggccgcccacgaagagatttgcaccactaacgaaggtgtaatgtaccgcatcggcgatcagtgggataagcaacacgacatgggccatatgatgagatgtacgtgtgtgggaaatgggcgcggcgagtggacctgcattgcctactcccagctgcgggaccaatgcattgtggacgacatcacttacaacgtgaacgatacttttcacaagagacacgaggaaggtcacatgctgaattgtacctgctttgggcaggggagaggtcggtggaaatgtgatccagttgaccagtgtcaggacagcgaaacgggaacattttaccagattggggactcatgggagaagtacgttcacggtgtgaggtaccaatgttattgctacgggcgcggcattggcgagtggcactgccagccattgcaaacctacccaagctctagcgggcccgtggaagtgttcatcactgaaaccccttcccagcccaactcacatcctatacagtggaatgccccccagccctcccacattagtaagtatatcttgagatggcgccctaaaaacagtgtgggcagatggaaggaagcgaccattcctgggcacctcaactcctatactataaaggggctcaaacctggcgtagtgtacgaggggcagctcattagcatccagcagtatggccaccaagaagtgaccaggttcgattttactacaacctccacttccacaccagtgaccagcaataccgttacaggagagacaacgcccttttcacctttagttgctaccagtgagtccgtcaccgagattacagccagctctttcgtcgtgtcctgggtgagcgctagcgacaccgtaagcggtttccgcgtggaatacgaactgtctgaggaaggagatgaacctcagtatctggatctaccatcaactgctacttccgtcaacattccagatttactgcccggcaggaaatatatcgtcaacgtttaccaaatctctgaggatggggagcaaagcttgatattaagtacaagccagaccactgctccagatgctcccccagataccacagtcgatcaggttgacgatacaagcatagtagtgcggtggagtcgcccccaggccccgataaccggctaccgcattgtctattctccatctgtggagggttcatcgaccgagctgaatttacctgaaacagcaaatagtgtgacactgtctgatttacagccaggggtgcaatacaacattacaatttatgctgtcgaggaaaaccaggagtctaccccagttgtgattcagcaggagaccaccggaacccccagatccgatacagtgccatctccccgggatctgcagtttgttgaagtgacagatgtgaaggtgaccattatgtggacaccgcctgagtctgcagtgacgggctatcgggtggacgtgatacctgtcaacttgccaggtgagcatgggcaaaggctgcccatctcccgtaataccttcgctgaggtgacaggattaagcccgggagtcacttactacttcaaggtcttcgctgtctcccacggccgagagtctaaaccgctgactgcccagcagactaccaagcttgatgcccctaccaatctacaattcgtgaatgagactgatagtactgtgctcgttcggtggacaccccctcgggcgcagattacaggttatagactcacagtcggtttgactcggagaggtcagccacgccagtacaacgtggggccttccgttagcaaataccctctgagaaaccttcaaccggcctctgagtacactgtgagccttgtggcaataaagggcaatcaagaatcccctaaggcaactggtgtgttcacaactctgcagcctggatcttctattcctccatataacacagaggtgaccgaaacaacgatcgtgattacgtggacaccggctccgagaattggattcaagctgggcgttaggccgagtcagggcggtgaggccccccgcgaagtgacctccgacagtggttctatcgtagtgtccggcctcactccgggcgtggagtatgtatataccattcaggtactcagagacggccaggaacgggatgcgccaatcgtcaataaggtggtcactccactgtcaccacccacaaatctgcacctggaagcaaatccagacactggagtgctgaccgtcagttgggaaaggtcaaccacgcctgatatcacaggctatagaataaccaccacccctacaaatggccagcaaggaaactcacttgaagaggtagttcacgcggaccagagctcttgcacttttgacaatctgagtcctggcctggagtataacgtgtccgtgtatactgtgaaagatgataaggaaagcgtcccaatctccgacacaatcatccccgccgtaccccccccaactgatctgagattcaccaatattgggcctgacactatgcgcgtgacttgggcccctccaccctctattgacctcaccaattttcttgttcggtactcccccgtgaaaaatgaagaggatgtcgcagaattgtcgatctccccatcggacaacgcagttgtccttactaatttgctgcctggaactgagtatgtggtgtccgtgtccagcgtgtatgagcaacatgagtccactccactgagaggccggcagaaaaccggcctcgacagccccaccggcatcgactttagcgacattaccgcaaactcgtttaccgtgcactggatcgcacccagagcaacgatcactggctatcgtatccggcaccaccccgaacacttttctgggcgacctagggaggaccgggtgccccactctcgaaatagcattacccttaccaacctgacccctggcactgagtatgtggtctctattgtcgcactgaacggacgcgaagagtccccacttttgatcggacagcaaagtaccgtgtccgatgtgccgagggacctagaggtagtggctgctactcctacaagtctcctgatcagttgggacgcccctgcggtgaccgtccggtactacaggatcacttatggagagaccggaggcaactcccctgtgcaggagttcactgttcccggcagtaaatcaaccgcaacaatctccggcctcaaaccgggtgtcgattatacgattacagtatacgcagttacgggccggggggactcccccgcatcatccaaaccgatctcgattaactacaggaccgagatagataaaccttctcagatgcaggttacagacgtccaggataattctatcagtgttaaatggcttcctagctctagtcccgtcaccggctatagggtaaccaccactcccaagaacggcccaggcccaaccaaaactaaaacagcggggccggaccagaccgaaatgactattgagggccttcagccaaccgtggaatacgtcgtctcagtgtacgcccaaaacccttctggcgagtcccagccgctggttcaaacagctgtgacaaacatcgataggcctaaaggccttgcttttacggatgtggatgtggattcaatcaaaattgcctgggagtctcctcagggccaagttagccgatatcgggtgacgtattcgtctcctgaagatgggattcacgagctatttcctgccccagatggcgaagaggacacggctgaactccagggcctgcggcccgggtcagagtataccgtctcggtggtggccctgcacgacgacatggaaagccagcccctaattggcacgcagtcaaccgctattcctgcgcccacagatctgaagtttacccaggtgacacctacctctttgtccgcacaatggacgccgcctaacgtccaactcactgggtacagagtcagagtgacacccaaagaaaagactggcccaatgaaggagatcaacctcgccccagattccagttcagtggttgtgagtggcctaatggtggccacaaaatacgaggtgtctgtgtatgcactaaaagatacacttaccagccgccctgcgcaaggtgtggtgactacactcgaaaatgtttctcccccaaggcgcgccagagtcaccgacgcaacggaaacaactatcactatctcctggcggacgaaaaccgaaacaatcacagggttccaagttgacgccgtacccgcaaatggtcaaacccccatacaacggaccatcaaacctgacgtgaggtcctatactattaccggtctccaaccaggcacagactataagatctacttatataccctgaatgacaatgcccggagtagcccggtggtcattgacgcttcgacagctatcgatgcaccttcgaatttgagatttcttgctaccacgcctaatagtctgcttgtcagttggcagcctcctagagcccgcattaccgggtatatcatcaaatacgagaaacctggatcacctccccgggaggtagtcccccggccaaggcccggggttactgaggcaaccatcactggcctagaacccgggactgagtatacgatctacgtaatagccctgaagaataatcagaagtctgaacccctgatcggaaggaagaaaaccgatgagttaccacaactcgttactctgcctcaccccaatttacacgggccggagatacttgacgtcccgagcaccgtgcaaaaaactccatttgtcacccacccaggttacgacacgggcaacggaatccaattgcccgggaccagcggacagcaaccttcggtaggacaacagatgatttttgaggagcatgggttcagacgcaccactccacccacaactgctacaccaattcgacacagaccaagaccctatcctcccaatgtcggccaggaagctcttagccaaaccactatttcctgggctcccttccaggatactagcgaatacatcataagttgtcacccagttggcacagatgaagaaccgctccagttcagagtccctggcacttcaacaagtgcgaccctgacaggcctcacccgcggagccacatataatgtcatcgtggaggctctgaaggaccaacaacgccacaaagtcagagaggaggtggtgactgtaggtaatagcgtgaacgagggtttgaatcagccaaccgatgactcttgtttcgatccatatacggtatcccattatgctgtgggagacgaatgggaacggatgtctgagtccgggttcaaattgctttgccagtgcctaggcttcggctcgggtcacttcagatgcgactcatctagatggtgccatgacaacggggtcaactacaagatcggcgagaaatgggataggcaaggtgagaacgggcaaatgatgtcctgtacttgcttgggtaatggaaagggcgagtttaaatgcgaccctcatgaagccacatgctacgacgacggtaagacctaccacgtcggcgaacagtggcagaaggaatatttaggcgccatttgtagttgcacttgcttcggaggacagcgggggtggcggtgtgacaactgcaggcgcccagggggcgagccctcccctgagggcacaacgggtcaatcttacaaccagtactcgcagcggtaccatcagcgtaccaacacaaacgtcaattgtcccatagagtgctttatgccccttgatgtgcaggctgaccgggaagatagccgggaatag

SEQ ID NO: 123340 - DNA, 7068 bp, Artificial Sequence
  derived and/or modified sequence
atgctcagaggtccaggaccgggactgctccttctggccgtacaatgtctcgggacagccgtcccatccacaggggcatctaaatcgaagagacaagcccagcaaatggtacagccacaatccccagtggccgttagccagagcaagccgggatgctatgacaacggtaagcattatcagatcaatcagcaatgggagcggacctatctgggtaatgctctcgtctgcacttgttacggaggtagtagaggtttcaattgtgagtctaaacccgaagcagaggagacttgctttgacaaatataccgggaacacctaccgcgtgggagatacatacgaaaggcctaaggattcaatgatctgggattgcacttgtatcggagctggcagagggcgaatttcctgcactattgccaatagatgccacgaaggcggacaatcctataaaatcggcgatacatggcgtaggccccacgaaacagggggttacatgttagagtgcgtctgtctgggtaatgggaaaggcgagtggacgtgcaaacccatcgccgaaaaatgtttcgaccatgctgcaggaactagctatgtggtaggcgagacctgggagaaaccttaccagggctggatgatggtggactgcacttgtctgggcgagggttccgggcgaataacttgtacctctaggaacagatgtaacgatcaggacaccagaacgtcgtatcgaataggggatacgtggtctaaaaaagataatcgcggtaatcttctccaatgcatttgcactggaaatgggaggggggagtggaagtgcgaaagacatacctctgtgcagactacttccagcggttccgggccatttactgatgtgcgcgctgccgtctaccagccccagccacaccctcagccgcctccgtacggacactgcgtcacagactccggagtggtgtacagtgttggaatgcaatggctcaaaacacagggaaataaacagatgctctgtacgtgcctcgggaacggcgtctcctgccaagaaactgcagtcacgcagacatacgggggtaactctaacggagaaccttgcgtgctgccttttacgtacaatggcagaacattttacagctgtaccaccgagggtcgccaagatggacatttgtggtgttctaccacatccaactatgaacaggaccagaaatacagcttctgtaccgatcacacagtcttagtccagacaaggggcggtaactccaatggcgctctttgccacttcccctttctttacaacaaccacaactacaccgactgcacatctgagggaaggcgggacaacatgaaatggtgtggcactacacagaactacgacgccgaccagaaattcggcttctgtcctatggccgcacatgaagaaatttgcactacgaacgaaggagttatgtataggattggcgaccaatgggataagcaacatgatatgggtcacatgatgcggtgtacttgcgtcggcaacggacgcggtgagtggacttgtatcgcctatagccaattgagggaccaatgtatcgtagatgatattacgtacaatgttaatgataccttccataagcgtcacgaggagggccatatgcttaattgtacctgctttggccaggggcgaggaaggtggaagtgcgatcccgtagaccagtgccaggatagcgagaccggcactttctaccagataggcgacagttgggagaagtacgtgcatggcgttaggtaccagtgttactgctatgggcgaggcattggagaatggcattgtcagcctctgcaaacgtatccgtccagtagtgggcctgtagaggtgttcatcaccgagacaccctcccaaccgaactcccaccctatccagtggaacgctccacagccatcacatatttcaaagtacatattgaggtggcgtccaaaaaactcggtaggaaggtggaaggaggccactatccctggccacctaaacagctacacaattaagggcctgaaaccaggcgtggtatatgaggggcagcttataagcattcagcagtacgggcaccaggaagtgactcgcttcgacttcacaaccaccagtacttctactccggtgacctccaacacggtaactggggaaactactccattctctcccctggtagcaacaagcgagtccgttactgaaattacagcttccagctttgtggttagttgggtgtctgccagcgacacagtgtctggttttcgcgtcgaatacgagctgtcagaagagggagacgagccccagtaccttgatctcccatctactgctacctccgttaatatcccagatctgctgccagggcgtaaatatattgttaacgtctatcagatttctgaggacggcgaacaaagcctcatcctttccacctcccagacaactgcgcctgacgctccgccagataccacagtggatcaggtagacgatacctctatcgtggtcagatggagtagaccccaagctccaatcacgggctatcgcatcgtttattcgccgtcagtagagggtagcagcacagaattgaatctgcccgagactgccaattcggttaccctatccgacttgcaacccggagtacagtacaatatcacgatttacgcagttgaggaaaaccaagaaagcactcctgtcgtgatccagcaggaaacaacaggaaccccacgttctgataccgtgccatccccccgtgatctccagttcgtagaggttacagatgtcaaagtaacaatcatgtggacaccccctgagagcgcggtcaccggctatcgggttgatgtcattcctgttaacctccctggagagcacgggcagaggttgcctatctcccgtaacaccttcgccgaagttaccggtctgtctcctggtgtgacttactactttaaagtatttgccgtctctcacggacgcgagagcaaaccactgaccgctcagcagactacaaaactggatgctccaactaacctgcagtttgtgaacgagactgattctaccgtactggttagatggacaccaccgagggcccagattaccggataccgtctaacagttggactcacccgccgaggacaacctaggcaatataatgtgggaccaagtgtttcaaagtatccactgaggaatctgcagcctgctagtgagtacaccgtatccctcgtggcaataaaaggcaaccaagagtcccccaaggccactggcgtgtttaccacacttcagccaggttcttcaatcccgccttataataccgaggtgaccgaaaccaccatcgtgatcacatggacccccgctcctcggataggcttcaagttgggagtgagacccagtcagggtggcgaagcccctcgcgaggtaacaagcgattcagggtctatcgtggtgtcaggcctgacacccggtgtggagtatgtgtacactattcaggtcctccgggacggtcaggaacgcgacgctccaattgtaaacaaagtcgttactcccctatctccccctacaaatctgcacctagaagcaaatcccgatactggagtattgacagtatcttgggagcgcagtactacacctgatatcacaggttacaggatcactaccacaccaacgaatgggcagcaggggaacagcctggaggaggtggtgcacgctgaccagagtagctgtacattcgacaacctctctcctggcctcgagtataatgtatccgtgtacacagtgaaggacgataaggagtccgtgcccattagcgacaccatcataccagccgtgcccccacccactgacctgcggtttacaaatatcgggcctgataccatgcgagttacatgggcaccacctccatcaatcgatttgactaacttcttggtacggtatagtcctgtgaagaacgaggaggacgtggcagagctctccatctcgccatcagataacgccgtggtacttacaaatctccttcctggcaccgagtatgtggtcagcgtttcaagcgtgtacgagcagcacgaatcaacacctctcaggggaagacagaagacaggcctggattcaccgacagggattgacttttctgacatcacggctaacagcttcaccgtgcactggattgcgccaagagccacgatcaccggctacaggatacgccaccatcccgagcacttcagcgggaggcctagggaagaccgcgtgccgcactctcgtaactccattacccttacaaatcttacaccaggcaccgaatacgtggtttccattgtggctcttaatggtcgcgaagaaagtcctctcctaattggtcagcagtcaaccgtgagcgatgtgccacgagacctggaggtggtcgcagccacccctacttcactgttgatatcgtgggacgctccagcagtcaccgttcggtattacaggattacatatggagagaccggcggaaatagcccagtacaggagtttactgtaccagggtccaaaagcacagccacgatctccggcctgaagcctggagtcgattacaccatcaccgtgtacgctgtcaccggccgaggcgactcccctgcctcaagtaaacctataagtattaactacagaactgagatcgataaaccaagccagatgcaagtgacagacgtgcaagacaacagcatttccgtcaagtggctcccatcatcctcaccggttacagggtatcgcgtcacgaccactccaaagaatggccctggacccaccaagaccaagacagcaggcccagatcagaccgaaatgaccatcgaggggttgcagccaactgttgaatatgtggtcagtgtttacgctcagaatccttccggggaatcccagcccctggtccaaactgccgttacgaatattgatcggcctaaaggcctcgctttcaccgacgttgacgtggattcaataaaaatcgcatgggagagcccacaaggtcaggtgtcacgctatcgcgtcacttattcttcccccgaggacggcatccatgagctgtttccagccccagacggtgaggaggatacggccgaacttcaaggcctacggccaggcagtgaatatacagtctcagtagtggcgctgcatgatgatatggaaagccagccattgatcgggacccagagtaccgccattccagctccgactgacctcaagttcacccaggtgaccccaacctcattgagtgcccaatggaccccaccaaacgtccaattaactggttatcgcgtgcgtgttaccccgaaggagaaaacaggcccaatgaaagagattaacctggcccctgactcctcctctgtcgtggtaagcggcctgatggtggccaccaagtacgaagtgtccgtttacgccctgaaagacacgttaaccagcaggcctgcacaaggagtggtcaccactctcgaaaatgtgagccctccacgcagagctcgggttaccgatgctaccgagaccacgattacaatttcttggcgcaccaagactgagacaattaccggattccaggtggatgctgttccagccaacgggcagacacctatccaaaggacaataaagcccgacgtgcgttcttatacaatcaccgggctgcagcccggaactgattacaagatctatctgtatacactcaatgataatgccaggagttcgcccgttgtcatcgacgctagtaccgccatcgacgccccatctaatcttcgttttctcgccacaactcccaattctttattagtctcctggcagcccccaagagcaagaattaccgggtatataataaagtacgagaaaccagggtccccccctcgagaagtcgtgccgagaccgaggcctggcgtcaccgaagcgacgatcactggtctggagcccggtacggaatacaccatctatgttatcgcgctgaaaaacaatcagaaatccgagcccctgatcggcagaaaaaaaactgacgagcttccacaactggtcacactgccgcaccccaacctgcacgggccagagattttggatgtgccgagcaccgtgcagaaaactcctttcgtgacacatccaggctacgatacaggtaacggtattcaactgccgggaacttctggtcagcagcccagcgtaggtcagcagatgatcttcgaggaacatgggtttcgtaggacaactccccctaccactgctacacctattcgccaccgtcctcggccatatcccccaaatgtgggtcaggaagccctttctcaaaccacaataagttgggccccttttcaggacacttcggaatacatcattagctgtcatcctgtcggaaccgatgaggagcccctgcagtttcgggtccctggtacgtctacctcagccactctgacaggtctaacaagaggggcaacctacaatgttatagtcgaggctctcaaagaccagcagcgacacaaggtgcgtgaggaagtcgtgacagttggcaactccgtcaatgagggcctcaatcagccaaccgatgatagctgttttgacccttacaccgtaagccactatgcggtaggggatgaatgggaacggatgagcgagtccgggttcaaactactttgccaatgcttgggcttcggctcaggccatttccggtgcgactcaagtcgatggtgccacgataacggcgtgaactacaaaatcggtgagaagtgggacaggcagggcgaaaacggccagatgatgtcgtgtacatgcctgggcaacggtaagggcgaattcaaatgcgaccctcacgaagctacttgctacgacgatggcaaaacatatcatgtgggagagcagtggcagaaggaatatctcggagcaatctgttcatgcacttgctttggaggccagcgcggatggcgttgcgacaactgtcggcgacccggtggcgagcccagccctgagggaaccacagggcagagctataaccagtatagccagaggtaccatcagagaacaaacacgaatgtgaattgcccaatcgagtgcttcatgcccctagacgtgcaagctgatcgcgaagactctcgcgagtaa

SEQ ID NO: 123341 - DNA, 7068 bp, Artificial Sequence
  derived and/or modified sequence
atgctccggggcccaggtcccggactgctgctgctggcagtgcagtgtcttgggacagccgttccttcaaccggggcttccaagtccaaacggcaggcacagcagatggtgcaaccccagagccctgtcgcagtatcacagagcaagcctgggtgctacgacaacggtaaacattatcagataaaccagcagtgggaacgaacctacttgggcaatgcacttgtctgtacgtgttacggaggcagccgcggtttcaactgtgagtcaaaacccgaggcggaagagacatgtttcgacaaatatacaggcaacacatacagagtgggggatacttacgagcgaccaaaggactccatgatctgggactgcacgtgcatcggcgcagggcgcgggaggatttcatgtacaatcgcaaatcgctgccacgagggcggccagagctataagatcggagatacctggcggcggccacacgagacaggaggctacatgctggaatgcgtctgtctgggaaatggcaaaggagagtggacttgcaagcccatcgccgaaaagtgcttcgaccatgccgcagggacatcctatgtggtaggcgagacttgggagaagccttatcagggatggatgatggttgactgtacctgtctgggcgaaggatcagggaggatcacatgcactagccgcaatcgatgtaatgatcaggatacccgcacgagctatagaataggggacacatggtcgaagaaagacaatcgagggaacctcctgcaatgtatttgtacaggcaacggacgcggtgaatggaaatgtgagagacatactagcgtccagacgactagcagcggaagtggcccatttacagatgtgcgggctgcagtttatcaacctcagccacaccctcaacctcctccatacgggcactgtgtgactgacagcggggtggtgtatagtgtcgggatgcagtggcttaagacccagggcaataagcaaatgctgtgcacgtgcttgggaaacggggtgagctgccaagaaacagccgtgacccagacgtatgggggaaactctaatggtgagccttgcgtgcttccattcacctacaacggaagaacattttattcttgtaccaccgagggccgccaagacgggcatctctggtgctccactactagcaactatgagcaggaccagaagtatagtttttgcacagatcacaccgtacttgttcaaaccaggggcggaaatagtaacggggctctgtgccatttcccctttctttacaacaatcacaactatactgattgtacttccgaaggacgcagggacaatatgaaatggtgtggcactacccaaaactacgatgccgatcagaaatttggcttttgtccaatggccgcacacgaagagatttgtacaaccaacgagggcgtgatgtatcgtatcggtgaccaatgggacaagcaacacgacatgggccatatgatgaggtgtacctgcgtgggcaatggccgcggagagtggacctgtattgcttactcccagctaagggatcagtgcatagttgatgacattacttataacgttaatgatacttttcacaaacggcacgaagaaggccacatgcttaactgtacttgctttggacagggacgtggtaggtggaaatgcgacccagtcgatcaatgccaggacagcgaaaccggaacgttctatcagatcggtgattcctgggagaagtacgtccatggggtgcggtaccaatgctactgttatggtaggggaatcggggagtggcattgccagccccttcagacttatccaagcagctccggaccggtggaagttttcattacagagaccccctcgcagcctaactcgcacccaattcagtggaacgcgcctcagccctcccacatcagcaagtatatcctgcgctggcgacctaagaactcagtagggaggtggaaagaagctaccataccaggacacctcaatagttatacaatcaaaggactcaaacctggagtcgtctatgaaggccagttgatttcaatccagcagtacggacaccaggaggtaactagatttgattttaccaccacttccacatccacaccagtcactagcaatactgtaaccggcgagaccaccccttttagccccttggtcgctaccagtgaatctgttacagagatcactgcttcaagtttcgtggtcagctgggtgtctgcatccgacaccgtctccggatttagagtcgaatatgagttgagcgaggagggcgatgagccacaatacttggacctgcctagcaccgctacctctgtcaacatcccagatttactgccaggacgtaaatacattgtaaacgtgtaccagatctcagaggacggtgaacaatcgttaattctttccacttcccaaacaaccgcacctgacgcgccacccgacacgacagtggaccaggtggatgataccagcatagtggtccgatggtccagaccgcaggcgccaatcaccggctatcgtatagtgtacagtccttccgtagaaggctcctcgactgagctcaacctgccagagacggcaaacagtgtgaccctaagcgacctgcagcctggtgtgcagtataatatcactatttatgctgtggaagaaaaccaagagagcacccccgtagtgattcagcaagagacaactgggacccctcgcagcgatacagtacccagccctcgagaccttcagtttgttgaggttaccgatgtgaaagttacaatcatgtggaccccccccgagagtgcagttactggttatagggtcgatgtgatccctgtgaatcttcctggggagcatggacagaggctcccgataagcaggaacacatttgctgaagtgactggactaagcccgggcgtgacttattacttcaaagtttttgcagtgagccatggacgagaaagcaagcctctaacagcccaacagactacaaagttggatgcccccaccaatctgcagtttgtcaacgaaaccgactccactgtgctggtgaggtggaccccccccagggcccaaattactgggtatcgtttaaccgttggtttaacgagacggggacagccgcgccagtataatgtgggaccatctgtgtccaagtatcccttgagaaatttacaaccagcgagtgagtacaccgtctccctggtggcaattaagggcaaccaagaatcccccaaagcgaccggagtcttcaccacgctgcagccaggctcgagcattcccccatataatactgaggttacagaaacaacaattgtgattacctggacccccgcaccaagaatcgggtttaagctgggcgtaaggcccagccagggtggagaagctccccgagaagtcaccagtgattcgggatctatagttgtctcgggattgacacctggagttgagtatgtatatacaattcaggtccttagagacgggcaagaacgggacgccccaattgtcaataaagtggtaactccgttgagtcccccaacgaatttgcacctggaggcaaatcccgataccggagtgctgactgtgtcatgggaaagatccacaactccagacatcactggctatagaattactactactcccacaaatggccagcagggaaactcactagaggaggttgttcacgctgaccagagctcatgtacgtttgacaaccttagtccaggcctggagtataatgtgagcgtgtataccgttaaggatgataaagaaagcgtccctatctctgacactattatccccgctgtccctcccccaacagacctgaggttcaccaatattggcccagataccatgcgcgttacttgggcaccacctccttccattgacctgacaaactttttggtgagatatagccctgttaagaacgaggaagatgtggcagagctgtctatttccccatccgacaatgctgtggttttgaccaaccttctgcccggcactgagtacgtagtttccgtttcttccgtgtacgagcagcacgagtcgactcccctgagggggagacagaagacgggactggactctcctacaggaattgatttcagcgatatcaccgcaaacagcttcacagtgcactggatcgccccacgggctaccatcactggctatcggatccggcaccacccggagcatttctcaggccgacctagggaggatcgggttccccacagtagaaactctattacattgacaaaccttacccccgggacagaatatgtagtgtctattgtggcactgaatggccgcgaagagtccccactgctaattggacaacagtccaccgtttctgatgtaccccgggacttagaggtggtggccgccacacctacctcactgctgatctcctgggacgcacctgcagtgacagttagatattatcgcattacctacggtgagaccgggggaaacagcccagttcaggagttcacggtgccggggagtaaatccaccgcaaccatttcaggtctgaagcccggggtggattacactatcacagtctacgcagttactggccgcggtgacagtcccgcaagcagtaaacccatctcaatcaattaccgaaccgagatagacaagcccagccagatgcaggtgaccgacgtgcaggacaatagtattagtgttaaatggcttcctagtagctcacctgtcaccggctatagggttacaaccacccctaagaacggtcctgggcccacaaagaccaagacagctgggccagatcagactgagatgacgatcgagggactccagcctaccgtggaatatgttgtgtccgtatacgcacagaacccaagtggagagtctcagcctttggtgcagaccgcagtaaccaacatagatcggcccaaaggcttggcatttacagacgtggacgtcgattcaatcaagattgcgtgggaaagtcctcagggacaggtttcacgttaccgcgtgacctatagtagtccagaagacggtattcacgagcttttcccagctccggatggggaagaagatacagccgaactccaagggttacggccagggagtgaatacactgtaagcgtggtagccctccatgacgacatggagtcgcagcctctcatcggaacgcagtctaccgccatacctgcccccacagacctgaaatttacccaggtgactccaacctctctatctgcgcagtggactcctccaaacgtccagttaactggttatagggtaagggttactccaaaagagaagacagggccaatgaaagagatcaacctagcccctgattcttcttctgtcgttgtcagtggcctgatggttgcgactaagtatgaagtgagtgtctatgcccttaaagatactctcacgagccggccagcacagggcgtagtaactacactcgagaatgtttcaccacctcgtcgcgcacgcgtcacagacgcaactgagacgacaattactatatcatggagaacaaagacagagaccatcaccgggttccaggtcgatgccgtaccagccaacggtcaaactcctatccaacggaccatcaaacccgatgtccgctcttatacaatcaccggactgcagcctggaactgattataagatttacctgtataccctgaacgataatgcccggagttcccccgtagtcatcgacgctagtaccgccattgacgctccaagtaatctacggtttctagcgacgacaccaaattccctgctggtgagctggcagcctccccgggcacggattactggatacattattaagtatgagaaaccaggctctccacccagggaggttgtgccacgcccaaggcccggcgttacggaagccacgatcactggtctggagcccgggacagagtataccatatacgtgatcgcactcaaaaacaaccagaagtccgaacctctcattggccgcaaaaaaaccgatgaactgccacaactagttactttgccccaccccaatctgcacggtcccgagattctggatgtgccctccacagtgcagaaaacacccttcgtgacacatccaggctatgatactggcaacggcatccagctgcccgggaccagtgggcagcagccttccgtcgggcagcagatgattttcgaagagcacggcttcagaagaacaactccccctacgacagcgacccctattcgtcatcgaccaagaccttacccaccaaatgtaggccaggaggccctttcccagactacaatcagctgggccccctttcaggatacctccgaatacattatatcatgccaccccgtgggcaccgacgaggagcccctccagtttagggtccctggaaccagtacatcagctactctgacaggattgacccgcggagcaacgtacaacgtgatcgtggaggcattgaaggaccagcaaaggcacaaggtgagagaggaggtagtgacggtcggaaactctgttaatgagggtctgaaccaacccactgatgattcctgcttcgatccatacaccgtgtcacactacgctgtgggagatgaatgggaaagaatgagcgaatccggtttcaaattactatgccagtgtctgggtttcggttctgggcatttccgatgtgattctagcaggtggtgtcacgacaatggagtgaactacaaaatcggagaaaagtgggatcggcagggagagaacggccagatgatgagctgtacttgtcttggcaacggaaagggtgagttcaagtgcgacccacacgaggcgacttgctacgacgatggcaagacataccacgtaggagagcagtggcagaaggaatatctgggcgcaatttgttcttgcacatgcttcggcggccagaggggatggcggtgcgataactgtaggaggccaggcggggagccctcacccgaggggacgacaggtcagtcctacaatcagtattctcagaggtaccaccagagaactaacactaatgtgaactgtcccattgagtgcttcatgcccctggacgtgcaggccgacagggaagacagccgcgagtag

SEQ ID NO: 123342 - DNA, 7068 bp, Artificial Sequence
  derived and/or modified sequence
atgctgcgaggacccgggccgggcctgttactcctcgctgtgcaatgtctgggaactgcagtgccctccacaggcgcttctaaaagtaaaaggcaagctcagcagatggtccagccacagtcacctgtagccgtttcacagagtaagcctggatgttacgataacgggaagcactatcagatcaatcaacagtgggagaggacatacttggggaacgcacttgtctgtacatgttatggcgggtcccggggatttaattgtgagagtaaacccgaagccgaggaaacgtgttttgataagtatacaggaaatacatatagggttggagatacgtacgaaaggccaaaggatagcatgatttgggactgtacatgcattggagctggacgagggcgaatctcatgcactatagcaaacagatgtcacgagggagggcagtcttataaaataggtgacacatggagaaggccacacgagacgggcggatatatgcttgaatgtgtgtgcctgggcaacggtaagggcgagtggacttgcaaacctattgccgaaaagtgtttcgatcacgcagcaggtaccagctacgtcgtgggagagacttgggaaaaaccctaccaaggatggatgatggtagactgtacgtgcctgggagagggctctggccgtatcacatgtaccagccgaaatagatgtaatgaccaggacactcgaacttcctaccgcatcggcgatacttggtctaagaaagacaatcgggggaatctgttacagtgtatctgtaccggaaatgggcggggggaatggaaatgtgaaagacatacaagcgtgcagacaacgtcctcaggatctgggccttttaccgacgttcgcgcagccgtgtaccaacctcaacctcatcctcagcccccaccctatgggcattgtgtaacagacagcggagttgtctattcagtaggaatgcagtggctaaaaacgcagggaaacaagcagatgctttgcacttgtctcggaaacggagtgtcctgtcaggagacagccgtgacccaaacgtatggagggaatagcaatggcgagccttgtgttttacctttcacttataatggacggactttctactcatgtacaaccgagggcaggcaggacggacacctctggtgcagtacgacctccaattacgaacaggatcagaagtatagtttttgtacagatcacacagtactcgtgcagacacggggcggaaattctaacggcgcattgtgtcacttcccttttctttataataatcacaactatacagattgcacatccgagggccgacgtgataatatgaagtggtgtggcacaactcaaaattatgacgctgaccagaagttcggtttttgcccaatggcagcacacgaagagatatgtactacgaatgagggggttatgtaccggattggggaccagtgggataaacagcatgacatgggccacatgatgagatgcacctgcgtgggaaacggacgtggcgagtggacatgtatagcatatagccagttaagggatcagtgtattgtggacgacataacctataacgtaaacgacacattccacaagcgacatgaggaaggccatatgctgaattgtacgtgttttgggcaggggaggggccggtggaaatgtgatcctgtcgaccaatgtcaagacagcgaaactggcacgttttatcagatcggcgatagttgggagaaatacgttcacggggttagatatcaatgctactgctatggcagaggcatcggagagtggcactgtcagccccttcagacttatccaagcagctccggaccggtggaagttttcattacagagaccccctcgcagcctaactcgcacccaattcagtggaacgcgcctcagccctcccacatcagcaagtatatcctgcgctggcgacctaagaactcagtagggaggtggaaagaagctaccataccaggacacctcaatagttatacaatcaaaggactcaaacctggagtcgtctatgaaggccagttgatttcaatccagcagtacggacaccaggaggtaactagatttgattttaccaccactagcacgagtacccccgtgacctccaacacagtcacaggtgagacaacccctttttctccattggtggccacctcagaaagtgttactgagatcactgcatctagctttgtggtcagctgggtcagcgcgtctgacaccgtgtcaggattccgtgtggaatacgaactaagcgaggaaggagatgaaccccagtacctggacctcccctctacagcgacatcagtcaatattcccgatctgttacctgggcgtaagtacattgtcaacgtctaccaaatttcagaagatggcgaacagagcctgatcttgtcaacctcccagaccacagctccagacgctccgcccgacacaaccgtggatcaagttgacgataccagtatcgtagttagatggagccgacctcaggcgccaattaccggatataggatagtgtattctccttccgttgaaggatcttccacagaactgaatctgccagagaccgctaactcagtgaccctgtctgaccttcagccaggagtccaatataacatcacaatttacgcagtcgaagaaaaccaagagtctacccctgtggtgatacagcaggaaacaaccggtacaccccgtagtgacacagtgccaagccccagagacctacaattcgtggaggtcactgacgttaaggtgactattatgtggacaccacccgaatcggccgtgaccggctaccgtgttgatgtaatcccagtgaatcttcccggtgaacacggacagagacttcctatctcaaggaacacatttgccgaggtgaccggattaagccccggggtcacctattatttcaaggtgtttgcagttagccatggaagagaatcaaagcccctgacagctcagcagaccactaagcttgatgccccaaccaatttgcagtttgtgaatgaaactgatagcaccgttcttgttcgatggactccccctagagcacagattacagggtataggctcaccgttggattaacacggagaggccagccccgtcagtataacgttggcccgtctgtctctaagtaccctctgcgcaacttacagcccgcatctgaatacactgtgtctctcgtggctattaagggcaaccaagaaagccccaaggcaacaggcgttttcacaaccctgcaaccaggtagtagcattcctccctacaataccgaagtaacggagaccaccatcgtgatcacctggacacctgctccccggataggcttcaaactcggcgtcagaccatcacaagggggtgaagcaccaagggaagtaacgagcgactctggttctatcgtagtctctggcctcacacctggcgtggaatacgtatacaccatccaggtcctacgggatggacaagagcgcgacgcccctattgttaacaaagtggtcactccattgtctcctccaacaaacctgcacctcgaggctaatccagatacaggggtactcaccgtgagctgggaacgcagtaccacacccgatatcactggttaccggatcacaacaacgcctacgaatggacagcagggcaatagccttgaggaagtcgtgcacgccgaccaaagcagctgcactttcgataatctgtctccaggcctcgaatacaacgtctctgtctatactgttaaagatgataaagagagtgtgccaatatccgataccatcatacctgccgtgccaccacccacagaccttcgtttcacaaatattgggcctgacaccatgcgagtcacctgggccccacccccaagtatagatcttacaaactttctagtacgttattccccagtgaaaaatgaagaggatgtcgccgaactgtccatatctccatctgacaatgcagtggttctgaccaatctgttgccaggtacagaatacgtggtcagcgtgagcagtgtctacgagcagcacgaatccactccactgagaggcaggcagaagactggactggactcaccgaccgggattgacttttccgacataacagccaactcatttaccgtgcattggattgcaccgagagccaccattaccggctatagaattcgccaccaccctgaacacttttccggccggccacgcgaagaccgagtccctcattcacgaaactccatcaccttaacaaaccttacccccggaaccgagtacgttgtctccatcgttgcgctgaatggaagggaagagtctccccttctgataggccagcagtctacagtttctgacgttccccgtgacctggaagtggtggccgctacacccacaagcctgttgatatcgtgggatgccccagcagtcacggttagatactaccgcattacatacggcgagaccggcgggaatagtccagtccaagagtttaccgtcccaggctcgaaaagcactgccaccatctccggactaaagccaggtgttgactatactattacggtgtacgcggtgacaggccggggcgactccccagcaagctcaaagcccatcagcatcaattataggacagagattgacaaaccttcccagatgcaagttacagatgtccaggataatagcatatctgtcaagtggctcccttccagttctcccgtcactggctacagagtcaccactacgccaaagaatggtcccggccccacaaaaaccaagacagcaggaccagaccagaccgaaatgaccatcgaagggctccagcccaccgtggagtatgtagtttccgtgtacgcccaaaatccatcaggcgagtcccagccacttgttcagacagccgttactaatattgacagacctaagggcttggcatttactgatgttgacgtcgattctattaagatcgcttgggaatctccacagggtcaggtatcaagatacagagtcacctatagcagtcccgaggatggaattcatgaacttttccccgcccccgacggggaggaagacacagccgaactacagggcctcaggccgggaagcgaatacactgtttccgtggtcgctttgcacgacgatatggaaagccagcccctcatcggaacacaaagcacagccattccagctcccaccgatctcaagtttacacaggtgactccaacctctcttagcgctcaatggacacctcccaacgtccagttgaccgggtacagggtcagagtgaccccaaaagaaaagaccggccccatgaaagaaatcaatctggctcccgattcaagtagtgtagtggtctctggtctcatggtagcgaccaagtacgaagtctccgtttacgcccttaaggatacactcacaagccgaccagcccagggagtcgttacaaccctcgaaaacgtttctccaccccgacgtgcaagagtgacagacgccaccgagacaaccattacaatatcctggcgcacgaagacagagactatcacaggctttcaggttgacgctgtccccgccaacgggcaaacgccgattcagagaactatcaagcctgatgtaagatcatatacaatcacaggacttcagcccggcaccgactacaaaatctacctctacacgctcaatgataatgctagatcctctccagtcgtaatagatgcctcaaccgccatcgacgccccttccaacttacggttcctggctacaactccaaatagcctgctggtctcttggcagccaccacgcgctagaattacaggttacattatcaaatacgaaaagcctggaagtccacccagagaagttgtcccaagacctcggcctggcgtgactgaagctacaataactggactggaacccggcaccgagtataccatatatgtaattgccctgaaaaacaatcaaaaaagcgagcccctgattggacgcaagaagaccgacgagctccctcagctggtgaccctgcctcaccccaacctgcacggaccagaaattctagatgtgccttcaaccgtccagaagactccttttgtcacccacccaggctatgatacaggaaacggtatccagctcccaggcacaagtggccagcagccatccgtaggacagcaaatgatttttgaggagcacggctttcgaagaactacgccccccaccaccgccacccctattaggcaccgccctagaccttatccccctaacgtcggacaggaagcgttgtctcagactacaatctcttgggccccgtttcaagataccagtgagtatattatttcctgccatcccgttggaaccgatgaggagccacttcagtttagggtaccaggtacatcgacttccgccactttaacagggttaactcgcggtgccacctacaatgtaatcgttgaggcacttaaggatcagcagcggcacaaggtcagagaggaagtggtgactgttgggaacagtgtgaacgaaggattaaatcaaccaactgacgatagctgtttcgacccatacacagtaagtcactacgccgtcggtgatgagtgggagagaatgtcagagtctggttttaagctgctgtgccaatgtcttggattcggatccggtcactttcggtgcgactccagcagatggtgtcatgacaacggggtgaattataagataggggaaaagtgggatagacagggagagaacggccagatgatgagctgtacctgtctcggaaatggcaaaggcgagtttaagtgcgacccacacgaggccacttgctacgatgacggcaaaacgtatcacgttggagagcaatggcagaaggaatatttgggtgcaatatgtagctgtacatgtttcggagggcaaagaggatggagatgtgacaactgtcgcagacccgggggcgagccatctcctgaaggcacaactggccagagttacaatcaatattcgcagcgctatcatcaaagaacaaataccaatgttaactgtcccattgaatgcttcatgccacttgacgtgcaggccgacagggaagattcaagggagtag

SEQ ID NO: 123343 - RNA, 7068 nt, Artificial Sequence
  derived and/or modified sequence
augcuccggggcccaggucccggacugcugcugcuggcagugcagugucuugggacagccguuccuucaaccggggcuuccaaguccaaacggcaggcacagcagauggugcaaccccagagcccugucgcaguaucacagagcaagccugggugcuacgacaacgguaaacauuaucagauaaaccagcagugggaacgaaccuacuugggcaaugcacuugucuguacguguuacggaggcagccgcgguuucaacugugagucaaaacccgaggcggaagagacauguuucgacaaauauacaggcaacacauacagagugggggauacuuacgagcgaccaaaggacuccaugaucugggacugcacgugcaucggcgcagggcgcgggaggauuucauguacaaucgcaaaucgcugccacgagggcggccagagcuauaagaucggagauaccuggcggcggccacacgagacaggaggcuacaugcuggaaugcgucugucugggaaauggcaaaggagaguggacuugcaagcccaucgccgaaaagugcuucgaccaugccgcagggacauccuaugugguaggcgagacuugggagaagccuuaucagggauggaugaugguugacuguaccugucugggcgaaggaucagggaggaucacaugcacuagccgcaaucgauguaaugaucaggauacccgcacgagcuauagaauaggggacacauggucgaagaaagacaaucgagggaaccuccugcaauguauuuguacaggcaacggacgcggugaauggaaaugugagagacauacuagcguccagacgacuagcagcggaaguggcccauuuacagaugugcgggcugcaguuuaucaaccucagccacacccucaaccuccuccauacgggcacugugugacugacagcggggugguguauagugucgggaugcaguggcuuaagacccagggcaauaagcaaaugcugugcacgugcuugggaaacggggugagcugccaagaaacagccgugacccagacguaugggggaaacucuaauggugagccuugcgugcuuccauucaccuacaacggaagaacauuuuauucuuguaccaccgagggccgccaagacgggcaucucuggugcuccacuacuagcaacuaugagcaggaccagaaguauaguuuuugcacagaucacaccguacuuguucaaaccaggggcggaaauaguaacggggcucugugccauuuccccuuucuuuacaacaaucacaacuauacugauuguacuuccgaaggacgcagggacaauaugaaaugguguggcacuacccaaaacuacgaugccgaucagaaauuuggcuuuuguccaauggccgcacacgaagagauuuguacaaccaacgagggcgugauguaucguaucggugaccaaugggacaagcaacacgacaugggccauaugaugagguguaccugcgugggcaauggccgcggagaguggaccuguauugcuuacucccagcuaagggaucagugcauaguugaugacauuacuuauaacguuaaugauacuuuucacaaacggcacgaagaaggccacaugcuuaacuguacuugcuuuggacagggacgugguagguggaaaugcgacccagucgaucaaugccaggacagcgaaaccggaacguucuaucagaucggugauuccugggagaaguacguccauggggugcgguaccaaugcuacuguuaugguaggggaaucggggaguggcauugccagccccuucagacuuauccaagcagcuccggaccgguggaaguuuucauuacagagacccccucgcagccuaacucgcacccaauucaguggaacgcgccucagcccucccacaucagcaaguauauccugcgcuggcgaccuaagaacucaguagggagguggaaagaagcuaccauaccaggacaccucaauaguuauacaaucaaaggacucaaaccuggagucgucuaugaaggccaguugauuucaauccagcaguacggacaccaggagguaacuagauuugauuuuaccaccacuuccacauccacaccagucacuagcaauacuguaaccggcgagaccaccccuuuuagccccuuggucgcuaccagugaaucuguuacagagaucacugcuucaaguuucguggucagcugggugucugcauccgacaccgucuccggauuuagagucgaauaugaguugagcgaggagggcgaugagccacaauacuuggaccugccuagcaccgcuaccucugucaacaucccagauuuacugccaggacguaaauacauuguaaacguguaccagaucucagaggacggugaacaaucguuaauucuuuccacuucccaaacaaccgcaccugacgcgccacccgacacgacaguggaccagguggaugauaccagcauagugguccgaugguccagaccgcaggcgccaaucaccggcuaucguauaguguacaguccuuccguagaaggcuccucgacugagcucaaccugccagagacggcaaacagugugacccuaagcgaccugcagccuggugugcaguauaauaucacuauuuaugcuguggaagaaaaccaagagagcacccccguagugauucagcaagagacaacugggaccccucgcagcgauacaguacccagcccucgagaccuucaguuuguugagguuaccgaugugaaaguuacaaucauguggaccccccccgagagugcaguuacugguuauagggucgaugugaucccugugaaucuuccuggggagcauggacagaggcucccgauaagcaggaacacauuugcugaagugacuggacuaagcccgggcgugacuuauuacuucaaaguuuuugcagugagccauggacgagaaagcaagccucuaacagcccaacagacuacaaaguuggaugcccccaccaaucugcaguuugucaacgaaaccgacuccacugugcuggugagguggaccccccccagggcccaaauuacuggguaucguuuaaccguugguuuaacgagacggggacagccgcgccaguauaaugugggaccaucuguguccaaguaucccuugagaaauuuacaaccagcgagugaguacaccgucucccugguggcaauuaagggcaaccaagaaucccccaaagcgaccggagucuucaccacgcugcagccaggcucgagcauucccccauauaauacugagguuacagaaacaacaauugugauuaccuggacccccgcaccaagaaucggguuuaagcugggcguaaggcccagccaggguggagaagcuccccgagaagucaccagugauucgggaucuauaguugucucgggauugacaccuggaguugaguauguauauacaauucagguccuuagagacgggcaagaacgggacgccccaauugucaauaaagugguaacuccguugagucccccaacgaauuugcaccuggaggcaaaucccgauaccggagugcugacugugucaugggaaagauccacaacuccagacaucacuggcuauagaauuacuacuacucccacaaauggccagcagggaaacucacuagaggagguuguucacgcugaccagagcucauguacguuugacaaccuuaguccaggccuggaguauaaugugagcguguauaccguuaaggaugauaaagaaagcgucccuaucucugacacuauuauccccgcugucccucccccaacagaccugagguucaccaauauuggcccagauaccaugcgcguuacuugggcaccaccuccuuccauugaccugacaaacuuuuuggugagauauagcccuguuaagaacgaggaagauguggcagagcugucuauuuccccauccgacaaugcugugguuuugaccaaccuucugcccggcacugaguacguaguuuccguuucuuccguguacgagcagcacgagucgacuccccugagggggagacagaagacgggacuggacucuccuacaggaauugauuucagcgauaucaccgcaaacagcuucacagugcacuggaucgccccacgggcuaccaucacuggcuaucggauccggcaccacccggagcauuucucaggccgaccuagggaggaucggguuccccacaguagaaacucuauuacauugacaaaccuuacccccgggacagaauauguagugucuauuguggcacugaauggccgcgaagaguccccacugcuaauuggacaacaguccaccguuucugauguaccccgggacuuagaggugguggccgccacaccuaccucacugcugaucuccugggacgcaccugcagugacaguuagauauuaucgcauuaccuacggugagaccgggggaaacagcccaguucaggaguucacggugccggggaguaaauccaccgcaaccauuucaggucugaagcccgggguggauuacacuaucacagucuacgcaguuacuggccgcggugacagucccgcaagcaguaaacccaucucaaucaauuaccgaaccgagauagacaagcccagccagaugcaggugaccgacgugcaggacaauaguauuaguguuaaauggcuuccuaguagcucaccugucaccggcuauaggguuacaaccaccccuaagaacgguccugggcccacaaagaccaagacagcugggccagaucagacugagaugacgaucgagggacuccagccuaccguggaauauguuguguccguauacgcacagaacccaaguggagagucucagccuuuggugcagaccgcaguaaccaacauagaucggcccaaaggcuuggcauuuacagacguggacgucgauucaaucaagauugcgugggaaaguccucagggacagguuucacguuaccgcgugaccuauaguaguccagaagacgguauucacgagcuuuucccagcuccggauggggaagaagauacagccgaacuccaaggguuacggccagggagugaauacacuguaagcgugguagcccuccaugacgacauggagucgcagccucucaucggaacgcagucuaccgccauaccugcccccacagaccugaaauuuacccaggugacuccaaccucucuaucugcgcaguggacuccuccaaacguccaguuaacugguuauaggguaaggguuacuccaaaagagaagacagggccaaugaaagagaucaaccuagccccugauucuucuucugucguugucaguggccugaugguugcgacuaaguaugaagugagugucuaugcccuuaaagauacucucacgagccggccagcacagggcguaguaacuacacucgagaauguuucaccaccucgucgcgcacgcgucacagacgcaacugagacgacaauuacuauaucauggagaacaaagacagagaccaucaccggguuccaggucgaugccguaccagccaacggucaaacuccuauccaacggaccaucaaacccgauguccgcucuuauacaaucaccggacugcagccuggaacugauuauaagauuuaccuguauacccugaacgauaaugcccggaguucccccguagucaucgacgcuaguaccgccauugacgcuccaaguaaucuacgguuucuagcgacgacaccaaauucccugcuggugagcuggcagccuccccgggcacggauuacuggauacauuauuaaguaugagaaaccaggcucuccacccagggagguugugccacgcccaaggcccggcguuacggaagccacgaucacuggucuggagcccgggacagaguauaccauauacgugaucgcacucaaaaacaaccagaaguccgaaccucucauuggccgcaaaaaaaccgaugaacugccacaacuaguuacuuugccccaccccaaucugcacggucccgagauucuggaugugcccuccacagugcagaaaacacccuucgugacacauccaggcuaugauacuggcaacggcauccagcugcccgggaccagugggcagcagccuuccgucgggcagcagaugauuuucgaagagcacggcuucagaagaacaacucccccuacgacagcgaccccuauucgucaucgaccaagaccuuacccaccaaauguaggccaggaggcccuuucccagacuacaaucagcugggcccccuuucaggauaccuccgaauacauuauaucaugccaccccgugggcaccgacgaggagccccuccaguuuagggucccuggaaccaguacaucagcuacucugacaggauugacccgcggagcaacguacaacgugaucguggaggcauugaaggaccagcaaaggcacaaggugagagaggagguagugacggucggaaacucuguuaaugagggucugaaccaacccacugaugauuccugcuucgauccauacaccgugucacacuacgcugugggagaugaaugggaaagaaugagcgaauccgguuucaaauuacuaugccagugucuggguuucgguucugggcauuuccgaugugauucuagcagguggugucacgacaauggagugaacuacaaaaucggagaaaagugggaucggcagggagagaacggccagaugaugagcuguacuugucuuggcaacggaaagggugaguucaagugcgacccacacgaggcgacuugcuacgacgauggcaagacauaccacguaggagagcaguggcagaaggaauaucugggcgcaauuuguucuugcacaugcuucggcggccagaggggauggcggugcgauaacuguaggaggccaggcggggagcccucacccgaggggacgacaggucaguccuacaaucaguauucucagagguaccaccagagaacuaacacuaaugugaacugucccauugagugcuucaugccccuggacgugcaggccgacagggaagacagccgcgaguag

SEQ ID NO: 123344 - RNA, 7068 nt, Artificial Sequence
  derived and/or modified sequence
augcugcgaggacccgggccgggccuguuacuccucgcugugcaaugucugggaacugcagugcccuccacaggcgcuucuaaaaguaaaaggcaagcucagcagaugguccagccacagucaccuguagccguuucacagaguaagccuggauguuacgauaacgggaagcacuaucagaucaaucaacagugggagaggacauacuuggggaacgcacuugucuguacauguuauggcgggucccggggauuuaauugugagaguaaacccgaagccgaggaaacguguuuugauaaguauacaggaaauacauauaggguuggagauacguacgaaaggccaaaggauagcaugauuugggacuguacaugcauuggagcuggacgagggcgaaucucaugcacuauagcaaacagaugucacgagggagggcagucuuauaaaauaggugacacauggagaaggccacacgagacgggcggauauaugcuugaaugugugugccugggcaacgguaagggcgaguggacuugcaaaccuauugccgaaaaguguuucgaucacgcagcagguaccagcuacgucgugggagagacuugggaaaaacccuaccaaggauggaugaugguagacuguacgugccugggagagggcucuggccguaucacauguaccagccgaaauagauguaaugaccaggacacucgaacuuccuaccgcaucggcgauacuuggucuaagaaagacaaucgggggaaucuguuacaguguaucuguaccggaaaugggcggggggaauggaaaugugaaagacauacaagcgugcagacaacguccucaggaucugggccuuuuaccgacguucgcgcagccguguaccaaccucaaccucauccucagcccccacccuaugggcauuguguaacagacagcggaguugucuauucaguaggaaugcaguggcuaaaaacgcagggaaacaagcagaugcuuugcacuugucucggaaacggaguguccugucaggagacagccgugacccaaacguauggagggaauagcaauggcgagccuuguguuuuaccuuucacuuauaauggacggacuuucuacucauguacaaccgagggcaggcaggacggacaccucuggugcaguacgaccuccaauuacgaacaggaucagaaguauaguuuuuguacagaucacacaguacucgugcagacacggggcggaaauucuaacggcgcauugugucacuucccuuuucuuuauaauaaucacaacuauacagauugcacauccgagggccgacgugauaauaugaagugguguggcacaacucaaaauuaugacgcugaccagaaguucgguuuuugcccaauggcagcacacgaagagauauguacuacgaaugaggggguuauguaccggauuggggaccagugggauaaacagcaugacaugggccacaugaugagaugcaccugcgugggaaacggacguggcgaguggacauguauagcauauagccaguuaagggaucaguguauuguggacgacauaaccuauaacguaaacgacacauuccacaagcgacaugaggaaggccauaugcugaauuguacguguuuugggcaggggaggggccgguggaaaugugauccugucgaccaaugucaagacagcgaaacuggcacguuuuaucagaucggcgauaguugggagaaauacguucacgggguuagauaucaaugcuacugcuauggcagaggcaucggagaguggcacugucagccccuucagacuuauccaagcagcuccggaccgguggaaguuuucauuacagagacccccucgcagccuaacucgcacccaauucaguggaacgcgccucagcccucccacaucagcaaguauauccugcgcuggcgaccuaagaacucaguagggagguggaaagaagcuaccauaccaggacaccucaauaguuauacaaucaaaggacucaaaccuggagucgucuaugaaggccaguugauuucaauccagcaguacggacaccaggagguaacuagauuugauuuuaccaccacuagcacgaguacccccgugaccuccaacacagucacaggugagacaaccccuuuuucuccauugguggccaccucagaaaguguuacugagaucacugcaucuagcuuuguggucagcugggucagcgcgucugacaccgugucaggauuccguguggaauacgaacuaagcgaggaaggagaugaaccccaguaccuggaccuccccucuacagcgacaucagucaauauucccgaucuguuaccugggcguaaguacauugucaacgucuaccaaauuucagaagauggcgaacagagccugaucuugucaaccucccagaccacagcuccagacgcuccgcccgacacaaccguggaucaaguugacgauaccaguaucguaguuagauggagccgaccucaggcgccaauuaccggauauaggauaguguauucuccuuccguugaaggaucuuccacagaacugaaucugccagagaccgcuaacucagugacccugucugaccuucagccaggaguccaauauaacaucacaauuuacgcagucgaagaaaaccaagagucuaccccuguggugauacagcaggaaacaaccgguacaccccguagugacacagugccaagccccagagaccuacaauucguggaggucacugacguuaaggugacuauuauguggacaccacccgaaucggccgugaccggcuaccguguugauguaaucccagugaaucuucccggugaacacggacagagacuuccuaucucaaggaacacauuugccgaggugaccggauuaagccccggggucaccuauuauuucaagguguuugcaguuagccauggaagagaaucaaagccccugacagcucagcagaccacuaagcuugaugccccaaccaauuugcaguuugugaaugaaacugauagcaccguucuuguucgauggacucccccuagagcacagauuacaggguauaggcucaccguuggauuaacacggagaggccagccccgucaguauaacguuggcccgucugucucuaaguacccucugcgcaacuuacagcccgcaucugaauacacugugucucucguggcuauuaagggcaaccaagaaagccccaaggcaacaggcguuuucacaacccugcaaccagguaguagcauuccucccuacaauaccgaaguaacggagaccaccaucgugaucaccuggacaccugcuccccggauaggcuucaaacucggcgucagaccaucacaagggggugaagcaccaagggaaguaacgagcgacucugguucuaucguagucucuggccucacaccuggcguggaauacguauacaccauccagguccuacgggauggacaagagcgcgacgccccuauuguuaacaaaguggucacuccauugucuccuccaacaaaccugcaccucgaggcuaauccagauacagggguacucaccgugagcugggaacgcaguaccacacccgauaucacugguuaccggaucacaacaacgccuacgaauggacagcagggcaauagccuugaggaagucgugcacgccgaccaaagcagcugcacuuucgauaaucugucuccaggccucgaauacaacgucucugucuauacuguuaaagaugauaaagagagugugccaauauccgauaccaucauaccugccgugccaccacccacagaccuucguuucacaaauauugggccugacaccaugcgagucaccugggccccacccccaaguauagaucuuacaaacuuucuaguacguuauuccccagugaaaaaugaagaggaugucgccgaacuguccauaucuccaucugacaaugcagugguucugaccaaucuguugccagguacagaauacguggucagcgugagcagugucuacgagcagcacgaauccacuccacugagaggcaggcagaagacuggacuggacucaccgaccgggauugacuuuuccgacauaacagccaacucauuuaccgugcauuggauugcaccgagagccaccauuaccggcuauagaauucgccaccacccugaacacuuuuccggccggccacgcgaagaccgagucccucauucacgaaacuccaucaccuuaacaaaccuuacccccggaaccgaguacguugucuccaucguugcgcugaauggaagggaagagucuccccuucugauaggccagcagucuacaguuucugacguuccccgugaccuggaagugguggccgcuacacccacaagccuguugauaucgugggaugccccagcagucacgguuagauacuaccgcauuacauacggcgagaccggcgggaauaguccaguccaagaguuuaccgucccaggcucgaaaagcacugccaccaucuccggacuaaagccagguguugacuauacuauuacgguguacgcggugacaggccggggcgacuccccagcaagcucaaagcccaucagcaucaauuauaggacagagauugacaaaccuucccagaugcaaguuacagauguccaggauaauagcauaucugucaaguggcucccuuccaguucucccgucacuggcuacagagucaccacuacgccaaagaauggucccggccccacaaaaaccaagacagcaggaccagaccagaccgaaaugaccaucgaagggcuccagcccaccguggaguauguaguuuccguguacgcccaaaauccaucaggcgagucccagccacuuguucagacagccguuacuaauauugacagaccuaagggcuuggcauuuacugauguugacgucgauucuauuaagaucgcuugggaaucuccacagggucagguaucaagauacagagucaccuauagcagucccgaggauggaauucaugaacuuuuccccgcccccgacggggaggaagacacagccgaacuacagggccucaggccgggaagcgaauacacuguuuccguggucgcuuugcacgacgauauggaaagccagccccucaucggaacacaaagcacagccauuccagcucccaccgaucucaaguuuacacaggugacuccaaccucucuuagcgcucaauggacaccucccaacguccaguugaccggguacagggucagagugaccccaaaagaaaagaccggccccaugaaagaaaucaaucuggcucccgauucaaguaguguaguggucucuggucucaugguagcgaccaaguacgaagucuccguuuacgcccuuaaggauacacucacaagccgaccagcccagggagucguuacaacccucgaaaacguuucuccaccccgacgugcaagagugacagacgccaccgagacaaccauuacaauauccuggcgcacgaagacagagacuaucacaggcuuucagguugacgcuguccccgccaacgggcaaacgccgauucagagaacuaucaagccugauguaagaucauauacaaucacaggacuucagcccggcaccgacuacaaaaucuaccucuacacgcucaaugauaaugcuagauccucuccagucguaauagaugccucaaccgccaucgacgccccuuccaacuuacgguuccuggcuacaacuccaaauagccugcuggucucuuggcagccaccacgcgcuagaauuacagguuacauuaucaaauacgaaaagccuggaaguccacccagagaaguugucccaagaccucggccuggcgugacugaagcuacaauaacuggacuggaacccggcaccgaguauaccauauauguaauugcccugaaaaacaaucaaaaaagcgagccccugauuggacgcaagaagaccgacgagcucccucagcuggugacccugccucaccccaaccugcacggaccagaaauucuagaugugccuucaaccguccagaagacuccuuuugucacccacccaggcuaugauacaggaaacgguauccagcucccaggcacaaguggccagcagccauccguaggacagcaaaugauuuuugaggagcacggcuuucgaagaacuacgccccccaccaccgccaccccuauuaggcaccgcccuagaccuuaucccccuaacgucggacaggaagcguugucucagacuacaaucucuugggccccguuucaagauaccagugaguauauuauuuccugccaucccguuggaaccgaugaggagccacuucaguuuaggguaccagguacaucgacuuccgccacuuuaacaggguuaacucgcggugccaccuacaauguaaucguugaggcacuuaaggaucagcagcggcacaaggucagagaggaaguggugacuguugggaacagugugaacgaaggauuaaaucaaccaacugacgauagcuguuucgacccauacacaguaagucacuacgccgucggugaugagugggagagaaugucagagucugguuuuaagcugcugugccaaugucuuggauucggauccggucacuuucggugcgacuccagcagauggugucaugacaacggggugaauuauaagauaggggaaaagugggauagacagggagagaacggccagaugaugagcuguaccugucucggaaauggcaaaggcgaguuuaagugcgacccacacgaggccacuugcuacgaugacggcaaaacguaucacguuggagagcaauggcagaaggaauauuugggugcaauauguagcuguacauguuucggagggcaaagaggauggagaugugacaacugucgcagacccgggggcgagccaucuccugaaggcacaacuggccagaguuacaaucaauauucgcagcgcuaucaucaaagaacaaauaccaauguuaacugucccauugaaugcuucaugccacuugacgugcaggccgacagggaagauucaagggaguag

SEQ ID NO: 123345 - protein, 379 aa, Artificial Sequence
  derived and/or modified sequence
MAATEGVGEAAQGGEPGQPAQPPPQPHPPPPQQQHKEEMAAEAGEAVASPMDDGFVSLDSPSYVLYRDRAEWADIDPVPQNDGPNPVVQIIYSDKFRDVYDYFRAVLQRDERSERAFKLTRDAIELNAANYTVWHFRRVLLKSLQKDLHEEMNYITAIIEEQPKNYQVWHHRRVLVEWLRDPSQELEFIADILNQDAKNYHAWQHRQWVIQEFKLWDNELQYVDQLLKEDVRNNSVWNQRYFVISNTTGYNDRAVLEREVQYTLEMIKLVPHNESAWNYLKGILQDRGLSKYPNLLNQLLDLQPSHSSPYLIAFLVDIYEDMLENQCDNKEDILNKALELCEILAKEKDTIRKEYWRYIGRSLQSKHSTENDSPTNVQQ

SEQ ID NO: 123346 - protein, 312 aa, Artificial Sequence
  derived and/or modified sequence
MAATEGVGEAAQGGEPGQPAQPPPQPHPPPPQQQHKEEMAAEAGEAVASPMDDGFVSLDSPSYVLYRHFRRVLLKSLQKDLHEEMNYITAIIEEQPKNYQVWHHRRVLVEWLRDPSQELEFIADILNQDAKNYHAWQHRQWVIQEFKLWDNELQYVDQLLKEDVRNNSVWNQRYFVISNTTGYNDRAVLEREVQYTLEMIKLVPHNESAWNYLKGILQDRGLSKYPNLLNQLLDLQPSHSSPYLIAFLVDIYEDMLENQCDNKEDILNKALELCEILAKEKDTIRKEYWRYIGRSLQSKHSTENDSPTNVQQ

SEQ ID NO: 123347 - DNA, 1840 bp, Artificial Sequence
  derived and/or modified sequence
cgcgcaaactcgcggcggacgcagccagcacccgcagccagcacccgcacactcccacccataccccggcagcccgccaagactctctggcccgcacctctatggtaggaaacccagaaaacaggaagtggcctcgagagggggaagggaggggcggggcctccgccaccacctcagctgcggaccgaggcgagatggcggccaccgagggggtcggggaggctgcgcaagggggcgagcccgggcagccggcgcaacccccgccccagccgcacccaccgccgccccagcagcagcacaaggaagagatggcggccgaggctggggaagccgtggcgtcccccatggacgacgggtttgtgagcctggactcgccctcctatgtcctgtacagggacagagcagaatgggctgatatagatccggtgccgcagaatgatggccccaatcccgtggtccagatcatttatagtgacaaatttagagatgtttatgattacttccgagctgtcctgcagcgtgatgaaagaagtgaacgagcttttaagctaacccgggatgctattgagttaaatgcagccaattatacagtgtggcatttccggagagttcttttgaagtcacttcagaaggatctacatgaggaaatgaactacatcactgcaataattgaggagcagcccaaaaactatcaagtttggcatcataggcgagtattagtggaatggctaagagatccatctcaggagcttgaatttattgctgatattcttaatcaggatgcaaagaattatcatgcctggcagcatcgacaatgggttattcaggaatttaaactttgggataatgagctgcagtatgtggaccaacttctgaaagaggatgtgagaaataactctgtctggaaccaaagatacttcgttatttctaacaccactggctacaatgatcgtgctgtattggagagagaagtccaatacactctggaaatgattaaactagtaccacataatgaaagtgcatggaactatttgaaagggattttgcaggatcgtggtctttccaaatatcctaatctgttaaatcaattacttgatttacaaccaagtcatagttccccctacctaattgcctttcttgtggatatctatgaagacatgctagaaaatcagtgtgacaataaggaagacattcttaataaagcattagagttatgtgaaatcctagctaaagaaaaggacactataagaaaggaatattggagatacattggaagatcccttcaaagcaaacacagcacagaaaatgactcaccaacaaatgtacagcaataacaccatccagaagaacttgatggaatgcttttattttttattaagggaccctgcaggagtttcacacgagagtggtccttccctttgcctgtggtgtaaaagtgcatcacacaggtattgctttttaacaagaactgatgctccttgggtgctgctgctactcagactagctctaagtaatgtgattcttctaaagcaaagtcattggatgggaggaggaagaaaaagtcccataaaggaacttttgtagtcttatcaacatataatctaatcccttagcatcagctcctccctcagtggtacatgcgtcaagatttgtagcagtaataactgcaggtcacttgtatgtaatggatgtgaggtagccgaagtttggttcagtaagcagggaatacagtcgttccatcagagctggtctgcacactcacattatcttgctatcactgtaaccaactaatgccaaaagaacggttttgtaataaaattatagctgtatctaaaaacaa

SEQ ID NO: 123348 - DNA, 1445 bp, Artificial Sequence
  derived and/or modified sequence
gaggcgagatggcggccaccgagggggtcggggaggctgcgcaagggggcgagcccgggcagccggcgcaacccccgccccagccgcacccaccgccgccccagcagcagcacaaggaagagatggcggccgaggctggggaagccgtggcgtcccccatggacgacgggtttgtgagcctggactcgccctcctatgtcctgtacaggcatttccggagagttcttttgaagtcacttcagaaggatctacatgaggaaatgaactacatcactgcaataattgaggagcagcccaaaaactatcaagtttggcatcataggcgagtattagtggaatggctaagagatccatctcaggagcttgaatttattgctgatattcttaatcaggatgcaaagaattatcatgcctggcagcatcgacaatgggttattcaggaatttaaactttgggataatgagctgcagtatgtggaccaacttctgaaagaggatgtgagaaataactctgtctggaaccaaagatacttcgttatttctaacaccactggctacaatgatcgtgctgtattggagagagaagtccaatacactctggaaatgattaaactagtaccacataatgaaagtgcatggaactatttgaaagggattttgcaggatcgtggtctttccaaatatcctaatctgttaaatcaattacttgatttacaaccaagtcatagttccccctacctaattgcctttcttgtggatatctatgaagacatgctagaaaatcagtgtgacaataaggaagacattcttaataaagcattagagttatgtgaaatcctagctaaagaaaaggacactataagaaaggaatattggagatacattggaagatcccttcaaagcaaacacagcacagaaaatgactcaccaacaaatgtacagcaataacaccatccagaagaacttgatggaatgcttttattttttattaagggaccctgcaggagtttcacacgagagtggtccttccctttgcctgtggtgtaaaagtgcatcacacaggtattgctttttaacaagaactgatgctccttgggtgctgctgctactcagactagctctaagtaatgtgattcttctaaagcaaagtcattggatgggaggaggaagaaaaagtcccataaaggaacttttgtagtcttatcaacatataatctaatcccttagcatcagctcctccctcagtggtacatgcgtcaagatttgtagcagtaataactgcaggtcacttgtatgtaatggatgtgaggtagccgaagtttggttcagtaagcagggaatacagtcgttccatcagagctggtctgcacactcacattatcttgctatcactgtaaccaactaatgccaaaagaacggttttgtaataaaattatagctgtatct

SEQ ID NO: 123349 - DNA, 1140 bp, Artificial Sequence
  derived and/or modified sequence
atggccgctacagaaggggtaggagaggccgcccagggaggtgagcccggccagccggcacagcctccccctcagccgcacccacccccgccgcagcagcagcacaaggaggagatggccgccgaagcaggtgaagcagtcgccagccctatggacgatggctttgtgtcactggacagcccatcctacgttctgtaccgggatcgcgctgagtgggccgacattgatcccgtgccccaaaatgacggccctaaccctgtggttcagatcatttactccgataaatttcgcgacgtttacgattactttcgggccgtgctgcagagggacgagaggtccgagcgcgcgtttaagctcacacgcgatgccatcgaactcaacgccgccaattatactgtgtggcacttccggagagtcttactgaaatctctccaaaaggacttgcatgaggaaatgaactacatcacagctattatcgaggagcagcctaagaactatcaggtgtggcatcatcggagggtgctcgtcgagtggttgagggacccttcccaggagcttgagttcatcgcagatattctcaatcaggatgcaaaaaactatcatgcatggcagcaccgacaatgggtgattcaagagttcaagctgtgggataatgaactgcagtacgtggatcaattattgaaggaggacgtcagaaataactccgtctggaaccagcggtactttgtgatttccaacaccaccggttacaacgatagggccgtgcttgagcgggaggtccagtacacattggagatgataaaactggtcccccacaatgaatccgcctggaactatctgaaggggattttgcaagaccggggcctctctaaataccccaacctgctgaaccagctgctcgatcttcaaccgtctcattccagcccatacctaattgccttcctcgtagacatctatgaagacatgctggaaaaccagtgcgataacaaggaggacattctgaataaggcactggagttgtgtgagattttggctaaagagaaggatacaatccgcaaggaatactggcggtatatcggccggtctctgcagtccaagcactcaacagaaaacgattcccccaccaatgttcagcagtag

SEQ ID NO: 123350 - DNA, 939 bp, Artificial Sequence
  derived and/or modified sequence
atggccgcgacagaaggcgtaggtgaagctgcacagggtggggagcctggccagcctgcacaaccccccccacaacctcaccctcctccgccgcagcaacagcacaaagaagaaatggccgcagaagccggagaggccgtcgcctctcccatggacgatggctttgtctccctggatagtccatcttacgtgctatatagacacttccgcagggtcttgttgaagtccttgcagaaggacctgcatgaggaaatgaactacattaccgctatcattgaagaacagccaaaaaactatcaagtttggcaccatcgaagagtgttagtggaatggttaagagatccaagccaggagctggagtttatcgccgatatcctaaaccaggatgctaagaattatcatgcgtggcagcataggcagtgggtgatccaggagtttaaactgtgggataatgagctccagtatgtagaccagttattgaaagaggacgtgagaaataacagcgtgtggaaccaacgttactttgtgatctccaacactacaggctataacgacagggccgtcttagagcgggaggttcagtatacactcgagatgattaaacttgtgccccacaatgagtccgcttggaactacctgaagggcatcctacaagatcgggggctaagcaagtatcccaatttgttgaaccaactgctggacttgcagccttcgcacagctccccctacctaatagcatttttggttgacatttacgaagacatgctggaaaaccaatgcgacaataaggaggatattttgaacaaggctctggaattatgcgagattctcgccaaggaaaaggatactataaggaaggagtattggcggtacatcggcagatccctgcaaagtaagcactccacagaaaacgatagtccaaccaacgttcagcagtag

SEQ ID NO: 123351 - DNA, 1140 bp, Artificial Sequence
  derived and/or modified sequence
atggccgccacagagggcgtgggggaggccgcccagggcggggagcccggccagcctgcccagcccccaccccagccccaccccccaccaccccagcagcagcacaaggaggagatggctgctgaggccggggaggccgtggccagccccatggatgatggctttgtgtccctggacagccccagctatgtgctgtacagagacagagctgagtgggccgacattgatcctgtgccccagaatgatggccccaaccctgtggtgcagatcatctacagcgacaagttcagagatgtgtatgactacttccgggctgtgctgcagagagatgagaggtctgagcgggccttcaagctgaccagagatgccatcgagctgaatgctgccaactacacagtgtggcacttcagaagagtgctgctgaagagcctgcagaaggacctgcacgaggagatgaactacatcacagccatcatcgaggagcagcccaagaactaccaggtgtggcaccaccggcgggtgctggtggagtggctgcgggaccccagccaggagctggagttcatcgctgacatcctgaaccaggatgccaagaactaccacgcctggcagcaccggcagtgggtgatccaggagttcaagctgtgggacaatgagctgcagtatgtggaccagctgctgaaggaggatgtgaggaacaacagcgtgtggaaccagcgctacttcgtcatcagcaacaccaccggctacaatgacagagctgtgctggagcgggaggtgcagtacaccctggagatgatcaagctggtgccccacaatgaaagtgcctggaactacctgaagggcatcctgcaggaccggggcctgagcaagtaccccaacctgctgaaccagctgctggacctgcagcccagccacagcagcccctacctgattgccttcctggtggacatctatgaggacatgctggagaaccagtgtgacaacaaggaggacatcctgaacaaggccctggagctgtgtgagatcctggccaaggagaaggacaccatcaggaaggagtactggagatacatcggccgcagcctgcagagcaagcacagcacagaaaatgacagccccaccaacgtgcagcagtag

SEQ ID NO: 123352 - DNA, 939 bp, Artificial Sequence
  derived and/or modified sequence
atggccgccacagagggcgtgggggaggccgcccagggcggggagcccggccagcctgcccagcccccaccccagccccaccccccaccaccccagcagcagcacaaggaggagatggctgctgaggccggggaggccgtggccagccccatggatgatggctttgtgtccctggacagccccagctatgtgctgtaccgccacttccggcgggtgctgctgaagagcctgcagaaggacctgcacgaggagatgaactacatcacagccatcatcgaggagcagcccaagaactaccaggtgtggcaccacagaagagtgctggtggagtggctgcgggaccccagccaggagctggagttcatcgctgacatcctgaaccaggatgccaagaactaccacgcctggcagcaccggcagtgggtgatccaggagttcaagctgtgggacaatgagctgcagtatgtggaccagctgctgaaggaggatgtgaggaacaacagcgtgtggaaccagcgctactttgtgatcagcaacaccaccggctacaatgacagagctgtgctggagcgggaggtgcagtacaccctggagatgatcaagctggtgccccacaatgaaagtgcctggaactacctgaagggcatcctgcaggaccggggcctgagcaagtaccccaacctgctgaaccagctgctggacctgcagcccagccacagcagcccctacctgattgccttcctggtggacatctatgaggacatgctggagaaccagtgtgacaacaaggaggacatcctgaacaaggccctggagctgtgtgagatcctggccaaggagaaggacaccatcaggaaggagtactggagatacatcggccgcagcctgcagagcaagcacagcacagaaaatgacagccccaccaacgtgcagcagtag

SEQ ID NO: 123353 - DNA, 1140 bp, Artificial Sequence
  derived and/or modified sequence
atggccgccaccgagggcgtgggcgaggccgcccagggcggcgagcctggacagcccgctcagccccctcctcagcctcatccacctcctccacagcagcagcataaagaagaaatggccgcagaggccggtgaggccgtggcctctcccatggacgacggctttgtgagtctggactctccaagctatgtactgtaccgcgaccgggctgagtgggccgacatcgatccggtgccgcagaacgacgggcccaatcctgtggtgcagattatctacagtgataagtttcgtgacgtttacgattattttagggctgtgctgcagagagatgagaggagtgagagggcctttaaacttacaagagacgcaattgagctaaacgctgcaaactatacagtgtggcacttccggcgtgttctgttaaaatctctgcagaaggacctccatgaagaaatgaactatataaccgcaattattgaagagcaacccaagaattatcaagtttggcatcaccggagagtcctcgtggagtggctgagagatcccagccaggaactggaatttattgcagatatcttaaatcaggacgctaaaaactaccacgcctggcagcaccgtcagtgggtgattcaggagtttaaattatgggacaatgagcttcagtacgtggaccagttgctcaaggaggacgtgcgcaataactctgtgtggaatcagaggtacttcgtcatttcaaacaccactggatacaatgacagggcggtccttgagagggaggtgcagtatactcttgagatgattaaactcgtgccccacaatgaatctgcctggaactacctgaaaggaattctgcaggatcggggtctctccaagtatccgaatctcctgaatcaactgttggatttgcagccatctcacagcagcccctacctaatcgctttcctggtcgatatctatgaggacatgcttgagaaccagtgtgacaacaaagaagacattctgaacaaggctctcgagctatgtgaaattttggctaaagagaaggacaccataaggaaagagtattggcgatacattggccgctctcttcagagtaaacacagcacggaaaatgatagtcccacgaatgttcagcagtag

SEQ ID NO: 123354 - DNA, 939 bp, Artificial Sequence
  derived and/or modified sequence
atggccgccaccgagggcgtgggcgaggccgcccagggcggcgagccaggtcagcccgcacaacctccacctcagcctcacccgcccccgccgcagcagcagcacaaagaggaaatggcagctgaggcaggcgaggcagtggcctcaccaatggacgatggattcgtctcgctggactccccctcctatgtcctctatcgccattttagaagagtgttgcttaaatcgctacagaaagacctccatgaagaaatgaactacatcacagccatcattgaggagcagccaaagaactaccaagtttggcaccaccggagggttctagtagagtggcttagagatccctctcaagaactggaattcatcgcagacatcctgaatcaagatgcaaagaactatcacgcatggcagcaccgccagtgggtcattcaggaattcaagctgtgggacaacgaactgcagtatgtcgaccagctgcttaaggaggatgtgagaaacaattctgtgtggaatcagcgctattttgtcatttccaacaccacaggctataacgaccgcgctgtactagaacgcgaggttcagtatacacttgaaatgatcaagctcgtcccacataatgagtccgcgtggaattaccttaaagggatcctgcaagacaggggcctgtctaaataccccaatttacttaaccagttgcttgacctacagccttcccattccagcccatacctcatagctttcttagtagatatctatgaggatatgttggaaaatcagtgcgacaataaagaagacattttgaataaggctctggaactgtgtgagatactggctaaagagaaagacactatcaggaaggaatattggcgatacataggaagaagtctccagtctaagcactccacagagaacgatagtccaacgaatgtgcagcagtag

SEQ ID NO: 123355 - DNA, 1140 bp, Artificial Sequence
  derived and/or modified sequence
atggcagcaaccgaaggcgtgggcgaagcagcccagggcggagagccaggacaaccagctcagccccctccacaaccacaccctcctcctccccaacagcagcataaagaagaaatggccgcagaggctggagaggccgtggcttcaccaatggacgatggttttgtttccctcgactctcctagctatgtcctatatcgggacagagccgagtgggcggacatagatcctgtaccacagaatgatggccctaatcccgtggtgcaaattatttacagcgataaatttcgggatgtttatgattacttccgggcagtcctccagagagacgaaaggtccgagagagcctttaaactgaccagggacgccatcgagctcaacgcagccaattacaccgtttggcactttcggcgtgtgctactgaagtccctccagaaggacctgcacgaagaaatgaattacatcacagctatcattgaagagcaaccaaagaactaccaggtgtggcatcaccggagagtgctcgtcgagtggctgagggacccctctcaagagttggagttcattgcggacatcttaaaccaggatgcaaagaattaccatgcatggcaacaccgtcagtgggtgattcaagagttcaaactgtgggacaacgaactacagtacgtcgatcaattactgaaggaggacgtccggaataacagtgtttggaatcagcgttatttcgtgatatcaaacacaaccggttacaacgaccgtgccgtgctggagcgggaagtacaatatacgctggagatgatcaaattagtcccgcacaacgagagcgcatggaattatctgaagggaatcttacaggataggggcctgagcaaatatcccaacctcctgaatcagttattggacttgcagccatcccactctagcccttacctcatcgcatttctcgtggacatctatgaggacatgctggagaaccaatgcgacaacaaggaggacattctcaacaaggctctcgaactctgcgaaatcttggccaaagagaaggacaccatccggaaggagtattggcggtacataggtcgttccctgcagagcaaacattccacagagaacgactcccctaccaatgttcagcaatag

SEQ ID NO: 123356 - DNA, 939 bp, Artificial Sequence
  derived and/or modified sequence
atggcagctacagaaggggtgggcgaagccgcacaaggcggagagcctgggcagccagcccagccccctccacaaccccatcctcctccgcctcaacagcagcataaagaagagatggcagccgaagccggtgaagcagttgccagccctatggatgacggatttgtgtccctcgatagcccatcatatgttctctaccgccactttcgtagggtgctcctcaagtcgctccagaaagacctgcacgaggagatgaattacattacggccatcatcgaagagcaacccaaaaactatcaggtttggcaccatagaagagtgctggtggagtggctgcgagatccttcacaggaactcgagtttattgctgacattcttaaccaggacgctaaaaactaccatgcttggcaacaccggcaatgggtgatccaggagttcaaactatgggataacgagctacagtacgtggatcaactgcttaaagaagatgtccgcaataacagcgtatggaaccagcgctactttgtcattagcaacacgaccggatataatgatcgagcagtcctggaaagagaggtacagtatactttagagatgattaagttggttcctcacaacgagtctgcttggaattacttgaaggggatactccaagatagaggcttgagtaagtaccccaatctcctgaaccaactactggacctgcagcctagtcactcttcaccctatctcattgctttcctggtggatatctatgaagatatgttagaaaaccagtgtgacaacaaagaagatatcctcaataaggcacttgaactatgtgagatcttggcgaaggaaaaggacactatacgaaaagaatactggaggtatatcgggcgtagtctgcagtcaaagcacagcacggaaaatgatagtccgacgaacgtgcaacagtag

SEQ ID NO: 123357 - DNA, 1140 bp, Artificial Sequence
  derived and/or modified sequence
atggccgccaccgagggcgtgggcgaggccgcccagggcggcgagcccggccagcccgcccagccccccccccagccccaccccccccccccccagcagcagcacaaggaggagatggccgccgaggccggcgaggccgtggccagccccatggacgacggcttcgtgagcctggacagccccagctacgtgctgtacagagacagagccgagtgggccgacatcgaccccgtgccccagaacgacggccccaaccccgtggtgcagatcatctacagcgacaagttcagagacgtgtacgactacttcagagccgtgctgcagagagacgagagaagcgagagagccttcaagctgaccagagacgccatcgagctgaacgccgccaactacaccgtgtggcacttcagaagagtgctgctgaagagcctgcagaaggacctgcacgaggagatgaactacatcaccgccatcatcgaggagcagcccaagaactaccaggtgtggcaccacagaagagtgctggtggagtggctgagagaccccagccaggagctggagttcatcgccgacatcctgaaccaggacgccaagaactaccacgcctggcagcacagacagtgggtgatccaggagttcaagctgtgggacaacgagctgcagtacgtggaccagctgctgaaggaggacgtgagaaacaacagcgtgtggaaccagagatacttcgtgatcagcaacaccaccggctacaacgacagagccgtgctggagagagaggtgcagtacaccctggagatgatcaagctggtgccccacaacgagagcgcctggaactacctgaagggcatcctgcaggacagaggcctgagcaagtaccccaacctgctgaaccagctgctggacctgcagcccagccacagcagcccctacctgatcgccttcctggtggacatctacgaggacatgctggagaaccagtgcgacaacaaggaggacatcctgaacaaggccctggagctgtgcgagatcctggccaaggagaaggacaccatcagaaaggagtactggagatacatcggcagaagcctgcagagcaagcacagcaccgagaacgacagccccaccaacgtgcagcagtag

SEQ ID NO: 123358 - DNA, 939 bp, Artificial Sequence
  derived and/or modified sequence
atggccgccaccgagggcgtgggcgaggccgcccagggcggcgagcccggccagcccgcccagccccccccccagccccaccccccccccccccagcagcagcacaaggaggagatggccgccgaggccggcgaggccgtggccagccccatggacgacggcttcgtgagcctggacagccccagctacgtgctgtacagacacttcagaagagtgctgctgaagagcctgcagaaggacctgcacgaggagatgaactacatcaccgccatcatcgaggagcagcccaagaactaccaggtgtggcaccacagaagagtgctggtggagtggctgagagaccccagccaggagctggagttcatcgccgacatcctgaaccaggacgccaagaactaccacgcctggcagcacagacagtgggtgatccaggagttcaagctgtgggacaacgagctgcagtacgtggaccagctgctgaaggaggacgtgagaaacaacagcgtgtggaaccagagatacttcgtgatcagcaacaccaccggctacaacgacagagccgtgctggagagagaggtgcagtacaccctggagatgatcaagctggtgccccacaacgagagcgcctggaactacctgaagggcatcctgcaggacagaggcctgagcaagtaccccaacctgctgaaccagctgctggacctgcagcccagccacagcagcccctacctgatcgccttcctggtggacatctacgaggacatgctggagaaccagtgcgacaacaaggaggacatcctgaacaaggccctggagctgtgcgagatcctggccaaggagaaggacaccatcagaaaggagtactggagatacatcggcagaagcctgcagagcaagcacagcaccgagaacgacagccccaccaacgtgcagcagtag

SEQ ID NO: 123359 - protein, 437 aa, Artificial Sequence
  derived and/or modified sequence
MASPSSFTYYCPPSSSPVWSEPLYSLRPEHARERLQDDSVETVTSIEQAKVEEKIQEVFSSYKFNHLVPRLVLQREKHFHYLKRGLRQLTDAYECLDASRPWLCYWILHSLELLDEPIPQIVATDVCQFLELCQSPEGGFGGGPGQYPHLAPTYAAVNALCIIGTEEAYDIINREKLLQYLYSLKQPDGSFLMHVGGEVDVRSAYCAASVASLTNIITPDLFEGTAEWIARCQNWEGGIGGVPGMEAHGGYTFCGLAALVILKRERSLNLKSLLQWVTSRQMRFEGGFQGRCNKLVDGCYSFWQAGLLPLLHRALHAQGDPALSMSHWMFHQQALQEYILMCCQCPAGGLLDKPGKSRDFYHTCYCLSGLSIAQHFGSGAMLHDVVLGVPENALQPTHPVYNIGPDKVIQATTYFLQKPVPGFEELKDETSAEPATD

SEQ ID NO: 123360 - DNA, 2834 bp, Artificial Sequence
  derived and/or modified sequence
gtagacacccttgcgcttcaggactctacgctcttgcagcagctcctctgcccaatggggggcggcagcatctcagtaactcactcgaaagacgggtaggcgggaggagacattcgcgttcaaaatctttttgcctctatccgctcgccgtagcgctttagcccgctcgagtttcaatgcgcgttgttgcttaacgaagcagagtcctacacactgtctgctgctctcctgatcatggcttctccgagttctttcacctactattgccctccatcttcctcccccgtctggtcagagccgctgtacagtctgaggcccgagcacgcgcgagagcggttgcaggacgactcggtggaaacagtcacgtccatagaacaggcaaaagtagaagaaaagatccaagaggtcttcagttcttacaagttcaaccaccttgtaccaaggcttgttttgcagagggagaagcacttccattatctgaaaagaggccttcgacaactgacagatgcctatgagtgtctggatgccagccgcccatggctctgctattggatcctgcacagcttggaactgctagatgaacccatcccccagatagtggctacagatgtgtgtcagttcctggagctgtgtcagagcccagaaggtggctttggaggaggacccggtcagtatccacaccttgcacccacatatgcagcagtcaatgcattgtgcatcattggcaccgaggaggcctatgacatcattaacagagagaagcttcttcagtatttgtactccctgaagcaacctgacggctcctttctcatgcatgtcggaggtgaggtggatgtgagaagcgcatactgtgctgcctccgtagcctcgctgaccaacatcatcactccagacctctttgagggcactgctgaatggatagcaaggtgtcagaactgggaaggtggcattggcggggtaccagggatggaagcccatggtggctataccttctgtggcctggccgcgctggtaatcctcaagagggaacgttccttgaacttgaagagcttattacaatgggtgacaagccggcagatgcgatttgaaggaggatttcagggccgctgcaacaagctggtggatggctgctactccttctggcaggcggggctcctgcccctgctccaccgcgcactgcacgcccaaggtgaccctgcccttagcatgagccactggatgttccatcagcaggccctgcaggagtacatcctgatgtgctgccagtgccctgcgggggggcttctggataaacctggcaagtcgcgtgatttctaccacacctgctactgcctgagcggcctgtccatagcccagcacttcggcagcggagccatgttgcatgatgtggtcctgggtgtgcccgaaaacgctctgcagcccactcacccagtgtacaacattggaccagacaaggtgatccaggccactacatactttctacagaagccagtcccaggttttgaggagcttaaggatgagacatcggcagagcctgcaaccgactagaggacctgggtcccggcagctctttgctcacccatctccccagtcagacaaggtttatacgtttcaatacatactgcattctgtgctacacaagccttagcctcagtggagctgtggttctcttggtactttcttgtcaaacaaaaccaatggctctgggtttggagaacacagtggctggttttaaaaattctttccacacctgtcaaaccaaaaatctatcagcccacgtggtgtggttggtgaacagtgcatgccaggaggaagcagtccctcctcaccagctctccagccaggacgatcacacagagatgaatggcatctgagtattacggcatccagagccactgctgactcccacttgcacgccaccattcagtcaccagactgggtgccctccgatgggtggaataagtctgcttcatgccaaggctgggctttgggtcccaccaagatgagttctctgtaagactgtggtggagttgcaccaggaggtgcctctgcctctcgacttgcaccctggtcatttgtaagggaaaagagctggaggtggggagagaaagatctccttcagttgggagtccttccacttcaacactggagaactgagccttgcatctctccagggtccaaggccacgcttggtgcacaggcaagacttgcttcagccccaggtgtggtgacttagacctaggaaaccaattatgagtggaaagtgaccctctagttcaactgtgccagaggaaacagccctccagtgcccacctgcctcactcctccctatcatgtaccgtgaaaaccccctctgatggcctcaaggcagtgcctgcaggccgaggcccttctgggggtttctatctttcttccaccagactccaagcccactctcctccaagactgtgttgtcttttctcaccaagagtattaacactactaagtctttcaccttaacttatgactcaggatttattcacgtcctgcccactctaggctcacaggaataaaatcaagtgctagacacactggctgctactaaggcactagcctctgtagctggtggtggcagcgtggggtgccgcccagcgtgctgggtcctggcagtgcctctgctgtgctgcacattgagccctttctcagtcagtggagtatcaagttgggccatctgtctactgacctggccttcatgtaagcagctgtgggctgcgggcagacaggagctcagagatgcagcatgaggcgcttagaaaaacctggccatttgctgcctctaattcccttttgctttg

SEQ ID NO: 123361 - DNA, 1314 bp, Artificial Sequence
  derived and/or modified sequence
atggctagtcccagctcattcacctactactgcccgccatccagctcccccgtttggagcgagcccctgtacagtctgagacctgagcatgccagagagcgattacaagacgactctgtggagacggtaacaagcatcgagcaggctaaggtggaagagaagattcaggaagtgttttcttcatacaagtttaatcatctggtcccgcgcttggtcctgcaacgtgagaagcatttccactacctcaagcggggcctgcgtcagttaaccgatgcatacgaatgcctggacgctagtcgaccctggctctgttattggattctccacagcctggaactgctcgatgagccaatcccacagattgtggcaactgacgtctgccaattcctggagctttgccaatcacccgagggaggctttggaggcggcccagggcagtatccccatctggcccctacctatgccgctgtgaacgcattatgcattatcgggacagaagaagcatacgacatcattaatcgtgaaaagctgctgcaatacctgtattctctgaaacaacccgacggttccttcctaatgcacgtgggcggggaggtcgacgttagaagtgcttactgcgcggctagcgtggcctcgctgacgaatatcataacaccggacctcttcgaagggaccgctgagtggattgcacgctgtcagaactgggagggaggaattggcggagtgcctggcatggaggcacatggtggctataccttttgtggtttagcagcactggtcatacttaagagggagcgctcacttaatttgaagagccttttacagtgggtcacatctcggcagatgcgatttgaaggtggatttcagggtcgatgtaataaacttgtcgacggatgttactcattctggcaggctggactgctgccgctgctccatcgagctctgcatgcacagggtgatcctgcactgagtatgagccattggatgttccaccagcaagccctgcaggagtacattctcatgtgttgccagtgtcccgccggcggcctgcttgacaagccagggaaatcccgagatttttaccacacctgttactgtctgtctggcctgtctatcgctcagcatttcggctctggcgccatgttacacgacgtggtacttggcgtccccgaaaatgccctgcaacccacacacccggtgtataatataggccctgataaggttatccaggcaacgacatattttctgcagaaaccagtaccggggtttgaggagcttaaagacgaaacatcagcggagcccgcgacggattag

SEQ ID NO: 123362 - DNA, 1314 bp, Artificial Sequence
  derived and/or modified sequence
atggccagccccagcagcttcacctactactgcccccccagcagcagccctgtgtggagcgagcccctgtacagcctgcggcctgagcacgcccgggagcggctgcaggatgattctgtggagaccgtgaccagcattgagcaggccaaggtggaggagaagatccaggaggtgttcagcagctacaagttcaaccacctggtgccccggctggtgctgcagcgggagaagcacttccactacctgaagaggggcctgcggcagctgacagatgcctatgagtgcctggatgccagccggccctggctgtgctactggatcctgcacagcctggagctgctggatgagcccatcccccagatcgtggccacagatgtgtgccagttcctggagctgtgccagagccctgagggcggctttggaggcggccctggccagtacccccacctggcccccacctatgctgctgtgaatgccctgtgcatcattggaacagaggaggcctatgacatcatcaaccgggagaagctgctgcagtacctgtacagcctgaagcagccagatggcagcttcctgatgcacgtgggcggggaggtggatgtgcgcagcgcctactgtgccgcctctgtggccagcctgaccaacatcatcaccccagacctgtttgagggcacagctgagtggatcgcccgctgccagaactgggagggcggcattggaggagtgcccggcatggaggcccacggcggctacaccttctgtggcctggccgccctggtgatcctgaagcgggagaggagcctgaacctgaagagcctgctgcagtgggtgaccagccggcagatgagatttgagggcggcttccagggccgctgcaacaagctggtggatggctgctacagcttctggcaggccggcctgctgcccctgctgcaccgggccctgcacgcccagggcgaccctgccctgtccatgagccactggatgttccaccagcaggccctgcaggagtacatcctgatgtgctgccagtgcccagctgggggcctgctggacaagccaggcaagagccgggacttctaccacacctgctactgcctgagcggcctgagcatcgcccagcacttcggcagcggggccatgctgcatgatgtggtgctgggcgtgcctgaaaatgccctgcagcccacccaccctgtgtacaacattggaccagacaaggtgatccaggccaccacctacttcctgcagaagcctgtgcccggctttgaggagctgaaggatgagaccagcgctgagcccgccacagactag

SEQ ID NO: 123363 - DNA, 1314 bp, Artificial Sequence
  derived and/or modified sequence
atggccagccccagcagcttcacctactactgcccccccagcagctccccagtgtggtctgaaccactgtattctctgaggcccgaacatgcccgtgaacgcttacaagacgactccgtcgaaactgtaacttccattgagcaggcgaaggtggaggaaaaaatccaggaagtcttctccagctacaaattcaatcacctggttcctcgcctcgtcctccaaagagaaaagcacttccactatctcaaaagaggtctcagacaactcactgatgcttatgagtgcctcgacgcatctcgaccatggctctgttactggattctgcacagtctggaacttctggacgaacctatccctcagatagtcgctacagacgtgtgccagtttctggagctgtgtcagtcccccgagggtggattcggtggagggcccggccaatacccacatttagcccccacgtatgctgctgtcaatgctttgtgcattatcggcactgaagaggcatatgacatcattaacagggagaagctcttgcagtacctgtactctttgaagcaaccagatggttctttcctaatgcatgtgggcggcgaagtagatgttagatcagcgtactgcgccgccagcgtcgcatccctgaccaatattattacccccgacctgtttgaagggacagcggaatggattgccaggtgccagaattgggaggggggtatagggggtgtgccagggatggaggcccacggaggctacaccttctgcggcctagcagctctagtcatcctgaaaagggagagaagccttaatctcaagagcctgctacagtgggttacctctcgacaaatgcgatttgaaggcggcttccaggggcgctgtaataaactggtggacggctgttattcgttctggcaggccggattgctgccactcctgcatcgcgctctgcacgctcagggcgacccagcccttagcatgtcccattggatgtttcatcagcaggcactccaggagtacattctcatgtgctgtcagtgccctgccggtgggttactggacaaaccaggaaagtctagggatttctaccacacctgttattgcctgtccggtctgtcaatagcccagcactttggttcaggcgcaatgttgcacgatgttgtgctcggggtaccagagaatgccttgcaaccgacacatcctgtctataatatcggaccggacaaggtgattcaggctactacctactttctgcagaaacctgtacctgggttcgaggaactgaaagacgagactagcgctgaaccggcaaccgactag

SEQ ID NO: 123364 - DNA, 1314 bp, Artificial Sequence
  derived and/or modified sequence
atggcttcaccctcctctttcacttactattgcccgccttcatcatcccctgtatggagtgaacccctgtactctctcagacccgaacatgcacgcgagagactgcaggacgacagcgttgaaacagtgacgtccatcgaacaggcaaaggtcgaggagaaaattcaggaagtcttttcgagctataaattcaatcacctggttcctcgtctggtactacagagagagaagcatttccattatctgaagaggggcttgagacagctgactgatgcttacgaatgtcttgatgcttctcgtccctggttgtgttactggatccttcactcgctcgagttactggacgagcccataccccaaattgtcgcaaccgacgtgtgccagtttctggaactctgccagtctccggaaggcggtttcggtggcggaccagggcagtaccctcacctcgctcctacctatgccgctgtgaacgccttgtgcatcatcggcacggaggaggcatatgacattatcaaccgcgagaaactgctccagtacttgtattctctgaaacagccagacgggagctttctgatgcacgtgggcggtgaggtggacgtgagatccgcttattgcgcagcaagtgttgccagtcttacaaacatcattacccctgatctcttcgagggcactgcggagtggattgctagatgccagaactgggaggggggaatcgggggagtccctggcatggaggcccatggaggatatacgttttgtggcttagctgccctggttattctcaagagggaaaggtctctcaacctcaaatctctcctgcagtgggtgaccagtaggcagatgagatttgaaggcggtttccagggacgctgtaataaactggtggacgggtgctactccttctggcaggctggactattacctctgctgcaccgcgctctgcacgcccagggtgatccagccctgtccatgagccattggatgtttcaccagcaggccctgcaggagtatattctgatgtgttgccagtgccccgcaggtggactcctggacaagcctggcaaaagccgggacttttatcacacatgttactgtctatcagggctgagcatcgcccagcacttcggctccggagctatgcttcatgatgtagtactgggtgtccccgagaacgcgcttcaaccaacgcaccctgtgtacaacattggccctgataaggtaattcaggccaccacctatttcttacagaagccagtgcctggatttgaggagctgaaagacgagacttctgctgaacccgctaccgattag

SEQ ID NO: 123365 - DNA, 1314 bp, Artificial Sequence
  derived and/or modified sequence
atggccagccccagcagcttcacctactactgcccccccagcagcagccccgtgtggagcgagcccctgtacagcctgagacccgagcacgccagagagagactgcaggacgacagcgtggagaccgtgaccagcatcgagcaggccaaggtggaggagaagatccaggaggtgttcagcagctacaagttcaaccacctggtgcccagactggtgctgcagagagagaagcacttccactacctgaagagaggcctgagacagctgaccgacgcctacgagtgcctggacgccagcagaccctggctgtgctactggatcctgcacagcctggagctgctggacgagcccatcccccagatcgtggccaccgacgtgtgccagttcctggagctgtgccagagccccgagggcggcttcggcggcggccccggccagtacccccacctggcccccacctacgccgccgtgaacgccctgtgcatcatcggcaccgaggaggcctacgacatcatcaacagagagaagctgctgcagtacctgtacagcctgaagcagcccgacggcagcttcctgatgcacgtgggcggcgaggtggacgtgagaagcgcctactgcgccgccagcgtggccagcctgaccaacatcatcacccccgacctgttcgagggcaccgccgagtggatcgccagatgccagaactgggagggcggcatcggcggcgtgcccggcatggaggcccacggcggctacaccttctgcggcctggccgccctggtgatcctgaagagagagagaagcctgaacctgaagagcctgctgcagtgggtgaccagcagacagatgagattcgagggcggcttccagggcagatgcaacaagctggtggacggctgctacagcttctggcaggccggcctgctgcccctgctgcacagagccctgcacgcccagggcgaccccgccctgagcatgagccactggatgttccaccagcaggccctgcaggagtacatcctgatgtgctgccagtgccccgccggcggcctgctggacaagcccggcaagagcagagacttctaccacacctgctactgcctgagcggcctgagcatcgcccagcacttcggcagcggcgccatgctgcacgacgtggtgctgggcgtgcccgagaacgccctgcagcccacccaccccgtgtacaacatcggccccgacaaggtgatccaggccaccacctacttcctgcagaagcccgtgcccggcttcgaggagctgaaggacgagaccagcgccgagcccgccaccgactag

SEQ ID NO: 123366 - protein, 353 aa, Artificial Sequence
  derived and/or modified sequence
METNFSIPLNETEEVLPEPAGHTVLWIFSLLVHGVTFVFGVLGNGLVIWVAGFRMTRTVNTICYLNLALADFSFSAILPFRMVSVAMREKWPFGSFLCKLVHVMIDINLFVSVYLITIIALDRCICVLHPAWAQNHRTMSLAKRVMTGLWIFTIVLTLPNFIFWTTISTTNGDTYCIFNFAFWGDTAVERLNVFITMAKVFLILHFIIGFSVPMSIITVCYGIIAAKIHRNHMIKSSRPLRVFAAVVASFFICWFPYELIGILMAVWLKEMLLNGKYKIILVLINPTSSLAFFNSCLNPILYVFMGRNFQERLIRSLPTSLERALTEVPDSAQTSNTDTTSASPPEETELQAM

SEQ ID NO: 123367 - DNA, 2517 bp, Artificial Sequence
  derived and/or modified sequence
aaaacactcattttgttttatagcatgacaggctgtctgattccatctttataaccaaagccaattaagatcttaaaaccaaacatataacttcatctttttacaagtacttagagcctgagttgctccacaggaatccaggaactgggcacaggaaaaggatctaagctggtggtgtgggaagatggaaaccaacttctccattcctctgaatgaaactgaggaggtgctccctgagcctgctggccacaccgttctgtggatcttctcattgctagtccacggagtcacctttgtcttcggggtcctgggcaatgggcttgtgatctgggtggctggattccggatgacacgcacagtcaacaccatctgttacctgaacctggccctagctgacttctctttcagtgccatcctaccattccgaatggtctcagtcgccatgagagaaaaatggccttttggctcattcctatgtaagttagttcatgttatgatagacatcaacctgtttgtcagtgtctacctgatcaccatcattgctctggaccgctgtatttgtgtcctgcatccagcctgggcccagaaccatcgcaccatgagtctggccaagagggtgatgacgggactctggattttcaccatagtccttaccttaccaaatttcatcttctggactacaataagtactacgaatggggacacatactgtattttcaactttgcattctggggtgacactgctgtagagaggttgaacgtgttcattaccatggccaaggtctttctgatcctccacttcattattggcttcagcgtgcctatgtccatcatcacagtctgctatgggatcatcgctgccaaaattcacagaaaccacatgattaaatccagccgtcccttacgtgtcttcgctgctgtggtggcttctttcttcatctgttggttcccttatgaactaattggcattctaatggcagtctggctcaaagagatgttgttaaatggcaaatacaaaatcattcttgtcctgattaacccaacaagctccttggccttttttaacagctgcctcaacccaattctctacgtctttatgggtcgtaacttccaagaaagactgattcgctctttgcccactagtttggagagggccctgactgaggtccctgactcagcccagaccagcaacacagacaccacttctgcttcacctcctgaggagacggagttacaagcaatgtgaggtcggggatatttttgggctctgtctctttctaccctgcgttaagcggaaaaaaaaaattctgacagtgtttttcttcctctttcataccaccaccaccacaatcatcaacataaaggaagtctgtaccaaatctgtagggggtttttcccacaaccaagcaatagacaccagctgggtgtcctacaattaaattccaacactatctacctggagctactgtcagatcccacaggtttaagggctcattccccaagtctgctcctccagttgagacacaagtcacaaatccaggcttctgaaacttcggaccaaccagcttcaatcagggttcccactaccccctctttgggggtagagtggctcatggaactcagagaaacatttatttcggcttgctggtttattataaaagcaaggtttattataaaagatactacaaaggatacagatgaagaggcacatagggcaaggtacggggttccacgccctccctgagtgcatcaccctctgggaacctccgtgtgttcacgtctcatgaagctctccaaatccagtcctcttgggtttttatggaagcttcatgatgtcagcattctttcctccagtgtataggatgggatcctctctggggagggtcttaagacccacaattagaaaggcaagggaagattagagtcctgctttggggtagatgaaaggaaaggagagagattctgtttcctgaggcttaatacacccaacattataacaaaggactgtagcaagggctatgggagttctgaagcagaaaccatgggctaaaaccaacatacatcttaataccagataccctaatcccagtcctaacttcatttaaccttggtcacattgagtcattccaggatgagtggctcaagtatttcctcagggaaaatacttctgtgccccctgatttgagggtaagaagtagataatgaggccactgtgggtgttattttttcatgtctggacctcagcctatatcctgagactaagtggaagtgggaaaagagtacaagagaagagacaaagtggggatatttgtaaggcttagatgagatagtgtttttttagaaaaaaactttatcttaccattaagtaaaatgtttgccataggctttctggggctttctctttttaaagtcagactgttgaaggtttcttctattcttatttgttaagagttttcttttattgtttaaatcatgaatgaatgttgaattttattaaatgcagtttctgtaaatatt

SEQ ID NO: 123368 - DNA, 1062 bp, Artificial Sequence
  derived and/or modified sequence
atggagacgaatttcagcataccactcaacgagaccgaggaggtgctacccgagccggctggacacaccgtcctctggattttctctttgctggtccacggtgtaacctttgttttcggcgtcctcggtaacgggctcgtgatctgggtggcagggtttcggatgactcggactgttaacactatctgctacctaaatctcgccctggccgacttctccttcagcgctatactgccctttcggatggtgtccgtggctatgcgggagaaatggccgttcggaagctttctctgcaaattagtgcacgtgatgatcgatattaatctgttcgtcagcgtgtacctgatcacaatcattgccctcgatcggtgcatctgcgttctgcacccagcttgggctcagaatcataggaccatgtctctggctaagagagtgatgacgggcttatggattttcactattgtgctgacactgccaaacttcattttctggactacaataagcacgaccaacggagatacctattgtatcttcaatttcgcattctggggagataccgctgtggaaagacttaatgtgttcatcaccatggcgaaggtctttcttattttgcattttattattgggtttagtgtgccaatgtctatcattaccgtctgctacggaatcatcgctgctaagatccataggaatcacatgattaagagcagcaggcctctgcgggttttcgccgccgtcgtggcttcctttttcatttgttggttcccctatgagctgattggcattctaatggcggtgtggttaaaggagatgctgttgaatgggaagtataagataattctcgttctcatcaaccctacatcttccctggcattcttcaatagctgcctgaaccccatattgtacgtgttcatgggtaggaattttcaggaaaggctcatcagatccttaccaacctcactcgaaagagctctgactgaggtgccagactcagcacagactagcaataccgataccacaagtgcgtcaccccccgaagaaaccgagctccaagccatgtag

SEQ ID NO: 123369 - DNA, 1062 bp, Artificial Sequence
  derived and/or modified sequence
atggagaccaacttcagcatccccctgaatgaaacagaggaggtgctgcctgagcccgccggccacacagtgctgtggatcttcagcctgctggtgcatggagtgacctttgtgtttggagtgctgggcaatggcctggtgatctgggtggccggcttcaggatgaccaggacagtgaacaccatctgctacctgaacctggccctggccgacttctccttcagcgccatcctgcccttcaggatggtgtctgtggccatgagggagaagtggcccttcggcagcttcctgtgcaagctggtgcacgtgatgattgacatcaacctgtttgtgtctgtgtacctgatcaccatcatcgccctggaccgctgcatctgtgtgctgcacccagcctgggcccagaaccacaggaccatgagcctggccaagagggtgatgacaggcctgtggatcttcaccatcgtgctgaccctgcccaacttcatcttctggaccaccatcagcaccaccaatggagacacctactgcatcttcaactttgccttctggggagacacagctgtggagcggctgaatgtgttcatcaccatggccaaggtgttcctgatcctgcacttcatcatcggcttctctgtgcccatgagcatcatcaccgtgtgctacggcatcatcgccgccaagatccacaggaaccacatgatcaagagcagccggcccctgcgggtgtttgctgctgtggtggccagcttcttcatctgctggttcccctatgagctgattggcatcctgatggctgtgtggctgaaggagatgctgctgaatggcaagtacaagatcatcctggtgctgatcaaccccaccagcagcctggccttcttcaacagctgcctgaaccccatcctgtatgtgttcatgggcaggaacttccaggagcggctcatccgcagcctgcccaccagcctggagcgggccctgacagaggtgcctgattctgcccagaccagcaacacagacaccaccagcgccagccccccagaggagacagagctgcaggccatgtag

SEQ ID NO: 123370 - DNA, 1062 bp, Artificial Sequence
  derived and/or modified sequence
atggagaccaacttcagcatccccctgaacgagaccgaggaggtgctcccagagcccgcaggccacactgttttgtggatatttagcctgctggtgcacggggtcacattcgtgtttggggtgttaggaaatgggttggtgatctgggtggctggatttaggatgacacggacagtgaataccatctgctacctgaacctagccctcgcagatttctctttttctgccatactgcctttccggatggtgtctgtcgcaatgcgcgagaagtggcccttcggaagcttcctatgtaaactggtgcacgtgatgatcgatattaatctgttcgtgtctgtctatctgatcaccattatcgccctggatagatgcatttgcgtgctgcacccagcatgggcccagaaccaccggaccatgagtttagcaaaaagggttatgactggcttatggatattcacaatagtcctcaccctgcccaatttcatcttttggacaacgatttcaaccaccaacggggatacatattgtatattcaatttcgccttctggggtgacaccgctgtggagcgcctgaatgttttcattactatggcaaaagtgtttcttattctgcacttcatcatagggtttagtgtgcctatgtccataatcacggtgtgttacggcattatcgccgctaaaatacatcgtaatcacatgattaaatcttcccggccactgcgcgtgttcgccgctgtggtggcttcctttttcatttgctggtttccttatgagttgatcggaattctcatggctgtctggttaaaggagatgctcctcaatggtaaatataaaattattcttgtgttgattaatccaactagtagtcttgccttttttaattcttgcctcaatcccatcctctatgtgttcatggggaggaacttccaggagagacttataaggagtctgcctacgagcttagagagagcactcaccgaagttcccgatagtgcacagacatcaaacactgatacaacttccgcctcccccccagaggaaactgaactccaggcaatgtag

SEQ ID NO: 123371 - DNA, 1062 bp, Artificial Sequence
  derived and/or modified sequence
atggagacaaacttctccatcccgctgaatgagacagaagaagttctgccagagcctgcgggacatacggtattatggatcttttctctgttggttcatggagtcacttttgtcttcggtgtcctcggcaacggacttgtaatctgggtggccggattcagaatgaccaggactgtgaatacaatctgctacctcaacctggccctcgccgacttctcctttagcgcaatattacctttccgcatggtttcagtcgccatgcgggagaaatggccttttggtagtttcttatgtaaactggtgcatgtcatgatcgacatcaatctgttcgtgagcgtgtacttgattaccatcattgcactagatagatgcatttgtgtactgcaccccgcttgggcacaaaaccataggaccatgtcgctggcaaaacgggtcatgaccggcctttggatcttcacaatcgtgctgacactgcccaacttcatattttggaccacaatttctaccactaacggcgatacatactgtatctttaacttcgccttttggggtgacacagccgtcgagcgcctcaacgtgtttattactatggcgaaagtctttcttattcttcattttattatcgggttcagcgtcccaatgagcataattacagtatgttatggtatcatcgccgcaaagatccataggaaccacatgatcaaaagctccagaccgctgagagtgtttgcagctgttgtggcaagtttcttcatctgttggtttccttacgagctgatcggcatcctgatggcagtctggctaaaggaaatgctgctcaacgggaagtacaagataattctggtcctaatcaaccctacctcctcgctggccttcttcaatagctgcttgaaccctattctctacgtctttatgggccgaaacttccaggagcgactcatccgcagtttgcccacctctcttgaaagggcactgactgaagtcccagactctgcccaaacctctaataccgacaccacttcagcttctcccccagaggagactgagcttcaggccatgtag

SEQ ID NO: 123372 - DNA, 1062 bp, Artificial Sequence
  derived and/or modified sequence
atggagaccaacttcagcatccccctgaacgagaccgaggaggtgctgcccgagcccgccggccacaccgtgctgtggatcttcagcctgctggtgcacggcgtgaccttcgtgttcggcgtgctgggcaacggcctggtgatctgggtggccggcttcagaatgaccagaaccgtgaacaccatctgctacctgaacctggccctggccgacttcagcttcagcgccatcctgcccttcagaatggtgagcgtggccatgagagagaagtggcccttcggcagcttcctgtgcaagctggtgcacgtgatgatcgacatcaacctgttcgtgagcgtgtacctgatcaccatcatcgccctggacagatgcatctgcgtgctgcaccccgcctgggcccagaaccacagaaccatgagcctggccaagagagtgatgaccggcctgtggatcttcaccatcgtgctgaccctgcccaacttcatcttctggaccaccatcagcaccaccaacggcgacacctactgcatcttcaacttcgccttctggggcgacaccgccgtggagagactgaacgtgttcatcaccatggccaaggtgttcctgatcctgcacttcatcatcggcttcagcgtgcccatgagcatcatcaccgtgtgctacggcatcatcgccgccaagatccacagaaaccacatgatcaagagcagcagacccctgagagtgttcgccgccgtggtggccagcttcttcatctgctggttcccctacgagctgatcggcatcctgatggccgtgtggctgaaggagatgctgctgaacggcaagtacaagatcatcctggtgctgatcaaccccaccagcagcctggccttcttcaacagctgcctgaaccccatcctgtacgtgttcatgggcagaaacttccaggagagactgatcagaagcctgcccaccagcctggagagagccctgaccgaggtgcccgacagcgcccagaccagcaacaccgacaccaccagcgccagcccccccgaggagaccgagctgcaggccatgtag

SEQ ID NO: 123373 - protein, 183 aa, Artificial Sequence
  derived and/or modified sequence
MTTASTSQVRQNYHQDSEAAINRQINLELYASYVYLSMSYYFDRDDVALKNFAKYFLHQSHEEREHAEKLMKLQNQRGGRIFLQDIKKPDCDDWESGLNAMECALHLEKNVNQSLLELHKLATDKNDPHLCDFIETHYLNEQVKAIKELGDHVTNLRKMGAPESGLAEYLFDKHTLGDSDNES

SEQ ID NO: 123374 - protein, 232 aa, Artificial Sequence
  derived and/or modified sequence
SGFPASTVLGRNPALVPHPGRPPIASPPSPLHRTLGLPQGPRRLSLVAAMTTASTSQVRQNYHQDSEAAINRQINLELYASYVYLSMSYYFDRDDVALKNFAKYFLHQSHEEREHAEKLMKLQNQRGGRIFLQDIKKPDCDDWESGLNAMECALHLEKNVNQSLLELHKLATDKNDPHLCDFIETHYLNEQVKAIKELGDHVTNLRKMGAPESGLAEYLFDKHTLGDSDNES

SEQ ID NO: 123375 - protein, 153 aa, Artificial Sequence
  derived and/or modified sequence
MTTASTSQSYYFDRDDVALKNFAKYFLHQSHEEREHAEKLMKLQNQRGGRIFLQDIKKPDCDDWESGLNAMECALHLEKNVNQSLLELHKLATDKNDPHLCDFIETHYLNEQVKAIKELGDHVTNLRKMGAPESGLAEYLFDKHTLGDSDNES

SEQ ID NO: 123376 - DNA, 1229 bp, Artificial Sequence
  derived and/or modified sequence
ataagagaccacaagcgacccgcagggccagacgttcttcgccgagagtcgtcggggtttcctgcttcaacagtgcttggacggaacccggcgctcgttccccaccccggccggccgcccatagccagccctccgtcacctcttcaccgcaccctcggactgccccaaggcccccgccgccgctccagcgccgcgcagccaccgccgccgccgccgcctctccttagtcgccgccatgacgaccgcgtccacctcgcaggtgcgccagaactaccaccaggactcagaggccgccatcaaccgccagatcaacctggagctctacgcctcctacgtttacctgtccatgtcttactactttgaccgcgatgatgtggctttgaagaactttgccaaatactttcttcaccaatctcatgaggagagggaacatgctgagaaactgatgaagctgcagaaccaacgaggtggccgaatcttccttcaggatatcaagaaaccagactgtgatgactgggagagcgggctgaatgcaatggagtgtgcattacatttggaaaaaaatgtgaatcagtcactactggaactgcacaaactggccactgacaaaaatgacccccatttgtgtgacttcattgagacacattacctgaatgagcaggtgaaagccatcaaagaattgggtgaccacgtgaccaacttgcgcaagatgggagcgcccgaatctggcttggcggaatatctctttgacaagcacaccctgggagacagtgataatgaaagctaagcctcgggctaatttccccatagccgtggggtgacttccctggtcaccaaggcagtgcatgcatgttggggtttcctttaccttttctataagttgtaccaaaacatccacttaagttctttgatttgtaccattccttcaaataaagaaatttggtacccaggtgttgtctttgaggtcttgggatgaatcagaaatctatccaggctatcttccagattccttaagtgccgttgttcagttctaatcacactaatcaaaaagaaacgagtatttgtatttattaaactcattagtttgggcagtatactaaggtgtggctgtcttggattcagatagaactaagggttcccgactctgaatccagagtctgagttaaatgtttccaatggttcagtctagctttcacagtttttatgaataaaaggcattaaaggctgaa

SEQ ID NO: 123377 - DNA, 860 bp, Artificial Sequence
  derived and/or modified sequence
tcggggtttcctgcttcaacagtgcttggacggaacccggcgctcgttccccaccccggccggccgcccatagccagccctccgtcacctcttcaccgcaccctcggactgccccaaggcccccgccgcctctccttagtcgccgccatgacgaccgcgtccacctcgcaggtgcgccagaactaccaccaggactcagaggccgccatcaaccgccagatcaacctggagctctacgcctcctacgtttacctgtccatgtcttactactttgaccgcgatgatgtggctttgaagaactttgccaaatactttcttcaccaatctcatgaggagagggaacatgctgagaaactgatgaagctgcagaaccaacgaggtggccgaatcttccttcaggatatcaagaaaccagactgtgatgactgggagagcgggctgaatgcaatggagtgtgcattacatttggaaaaaaatgtgaatcagtcactactggaactgcacaaactggccactgacaaaaatgacccccatttgtgtgacttcattgagacacattacctgaatgagcaggtgaaagccatcaaagaattgggtgaccacgtgaccaacttgcgcaagatgggagcgcccgaatctggcttggcggaatatctctttgacaagcacaccctgggagacagtgataatgaaagctaagcctcgggctaatttccccatagccgtggggtgacttccctggtcaccaaggcagtgcatgcatgttggggtttcctttaccttttctataagttgtaccaaaacatccacttaagttctttgatttgtaccattccttcaaataaagaaatttggtaccc

SEQ ID NO: 123378 - DNA, 786 bp, Artificial Sequence
  derived and/or modified sequence
ggggtttcctgcttcaacagtgcttggacggaacccggcgctcgttccccaccccggccggccgcccatagccagccctccgtcacctcttcaccgcaccctcggactgccccaaggcccccgccgccgctccagcgccgcgcagccaccgccgccgccgccgcctctccttagtcgccgccatgacgaccgcgtccacctcgcagtcttactactttgaccgcgatgatgtggctttgaagaactttgccaaatactttcttcaccaatctcatgaggagagggaacatgctgagaaactgatgaagctgcagaaccaacgaggtggccgaatcttccttcaggatatcaagaaaccagactgtgatgactgggagagcgggctgaatgcaatggagtgtgcattacatttggaaaaaaatgtgaatcagtcactactggaactgcacaaactggccactgacaaaaatgacccccatttgtgtgacttcattgagacacattacctgaatgagcaggtgaaagccatcaaagaattgggtgaccacgtgaccaacttgcgcaagatgggagcgcccgaatctggcttggcggaatatctctttgacaagcacaccctgggagacagtgataatgaaagctaagcctcgggctaatttccccatagccgtggggtgacttccctggtcaccaaggcagtgcatgcatgttggggtttcctttaccttttctataagttgtaccaaaacatccacttaagttctttgatttgtaccattccttcaa

SEQ ID NO: 123379 - DNA, 552 bp, Artificial Sequence
  derived and/or modified sequence
atgacgacagcttccacgagccaagtccgtcagaattatcatcaagattctgaggcggctatcaaccgacagatcaacttagagctgtatgcttcatatgtttacctgagcatgtcttattatttcgatcgcgacgacgtggcgcttaagaattttgctaagtatttcctgcaccagagccatgaggaacgcgaacacgctgaaaaactgatgaaactacaaaatcagcgaggaggcaggatttttttgcaggacattaaaaagccagactgtgacgattgggagtcaggactaaacgccatggagtgtgccttgcatctcgagaaaaatgtgaaccagtccctcctggagctgcacaagttagctacagataagaacgatccgcacctgtgcgattttattgaaacgcattatcttaacgagcaggtcaaagccattaaagaattaggggaccacgtgactaatctgagaaaaatgggagccccggagtccggtctggcagaatatctgttcgacaaacatacgctgggcgattcggataatgagtcgtag

SEQ ID NO: 123380 - DNA, 699 bp, Artificial Sequence
  derived and/or modified sequence
agcggctttcccgctagcactgtactgggtcgcaatccggccctggtgccccacccaggacggcctcccatcgcttctccccccagccctctgcaccgcactctcgggctgcctcagggtccccggaggcttagcttggtcgccgccatgactactgccagcacctcacaggttaggcagaactatcatcaggattcagaggcggccatcaaccgacagatcaatctagaactgtacgcttcttacgtctacctgagcatgtcttattattttgatcgggatgacgtggcattgaaaaacttcgccaagtattttctgcatcaatctcacgaagagagagaacacgcagagaagctgatgaagctccagaaccagagaggcggccgcatctttctgcaggacatcaaaaagccagactgcgatgactgggagtccggcctcaatgccatggaatgtgccttgcatctcgagaagaacgtcaaccaatcccttctggaacttcataaactggctacagataagaatgacccacacctctgcgactttattgagacacactatctgaatgaacaggtgaaggccatcaaggaactcggcgaccatgtgactaatctgaggaaaatgggcgctcccgagtccggcctagcagagtatttattcgataaacacacacttggagatagcgataatgagagctag

SEQ ID NO: 123381 - DNA, 462 bp, Artificial Sequence
  derived and/or modified sequence
atgacgacggcttccactagccagtcttattattttgacagagacgatgtggccttgaagaacttcgcaaagtacttcctccaccagtctcacgaagaaagagagcacgccgagaagctgatgaagctgcagaatcagcgcggggggagaattttcctgcaggacatcaaaaagcctgactgtgacgactgggagtccgggctgaacgccatggaatgcgcacttcatctcgaaaagaacgtgaatcagagcttgctggagctgcacaaactcgctaccgataaaaacgatcctcacttatgtgatttcatcgagacccactatctgaacgagcaagtcaaagccattaaggagctgggagaccacgtgacaaaccttagaaagatgggtgcacctgaaagtgggctggctgagtacttgtttgacaaacataccctgggtgattctgacaatgaaagctag

SEQ ID NO: 123382 - DNA, 552 bp, Artificial Sequence
  derived and/or modified sequence
atgaccacagccagcaccagccaggtgcggcagaactaccaccaggacagcgaggccgccatcaaccggcagatcaacctggagctgtatgccagctatgtgtacctgtccatgagctactactttgacagagatgatgtggccctgaagaactttgccaagtacttcctgcaccagagccatgaggagcgggagcacgccgagaagctgatgaagctgcagaaccagaggggcggccgcatcttcctgcaggacatcaagaagccagactgtgatgactgggagagcggcctgaatgccatggagtgtgccctgcacctggagaagaatgtgaaccagagcctgctggagctgcacaagctggccacagacaagaatgacccccacctgtgtgacttcatcgagacccactacctgaatgagcaggtgaaggccatcaaggagctgggggaccacgtgaccaacctgaggaagatgggcgcccctgagagcggcctggccgagtacctgtttgacaagcacaccctgggggacagcgacaatgaaagctag

SEQ ID NO: 123383 - DNA, 699 bp, Artificial Sequence
  derived and/or modified sequence
tctggcttccctgccagcacagtgctgggcagaaatcctgccctggtgccccaccctggccggccccccatcgccagcccccccagccccctgcacaggaccctgggcctgccccagggcccccggcggctgagcctggtggccgccatgaccacagccagcaccagccaggtgcggcagaactaccaccaggacagcgaggccgccatcaaccggcagatcaacctggagctgtatgccagctatgtgtacctgtccatgagctactactttgacagagatgatgtggccctgaagaactttgccaagtacttcctgcaccagagccatgaggagcgggagcacgccgagaagctgatgaagctgcagaaccagagaggaggccgcatcttcctgcaggacatcaagaagccagactgtgatgactgggagagcggcctgaatgccatggagtgtgccctgcacctggagaagaatgtgaaccagagcctgctggagctgcacaagctggccacagacaagaatgacccccacctgtgtgacttcatcgagacccactacctgaatgagcaggtgaaggccatcaaggagctgggggaccacgtgaccaacctgaggaagatgggcgcccctgagagcggcctggccgagtacctgtttgacaagcacaccctgggggacagcgacaatgaaagctag

SEQ ID NO: 123384 - DNA, 462 bp, Artificial Sequence
  derived and/or modified sequence
atgaccacagccagcaccagccagagctactactttgacagagatgatgtggccctgaagaactttgccaagtacttcctgcaccagagccatgaggagcgggagcacgccgagaagctgatgaagctgcagaaccagaggggcggccgcatcttcctgcaggacatcaagaagccagactgtgatgactgggagagcggcctgaatgccatggagtgtgccctgcacctggagaagaatgtgaaccagagcctgctggagctgcacaagctggccacagacaagaatgacccccacctgtgtgacttcatcgagacccactacctgaatgagcaggtgaaggccatcaaggagctgggggaccacgtgaccaacctgaggaagatgggcgcccctgagagcggcctggccgagtacctgtttgacaagcacaccctgggggacagcgacaatgaaagctag

SEQ ID NO: 123385 - DNA, 552 bp, Artificial Sequence
  derived and/or modified sequence
atgaccaccgccagcaccagccaggtgcggcagaactaccaccaggactctgaggcggctataaatcgacaaataaatcttgagttatacgcctcttacgtctacctaagcatgtcttactatttcgatcgcgacgacgttgcgctgaaaaacttcgctaaatatttcctgcatcagagccatgaagagagagaacatgctgagaagctgatgaaacttcagaaccagaggggtggacgtattttcctccaggacattaagaaaccggattgcgatgactgggagtctggcctaaatgccatggagtgcgctctccacttggagaagaacgttaaccagtcactcttagaactccataaactggcaaccgacaagaacgatccacatctgtgcgacttcatcgagacacattatctgaacgagcaggtgaaggcaattaaggaacttggggatcacgtgaccaatctacgaaaaatgggagccccggaaagtgggctggcagagtacttattcgataagcatactttgggagactcggataacgaaagttag

SEQ ID NO: 123386 - DNA, 699 bp, Artificial Sequence
  derived and/or modified sequence
agcggcttccccgccagcaccgtgctgggccggaaccccgccctggtgccccaccccgggaggcctcccattgcgtcaccaccatctcctctgcacagaaccttggggctgcctcagggccccaggcggctcagtctcgtggccgccatgactactgcctctacatcccaggtgcgccagaactaccaccaggattcagaagccgcaatcaacagacagattaatctcgaactgtacgcctcatacgtgtacctttctatgtcctactactttgacagggacgatgtcgccctgaagaattttgctaagtactttcttcatcagagccatgaggaacgcgagcacgcagagaagttgatgaagctccagaaccaaagaggaggccgaattttcctgcaggatataaaaaaaccagactgtgacgactgggaatcaggtttgaacgctatggagtgcgctctgcatctggaaaagaatgtcaaccaatctttgttagaactccataagttggccactgacaagaacgatcctcatttgtgcgattttatcgagactcactatctgaacgagcaggtgaaagccattaaggaactgggtgaccacgtgactaacctaagaaagatgggtgctccggaaagtgggctggccgaatatcttttcgacaaacacaccctgggtgattcagacaatgaaagctag

SEQ ID NO: 123387 - DNA, 462 bp, Artificial Sequence
  derived and/or modified sequence
atgaccaccgccagcaccagccagagctactacttcgaccgggacgatgtggccttaaagaattttgctaagtacttcctgcaccagtcccacgaagagcgagagcatgcagagaagcttatgaagttacagaatcaacgcggagggcgtatttttctacaggacattaagaaacccgactgtgacgattgggagagcggacttaacgcaatggagtgtgctctgcacctggaaaagaatgtgaatcagtccctgttagaactgcacaagctcgccacagataagaatgatccacatctgtgtgatttcatcgaaacccactacctgaatgaacaggtcaaagctattaaagaactgggcgaccacgtaaccaaccttcgaaaaatgggtgcacccgagtctggcctggccgagtacctgtttgacaagcatactctgggcgattcagataacgaaagctag

SEQ ID NO: 123388 - DNA, 552 bp, Artificial Sequence
  derived and/or modified sequence
atgactaccgctagtacttcacaggtcaggcaaaactaccatcaggacagtgaagcagcgataaatcgccagatcaacctagagctctacgcctcttacgtgtacctatcaatgtcctattactttgacagagacgatgtggctctgaagaactttgccaaatatttccttcatcagtcacacgaagaacgggaacatgctgaaaagctgatgaaactgcaaaaccaacgcggaggacgaattttcctgcaagatataaagaagccagactgtgatgactgggaaagcggattgaatgccatggagtgtgcactccatttggagaaaaacgtaaatcaatccctgctcgagcttcacaagttggcgacggataagaacgatccacatttgtgtgacttcattgaaacgcactatctgaacgagcaggtcaaggccatcaaggagctgggcgatcatgtgaccaaccttcgaaagatgggcgcacccgagagcggattggctgagtacctgtttgacaaacacaccctgggagacagcgataacgaatcctag

SEQ ID NO: 123389 - DNA, 699 bp, Artificial Sequence
  derived and/or modified sequence
tctggattcccagctagtaccgtcttaggaaggaatcccgctttagttcctcacccaggaaggcctcctatcgcaagtccaccgagccccctccaccgcactctcgggctgcctcagggtccgaggagactgtctctagttgccgctatgacgaccgccagcactagccaggtgagacagaattaccaccaggactctgaggctgcaatcaatcgccagattaacctcgagctctatgcatcctatgtatacctatctatgtcctattattttgatcgcgacgatgtagcccttaagaattttgctaagtattttcttcatcagtcccatgaagaaagggagcacgccgagaaactgatgaaactgcagaaccagaggggaggccgtattttccttcaggacattaagaagccagactgcgacgattgggagtctgggctaaatgcaatggagtgcgccctacacctggaaaagaacgtgaaccagtctctgctagaactccacaagctggcaaccgataagaacgatccccacctgtgcgacttcatcgaaactcattacctgaatgaacaggtcaaggctattaaagagctgggagatcatgtgaccaacctgcgcaaaatgggcgctccagaaagcggattagctgaatatcttttcgacaaacataccctcggtgactctgataacgaaagttag

SEQ ID NO: 123390 - DNA, 462 bp, Artificial Sequence
  derived and/or modified sequence
atgaccaccgcttctacatcccagagttattacttcgatcgagatgacgtggctttgaagaattttgccaagtacttcctccatcaatctcacgaagaacgtgagcatgctgaaaagctcatgaagctccagaaccagagagggggaaggattttcctgcaggacataaagaaacctgattgcgatgattgggagagcgggctgaatgccatggaatgcgcgctgcacctagagaaaaatgtcaatcagtctctcctggaactgcataagttggccacagataagaatgaccctcacctgtgcgattttatcgagacccactacctgaatgagcaagtcaaggccatcaaagaacttggggatcatgtgacgaaccttcggaagatgggagcaccagagagtggtcttgctgaatacctttttgacaaacatacactgggcgactcagacaatgaatcttag

SEQ ID NO: 123391 - DNA, 552 bp, Artificial Sequence
  derived and/or modified sequence
atgaccaccgccagcaccagccaggtgagacagaactaccaccaggacagcgaggccgccatcaacagacagatcaacctggagctgtacgccagctacgtgtacctgagcatgagctactacttcgacagagacgacgtggccctgaagaacttcgccaagtacttcctgcaccagagccacgaggagagagagcacgccgagaagctgatgaagctgcagaaccagagaggcggcagaatcttcctgcaggacatcaagaagcccgactgcgacgactgggagagcggcctgaacgccatggagtgcgccctgcacctggagaagaacgtgaaccagagcctgctggagctgcacaagctggccaccgacaagaacgacccccacctgtgcgacttcatcgagacccactacctgaacgagcaggtgaaggccatcaaggagctgggcgaccacgtgaccaacctgagaaagatgggcgcccccgagagcggcctggccgagtacctgttcgacaagcacaccctgggcgacagcgacaacgagagctag

SEQ ID NO: 123392 - DNA, 699 bp, Artificial Sequence
  derived and/or modified sequence
agcggcttccccgccagcaccgtgctgggcagaaaccccgccctggtgccccaccccggcagaccccccatcgccagcccccccagccccctgcacagaaccctgggcctgccccagggccccagaagactgagcctggtggccgccatgaccaccgccagcaccagccaggtgagacagaactaccaccaggacagcgaggccgccatcaacagacagatcaacctggagctgtacgccagctacgtgtacctgagcatgagctactacttcgacagagacgacgtggccctgaagaacttcgccaagtacttcctgcaccagagccacgaggagagagagcacgccgagaagctgatgaagctgcagaaccagagaggcggcagaatcttcctgcaggacatcaagaagcccgactgcgacgactgggagagcggcctgaacgccatggagtgcgccctgcacctggagaagaacgtgaaccagagcctgctggagctgcacaagctggccaccgacaagaacgacccccacctgtgcgacttcatcgagacccactacctgaacgagcaggtgaaggccatcaaggagctgggcgaccacgtgaccaacctgagaaagatgggcgcccccgagagcggcctggccgagtacctgttcgacaagcacaccctgggcgacagcgacaacgagagctag

SEQ ID NO: 123393 - DNA, 462 bp, Artificial Sequence
  derived and/or modified sequence
atgaccaccgccagcaccagccagagctactacttcgacagagacgacgtggccctgaagaacttcgccaagtacttcctgcaccagagccacgaggagagagagcacgccgagaagctgatgaagctgcagaaccagagaggcggcagaatcttcctgcaggacatcaagaagcccgactgcgacgactgggagagcggcctgaacgccatggagtgcgccctgcacctggagaagaacgtgaaccagagcctgctggagctgcacaagctggccaccgacaagaacgacccccacctgtgcgacttcatcgagacccactacctgaacgagcaggtgaaggccatcaaggagctgggcgaccacgtgaccaacctgagaaagatgggcgcccccgagagcggcctggccgagtacctgttcgacaagcacaccctgggcgacagcgacaacgagagctag

SEQ ID NO: 123394 - protein, 530 aa, Artificial Sequence
  derived and/or modified sequence
MRRLWGAARKPSGAGWEKEWAEAPQEAPGAWSGRLGPGRSGRKGRAVPGWASWPAHLALAARPARHLGGAGQGPRPLHSGTAPFHSRASGERQRRLEPQLQHESRCRSSTPADAWRAEAALPVRAMGAPWGSPTAAAGGRRGWRRGRGLPWTVCVLAAAGLTCTALITYACWGQLPPLPWASPTPSRPVGVLLWWEPFGGRDSAPRPPPDCRLRFNISGCRLLTDRASYGEAQAVLFHHRDLVKGPPDWPPPWGIQAHTAEEVDLRVLDYEEAAAAAEALATSSPRPPGQRWVWMNFESPSHSPGLRSLASNLFNWTLSYRADSDVFVPYGYLYPRSHPGDPPSGLAPPLSRKQGLVAWVVSHWDERQARVRYYHQLSQHVTVDVFGRGGPGQPVPEIGLLHTVARYKFYLAFENSQHLDYITEKLWRNALLAGAVPVVLGPDRANYERFVPRGAFIHVDDFPSASSLASYLLFLDRNPAVYRRYFHWRRSYAVHITSFWDEPWCRVCQAVQRAGDRPKSIRNLASWFER

SEQ ID NO: 123395 - DNA, 189 bp, Artificial Sequence
  derived and/or modified sequence
atgctgcaggtggtgcaggagggcaaccccgcccccttcatcatcaacacagtcaaaagaggcaggagagacagagaaaggcagaggaccccatgggcacctcatccactcgggttccaaggcaggcgctatatctacgagtccccaaatcaccggggaaaagacagtagtttcctggcccagaaatag

SEQ ID NO: 123396 - DNA, 6047 bp, Artificial Sequence
  derived and/or modified sequence
aatccctccctccggcgggcgtcgctggcgggtggctaggcccaacggcaggaagccgacgctatcctccgttccgcggcgccgggtccgccttccgtctgttctagggcctgctcctgcgcggcagctgctttagaaggtctcgagcctcctgtaccttcccagggatgaaccgggccttccctctggaaggcgagggttcgggccacagtgagcgagggccagggcggtgggcgcgcgcagagggaaaccggatcagttgagagagaatcaagagtagcggatgaggcgcttgtggggcgcggcccggaagccctcgggcgcgggctgggagaaggagtgggcggaggcgccgcaggaggctcccggggcctggtcgggccggctgggccccgggcgcagtggaagaaagggacgggcggtgcccggttgggcgtcctggccagctcaccttgccctggcggctcgccccgcccggcacttgggaggagcagggcagggcccgcggcctttgcattctgggaccgcccccttccattcccgggccagcggcgagcggcagcgacggctggagccgcagctacagcatgagagccggtgccgctcctccacgcctgcggacgcgtggcgagcggaggcagcgctgcctgttcgcgccatgggggcaccgtggggctcgccgacggcggcggcgggcgggcggcgcgggtggcgccgaggccgggggctgccatggaccgtctgtgtgctggcggccgccggcttgacgtgtacggcgctgatcacctacgcttgctgggggcagctgccgccgctgccctgggcgtcgccaaccccgtcgcgaccggtgggcgtgctgctgtggtgggagcccttcggggggcgcgatagcgccccgaggccgccccctgactgccggctgcgcttcaacatcagcggctgccgcctgctcaccgaccgcgcgtcctacggagaggctcaggccgtgcttttccaccaccgcgacctcgtgaaggggccccccgactggcccccgccctggggcatccaggcgcacactgccgaggaggtggatctgcgcgtgttggactacgaggaggcagcggcggcggcagaagccctggcgacctccagccccaggcccccgggccagcgctgggtttggatgaacttcgagtcgccctcgcactccccggggctgcgaagcctggcaagtaacctcttcaactggacgctctcctaccgggcggactcggacgtctttgtgccttatggctacctctaccccagaagccaccccggcgacccgccctcaggcctggccccgccactgtccaggaaacaggggctggtggcatgggtggtgagccactgggacgagcgccaggcccgggtccgctactaccaccaactgagccaacatgtgaccgtggacgtgttcggccggggcgggccggggcagccggtgcccgaaattgggctcctgcacacagtggcccgctacaagttctacctggctttcgagaactcgcagcacctggattatatcaccgagaagctctggcgcaacgcgttgctcgctggggcggtgccggtggtgctgggcccagaccgtgccaactacgagcgctttgtgccccgcggcgccttcatccacgtggacgacttcccaagtgcctcctccctggcctcgtacctgcttttcctcgaccgcaaccccgcggtctatcgccgctacttccactggcgccggagctacgctgtccacatcacctccttctgggacgagccttggtgccgggtgtgccaggctgtacagagggctggggaccggcccaagagcatacggaacttggccagctggttcgagcggtgaagccgcgctcccctggaagcgacccaggggaggccaagttgtcagctttttgatcctctactgtgcatctccttgactgccgcatcatgggagtaagttcttcaaacacccatttttgctctatgggaaaaaaacgatttaccaattaatattactcagcacagagatgggggcccggtttccatattttttgcacagctagcaattgggctccctttgctgctgatgggcatcattgtttaggggtgaaggagggggttcttcctcaccttgtaaccagtgcagaaatgaaatagcttagcggcaagaagccgttgaggcggtttcctgaatttccccatctgccacaggccatatttgtggcccgtgcagcttccaaatctcatacacaactgttcccgattcacgtttttctggaccaaggtgaagcaaatttgtggttgtagaaggagccttgttggtggagagtggaaggactgtggctgcaggtgggactttgttgtttggattcctcacagccttggctcctgagaaaggtgaggagggcagtccaagaggggccgctgacttctttcacaagtactatctgttcccctgtcctgtgaatggaagcaaagtgctggattgtccttggaggaaacttaagatgaatacatgcgtgtacctcactttacataagaaatgtattcctgaaaagctgcatttaaatcaagtcccaaattcattgacttaggggagttcagtatttaatgaaaccctatggagaatttatccctttacaatgtgaatagtcatctcctaatttgtttcttctgtctttatgtttttctataacctggattttttaaatcatattaaaattacagatgtgaaaataaagcagaagcaacctttttccctcttcccagaaaaccagtctgtgtttacagacagaagagaaggaagccatagtgtcacttccacacaattatttatttcatgtctttactggacctgaaatttaaactgcaatgccagtcctgcaggagtgctggcattaccctctgcagaacagtgaaaggtattgcactacattatggaatcatgcaaaaggaaaaaaagtttcatgatatctgttgttggcagtttttgtttatctctgacagtttttagttaaatgtttagatcctcagaactacattagtgcctactattaacttactctgtctcttgttaaaggctaaatctgcgcttctccctggtgccagcaggttcccctcacagtcaatgcagtggtatagcatatcctcacatttctagtgcccttgagactgtgctatggaaccaatcttgaacatacatgcattgacttgacaagttactgagtaagcagcatattcagcaggtgccactacatgcctactctgccagacactgagcttggggccctagggaagatagagaattatacaaggcaaagtccttctctttagggctcttacaatctatcacttccaaaaagtaaatggtgactgataaaacaattggcagaacctgtttgattactgtgacagtcttaatgataccataaatcaatattagaaagctagttgacttaaagcctgaaataatgggagttttctcctccacttattagaataaggaccctcagtgactaattattgtgggtagggtcaagattaactagttttatacagagttctgctgtaaatagtcattttgcatttgattagtgcagttctctgaatcataaagcaagttttacctctctgtacatgtttttgcagacatacttgaaaagctcacttaaatctaggtgcttcaattcactttcttgagaggacaaatgaaaagctgtggagaaaatgtcctcattaaagtattaaagtgtgggcagaattacaattacaaagtgccagccaccgaataaagataaaagttcagttcttaaaatgagtttttatgagataacagtcagtgatcttggtgttaccgggattccacatggggcagtgggaaagagttcaggttttgaaggtaacctagtttagatttgaattccagctatgtgacattgggtaaattagtagtagtcctgagcctcagcgtcctcatctataaaatgactggcgaaaatacttcacaagctcattttgagcactttaggaagtaagtgaaagtacctaaaatagcaggcacccaattgatgattttatatcttccttctttgcttgcagtgatttcaggatgtcctcatatctatttataggtctaaaattatatcttaaggtatgttgtagaataaattaaaaggataatctaaatcaccatttagattaagcttgacttgcaaactaggaagaagcacctaggctttctttgaaaatatttttttggttcgttttggtaaagctctataaattggtatctattattttaccaatttttttttagtattaagtccatttagaactaaccatattatttatggaataattagcatgaggaaggtataattgcatttttttttttttgagacggagtcttgcactgtagccccagctggactgcagtggcgtgatcttggctcactgcaacctccgcctcccaggttcaagcgattctcctgcctcagcctcccgagcagctgagactacaggcgcctgccaccacgcctggccaattttttgtatttttagtagagactgcgtttcaccatgttgggcaggctggtcttgaactcctgaccttgtgatccacctgcctcggcctctcagagagctgggattacaggtgtgagccgccgtgcccagccattgcatttttattcacatacacattgttaatgtggaacaatttaacactaatctcatcagagagcgagatgaatgtggcaattgctcattttattttgcatatattaaattgagtaggttcagctctaacataccttaagaaaaatgcatatcggtgcactgtatgtatttcaaaatgcctttcctatgattgtcatgtcctcctttaaggcttttccctcaaatttattacaaatttagtatttttagtacttgatgactctaattacatgaatgcacctggaatgacatttgtaacagaagacggtctgacttgctttcagtattcacaagttctttccagtttccaagtcttttcctagcagtaatttaggggagacagaggagtttcatgtaaagagcatgcagtttggagtcagaacctgggtatgactctgtggccttgatgaagcaagttacttaaactcttgagttttagctttctcctttacaatgcatgaatgcctatccccctacaaaacaaagattaaatgtgatgatgtatgccaaggtgctttgtatattgtaaagtgctatataattataagatgttctaaattttcaaggatctaaaccagggattggcaaacgtttttccagggagtaaatattttacgctttgcatatataatttatggaggtgttgagaggatagattagacacttgaagtactcaggatagtgcctggcatgtaggaagcacctggaaaatattcgctgtgattaccatcagtccattttaccgaggaaggagccaaggtccaggcccactgaaggacttgcataacattacaatagcagtggcagaaccagccatgcttctgcaaatcacaacctctttgagcctctgtcacctgaactgcaaaatgagtgggttagacaaaatcatctgttgggacctcctagttccacgtgctatcattctactaactggcaccctaaggttgaaagtgcttatctgctttccaatgtggcttccttacagtctggaactgacaatatgcaggagcagtaaactggcagaaaaccaggaatcagagaaagaaaatataatttaactttaaagatgtaaattatatatatagtatattatatatatttttaaagctttatatgcctcaaatatcagggaaaggagccaagtccttggtatttagtttggtgaatacttgcattgaatacatgtcaagatgtcaagtcatttttgaatgtgtctcagggatttctatgctacacattcttttaacaaatcaagtatttatgtacacatgttcagattttttgacaaaatgattaaaataatgagatggaaaatg

SEQ ID NO: 123397 - DNA, 1593 bp, Artificial Sequence
  derived and/or modified sequence
atgcggaggctgtggggggctgcgcggaaacccagcggggcaggctgggaaaaagagtgggccgaggccccgcaagaggctcccggggcctggagtggacggctcggcccaggacggtccggccgcaaagggcgggctgtccccggatgggcaagctggcctgctcatctggctctggctgccaggcctgcccgacatctgggcggagccggccagggtccaagacctcttcactccggcacggcaccatttcacagtcgcgcatctggtgaaagacagagacgcctcgaaccccagctgcagcatgaaagcagatgtcgctcatcaactcctgctgatgcctggcgcgcagaagcggccctccccgtccgagccatgggcgccccttgggggtcacctactgccgccgcaggagggagaagggggtggcgccggggtagaggtctgccttggacagtatgcgttctggccgccgctggcctgacctgcacggctctcatcacatatgcctgctggggacagctccctcctttgccctgggcctcaccaactccaagtagacccgtcggggttctcctgtggtgggaacctttcgggggcagggacagtgcaccccgccccccaccagactgtcgcctgaggttcaacatatccggctgtaggttgctgactgacagagcttcctacggagaggcacaggctgtcctgttccaccacagggacctggtgaagggccctccggattggcccccaccctgggggattcaagcccatacggccgaagaagtcgacctaagagtactggactacgaggaagccgcagccgcagccgaggccctggctacctcgagtccacgaccccccggacagcgttgggtttggatgaatttcgaatccccgtcccacagtccaggcctaagaagcttggccagtaacttgtttaattggaccttgagctatcgggccgactctgacgtgtttgttccctacggctacctgtatccccgctctcaccccggggaccctccttctgggctggcccccccattatcacgcaaacaagggcttgttgcttgggtggtcagtcactgggatgaaagacaggctagggtcagatactaccaccaacttagtcaacacgtgaccgtcgatgtcttcggcaggggcggtcctgggcagcctgtccccgaaatcggcctgctgcatacagtggcccgctacaagttttacttagcgttcgaaaactcgcagcacctggattatatcaccgaaaagctctggaggaatgcccttctcgcgggcgctgtccctgtagtgcttgggcccgatcgcgcaaattacgagcgtttcgtgccccggggagccttcatacacgtggatgactttccaagcgcaagtagtctggcttcctacctgctgtttttggataggaatccagccgtgtatagaaggtatttccactggaggcgctcatatgcagtgcacattacctcattctgggacgagccctggtgcagggtttgccaggccgtgcagagagcgggcgaccgccccaaaagcataaggaatttagcatcctggtttgagcggtag

SEQ ID NO: 123398 - DNA, 1593 bp, Artificial Sequence
  derived and/or modified sequence
atgaggcggctgtggggcgccgccaggaagcccagcggggccggctgggagaaggagtgggccgaggccccccaggaggcccctggggcctggagcggccgcctgggccctggccgcagcggcaggaagggccgggctgtgcccggctgggcctcctggccagcccacctggccctggccgcccggcctgcccggcacctgggcggggccggccagggcccccggcccctgcacagcggcacagcccccttccacagccgggccagcggggagcggcagaggcggctggagccccagctgcagcacgagagccgctgccgcagcagcaccccagcagatgcctggagggctgaggccgccctgcctgtgcgggccatgggcgccccctggggcagccccacagctgctgctgggggccggcggggctggaggcggggccggggcctgccctggacagtgtgtgtgctggccgctgctggcctgacctgcacagccctgatcacctacgcctgctggggccagctgccccccctgccctgggccagccccacccccagcaggcctgtgggcgtgctgctgtggtgggagccctttggaggccgggacagcgcccccaggcctcctccagactgccgcctgcgcttcaacatcagcggctgccgcctgctgacagaccgggccagctatggagaggcccaggccgtgctcttccaccaccgggacctggtgaagggccccccagactggcccccaccctggggcatccaggcccacacagctgaggaggtggacctgcgggtgctggactatgaggaggccgctgctgctgctgaggccctggccaccagcagccccaggcctcctggccagcgctgggtgtggatgaactttgagagccccagccacagccctggcctgcggagcctggccagcaacctcttcaactggaccctgagctacagagctgacagtgatgtgtttgtgccctacggctacctgtaccccaggagccaccctggggacccccccagcggcctggccccacccctgagcaggaagcagggcctggtggcctgggtggtgagccactgggatgagcggcaggcccgggtgcgctactaccaccagctgagccagcacgtgacagtggatgtgtttggccggggcggccctggccagcctgtgcctgagatcggcctgctgcacacagtggcccgctacaagttctacctggcctttgagaacagccagcacctggactacatcacagagaagctgtggagaaatgccctgctggccggggctgtgcctgtggtgctgggccctgaccgggccaactatgaaagatttgtgcccaggggggccttcatccacgtggatgacttccccagcgccagcagcctggccagctacctgctcttcctggacagaaatcctgctgtgtaccgccgctacttccactggaggaggagctatgctgtgcacatcaccagcttctgggatgagccctggtgccgggtgtgccaggccgtgcagagagctggggaccggcccaagagcatccggaacctggcctcctggtttgagaggtag

SEQ ID NO: 123399 - DNA, 1593 bp, Artificial Sequence
  derived and/or modified sequence
atgcggcggctgtggggcgccgcccggaagcccagcggcgccggctgggagaaggagtgggcagaagcaccccaggaggcaccaggagcctggagcgggaggctagggccggggagatcaggtcgtaaaggccgggccgtgccaggctgggccagttggcccgcccacttggcacttgcagctaggcccgcacgccatctcggcggcgcagggcaggggcctagaccactgcatagtgggactgcgcccttccactctagggcttccggtgagcgtcagaggcgcctggagcctcagctgcagcacgagagcagatgtagatcctctactcctgcggacgcctggcgtgcggaagcagctttgcctgtgagggccatgggagctccatgggggtctccaacggcggccgcaggtggccgccgcgggtggagaagggggaggggcctgccatggacagtctgcgtgctggcagcggccggtctgacgtgcacagccctgattacatacgcctgctggggtcagctgccacctctgccttgggcctcgcctacccccagcagacctgttggcgtgctgctctggtgggagcctttcggtggaagagatagtgccccgcggccgcctccagattgccgactaagatttaatatctctgggtgccggctactcaccgatcgtgcttcctacggcgaggcccaggctgtgctgtttcaccaccgggatctggtgaaaggaccaccggattggcctcctccttggggaatccaggcacacacagcggaagaggtggacctgcgggttctggactatgaagaggccgcagcagctgccgaagccttagcaactagttcaccacgccctccagggcagcgatgggtctggatgaacttcgaaagtccgtcccatagccccggcttacgcagcttagcgtcaaacctgttcaactggaccttgagctaccgcgcagactctgatgtcttcgtgccttatggctacctgtaccctcgtagccatcctggagatcccccatctggtctggcgcccccattgtcgcgaaagcaggggctagtggcctgggtggtttcacattgggatgaaaggcaggcaagagtgagatattaccaccaactctcccagcacgtcacagtggacgtgtttgggcgtggaggtccaggacaacccgtccccgagattggactcctacacaccgtagccaggtacaagttctatctcgcgttcgagaacagtcagcacctggattacatcacagaaaaactgtggagaaatgctcttctcgccggcgctgttccagttgtgctcgggcccgaccgagcgaattatgagcggttcgttcctcgtggcgcttttatccacgtagatgacttccctagtgccagctcactcgcttcgtatctgctgtttctagataggaatcctgccgtgtaccgaaggtattttcactggcggaggagctacgctgtgcatattacatcattttgggatgagccatggtgtagggtgtgccaggcagtccaacgtgcaggagacaggcccaagagtattcgtaatctggcgtcctggtttgaacgctag

SEQ ID NO: 123400 - DNA, 1593 bp, Artificial Sequence
  derived and/or modified sequence
atgaggagactctggggggctgctagaaaaccctcaggtgccggatgggagaaggagtgggccgaagcacctcaagaagcgcctggcgcttggtctggaagactaggcccaggaagatcagggagaaaaggaagagctgtcccagggtgggcttcctggcccgctcacctcgctctggcagctcgtcccgctcgacacctcggaggggctggacaggggccaaggcccttgcactctggcacagctccattccactctcgggcaagcggcgagcgccagcgaagactggagccccaactgcagcatgagtcccggtgccgatcttccactccggcagacgcttggcgcgcagaagctgcgcttccggtcagagcgatgggggctccctggggtagccctactgctgcagcgggagggagacggggatggcggaggggccgtggtctcccatggactgtgtgtgtcctggctgctgctggcttaacatgcacagccctgataacatatgcttgttgggggcaacttcctcctctgccttgggcctctcccacaccctcgaggcctgtcggtgtcttgctatggtgggaacctttcggaggcagggacagcgcacctcgaccgcctcccgattgccgtctgaggttcaacatttccggatgtaggctgttgactgaccgtgcctcttacggagaggcccaggccgttttgtttcaccaccgggacctcgtgaaggggcctccagattggccacctccctgggggattcaggcgcacaccgcagaagaagtggacctgcgggtactcgattatgaagaagccgctgccgcagccgaggcactcgccacctcaagcccaaggccaccgggtcagcggtgggtttggatgaactttgagtctccctcccactcgccaggactacgctcactcgcctctaacctgtttaactggacgctgtcttatagagccgactccgacgtctttgtcccctacggctatctctacccgagatctcatccaggagaccccccatccggactggcacctcctttgtctcggaaacaggggttagtcgcctgggtggtgtctcattgggatgagagacaagcgagggtccgctactatcaccaactgtcgcagcatgtgacagtggacgtgtttggtcggggaggtccagggcaacctgtacccgagataggcctgctgcacacagttgccaggtacaaattctatctggcttttgagaattcacagcatctcgactacattaccgagaagttgtggcgcaatgccttgctggctggagctgtgcccgtggtcttaggtccagatagagcgaactacgaaagattcgtacctcgaggtgcctttattcacgtcgatgattttcctagtgcttcctcactggcgtcatacctattgtttctggaccgtaacccggctgtctataggcgctactttcactggcggcgtagctatgcagtccacataactagtttctgggacgagccatggtgtagagtgtgccaagcggtccagcgcgctggtgaccgcccaaaatccattaggaacctggccagctggtttgagcggtag

SEQ ID NO: 123401 - DNA, 1593 bp, Artificial Sequence
  derived and/or modified sequence
atgagaagactgtggggcgccgccagaaagcccagcggcgccggctgggagaaggagtgggccgaggccccccaggaggcccccggcgcctggagcggcagactgggccccggcagaagcggcagaaagggcagagccgtgcccggctgggccagctggcccgcccacctggccctggccgccagacccgccagacacctgggcggcgccggccagggccccagacccctgcacagcggcaccgcccccttccacagcagagccagcggcgagagacagagaagactggagccccagctgcagcacgagagcagatgcagaagcagcacccccgccgacgcctggagagccgaggccgccctgcccgtgagagccatgggcgccccctggggcagccccaccgccgccgccggcggcagaagaggctggagaagaggcagaggcctgccctggaccgtgtgcgtgctggccgccgccggcctgacctgcaccgccctgatcacctacgcctgctggggccagctgccccccctgccctgggccagccccacccccagcagacccgtgggcgtgctgctgtggtgggagcccttcggcggcagagacagcgcccccagacccccccccgactgcagactgagattcaacatcagcggctgcagactgctgaccgacagagccagctacggcgaggcccaggccgtgctgttccaccacagagacctggtgaagggcccccccgactggccccccccctggggcatccaggcccacaccgccgaggaggtggacctgagagtgctggactacgaggaggccgccgccgccgccgaggccctggccaccagcagccccagaccccccggccagagatgggtgtggatgaacttcgagagccccagccacagccccggcctgagaagcctggccagcaacctgttcaactggaccctgagctacagagccgacagcgacgtgttcgtgccctacggctacctgtaccccagaagccaccccggcgacccccccagcggcctggccccccccctgagcagaaagcagggcctggtggcctgggtggtgagccactgggacgagagacaggccagagtgagatactaccaccagctgagccagcacgtgaccgtggacgtgttcggcagaggcggccccggccagcccgtgcccgagatcggcctgctgcacaccgtggccagatacaagttctacctggccttcgagaacagccagcacctggactacatcaccgagaagctgtggagaaacgccctgctggccggcgccgtgcccgtggtgctgggccccgacagagccaactacgagagattcgtgcccagaggcgccttcatccacgtggacgacttccccagcgccagcagcctggccagctacctgctgttcctggacagaaaccccgccgtgtacagaagatacttccactggagaagaagctacgccgtgcacatcaccagcttctgggacgagccctggtgcagagtgtgccaggccgtgcagagagccggcgacagacccaagagcatcagaaacctggccagctggttcgagagatag

SEQ ID NO: 123402 - protein, 374 aa, Artificial Sequence
  derived and/or modified sequence
MDPLGPAKPQWLWRRCLAGLLFQLLVAVCFFSYLRVSRDDATGSPRPGLMAVEPVTGAPNGSRCQDSMATPAHPTLLILLWTWPFNTPVALPRCSEMVPGAADCNITADSSVYPQADAVIVHHWDIMYNPSANLPPPTRPQGQRWIWFSMESPSNCRHLEALDGYFNLTMSYRSDSDIFTPYGWLEPWSGQPAHPPLNLSAKTELVAWAVSNWKPDSARVRYYQSLQAHLKVDVYGRSHKPLPKGTMMETLSRYKFYLAFENSLHPDYITEKLWRNALEAWAVPVVLGPSRSNYERFLPPDAFIHVDDFQSPKDLARYLQELDKDHARYLSYFHWRETLRPRSFSWALAFCKACWKLQQESRYQTVRSIAAWFT

SEQ ID NO: 123403 - DNA, 1988 bp, Artificial Sequence
  derived and/or modified sequence
gattacagacatgagccacctcgcccagccttttcatggctgagtgatattccattgtgtggatggatcacactagctactctgacccatggatcccctgggcccagccaagccacagtggctgtggcgccgctgtctggccgggctgctgtttcagctgctggtggctgtgtgtttcttctcctacctgcgtgtgtcccgagacgatgccactggatcccctaggccagggcttatggcagtggaacctgtcaccggggctcccaatgggtcccgctgccaggacagcatggcgacccctgcccaccccaccctactgatcctgctgtggacgtggccttttaacacacccgtggctctgccccgctgctcagagatggtgcccggcgcggccgactgcaacatcactgccgactccagtgtgtacccacaggcagacgcggtcatcgtgcaccactgggatatcatgtacaaccccagtgccaacctcccgccccccaccaggccgcaggggcagcgctggatctggttcagcatggagtcccccagcaactgccggcacctggaagccctggacggatacttcaatctcaccatgtcctaccgcagcgactccgacatcttcacgccctacggctggctggagccgtggtccggccagcctgcccacccaccgctcaacctctcggccaagaccgagctggtggcctgggcggtgtccaactggaagccggactcggccagggtgcgctactaccagagcctgcaggctcatctcaaggtggacgtgtacggacgctcccacaagcccctgcccaaggggaccatgatggagacgctgtcccggtacaagttctatctggccttcgagaactccttgcaccccgactacatcaccgagaagctgtggaggaacgccctggaggcctgggccgtgcccgtggtgctgggccccagcagaagcaactacgagaggttcctgccacccgacgccttcatccacgtggacgacttccagagccccaaggacctggcccggtacctgcaggagctggacaaggaccacgcccgctacctgagctactttcactggcgggagacgctgcggcctcgctccttcagctgggcactggctttctgcaaggcctgctggaagctgcagcaggaatctaggtaccagacggtgcgcagcatagcggcttggttcacctgagaggccggcatggggcctgggctgccgggacctcactttcccagggcctcacctacctagggtctcactagtcgggggatttacctacctggggcctcggctgcctggggcctcggctgcctggggtctcacctgcctggggcctcacctgctggagtctttggtggccaggcatgtgacttacctgggatttcacttgccgggcttcactgccaggagcctcccctgctggggaccttgccagctggggctggggatggtgcctactggggaccttgctttctggaggctgcacctactgaggatctcggctgttggggactttacctgctgggacctgctcccagagaccttgccacactgaatgtcacctgctaggagcctcacccgctgggaggcacagggcccaagggagctggatgtgttgcccaaggtgtgcagggcaggtcagggaagggcagggtcccctaaggaggagggcgaagggtatgtgtgtgaccatcagcagtggtgtgcacatggctgggggacactcggtttgaccgccagcggatgggtgtcacaaatgcatcactatgggtgtgacctcggcgtgactctgatagtgcctgtggatgtgttgcgatgcctcaccctggagggcactgggccctgagaacgggtgcccttgaggccctgcccccgggcgatggtgcaggctggtttgcttgtggttttattgctgttgttaaccacccatgaggggtgcaaacagataatgctgttaacattttca

SEQ ID NO: 123404 - DNA, 2118 bp, Artificial Sequence
  derived and/or modified sequence
tctcgcgatagccagccgcggctgcccttgcgcttcccgagctggcggggtccgtggtgcgggatcgagattgcgggctatggcgccgaaggtttttcgtcagtactgggatatccccgatggcaccgattgccaccgcaaagcctacagcaccaccagtattgccagcgtcgctggcctgaccgccgctgcctacagagtcacactcaatcctccgggcaccttccttgaaggagtggctaaggttggacaatacacgttcactgcagctgctgtcggggccgtgtttggcctcaccacctgcatcagcgcccatgtccgcgagaagcccgacgaccccctgaactacttcctcggtggctgcgccggaggcctgactctgggagcacgcaagactgggtttcaccgtgttagccaggatggtcttgatctcctgacctcgtgatctacctgcctcggcctcccaaagtgctgggattacagacatgagccacctcgcccagccttttcatggctgagtgatattccattgtgtggatggatcacactagctactctgacccatggatcccctgggcccagccaagccacagtggctgtggcgccgctgtctggccgggctgctgtttcagctgctggtggctgtgtgtttcttctcctacctgcgtgtgtcccgagacgatgccactggatcccctaggccagggcttatggcagtggaacctgtcaccggggctcccaatgggtcccgctgccaggacagcatggcgacccctgcccaccccaccctactgatcctgctgtggacgtggccttttaacacacccgtggctctgccccgctgctcagagatggtgcccggcgcggccgactgcaacatcactgccgactccagtgtgtacccacaggcagacgcggtcatcgtgcaccactgggatatcatgtacaaccccagtgccaacctcccgccccccaccaggccgcaggggcagcgctggatctggttcagcatggagtcccccagcaactgccggcacctggaagccctggacggatacttcaatctcaccatgtcctaccgcagcgactccgacatcttcacgccctacggctggctggagccgtggtccggccagcctgcccacccaccgctcaacctctcggccaagaccgagctggtggcctgggcggtgtccaactggaagccggactcggccagggtgcgctactaccagagcctgcaggctcatctcaaggtggacgtgtacggacgctcccacaagcccctgcccaaggggaccatgatggagacgctgtcccggtacaagttctatctggccttcgagaactccttgcaccccgactacatcaccgagaagctgtggaggaacgccctggaggcctgggccgtgcccgtggtgctgggccccagcagaagcaactacgagaggttcctgccacccgacgccttcatccacgtggacgacttccagagccccaaggacctggcccggtacctgcaggagctggacaaggaccacgcccgctacctgagctactttcactggcgggagacgctgcggcctcgctccttcagctgggcactggctttctgcaaggcctgctggaagctgcagcaggaatctaggtaccagacggtgcgcagcatagcggcttggttcacctgagaggccggcatggggcctgggctgccgggacctcactttcccagggcctcacctacctagggtctcactagtcgggggatttacctacctggggcctcggctgcctggggcctcggctgcctggggtctcacctgcctggggcctcacctgctggagtctttggtggccaggcatgtgacttacctgggatttcacttgccgggcttcactgccaggagcctcccctgctggggaccttgccagctggggctggggatggtgcctactggggaccttgctttctggaggctgcacctactgaggatctcggctgttggggactttacctgctgggacctgctcccagagaccttgccacactgaatgtcacctgctaggagcctcacccgctgggaggcacagggcccaagggagctggatgtgttgccc

SEQ ID NO: 123405 - DNA, 1125 bp, Artificial Sequence
  derived and/or modified sequence
atggaccccttgggacccgcaaagccacagtggctctggagacgttgcctggctggcctcttattccagctccttgtggccgtttgtttcttttcatacctgcgcgttagccgagatgatgctaccggctcaccccgacctggattgatggccgtggaacccgtgactggggcccctaacggcagccgctgtcaggattctatggctacacctgcgcacccaacactcctcatactgctctggacttggccttttaatacacccgtggcccttccccggtgctctgagatggtcccaggggctgcagattgtaatattaccgccgattcaagcgtgtacccacaggctgatgcggtgatcgtgcatcactgggacattatgtataacccaagcgcaaatctccccccacctacacggccgcagggacaacggtggatctggttctcaatggagtcacctagcaattgcagacatttagaggccttggacggatatttcaacctcactatgagctaccgatccgactcagatatatttaccccgtacggatggcttgagccatggtctggccagcccgcacatccaccgctcaacctttcagccaagacagagctcgtggcctgggctgtgagtaactggaagcctgacagtgccagagtgcggtattaccagagtcttcaggcccatttgaaagtcgatgtctatggccggagtcacaagcccttacccaaagggacaatgatggagacgctgtctcggtacaagttctacttggcgttcgaaaactcgttgcatccagactatatcaccgaaaagctatggcgaaatgccctggaggcgtgggccgtccccgttgtcctgggaccctctcgcagcaactatgaaaggtttttgcctcccgatgccttcattcacgtcgatgattttcagagtcccaaggatctggctcgctacctccaggaattagataaggaccatgcgaggtacctttcttacttccactggagggaaaccctgcgacctaggagcttcagctgggctctggctttttgtaaagcctgctggaaactgcagcaggagtctcgctaccagaccgtgcggagcatcgccgcctggttcacatag

SEQ ID NO: 123406 - DNA, 1125 bp, Artificial Sequence
  derived and/or modified sequence
atggacccactgggcccggccaaaccacagtggctttggcgacggtgcctcgcagggctcctgttccagctcctcgtagcggtttgtttcttctcatacttgcgagtgtcccgcgatgacgctacaggaagccctcgaccgggactgatggccgtagagcctgtcaccggcgcacccaatgggtctcgatgccaagatagcatggccactcctgcccatcccaccttactgattctcctttggacatggccgttcaatactccagtcgccctgccccgctgtagcgaaatggtccccggtgccgctgattgcaatattacggctgacagctctgtctaccctcaagcagacgcagttatcgtgcaccactgggacatcatgtataacccttcagctaacttaccaccacctacacggcctcagggccagagatggatctggttctccatggaatctccaagtaattgccggcatctcgaggccttggacggctattttaatctcaccatgtcctataggtccgattctgatatcttcacaccatatggatggttagagccgtggtctggccagcccgcccatcctccccttaatctctctgcaaagaccgagctggtggcctgggcagtatctaactggaaacccgactcggcccgagtgagatattaccagagtctccaagcccaccttaaggtggatgtatacggcagaagccacaagcccttgccgaaaggtactatgatggagacactctcacggtacaaattctacttggcgtttgaaaacagccttcatcctgattatattacagaaaaactgtggcggaatgctttggaggcttgggccgtgcccgtggtgctcggaccctctagatctaactacgagaggtttctcccgcccgatgccttcatccatgtggatgatttccagtcccctaaagatttagctagatacctccaagaactagacaaagaccacgccaggtatctgagttacttccactggcgggaaacgctgaggccccgtagcttctcttgggcactcgcattttgcaaggcatgctggaagctccagcaggagagcagataccagaccgtgcggagcatagccgcatggttcacctag

SEQ ID NO: 123407 - DNA, 1125 bp, Artificial Sequence
  derived and/or modified sequence
atggaccccctgggccctgccaagccccagtggctgtggaggcgctgcctggccggcctgctcttccagctgctggtggccgtgtgcttcttctcctacctgcgggtgtccagagatgatgccaccggcagccccaggcctggcctgatggctgtggagcctgtgactggagcccccaacggcagccgctgccaggacagcatggccaccccagcccaccccaccctgctgatcctgctgtggacctggcccttcaacacccctgtggccctgccccgctgcagcgagatggtgcctggagctgctgactgcaacatcacagctgacagctctgtgtacccccaggctgatgctgtgattgtgcaccactgggacatcatgtacaaccccagcgccaacctgcccccacccacccggccccagggccagcgctggatctggttctccatggagagccccagcaactgccgccacctggaggccctggatggctacttcaacctgaccatgagctacagaagtgacagcgacatcttcaccccctacggctggctggagccctggagcggccagcctgcccacccccccctgaacctgagcgccaagacagagctggtggcctgggccgtgagcaactggaagccagattctgcccgggtgcgctactaccagagcctgcaggcccacctgaaggtggatgtgtatggccgcagccacaagcccctgcccaagggcaccatgatggagaccctgagccgctacaagttctacctggcctttgagaacagcctgcacccagactacatcacagagaagctgtggagaaatgccctggaggcctgggccgtgcctgtggtgctgggccccagccgcagcaactatgagcgcttcctgcccccagatgccttcatccacgtggatgacttccagagccccaaggacctggcccgctacctgcaggagctggacaaggaccacgcccgctacctgagctacttccactggagggagaccctgcggcccaggagcttctcctgggccctggccttctgcaaggcctgctggaagctgcagcaggagagccgctaccagacagtgcgcagcattgctgcctggttcacctag

SEQ ID NO: 123408 - DNA, 1125 bp, Artificial Sequence
  derived and/or modified sequence
atggaccccctgggccccgccaagccccagtggctgtggcggcggtgtttggctgggcttctgttccagttactggtcgccgtctgcttttttagttaccttcgggtttcacgagatgacgccacaggttcacctcgaccgggcctgatggccgttgagccagtgaccggggcgcctaatgggtctaggtgccaggatagcatggctactcccgcacaccctacgctgcttattttgctctggacatggccttttaacacgccggtcgccctcccaagatgttcagagatggtcccgggggctgcagactgcaacatcaccgccgatagcagcgtatacccacaggcagacgcagtcattgtacatcactgggacatcatgtacaatccatctgcgaacctgcctccccccactagaccccagggccagcgttggatttggtttagcatggaaagcccaagtaattgcagacacctcgaggcactggatgggtacttcaatttaactatgtcttatcggtccgattcagacattttcaccccatatggctggttagaaccttggagcggccaacccgctcatcctcccctcaatttatccgctaaaactgagctcgtcgcctgggctgtgtctaactggaagccagattccgcccgtgtccgctactatcaatctctgcaagctcacctgaaggtggatgtgtatggccgcagccacaaacctcttcccaaagggacaatgatggaaacactcagccgctacaaattctatcttgccttcgagaacagcctccaccccgactacatcacggagaagctatggagaaacgcattagaggcttgggcggttcccgtagtgctcggtccatctagatccaactacgagcgatttctgccacctgacgccttcatccatgttgacgactttcaatctcccaaagatttggcgaggtatctgcaagagctcgataaggatcatgctcgctacctgtcatacttccattggagagagacactgcgcccgagaagcttctcgtgggctttggcattttgtaaagcctgttggaaattgcagcaagagtcacggtaccagaccgtcagatctattgcagcctggttcacgtag

SEQ ID NO: 123409 - DNA, 1125 bp, Artificial Sequence
  derived and/or modified sequence
atggaccccctgggccccgccaagccccagtggctgtggcggcggtgcctggccggtctgctgttccagctgctggtggcagtgtgctttttctcttacctgagggtgtctcgggatgacgccaccggctccccaagaccggggttgatggcggtggagcccgtgaccggtgcaccaaacggatcaagatgccaggatagcatggcgacacccgcccatcccactctcctcatcctgctgtggacttggccctttaacactcctgtggctctgcctaggtgtagcgagatggtgcccggggcggctgattgcaacattactgcagacagctccgtataccctcaggctgacgcggtcatagtccaccattgggacatcatgtacaacccttccgcgaaccttcccccacctacccggccacaaggacaacggtggatctggttctccatggaatcaccctcaaactgccgacacctggaggcactcgatggctacttcaatcttaccatgagctacagaagcgactctgacattttcaccccctatggttggctggagccatggtcaggccagcctgcacacccccctctcaacctctccgcaaagaccgaattagtggcttgggcggtaagcaactggaagcccgactcggcacgcgtgagatattatcaaagtctacaagctcacctgaaggttgacgtttatggacggagtcacaaaccactgccaaaagggaccatgatggaaactctctctaggtacaagttttatctggcttttgagaacagccttcatccagactacattactgagaagttgtggagaaatgccctggaggcctgggctgttcccgttgtgctcggtccttctcgctccaattacgaaagatttcttccaccggatgcctttattcacgtggacgacttccagagtcctaaggacctagctagatacctgcaggagctcgataaggatcacgcccggtatctgtcctatttccactggcgagagacattgcgccccagatccttctcctgggcgttagcgttttgcaaggcttgttggaaattacagcaagagtctagataccaaactgtgaggagtatcgctgcctggttcacctag

SEQ ID NO: 123410 - DNA, 1125 bp, Artificial Sequence
  derived and/or modified sequence
atggacccccttggacctgccaaaccccagtggctgtggcgtcggtgccttgcaggcctcttgttccagctgctagtcgctgtgtgcttcttcagctacctgagggtcagccgagacgacgccaccggcagtccccgaccagggctgatggctgtggaacccgtgaccggtgcacccaatgggtcaagatgtcaggattcaatggccactccagcacaccctacactgttgattctcctatggacatggccatttaacacgcccgtggccctaccccgatgtagtgagatggtgccaggggcagcagattgtaacattactgccgatagctccgtctatccccaagccgacgccgttattgtccaccactgggatatcatgtataaccctagcgcaaacttgccaccccctactaggccacaagggcagcggtggatttggttcagcatggaaagcccatcaaactgccgacacttagaggccctggacggctacttcaatctgactatgagttatagaagcgactcagatatatttactccttacgggtggctggaaccatggtcaggccaaccggctcatcccccattgaatcttagcgctaagacggagttagtagcctgggctgtgagcaactggaagccagactccgctagagtgaggtactaccaatcattacaggctcatctgaaggtggatgtgtatggacgcagtcacaagccacttccaaaggggactatgatggaaactttgtctagatacaagttctacctggcctttgaaaattctctgcatcctgactacatcaccgaaaaactctggcgaaatgcccttgaggcatgggccgtcccggtggtactaggtccatctcgatctaattatgaacggttcctgccgcctgacgctttcatccacgtggacgatttccaaagccccaaggatcttgccagatatctccaagagcttgataaagatcacgcacgctacttaagttacttccactggagggaaacactgagacctcgctcttttagctgggcgcttgcattctgcaaggcgtgttggaagctgcagcaagaatctcgctatcagactgttcgcagcatagcggcatggtttacctag

SEQ ID NO: 123411 - DNA, 1125 bp, Artificial Sequence
  derived and/or modified sequence
atggaccctcttgggccagctaaaccccagtggctgtggagaagatgcctcgcagggctcctgttccaattgctggtcgcggtttgttttttcagctacttgcgcgtcagccgggatgacgccactggtagcccaagacccggactaatggctgtagagcccgtgaccggcgcaccgaacggtagccggtgccaggacagtatggcaacacctgcacatccaaccctgctcatcttactgtggacctggccctttaatacccctgttgccctccccaggtgcagcgagatggtcccaggtgccgctgactgtaacataactgccgacagctccgtgtatcctcaggccgatgccgtcatcgtccaccactgggacataatgtataatccgtctgctaaccttcccccacccacacgcccacaagggcagcgctggatctggttcagtatggagagcccgagcaattgccggcacctggaagccctggacggctattttaatctaactatgtcataccgttctgatagcgacatctttaccccctacggctggctcgagccatggtctggccaacctgcccacccccctttgaacttgtccgcaaagacagaactggttgcatgggcagtttcaaattggaagcctgacagtgcacgcgttcggtattatcagtcactccaggctcacctcaaggttgacgtttacggaagatcacacaagcctcttccaaaggggacaatgatggagacgctttccagatataagttctatttggccttcgaaaacagccttcaccccgattacatcacggagaagttatggagaaatgccctggaggcttgggctgtgccggtggtcctcggtccttctcgtagtaactacgagcggttcctccctccagatgctttcatccatgtggacgactttcaaagccccaaagatctagctaggtacctacaggaactggacaaagaccacgcacgctatctctcctattttcactggagagaaactctgcggcctagatctttcagttgggccctcgcattttgtaaagcctgttggaaactgcagcaggagagccggtatcagaccgtgaggtccatcgccgcttggttcacatag

SEQ ID NO: 123412 - DNA, 1125 bp, Artificial Sequence
  derived and/or modified sequence
atggaccccctgggccccgccaagccccagtggctgtggagaagatgcctggccggcctgctgttccagctgctggtggccgtgtgcttcttcagctacctgagagtgagcagagacgacgccaccggcagccccagacccggcctgatggccgtggagcccgtgaccggcgcccccaacggcagcagatgccaggacagcatggccacccccgcccaccccaccctgctgatcctgctgtggacctggcccttcaacacccccgtggccctgcccagatgcagcgagatggtgcccggcgccgccgactgcaacatcaccgccgacagcagcgtgtacccccaggccgacgccgtgatcgtgcaccactgggacatcatgtacaaccccagcgccaacctgcccccccccaccagaccccagggccagagatggatctggttcagcatggagagccccagcaactgcagacacctggaggccctggacggctacttcaacctgaccatgagctacagaagcgacagcgacatcttcaccccctacggctggctggagccctggagcggccagcccgcccacccccccctgaacctgagcgccaagaccgagctggtggcctgggccgtgagcaactggaagcccgacagcgccagagtgagatactaccagagcctgcaggcccacctgaaggtggacgtgtacggcagaagccacaagcccctgcccaagggcaccatgatggagaccctgagcagatacaagttctacctggccttcgagaacagcctgcaccccgactacatcaccgagaagctgtggagaaacgccctggaggcctgggccgtgcccgtggtgctgggccccagcagaagcaactacgagagattcctgccccccgacgccttcatccacgtggacgacttccagagccccaaggacctggccagatacctgcaggagctggacaaggaccacgccagatacctgagctacttccactggagagagaccctgagacccagaagcttcagctgggccctggccttctgcaaggcctgctggaagctgcagcaggagagcagataccagaccgtgagaagcatcgccgcctggttcacctag

SEQ ID NO: 123413 - protein, 332 aa, Artificial Sequence
  derived and/or modified sequence
MLLLAAAFLVAFVLLLYMVSPLISPKPLALPGAHVVVTGGSSGIGKCIAIECYKQGAFITLVARNEDKLLQAKKEIEMHSINDKQVVLCISVDVSQDYNQVENVIKQAQEKLGPVDMLVNCAGMAVSGKFEDLEVSTFERLMSINYLGSVYPSRAVITTMKERRVGRIVFVSSQAGQLGLFGFTAYSASKFAIRGLAEALQMEVKPYNVYITVAYPPDTDTPGFAEENRTKPLETRLISETTSVCKPEQVAKQIVKDAIQGNFNSSLGSDGYMLSALTCGMAPVTSITEGLQQVVTMGLFRTIALFYLGSFDSIVRRCMMQREKSENADKTA

SEQ ID NO: 123414 - DNA, 807 bp, Artificial Sequence
  derived and/or modified sequence
atgcttcttctggcagcagctttcttggtggcttttgtgctccttttatatatggtctctcctcttatcagccctaaacccttggcgctaccaggtgcccacgtcgtagtcaccggtgggtcctcaggcataggaaagtgcatcgcaatagaatgctataagcagggggctttcataacccttgtggctcgtaacgaggacaaactgctgcaggccaagaaggagatagagatgcactccattaacgacaaacaggttgtgctgtgtatctccgttgacgtgagccaggattataaccaggttgaaaacgttataaagcaggcccaggaaaagttggggccagtggacatgctagtaaactgcgccggaatggctgttagtggaaagtttgaggatctggaggtgtctaccttcgaggtcaaaccttacaacgtttatatcactgtcgcctacccgcctgacactgacacaccgggatttgccgaggaaaatcgaaccaaaccgttggagacccgcctgattagcgagactaccagcgtgtgtaaacccgaacaagtggcaaagcagattgttaaggacgcaattcaggggaacttcaattcatccctgggctctgacgggtatatgcttagtgccctgacttgtgggatggccccagtgacatcaatcaccgaagggctgcaacaggttgtcactatgggactatttagaaccatcgctcttttctatttgggttcttttgatagcattgtacgtaggtgcatgatgcagcgcgaaaaaagtgaaaacgccgataagacggcatag

SEQ ID NO: 123415 - DNA, 5435 bp, Artificial Sequence
  derived and/or modified sequence
ggcgcgctcgcatctggcgctgtccggagcccgctcgcgacgcacagggacgggaggcccggtttccacgggagaggctgcggactgcgggccccgtcccgaggccgggggagtgggagacacccggcgacccccgagaggcgattctggcagtggtggcggtggcggtggcggtggcggcctactcgccccctggaagcaccgccccgcctgggtggcgcgcgcgccggctcctcctcttcccctccgccgcggcccgccccggcccgcaaacccaaacactccaggcgcccgcccgccgcgcgtgattctcgcctcgccgcagcccagccctgcgcgccttgcccggcggcccccgcccggccgctccgggcccctggccccgcggagcgatgctgctgctggctgccgccttcctcgtggccttcgtgctgctgctgtacatggtgtctccgctcatcagccccaagcccctcgccctgcccggggcgcatgtggtggttacaggaggttccagtggcatcgggaagtgcattgctatcgagtgctataaacaaggagcttttataactctggttgcacgaaatgaggataagctgctgcaggcaaagaaagaaattgaaatgcactctattaatgacaaacaggtggtgctttgcatatcagttgatgtatctcaagactataaccaagtagagaatgtcataaaacaagcacaggagaaactgggtccagtggacatgctggtaaattgtgcaggaatggcagtgtcaggaaaatttgaagatcttgaagttagtacctttgaaaggttaatgagcatcaattacctgggcagcgtgtaccccagccgggccgtgatcaccaccatgaaggagcgccgggtgggcaggatcgtgtttgtgtcctcccaggcaggacagttgggattattcggtttcacagcctactctgcatccaagtttgccataaggggattggcagaagctttgcagatggaggtgaagccatataatgtctacatcacagttgcttacccaccagacacagacacacctggctttgccgaagaaaacagaacaaagcctttggagactcgacttatttcagagaccacatctgtgtgcaaaccagaacaggtggccaaacaaattgttaaagatgccatacaaggaaatttcaacagttcccttggctcagatgggtacatgctctcggccctgacctgtgggatggctccagtaacttctattactgaggggctccagcaggtggtcaccatgggccttttccgcactattgctttgttttaccttggaagttttgacagcatagttcgtcgctgcatgatgcagagagaaaaatctgaaaatgcagacaaaactgcctaatcttcttaccccttggaagaagactgtttccaaataatttgaacagcttgctgctaaatgggacccaatttttggcctatagacacttatgtattgttttcgaatacgtcagattggaccagtgctcttcaggaatgtggctgcaagcaaggggctagaagttcacctcctgacagtattattaatactatgcaaatatggaataggagaccatttgattttctaggctttgtggtagagaggtgaaggtatgagaattaatagcgtgtgaacaaagtaaagaacaggattccagaatgatcattaaatttgtttctatttattcttttttgcccccctagagattaagtccagaaatgtactttctggcacataaagaaatcttgaggactttgtttaaaccttccataaaaaaacaattttcggtttctcgggttctctctctctctctctctgtctctctgtctctctgtctctctgtctctctgtctctctgtctctctctctctctctctttctttctttgtgtattttattcaagatgagttggacccattgccagtgagtctgaatgtcactgacagccctgtgttgtgctcaggactcactctgctgctggtggaaactcatggcttctctctctctttgatcccataaagctacgagggggacgggagagggcagtgcaatgggaagtaaagagatattttccagtaggaaaagcaatgctttcttgtctttagactcaaatgcttagggaacgtttcatttctcattcatggggaaaggcagcctccttaaatgttttctgaagagcggtaaaatctagaagcttaagaatttacagttccttcaataaccatgatgacctgaagttcacctatcccattttagcatctacttgtttttcccatctcttcctttccaattttgcttatactgctgtaatatttttgtaaaaaaaaaaaaaaaggaaaaaaaagaccagctaaaattttcgacttgactttttaacttaactcatgaattaattaaagcaaatgaaaaaattaaaaagtgtgactttttctcggagcatatatgtagcttttaggaaaggctgatgatggtataaagtttgctcattaagaaaaaaagacaaggctgattttgaagagagttgcttttgaaataaaatgatcacctgttctttatgtgactctcccactgaacctgcagacattatttttataccacatgctaaggaagcccactcatctaactctgtagccctggaaaccctcttggcccctgaatgttgtttccaggttataggatctgtgttcattagtggattttgacagcaagtgcctctgatgagttttagccaacattccccgttgcatcctgctcattgttcacactcctctgacttgaggagagctgccttcaccttgatcttgtaacctgtcttccttgcatatacggtagcacattccagatcacttcggtgagaaaagacctctgtttttgaagaggaaactttcttaaattgtaaaataaaacttaaaaaacataaaaactctatacaaaaattgaagacctaaaaattatagcataccttttttttgctcttgagtttttgaagctcttgactttaaatgacttaactttttaaaaaataagatgttttatggctttaacccatgtttttattaagatctgagaatagcatattttaaacactgatagatacagaagaaattattatttaatatataaattgcttggaatgatttcattgcagcttgtaaggatgggttgatgccagaatggtttcataaatctttcagtcttacagagccaaagtttgcagattatatcgagttgcgttgtgcagctgctaaaatggaatcatagctttttataatttgcagaaaacaattgcattaatgtctggatgtttctcagttttattcttttctcataaatgttcctcgaatgttggcaccttctactgctgatctatattagaatctagtccaagaaagtgtctgatttaataacattaaatagttatttcaatatattttttcaaattatcctcatagaacctgttgcctccagtgagatggtaatctactacccgaataaatttaagagcacctgttgagagcccctgttttgcggtagaagacaattgtccctatcccaatttccactgaaatatgagagcagatttgcagagaccatcatgtcagagaagaaatttccttgtcagagatgttaaagggctacagtcccttagcaaagaaacttcgaaatctaagttggtttgtgtttttctaaatttgataccgtaattcatttggcagcaaaatctgacttgaactgatgtgagagtattgtactttatatttatgctacttcattgtgacttaattttccctgaagaaatatccatggatttgattataggttttcccttagatgctgtggaggtgttttgtaatattcaaaatatgcccatattgcctttttaaaaccccaaagattatgaattctgaaacacatccagcccagcgggttttggataaggggttgtaggcatttaagcagcctcacataatgggctgacttcatccaaaacatgaaaatattacaaggcaaattctattttttatattttttggttcaatgcttgaacaacttgtttttctgctgggggaagaaaaaaagaaccaaccctgagtgtgattgttacggaaactaatgactttgtttttaaaggatcacattgattcaacaccttctattggacccagaagtgcgtaaatattacctatggtagtaaacgtttaattatcattcagtttaaatgttggccttctgtatgtagccaagaacagctcattttgtgaatttcagtttttaagtggctgctttttgatttggttgtattattttattataatgtatttgcaagtatattaaaaaattaacattgagccataaaaatccccaaatatgttcaaggacttcataattgaaaaatatatagaaaacaatccttacttctttttacaaaaacaaaatcatgggaattattcttttctatatatttagttataaatctttctctgggccgggcgtggtggctcacgccagtaatcccagcactttgggaggctgagacaggcgaatcacgaggtcaggagttcgagaccagcctggccaacatggtgaaaccccgtctctactgaaaatacaaaaaattagctggacacggtggcaggcgcctgtgtgtggcgggcgccagctactcaggaggctgaggcaggagaatcgcttgaacccaggaggcagaggttgcagtgagccaagattgcgccactgcactccagcctaggtgacagtgcgagactctgtctcaaaaaaaaaaaaaaagaaaaaaaatctttatctggatctgttaaaccatatattattgatcattgcaagtgaaattttgagagattgtttctagtatttaggtgatgaaaacatttggtaatattgctttggttcaaagaattttatgtctttatctttctagaagaaagcaattatatatatatttttgctaaattacataaacatttaattacatcaggttctaatttaaacatgtattactcacttgaggccacttttaaatattcatactctttgacataagatgctttgtatatttctcatttcttttagttcttagtaagtcagctttaaaaagtacctgccaaccagaaccttccatattctggactaaatcttgctcttcggattatacttcagtgcagtaactgtggatttgcaattttgaaggggagatagtagctattatattttacacttgcttgatgtgataactctaaagactttttaactgataaaagcgcacatggctattttgatacacaaagttgtgtttgctactttagaagcttttgtggcagaattgtaatctaattttcataccttgtatttctgaatcacaacaaaaaaataaatggggaacaagactta

SEQ ID NO: 123416 - DNA, 999 bp, Artificial Sequence
  derived and/or modified sequence
atgctgttgttggccgcagcattcctggtggcattcgtgttactactctacatggtgtcgccgttgatcagccccaagcctctcgcactgcctggagcccacgtggtcgttaccgggggtagctctggaatcggtaagtgcatcgccattgaatgttacaaacagggtgcttttatcacactggtggccaggaacgaggacaaactgctgcaggcgaagaaagaaattgagatgcactccattaacgataagcaggttgtgctatgtatatccgtggatgtaagccaggactacaaccaagtggaaaatgtcattaaacaggcccaggagaagcttggccctgttgacatgctggtcaactgtgccggtatggcggtctctggcaagttcgaagacctggaagtatcgacctttgagagactgatgagcataaactacctaggttctgtttacccgagccgtgcagtaattacgacaatgaaggagcgcagagtggggaggatcgtgtttgtgtctagtcaagccggacagcttggcttgttcgggtttaccgcttactctgcttctaaatttgcaatccgaggtctagccgaagctctccagatggaggtgaagccttataatgtttacatcacggtggcctatcctcctgatactgacacgcccggatttgcagaggagaaccggacaaagccacttgaaacccgcctgatttcggagacaacctctgtatgcaaacccgagcaagtggctaagcaaatcgtgaaggacgcaattcagggaaattttaactcgtccttgggctcagatggctatatgctgagcgctctcacctgtgggatggctccagtcacttccattacggagggcctacagcaggtcgtgacaatggggctcttccggactatagccctgttttaccttgggtcctttgattctattgttcgcagatgcatgatgcagagagaaaaatcagagaatgcggacaagaccgcttag

SEQ ID NO: 123417 - DNA, 807 bp, Artificial Sequence
  derived and/or modified sequence
atgctgctgctggctgcagcttttctagtggccttcgttcttctattgtacatggtatcaccactgatcagtccaaagccattggccctgcctggggcgcacgtcgtggtcacaggaggctccagcggcatcggcaaatgtattgcaattgaatgctataagcagggggcttttatcaccctggtagctaggaacgaggataaattgctgcaagccaaaaaggagatcgaaatgcattctattaacgataagcaggtagtactgtgcatttcagtagacgtctcacaggactataatcaggtggaaaacgtaataaagcaggctcaggaaaaattggggcctgtcgatatgttggttaattgcgccggtatggctgtctcgggaaagtttgaggatctagaggtcagcacattcgaagtgaagccttacaacgtgtatattaccgtggcctacccccccgacactgacactcctggttttgcagaagagaaccgcactaagccacttgaaacccggttgatcagcgaaacaacaagcgtttgcaagcctgaacaagtcgcgaagcagatcgtaaaagatgctatccaagggaacttcaactcgagcctggggtcggatggttacatgttaagcgcactgacttgtggtatggcaccagttacgtcaattaccgaaggcctccagcaggtcgtgactatggggctctttagaaccattgcattgttctatctaggatcgttcgatagcatagttagaaggtgtatgatgcaaagggagaaatccgaaaatgccgacaagacagcgtag

SEQ ID NO: 123418 - DNA, 999 bp, Artificial Sequence
  derived and/or modified sequence
atgcttctgttggccgctgccttcctagtggcgttcgtcctgcttctctatatggtatctccattaatctcccctaaacctcttgctctacccggggcacatgtggtggtgacaggaggatccagcgggattggcaaatgtatcgcgatcgaatgctataagcagggtgcttttatcaccctggtggccagaaatgaggacaagctcctgcaggctaagaaagagatcgaaatgcactcaattaacgataagcaagtagtgctgtgtattagtgtggatgtgtcccaggattataatcaggtggaaaacgttattaaacaggcgcaagaaaagctcggccccgttgatatgctggtgaattgtgcaggtatggcagtctcaggcaaattcgaagatctcgaggtcagcacatttgagcgcctaatgtccataaattatcttggcagcgtgtatccttctcgtgcagttatcactacgatgaaggagagacgggtcggaagaattgtattcgtgtccagtcaagcgggacaattgggactcttcggattcacagcatactcagctagcaagttcgcgattcgcggactggcagaagcactccagatggaggtcaaaccctataatgtttacatcactgtggcttatcctccagacacagataccccagggtttgctgaagaaaaccgaacaaagccacttgagacccgtctgatctctgaaaccacttctgtctgtaagcctgaacaggtggccaagcaaatcgtcaaagacgctattcaggggaattttaattcatctctgggttccgatggctatatgttgagtgctctcacgtgcgggatggcccctgtgaccagcataacagaaggtctacaacaagtcgttacaatgggtcttttccgaactattgctctgttttaccttggatcattcgatagcatcgttcgcaggtgtatgatgcaaagagagaagagcgagaacgcagataaaacggcatag

SEQ ID NO: 123419 - DNA, 807 bp, Artificial Sequence
  derived and/or modified sequence
atgctgctgctcgctgctgcatttctggtggccttcgtactcttactctatatggtctctccactgatctcccctaagcccctcgcactgcccggcgcccacgtcgttgtgactggaggcagttccgggatcgggaagtgtatagctatcgaatgttataaacagggagcttttatcacactagtggctaggaacgaagacaaattactgcaggccaagaaagaaatcgagatgcactctatcaacgataagcaggtggtgctctgtatctccgttgatgtctcccaggattataaccaggtggagaatgttataaaacaggcccaggaaaagttaggacccgttgatatgctcgtaaattgtgcaggcatggctgtatcaggaaaatttgaagacctagaggtcagcaccttcgaagtgaagccctataacgtatacattactgtggcgtacccccccgataccgacactcctggattcgctgaggaaaataggacgaaacccctcgaaactagattgataagcgaaaccacctcagtgtgtaaacccgaacaggtggctaaacaaattgtgaaggatgccatccagggaaatttcaattcttcgctgggctccgatggatatatgttaagcgccctcacctgcggaatggcccctgttacttccatcacagaggggctacaacaggtagtgacaatgggcttgtttaggactatcgccctcttctatttaggtagcttcgattccattgttagacgatgcatgatgcaacgagagaaatccgagaacgcagacaaaaccgcttag

SEQ ID NO: 123420 - DNA, 999 bp, Artificial Sequence
  derived and/or modified sequence
atgctgttgctcgcagctgccttcttagttgccttcgttttgttattgtatatggtttctccgctcattagccccaagcccctcgcactgcctggagcgcacgttgtcgtgaccggaggctcaagcggtatcggcaagtgtatagccattgagtgttacaaacagggagccttcattaccctcgtagcccggaatgaagacaagctacttcaggccaagaaggaaattgaaatgcatagtattaatgataagcaagtggttctgtgtatatctgtggacgtatcacaagactacaaccaggtcgagaatgtgattaaacaagcccaagagaagctcggaccggtggatatgctggttaactgtgcaggaatggcagtgagtgggaaatttgaggatcttgaggtttctacatttgagagattgatgtccatcaactacctggggagtgtgtatcctagtcgtgctgtgatcacaacgatgaaagaaaggcgcgttggtcgaattgtgtttgtcagtagccaagcggggcagctgggtcttttcggctttacagcctacagcgcttcgaagtttgctatcagaggattagccgaggcattgcaaatggaggtgaaaccatacaatgtgtacattactgttgcataccccccagacacagacactcctggattcgctgaagaaaaccgaaccaaacctctggaaactaggcttatcagcgaaacgacttcagtctgtaagcccgaacaagtagccaaacaaatcgtcaaggacgccatccagggtaattttaacagttccctcggtagtgacgggtatatgctatcggcattgacatgcggcatggcaccagtgacctctatcacggaaggcctccagcaggtggtcaccatgggtttgttccgtacgattgcccttttttaccttggatcctttgactcaatagttcgtagatgtatgatgcagcgcgagaaaagcgagaacgccgacaagactgcctag

SEQ ID NO: 123421 - DNA, 807 bp, Artificial Sequence
  derived and/or modified sequence
atgctgctgctggccgccgccttcctggtggccttcgtgctgctgctgtacatggtgagccccctgatcagccccaagcccctggccctgcccggcgcccacgtggtggtgaccggcggcagcagcggcatcggcaagtgcatcgccatcgagtgctacaagcagggcgccttcatcaccctggtggccagaaacgaggacaagctgctgcaggccaagaaggagatcgagatgcacagcatcaacgacaagcaggtggtgctgtgcatcagcgtggacgtgagccaggactacaaccaggtggagaacgtgatcaagcaggcccaggagaagctgggccccgtggacatgctggtgaactgcgccggcatggccgtgagcggcaagttcgaggacctggaggtgagcaccttcgaggtgaagccctacaacgtgtacatcaccgtggcctacccccccgacaccgacacccccggcttcgccgaggagaacagaaccaagcccctggagaccagactgatcagcgagaccaccagcgtgtgcaagcccgagcaggtggccaagcagatcgtgaaggacgccatccagggcaacttcaacagcagcctgggcagcgacggctacatgctgagcgccctgacctgcggcatggcccccgtgaccagcatcaccgagggcctgcagcaggtggtgaccatgggcctgttcagaaccatcgccctgttctacctgggcagcttcgacagcatcgtgagaagatgcatgatgcagagagagaagagcgagaacgccgacaagaccgcctag

SEQ ID NO: 123422 - DNA, 999 bp, Artificial Sequence
  derived and/or modified sequence
atgctgctgctggccgccgccttcctggtggccttcgtgctgctgctgtacatggtgagccccctgatcagccccaagcccctggccctgcccggcgcccacgtggtggtgaccggcggcagcagcggcatcggcaagtgcatcgccatcgagtgctacaagcagggcgccttcatcaccctggtggccagaaacgaggacaagctgctgcaggccaagaaggagatcgagatgcacagcatcaacgacaagcaggtggtgctgtgcatcagcgtggacgtgagccaggactacaaccaggtggagaacgtgatcaagcaggcccaggagaagctgggccccgtggacatgctggtgaactgcgccggcatggccgtgagcggcaagttcgaggacctggaggtgagcaccttcgagagactgatgagcatcaactacctgggcagcgtgtaccccagcagagccgtgatcaccaccatgaaggagagaagagtgggcagaatcgtgttcgtgagcagccaggccggccagctgggcctgttcggcttcaccgcctacagcgccagcaagttcgccatcagaggcctggccgaggccctgcagatggaggtgaagccctacaacgtgtacatcaccgtggcctacccccccgacaccgacacccccggcttcgccgaggagaacagaaccaagcccctggagaccagactgatcagcgagaccaccagcgtgtgcaagcccgagcaggtggccaagcagatcgtgaaggacgccatccagggcaacttcaacagcagcctgggcagcgacggctacatgctgagcgccctgacctgcggcatggcccccgtgaccagcatcaccgagggcctgcagcaggtggtgaccatgggcctgttcagaaccatcgccctgttctacctgggcagcttcgacagcatcgtgagaagatgcatgatgcagagagagaagagcgagaacgccgacaagaccgcctag

SEQ ID NO: 123423 - DNA, 1024 bp, Artificial Sequence
  derived and/or modified sequence
gattctcgcctcgccgcagcccagccctgcgcgccttgcccggcggcccccgcccggccgctccgggcccctggccccgcggagcgatgctgctgctggctgccgccttcctcgtggccttcgtgctgctgctgtacatggtgtctccgctcatcagccccaagcccctcgccctgcccggggcgcatgtggtggttacaggaggttccagtggcatcgggaagtgcattgctatcgagtgctataaacaaggagcttttataactctggttgcacgaaatgaggataagctgctgcaggcaaagaaagaaattgaaatgcactctattaatgacaaacaggtggtgctttgcatatcagttgatgtatctcaagactataaccaagtagagaatgtcataaaacaagcacaggagaaactgggtccagtggacatgctggtaaattgtgcaggaatggcagtgtcaggaaaatttgaagatcttgaagttagtacctttgaagtgaagccatataatgtctacatcacagttgcttacccaccagacacagacacacctggctttgccgaagaaaacagaacaaagcctttggagactcgacttatttcagagaccacatctgtgtgcaaaccagaacaggtggccaaacaaattgttaaagatgccatacaaggaaatttcaacagttcccttggctcagatgggtacatgctctcggccctgacctgtgggatggctccagtaacttctattactgaggggctccagcaggtggtcaccatgggccttttccgcactattgctttgttttaccttggaagttttgacagcatagttcgtcgctgcatgatgcagagagaaaaatctgaaaatgcagacaaaactgcctaatcttcttaccccttggaagaagactgtttccaaataatttgaacagcttgctgctaaatgggacccaatttttggcctatagacacttatgtattgttttcgaatacgtcagattggaccagtgctcttca

SEQ ID NO: 123424 - DNA, 807 bp, Artificial Sequence
  derived and/or modified sequence
atgttgctgcttgctgctgccttcctggtggccttcgttctcctgctctacatggtaagtcctctcatttcaccaaaacccctcgccttgccgggagcccatgttgtagtgactggggggagctctggtattggtaaatgcatcgctattgagtgttataaacagggtgcattcatcaccctagtcgcaaggaatgaggacaaactgttgcaggccaagaaagagatcgaaatgcactctatcaacgataagcaagttgtgctgtgtatttccgtggatgtttcacaggactataaccaggtcgagaacgtcattaagcaggcacaggagaaactcggtccagtcgacatgctggttaattgcgcgggaatggccgtgagcggcaagtttgaggacctggaggtatcaaccttcgaagtgaagccctataatgtgtacataaccgtcgcatatccccccgacacggacacccccggatttgcagaggaaaatcggacaaagccccttgaaacccgattaatctcagagactacatcagtgtgtaagccagagcaagttgccaagcagattgtgaaggatgctatccagggtaactttaatagttctctgggatcagacggctacatgctgagtgccctgacgtgtggtatggctccggtgacgtctattaccgaggggctgcagcaggtcgtgaccatggggctattcaggactattgcacttttttacttgggcagctttgatagcattgtacgacggtgtatgatgcagagagaaaagtcagaaaatgctgataaaaccgcttag

SEQ ID NO: 123425 - DNA, 999 bp, Artificial Sequence
  derived and/or modified sequence
atgttgttgctggctgctgctttcctggttgcattcgttttgttgctgtatatggtgtcccctctgattagcccaaagccactagctttaccaggcgcacacgttgttgttaccggaggatcatcggggatcggaaagtgtattgccatcgaatgttataaacagggcgcctttatcactttggtggctcgcaacgaagataaacttcttcaggctaagaaggagatcgaaatgcactcaattaacgataagcaggtggtgttgtgcatttcagttgatgtgtcacaggattataaccaggtggagaatgtcatcaaacaggctcaggagaaactgggcccagtcgatatgctcgtcaactgtgctgggatggccgtgtcaggcaaattcgaggacctggaagtctcgaccttcgagaggctgatgagcataaattacctggggtccgtgtatccatcgagggccgtgatcaccaccatgaaggagagaagggtcggacgcatcgtcttcgtgtcctcacaagccggtcagctcggcctgttcggatttacagcgtatagtgcctcaaagttcgccatcagaggactcgccgaggcactgcagatggaggtgaagccttacaacgtctatataaccgttgcctatccgcctgacaccgacacccccgggttcgcagaagaaaaccggaccaaacctctcgaaactaggctcatcagcgagacgaccagcgtgtgcaagcctgagcaggtggcgaaacaaattgttaaggatgctattcagggcaacttcaactcgtcactgggctcagatgggtacatgctgagcgcactcacttgcggcatggctccagtgacctccatcactgaaggactgcagcaagtggtgaccatggggctgtttcgtaccatcgccctcttctacctcggttcattcgacagtatagtcaggcgctgtatgatgcagagggagaaatccgagaatgccgataagacggcatag

SEQ ID NO: 123426 - DNA, 807 bp, Artificial Sequence
  derived and/or modified sequence
atgctgctgctggccgccgccttcctggtggcctttgtgctgctgctgtacatggtgagccccctcatcagccccaagcccctggccctgcccggggcccacgtggtggtgactggaggcagcagcggcatcggcaagtgcatcgccatcgagtgctacaagcagggcgccttcatcaccctggtggccagaaatgaagacaagctgctgcaggccaagaaggagattgagatgcacagcatcaatgacaagcaggtggtgctgtgcatctctgtggatgtgtcccaggactacaaccaggtggagaatgtcatcaagcaggcccaggagaagctgggccctgtggacatgctggtgaactgtgccggcatggctgtgtctgggaagtttgaggacctggaggtgtccacctttgaggtgaagccctacaacgtgtacatcaccgtggcctaccccccagacacagacaccccaggctttgctgaagaaaatagaaccaagcccctggagaccaggctcatcagcgagaccacctctgtgtgcaagccagagcaggtggccaagcagatcgtgaaggatgccatccagggcaacttcaacagcagcctgggcagtgatggctacatgctgagcgccctgacctgtggcatggcccctgtgaccagcatcacagagggcctgcagcaggtggtgaccatgggcctcttccgcaccatcgccctcttctacctgggcagctttgacagcatcgtgcggcgctgcatgatgcagcgggagaagtcagaaaatgctgacaagacagcctag

SEQ ID NO: 123427 - DNA, 999 bp, Artificial Sequence
  derived and/or modified sequence
atgctgctgctggccgccgccttcctggtggcctttgtgctgctgctgtacatggtgagccccctcatcagccccaagcccctggccctgcccggggcccacgtggtggtgactggaggcagcagcggcatcggcaagtgcatcgccatcgagtgctacaagcagggcgccttcatcaccctggtggccagaaatgaagacaagctgctgcaggccaagaaggagattgagatgcacagcatcaatgacaagcaggtggtgctgtgcatctctgtggatgtgtcccaggactacaaccaggtggagaatgtcatcaagcaggcccaggagaagctgggccctgtggacatgctggtgaactgtgccggcatggctgtgtctgggaagtttgaggacctggaggtgtccacctttgagcggctgatgagcatcaactacctgggctctgtgtaccccagcagagctgtgatcaccaccatgaaggagaggagagtgggccgcatcgtgtttgtgagcagccaggccggccagctgggcctgtttggcttcaccgcctacagcgccagcaagtttgccatccggggcctggccgaggccctgcagatggaggtgaagccctacaacgtgtacatcaccgtggcctaccccccagacacagacaccccaggctttgctgaagaaaatagaaccaagcccctggagaccaggctcatcagcgagaccacctctgtgtgcaagccagagcaggtggccaagcagatcgtgaaggatgccatccagggcaacttcaacagcagcctgggcagtgatggctacatgctgagcgccctgacctgtggcatggcccctgtgaccagcatcacagagggcctgcagcaggtggtgaccatgggcctcttccgcaccatcgccctcttctacctgggcagctttgacagcatcgtgcggcgctgcatgatgcagcgggagaagtcagaaaatgctgacaagacagcctag

SEQ ID NO: 123428 - DNA, 807 bp, Artificial Sequence
  derived and/or modified sequence
atgctgctgctggccgccgccttcctggtggccttcgtgctgctgctgtatatggtgtcccccttgatttcacccaagcccttagccttgcccggagcacacgtagtggtgaccgggggatccagcggaatcggtaagtgtattgcgatcgagtgctacaaacaaggggcgtttatcaccctcgtagcgcgcaacgaggataagctactccaggctaagaaagagatcgaaatgcatagcatcaacgacaaacaggttgtactgtgtatctcagtggatgtgtcacaagattataatcaagtcgaaaatgtgataaaacaggcccaagagaagctaggtccagtcgatatgttggtgaattgcgcagggatggctgtgtctggcaagttcgaggaccttgaggtgagcacttttgaagtaaagccttacaacgtgtatatcaccgtggcttaccctcctgatacagatacacccggcttcgcagaagagaacaggactaagcctctcgaaacccgtcttatttccgagaccacgagcgtctgcaagcccgagcaggtcgctaagcagatcgtgaaagatgccatccaagggaactttaactcatcattaggtagcgacggttacatgctctccgccctcacgtgtgggatggcccctgtgactagtattacagagggcttacagcaggtggtgacaatggggttgttccggacaattgctttgttctacctgggttccttcgattctattgtccgccgctgcatgatgcagcgcgaaaagtctgaaaatgctgataagaccgcgtag

SEQ ID NO: 123429 - DNA, 999 bp, Artificial Sequence
  derived and/or modified sequence
atgctgctgctggccgccgccttcctggtggccttcgtgctgctgttatatatggtctcccccctgatatcacctaaaccgctagccctgccaggagctcacgtggttgtgacaggagggtccagcggtataggtaagtgtattgcaatcgagtgctataaacagggagccttcatcactctcgtagccaggaacgaggataaactgctccaggctaagaaggagatcgagatgcacagcatcaacgacaagcaggtcgtcttgtgtatttctgtagatgtcagtcaagactacaaccaagtggagaacgtcattaagcaggcccaggagaagcttggccccgtggacatgttggttaactgtgctggcatggccgtaagtggcaagttcgaagatcttgaggtcagcacttttgaacgactgatgagtataaactacctgggatcagtgtaccccagcagagccgtcataaccactatgaaagagaggcgcgtagggagaattgtcttcgtcagttcccaggctggccagctcggactattcggctttaccgcctattccgccagtaaattcgccatacggggtctcgccgaagccctgcagatggaggtgaagccatataacgtgtatattacagtggcctatcccccggatacagacacgcctgggttcgcagaggagaacagaacaaagcccttggagactagattaatctctgagaccacttcggtttgcaagccagaacaggtagcgaagcagatcgttaaggacgccatacagggaaattttaacagctcacttggcagcgatggatatatgctttcagccctcacgtgcggtatggccccagttacttccatcaccgaaggacttcagcaggtcgtgacaatgggcctgtttcgtaccattgcgctattctatctgggctctttcgatagtattgtccggcgatgcatgatgcagcgagagaagagtgaaaacgccgataaaacggcatag

SEQ ID NO: 123430 - RNA, 807 nt, Artificial Sequence
  derived and/or modified sequence
augcugcugcuggcugcagcuuuucuaguggccuucguucuucuauuguacaugguaucaccacugaucaguccaaagccauuggcccugccuggggcgcacgucguggucacaggaggcuccagcggcaucggcaaauguauugcaauugaaugcuauaagcagggggcuuuuaucacccugguagcuaggaacgaggauaaauugcugcaagccaaaaaggagaucgaaaugcauucuauuaacgauaagcagguaguacugugcauuucaguagacgucucacaggacuauaaucagguggaaaacguaauaaagcaggcucaggaaaaauuggggccugucgauauguugguuaauugcgccgguauggcugucucgggaaaguuugaggaucuagaggucagcacauucgaagugaagccuuacaacguguauauuaccguggccuacccccccgacacugacacuccugguuuugcagaagagaaccgcacuaagccacuugaaacccgguugaucagcgaaacaacaagcguuugcaagccugaacaagucgcgaagcagaucguaaaagaugcuauccaagggaacuucaacucgagccuggggucggaugguuacauguuaagcgcacugacuugugguauggcaccaguuacgucaauuaccgaaggccuccagcaggucgugacuauggggcucuuuagaaccauugcauuguucuaucuaggaucguucgauagcauaguuagaagguguaugaugcaaagggagaaauccgaaaaugccgacaagacagcguag

SEQ ID NO: 123431 - RNA, 999 nt, Artificial Sequence
  derived and/or modified sequence
augcuucuguuggccgcugccuuccuaguggcguucguccugcuucucuauaugguaucuccauuaaucuccccuaaaccucuugcucuacccggggcacaugugguggugacaggaggauccagcgggauuggcaaauguaucgcgaucgaaugcuauaagcagggugcuuuuaucacccugguggccagaaaugaggacaagcuccugcaggcuaagaaagagaucgaaaugcacucaauuaacgauaagcaaguagugcuguguauuaguguggaugugucccaggauuauaaucagguggaaaacguuauuaaacaggcgcaagaaaagcucggccccguugauaugcuggugaauugugcagguauggcagucucaggcaaauucgaagaucucgaggucagcacauuugagcgccuaauguccauaaauuaucuuggcagcguguauccuucucgugcaguuaucacuacgaugaaggagagacgggucggaagaauuguauucguguccagucaagcgggacaauugggacucuucggauucacagcauacucagcuagcaaguucgcgauucgcggacuggcagaagcacuccagauggaggucaaacccuauaauguuuacaucacuguggcuuauccuccagacacagauaccccaggguuugcugaagaaaaccgaacaaagccacuugagacccgucugaucucugaaaccacuucugucuguaagccugaacagguggccaagcaaaucgucaaagacgcuauucaggggaauuuuaauucaucucuggguuccgauggcuauauguugagugcucucacgugcgggauggccccugugaccagcauaacagaaggucuacaacaagucguuacaaugggucuuuuccgaacuauugcucuguuuuaccuuggaucauucgauagcaucguucgcagguguaugaugcaaagagagaagagcgagaacgcagauaaaacggcauag

SEQ ID NO: 123432 - RNA, 807 nt, Artificial Sequence
  derived and/or modified sequence
augcugcugcucgcugcugcauuucugguggccuucguacucuuacucuauauggucucuccacugaucuccccuaagccccucgcacugcccggcgcccacgucguugugacuggaggcaguuccgggaucgggaaguguauagcuaucgaauguuauaaacagggagcuuuuaucacacuaguggcuaggaacgaagacaaauuacugcaggccaagaaagaaaucgagaugcacucuaucaacgauaagcagguggugcucuguaucuccguugaugucucccaggauuauaaccagguggagaauguuauaaaacaggcccaggaaaaguuaggacccguugauaugcucguaaauugugcaggcauggcuguaucaggaaaauuugaagaccuagaggucagcaccuucgaagugaagcccuauaacguauacauuacuguggcguacccccccgauaccgacacuccuggauucgcugaggaaaauaggacgaaaccccucgaaacuagauugauaagcgaaaccaccucaguguguaaacccgaacagguggcuaaacaaauugugaaggaugccauccagggaaauuucaauucuucgcugggcuccgauggauauauguuaagcgcccucaccugcggaauggccccuguuacuuccaucacagaggggcuacaacagguagugacaaugggcuuguuuaggacuaucgcccucuucuauuuagguagcuucgauuccauuguuagacgaugcaugaugcaacgagagaaauccgagaacgcagacaaaaccgcuuag

SEQ ID NO: 123433 - RNA, 999 nt, Artificial Sequence
  derived and/or modified sequence
augcuguugcucgcagcugccuucuuaguugccuucguuuuguuauuguauaugguuucuccgcucauuagccccaagccccucgcacugccuggagcgcacguugucgugaccggaggcucaagcgguaucggcaaguguauagccauugaguguuacaaacagggagccuucauuacccucguagcccggaaugaagacaagcuacuucaggccaagaaggaaauugaaaugcauaguauuaaugauaagcaagugguucuguguauaucuguggacguaucacaagacuacaaccaggucgagaaugugauuaaacaagcccaagagaagcucggaccgguggauaugcugguuaacugugcaggaauggcagugagugggaaauuugaggaucuugagguuucuacauuugagagauugauguccaucaacuaccuggggaguguguauccuagucgugcugugaucacaacgaugaaagaaaggcgcguuggucgaauuguguuugucaguagccaagcggggcagcugggucuuuucggcuuuacagccuacagcgcuucgaaguuugcuaucagaggauuagccgaggcauugcaaauggaggugaaaccauacaauguguacauuacuguugcauaccccccagacacagacacuccuggauucgcugaagaaaaccgaaccaaaccucuggaaacuaggcuuaucagcgaaacgacuucagucuguaagcccgaacaaguagccaaacaaaucgucaaggacgccauccaggguaauuuuaacaguucccucgguagugacggguauaugcuaucggcauugacaugcggcauggcaccagugaccucuaucacggaaggccuccagcagguggucaccauggguuuguuccguacgauugcccuuuuuuaccuuggauccuuugacucaauaguucguagauguaugaugcagcgcgagaaaagcgagaacgccgacaagacugccuag

SEQ ID NO: 123434 - protein, 336 aa, Artificial Sequence
  derived and/or modified sequence
MGNCLHRAELSPSTENSSQLDFEDVWNSSYGVNDSFPDGDYGANLEAAAPCHSCNLLDDSALPFFILTSVLGILASSTVLFMLFRPLFRWQLCPGWPVLAQLAVGSALFSIVVPVLAPGLGSTRSSALCSLGYCVWYGSAFAQALLLGCHASLGHRLGAGQVPGLTLGLTVGIWGVAALLTLPVTLASGASGGLCTLIYSTELKALQATHTVACLAIFVLLPLGLFGAKGLKKALGMGPGPWMNILWAWFIFWWPHGVVLGLDFLVRSKLLLLSTCLAQQALDLLLNLAEALAILHCVATPLLLALFCHQATRTLLPSLPLPEGWSSHLDTLGSKS

SEQ ID NO: 123435 - DNA, 1011 bp, Artificial Sequence
  derived and/or modified sequence
atgggcaactgtcttcaccgagctgagctgtctccttccactgagaacagctctcagttagacttcgaggacgtctggaactcgagttatggggtgaatgattcttttcccgatggggactacggggccaacctcgaagccgcagcaccatgtcactcttgcaacctcttagacgactctgctctccctttcttcatactgaccagtgtgttgggtatcctggcctcttcaaccgttttatttatgctgtttaggcccctgttccggtggcaactgtgtcccggctggccagtattggcacaactggctgtgggcagtgccttgttctcaattgtggttcccgtgcttgcccctggcctggggtcgacacggagttcagctctctgcagtctgggatactgcgtgtggtacgggtcagcgttcgcacaagccttattgctggggtgtcacgctagcctgggccatagactgggagccggccaggtacccgggctgacactgggcttgactgtcggaatctggggggtggccgccctgctgaccctgcctgtgactcttgccagtggagcgtcaggcggtttatgtactttgatatatagtacagaactcaaggccctacaggctacacacacggtggcctgcctcgccatcttcgtgttattacccttgggcctcttcggagccaagggtctgaagaaggcgctagggatgggcccgggcccctggatgaacatcctctgggcctggttcatattctggtggcctcatggcgtggtgctgggtctggactttctcgtgcgttcaaagctgctcctgcttagcacctgtttagcccagcaagccctggacttacttctgaatctggctgaggccctcgccatcctgcactgcgtagcaacacccctcctgctcgccctcttctgccaccaggcaacacggacactgctgccaagccttccattacctgagggatggtccagtcaccttgacactctcggaagtaaatcctag

SEQ ID NO: 123436 - DNA, 1011 bp, Artificial Sequence
  derived and/or modified sequence
atgggaaactgtcttcacagggccgagctgtctccatcaacagagaattccagccagcttgactttgaagacgtatggaacagttcctatggggtgaacgactccttcccagatggcgattatggagcaaacctcgaggccgcagccccttgccactcttgcaacctactcgacgacagtgctctgcctttctttatcttgacgagtgtgctcggtatactggcgtcctctaccgtactgttcatgttgtttagaccactgtttcggtggcagctgtgcccgggctggcctgttctagcccagttggcggtcggttccgcactcttctctattgtggtgcctgtgctggctccgggcctgggttcgactagatcgagcgccctctgtagcctaggctactgcgtgtggtacggctcagcgttcgcccaagccctcctcctgggttgccacgccagcttaggccaccgcctaggagctggtcaggtccccggccttaccttggggctgaccgtgggcatctggggcgtcgccgccctcctgacactgcccgtgaccctagcctccggtgcatctggaggactttgtactctgatatactcaacagagttgaaggctctccaggctacccatactgttgcttgtctggccattttcgttcttctgcctctgggacttttcggagccaaagggctgaagaaagcactgggcatgggccccggcccctggatgaacattctgtgggcatggtttatcttctggtggcctcacggtgtcgtgctgggcctcgatttcttggtcaggagcaaacttctcttattgtcgacctgtctcgcacaacaggctttggaccttctcctaaacctagccgaggctctggccattctgcactgtgtagcaacccccctgttgctggcattgttttgtcaccaggccactaggactctgctgcccagtctgccgctgcctgaaggatggtccagccatcttgacaccctggggtctaagtcctag

SEQ ID NO: 123437 - DNA, 1011 bp, Artificial Sequence
  derived and/or modified sequence
atggggaactgcctgcacagagccgagttgagccccagtaccgagaactccagccagctcgactttgaggatgtgtggaacagttcttacggagtgaacgactcctttccagacggggactatggagcgaacctcgaagccgcggcaccatgccactcttgcaatctgcttgatgattccgcactcccatttttcatattaacgagtgtgctggggattctggcatcctctacagtgctgttcatgctcttcagacctctattcagatggcaattgtgtccaggctggccagtgctggctcagctggcagtgggatcagctttgttttctattgtagtcccagtcttggcccctggcctgggttctacccggtcctccgccctgtgttcgctgggctactgcgtttggtatggatcagccttcgcccaggcgctgctgctaggatgccacgccagcctcggccaccgccttggggcaggccaggttccagggctaaccttgggacttactgtggggatttggggggtggctgcgctccttacactgccagtgacgctggcgtctggggcatctggcggactttgcacgctgatttactctacagagctgaaagccttgcaggccactcatactgtcgcctgccttgccatctttgtattactccctctgggtctgttcggcgccaaaggcctcaagaaagctcttggaatgggtcccgggccctggatgaacattctctgggcctggtttatcttttggtggccacacggggttgtcctcggccttgattttctcgtgcgtagtaagttactgctgctgtccacgtgtttggcccagcaggccctggatctgctcctgaatcttgccgaagcactggcaattctgcactgtgtcgccacacctctgctgctagctctgttttgtcatcaggcaactcgcacattattgccaagcttgcccctgccagaagggtggtcttctcatcttgacacccttggctccaaatcttag

SEQ ID NO: 123438 - DNA, 1011 bp, Artificial Sequence
  derived and/or modified sequence
atgggcaactgcctgcacagagctgagctgagccccagcacagagaacagcagccagctggactttgaagatgtgtggaacagcagctatggagtgaatgacagcttcccagatggagactatggagccaacctggaggccgccgccccctgccacagctgcaacctgctggatgacagcgccctgcccttcttcatcctgacctctgtgctgggcatcctggccagcagcacagtgctcttcatgctgttccggcccctcttccgctggcagctgtgccccggctggcctgtgctggcccagctggccgtgggcagcgccctcttcagcatcgtggtgcctgtgctggcccctggcctgggcagcaccaggagcagcgccctgtgcagcctgggctactgtgtgtggtacggcagcgcctttgcccaggccctgctgctgggctgccacgccagcctgggccaccggctgggcgccggccaggtgcccggcctgaccctgggcctgactgtgggcatctggggcgtggccgccctgctgaccctgcctgtgaccctggccagcggggccagcggcggcctgtgcaccctcatctacagcacagagctgaaggccctgcaggccacccacacagtggcctgcctggccatctttgtgctgctgcccctgggcctgtttggagccaagggcctgaagaaggccctgggcatgggccctggcccctggatgaacatcctgtgggcctggttcatcttctggtggccccacggcgtggtgctgggcctggacttcctggtgcgcagcaagctgctgctgctgagcacctgcctggcccagcaggccctggacctgctgctgaacctggccgaggccctggccatcctgcactgtgtggccacccccctgctgctggccctcttctgccaccaggccaccaggaccctgctgcccagcctgcccctgcctgagggctggagcagccacctggacaccctgggcagcaagagctag

SEQ ID NO: 123439 - DNA, 1011 bp, Artificial Sequence
  derived and/or modified sequence
atgggcaactgcctgcaccgggccgagctgagccccagcaccgagaattccagtcaactagattttgaggacgtttggaacagctcgtacggtgtcaatgattcttttcctgatggagattacggtgccaatctcgaagccgctgctccatgccactcttgtaacttactcgacgattccgccctgcccttcttcattctgacaagtgtgctgggtatactggcatcttccacggtcttgttcatgctctttagacctttgtttaggtggcaattgtgtcccggatggcctgtcttggcccagctcgcagttgggagcgcactcttttcaatcgttgtccccgtactggcaccaggcctggggagtactcggtcgagcgcgctttgtagcctgggatattgtgtgtggtacgggagcgcatttgcacaggctctgcttctcggttgccacgcctccctggggcaccggcttggcgcaggtcaggtccctggactgactctgggtctgacagtgggcatctggggagttgccgcgttattaactcttcctgtgaccctcgcaagcggggcgtctggaggtttgtgcactctgatttactcaacagaactgaaggccctccaggcgactcatacggtagcttgtctcgccattttcgtgctcctgcctttgggtctgttcggcgctaaaggcctgaagaaagccctcggcatgggaccaggaccctggatgaacattctgtgggcatggtttattttctggtggccccacggtgtggtacttgggctggacttcctagtgcgaagtaagctgctactgctgtctacttgtttggcccagcaggccctggatctgttgctgaacctggcagaggctttagctatcttgcattgtgttgctactcccctgttactcgcactgttctgtcatcaggccacgcgcaccttactgccttccctcccactgccggaggggtggtcctcccatctggacaccttaggttcgaaaagttag

SEQ ID NO: 123440 - DNA, 1011 bp, Artificial Sequence
  derived and/or modified sequence
atgggcaactgcctgcaccgggccgagctgagccccagcaccgagaattcatcgcagctcgacttcgaggatgtttggaacagctcatatggcgttaatgactccttccccgatggggattatggagccaatctcgaggctgctgccccctgccactcttgtaacctattagatgattccgctctgccctttttcattttgacgtctgtgctgggaatcctggccagttctaccgtcttgtttatgctttttcggcctcttttccggtggcagctgtgtcccggctggccagtgttagcccaactggcggttggctctgctctgttttccatagtggtccccgtgctggcccccggactggggtctacaaggtctagtgccctctgcagcctcggttactgtgtgtggtacgggtccgcctttgcgcaggctttactcctgggctgccatgcttctctcggacatagactgggcgccggacaggtgcctgggctaaccttgggccttaccgttggaatctggggagtcgcagccctgctcactctgccagtgactctggctagcggcgccagcgggggcctctgcacattaatttacagcacagaactcaaggcccttcaggccacgcacaccgtggcgtgtttagcaatcttcgtcctgctacccttaggcctgtttggagctaagggccttaagaaggcactcggcatgggacccggtccctggatgaacatcctgtgggcttggtttatcttctggtggccacacggggtggttttgggcctagactttttagtgcgctccaaacttctgctccttagcacgtgtctggcacaacaggccctggatttactgctgaacctggcggaagcgctcgccatcctccactgcgtggcgacgccactcctgctagcactgttctgtcatcaggcgacccgaacgcttctcccctccctgcccttgcccgaagggtggagcagccatttggatacacttggatcaaagtcatag

SEQ ID NO: 123441 - DNA, 1011 bp, Artificial Sequence
  derived and/or modified sequence
atgggcaactgcctgcaccgggccgagctgagccccagcaccgagaatagcagccagctggactttgaggatgtgtggaattcaagttacggtgtcaatgactcatttccggacggcgattacggcgcaaatcttgaggcagctgccccatgtcatagctgcaatctcctggacgacagcgccctgcctttttttatacttacaagcgtcctgggtatcctcgctagctcaacagtgctattcatgctgttccggcccctgtttcggtggcaattgtgccctggatggcccgtgctggcacagttggccgtcgggagcgctcttttttctattgtcgtcccagttctggctcctggcctaggctcaaccagatcttccgctctttgctctctcggatattgcgtatggtacgggtcagcctttgcccaggctttgctccttgggtgtcacgccagtcttgggcaccggttgggggccggccaggtgcctggtctgaccctcggactcacggttggcatctggggcgtggccgctctcttgacattaccggtgactctggcatcaggggcctccggcgggttgtgcaccctcatctattctaccgaactgaaggcactgcaagccacgcacactgtggcctgcttggcgattttcgtgttactccccctgggactgtttggggccaaggggttgaaaaaggccctcgggatgggaccaggtccttggatgaatatcctctgggcttggttcattttctggtggccacatggtgtggtcctggggctagatttccttgttcgttctaagctgctgttgttgagcacctgcctcgcccagcaggcgttagacctgttactgaacctcgctgaggcgctggctatcctacactgcgttgccactcccctactgttggccctcttctgtcatcaggccaccaggaccctcctgccatcgctgccactgccagagggctggtcgtcccacctggacacccttggcagtaagtcatag

SEQ ID NO: 123442 - DNA, 1011 bp, Artificial Sequence
  derived and/or modified sequence
atggggaactgtttacaccgggctgaactctcaccttccacagaaaatagttcccagcttgatttcgaagatgtgtggaattccagctatggagtgaacgactcattccccgatggcgactacggggcaaacctggaagccgcagccccttgccattcttgtaatttactggacgattctgctctaccatttttcatcttgaccagtgttctgggcattctggcttcctctacagttctcttcatgctgttcagacctctattccgctggcaactttgtcccggttggcccgtgctcgctcagctcgccgtgggctccgctttatttagcattgtggtacccgtcttagccccaggcctcggctcaacgagatcttccgctctctgctcactagggtactgtgtatggtacgggagtgcatttgcccaggctcttctcctcggatgtcatgcctctctggggcacaggttgggggctggacaggtcccagggctgacactcggactgaccgtcggaatatggggagtggcagccctactgacactcccggtaacgcttgctagcggggctagcgggggtttgtgtaccctgatctattccactgaactgaaagctctgcaagccacccacactgtggcgtgcctcgccattttcgtactgctgcccctgggactgttcggcgcaaaggggttgaaaaaggccctggggatggggccaggtccatggatgaatattctttgggcgtggttcatcttttggtggccgcacggagttgtgctcggattggattttcttgttcgaagcaaactgttgctcctatccacctgcctggcgcagcaagcactggatcttctgctgaacctggcagaagctctggccatattacattgcgtggctacccctctgcttctggccttgttctgtcaccaggctactagaaccttgctgccatccttgcctctgccagaaggttggtcaagtcacctggatacccttggatccaaatcatag

SEQ ID NO: 123443 - DNA, 1011 bp, Artificial Sequence
  derived and/or modified sequence
atggggaattgcctgcatcgcgcagagctgtctccctccaccgagaatagcagccaactggacttcgaggacgtttggaattctagttacggagttaatgacagcttccccgatggtgactacggggcaaatctcgaggctgccgcaccctgccactcttgcaatctgttagatgacagcgctctcccattttttatactgaccagcgtccttggcatactggccagctctactgtcttgtttatgcttttcaggccactatttagatggcagctgtgccccggatggccagtcctcgcgcagctggcggttggctccgccctctttagcatcgtggtgcctgtactagcacccggactggggtccactcgatcctccgcactttgtagccttggctactgcgtctggtacgggagcgcctttgcgcaggctcttctgttgggctgccatgccagcctcggtcataggctgggagccggacaggtgcctgggctcacactgggtcttacagttggcatttggggggtggctgctcttctaactttaccagtaacattggcatcaggcgcaagtgggggtttgtgtacccttatctatagtacagaacttaaagcgcttcaggcaacacacactgttgcgtgcctggctattttcgtcctcctgccgcttggcctctttggcgctaaaggcctaaagaaagcactgggaatgggtcccggaccttggatgaacatcttatgggcctggtttatcttctggtggccgcacggagtcgttcttggcctagacttcctcgttaggtcaaagctgctattgctctctacttgccttgcccaacaggccctggacttgcttctgaatttagccgaagccctggcgatactgcattgtgtggctacaccactgttgctggcgcttttctgtcaccaagctactcgaaccctgcttccttcgcttccactccctgaaggatggagctcacacctggacaccctcgggagcaaatcctag

SEQ ID NO: 123444 - DNA, 1011 bp, Artificial Sequence
  derived and/or modified sequence
atgggtaactgcctccacagggcagaactcagcccatccaccgagaactcaagccagctggactttgaagacgtgtggaatagctcttatggtgtaaatgacagctttccagatggggactatggggctaatctggaagccgcagcaccatgccattcctgcaatctactggatgattctgccttacccttttttatccttacctcagtgcttggaatcctggcgtcaagcacggtgctgttcatgttattcaggcccctttttaggtggcaactatgtcctggatggccagtgcttgcacagctggccgtaggtagcgctctgttcagcatcgtggtgcctgttctcgcccctgggttaggctctactcgatcctccgctctatgctccttaggatactgtgtttggtacgggtcagcttttgcccaggcactgctgctgggttgccacgcttcattaggccacaggctcggggcagggcaggtgcctggactgactttgggcttaactgttggcatatggggtgtagccgctttgctgaccctgcccgtgacccttgcttctggcgcaagcggtggcttgtgcacactgatctacagcactgagttgaaagccctgcaagccacgcacaccgtggcctgtctggccatcttcgtcttgttaccactcggcttgttcggcgcaaaaggtttaaaaaaagctttgggaatgggcccagggccatggatgaatatcttgtgggcctggttcattttttggtggccccacggcgtggtgctggggcttgatttcctcgttcggtctaaactgctccttctcagtacctgcctggcccagcaagccctggacctccttctcaatttggctgaggcactagctatactgcattgcgtagcaactcccttattacttgccttgttctgccaccaagccaccaggaccttgctcccatctctcccactcccagaaggctggtcctcgcacttagacaccctagggagcaaatcgtag

SEQ ID NO: 123445 - DNA, 1011 bp, Artificial Sequence
  derived and/or modified sequence
atgggcaactgcctgcacagagccgagctgagccccagcaccgagaacagcagccagctggacttcgaggacgtgtggaacagcagctacggcgtgaacgacagcttccccgacggcgactacggcgccaacctggaggccgccgccccctgccacagctgcaacctgctggacgacagcgccctgcccttcttcatcctgaccagcgtgctgggcatcctggccagcagcaccgtgctgttcatgctgttcagacccctgttcagatggcagctgtgccccggctggcccgtgctggcccagctggccgtgggcagcgccctgttcagcatcgtggtgcccgtgctggcccccggcctgggcagcaccagaagcagcgccctgtgcagcctgggctactgcgtgtggtacggcagcgccttcgcccaggccctgctgctgggctgccacgccagcctgggccacagactgggcgccggccaggtgcccggcctgaccctgggcctgaccgtgggcatctggggcgtggccgccctgctgaccctgcccgtgaccctggccagcggcgccagcggcggcctgtgcaccctgatctacagcaccgagctgaaggccctgcaggccacccacaccgtggcctgcctggccatcttcgtgctgctgcccctgggcctgttcggcgccaagggcctgaagaaggccctgggcatgggccccggcccctggatgaacatcctgtgggcctggttcatcttctggtggccccacggcgtggtgctgggcctggacttcctggtgagaagcaagctgctgctgctgagcacctgcctggcccagcaggccctggacctgctgctgaacctggccgaggccctggccatcctgcactgcgtggccacccccctgctgctggccctgttctgccaccaggccaccagaaccctgctgcccagcctgcccctgcccgagggctggagcagccacctggacaccctgggcagcaagagctag

SEQ ID NO: 123446 - DNA, 2006 bp, Artificial Sequence
  derived and/or modified sequence
cccccagtagaaatatgaatagaaatcaccctgtgggcaatggtcccattttaaaatatgctgtcccattgtcccctagagcctactttaacttgtcagaccatgtattccacttcatatgcaagaggcatgcactgagcccataggtggctaggcaaacacccaatagctccctgaaatggcttcattatgcagcctcgacagccaccccaaccctcccactctcacactgaaacacccagacctagagatagctagacacacccagacacccgccaagcccctcacatacagatatgtgcacaatgatacacagcaaacgtacacagagttcagtacacacaaagagctcacgcccacgtgcacacacccctcagttgggacagagttgaccaccaccacctttctcccaaacacatggcttttgaactgcctttccttggatccagttcaaggggatggaggagcagtgagagtcagccgcccttccactccaatttcccagcacctcccttatctctgcctcacaagtcacccagcccccctctcttccttccttgtgcttgaagaatctctccttgctggaaagccccctgttttctcaatctccctttccacttcggtaaaatctctacttgctggaaagccccctgttttctcaatctccctttccacttcggtaaaatgcccactttctggtccccacctttttcctgagtgtagtcccaaccagccaaatccaacctcaaaacaggaagacccaaggccagtgacccccataggcctgaggcttgtgcaggcagtgggcgtggggtaaggcttcctgatgccccctgtccctgcccagaacctgatggccctcattagtccttggctcttatcttggaagcacaggcgctgacagccgtcccagcccttctgtctgcgggcctgaaccaaacggtgccatggggaactgtctgcacagggcggagctctccccctcaactgagaactcaagtcagctggacttcgaagatgtatggaattcttcctatggtgtgaatgattccttcccagatggagactatggtgccaacctggaagcagctgccccctgccactcctgtaacctgctggatgactctgcactgcccttcttcatcctcaccagtgtcctgggtatcctagctagcagcactgtcctcttcatgcttttcagacctctcttccgctggcagctctgccctggctggcctgtcctggcacagctggctgtgggcagtgccctcttcagcattgtggtgcccgtcttggccccagggctaggtagcactcgcagctctgccctgtgtagcctgggctactgtgtctggtatggctcagcctttgcccaggctttgctgctagggtgccatgcctccctgggccacagactgggtgcaggccaggtcccaggcctcaccctggggctcactgtgggaatttggggagtggctgccctactgacactgcctgtcaccctggccagtggtgcttctggtggactctgcaccctgatatacagcacggagctgaaggctttgcaggccacacacactgtagcctgtcttgccatctttgtcttgttgccattgggtttgtttggagccaaggggctgaagaaggcattgggtatggggccaggcccctggatgaatatcctgtgggcctggtttattttctggtggcctcatggggtggttctaggactggatttcctggtgaggtccaagctgttgctgttgtcaacatgtctggcccagcaggctctggacctgctgctgaacctggcagaagccctggcaattttgcactgtgtggctacgcccctgctcctcgccctattctgccaccaggccacccgcaccctcttgccctctctgcccctccctgaaggatggtcttctcatctggacacccttggaagcaaatcctagttctcttcccacctgtcaacctgaattaaagtctacactgcctttgtg

SEQ ID NO: 123447 - DNA, 1905 bp, Artificial Sequence
  derived and/or modified sequence
caagggagagaagtgtgttcacttccttttgctaagcccttcctttccagagagtgtcttggggggcatctgactgcttccccccaccctctgccaggcattgctggagaatgttaagacggcgatggagatgccatcaaccccaccctgcagagcatcacccagacacccgccaagcccctcacatacagatatgtgcacaatgatacacagcaaacgtacacagagttcagtacacacaaagagctcacgcccacgtgcacacacccctcagttgggacagagttgaccaccaccacctttctcccaaacacatggcttttgaactgcctttccttggatccagttcaaggggatggaggagcagtgagagtcagccgcccttccactccaatttcccagcacctcccttatctctgcctcacaagtcacccagcccccctctcttccttccttgtgcttgaagaatctctccttgctggaaagccccctgttttctcaatctccctttccacttcggtaaaatctctacttgctggaaagccccctgttttctcaatctccctttccacttcggtaaaatgcccactttctggtccccacctttttcctgagtgtagtcccaaccagccaaatccaacctcaaaacaggaagacccaaggccagtgacccccataggcctgaggcttgtgcaggcagtgggcgtggggtaaggcttcctgatgccccctgtccctgcccagaacctgatggccctcattagtccttggctcttatcttggaagcacaggcgctgacagccgtcccagcccttctgtctgcgggcctgaaccaaacggtgccatggggaactgtctgcacagggcggagctctccccctcaactgagaactcaagtcagctggacttcgaagatgtatggaattcttcctatggtgtgaatgattccttcccagatggagactatggtgccaacctggaagcagctgccccctgccactcctgtaacctgctggatgactctgcactgcccttcttcatcctcaccagtgtcctgggtatcctagctagcagcactgtcctcttcatgcttttcagacctctcttccgctggcagctctgccctggctggcctgtcctggcacagctggctgtgggcagtgccctcttcagcattgtggtgcccgtcttggccccagggctaggtagcactcgcagctctgccctgtgtagcctgggctactgtgtctggtatggctcagcctttgcccaggctttgctgctagggtgccatgcctccctgggccacagactgggtgcaggccaggtcccaggcctcaccctggggctcactgtgggaatttggggagtggctgccctactgacactgcctgtcaccctggccagtggtgcttctggtggactctgcaccctgatatacagcacggagctgaaggctttgcaggccacacacactgtagcctgtcttgccatctttgtcttgttgccattgggtttgtttggagccaaggggctgaagaaggcattgggtatggggccaggcccctggatgaatatcctgtgggcctggtttattttctggtggcctcatggggtggttctaggactggatttcctggtgaggtccaagctgttgctgttgtcaacatgtctggcccagcaggctctggacctgctgctgaacctggcagaagccctggcaattttgcactgtgtggctacgcccctgctcctcgccctattctgccaccaggccacccgcaccctcttgccctctctgcccctccctgaaggatggtcttctcatctggacacccttggaagcaaatcctagttctcttcccacctgtcaacctgaattaaagtctacactgcctttgtgaa

SEQ ID NO: 123448 - DNA, 1902 bp, Artificial Sequence
  derived and/or modified sequence
caagggagagaagtgtgttcacttccttttgctaagcccttcctttccagagagtgtcttggggggcatctgactgcttccccccaccctctgccaggcattgctggagaatgttaagacggcgatggagatgccatcaaccccaccctgcagagcatcaccagacacccgccaagcccctcacatacagatatgtgcacaatgatacacagcaaacgtacacagagttcagtacacacaaagagctcacgcccacgtgcacacacccctcagttgggacagagttgaccaccaccacctttctcccaaacacatggcttttgaactgcctttccttggatccagttcaaggggatggaggagcagtgagagtcagccgcccttccactccaatttcccagcacctcccttatctctgcctcacaagtcacccagcccccctctcttccttccttgtgcttgaagaatctctccttgctggaaagccccctgttttctcaatctccctttccacttcggtaaaatctctacttgctggaaagccccctgttttctcaatctccctttccacttcggtaaaatgcccactttctggtccccacctttttcctgagtgtagtcccaaccagccaaatccaacctcaaaacaggaagacccaaggccagtgacccccataggcctgaggcttgtgcaggcagtgggcgtggggtaaggcttcctgatgccccctgtccctgcccagaacctgatggccctcattagtccttggctcttatcttggaagcacaggcgctgacagccgtcccagcccttctgtctgcgggcctgaaccaaacggtgccatggggaactgtctgcacagggcggagctctccccctcaactgagaactcaagtcagctggacttcgaagatgtatggaattcttcctatggtgtgaatgattccttcccagatggagactatggtgccaacctggaagcagctgccccctgccactcctgtaacctgctggatgactctgcactgcccttcttcatcctcaccagtgtcctgggtatcctagctagcagcactgtcctcttcatgcttttcagacctctcttccgctggcagctctgccctggctggcctgtcctggcacagctggctgtgggcagtgccctcttcagcattgtggtgcccgtcttggccccagggctaggtagcactcgcagctctgccctgtgtagcctgggctactgtgtctggtatggctcagcctttgcccaggctttgctgctagggtgccatgcctccctgggccacagactgggtgcaggccaggtcccaggcctcaccctggggctcactgtgggaatttggggagtggctgccctactgacactgcctgtcaccctggccagtggtgcttctggtggactctgcaccctgatatacagcacggagctgaaggctttgcaggccacacacactgtagcctgtcttgccatctttgtcttgttgccattgggtttgtttggagccaaggggctgaagaaggcattgggtatggggccaggcccctggatgaatatcctgtgggcctggtttattttctggtggcctcatggggtggttctaggactggatttcctggtgaggtccaagctgttgctgttgtcaacatgtctggcccagcaggctctggacctgctgctgaacctggcagaagccctggcaattttgcactgtgtggctacgcccctgctcctcgccctattctgccaccaggccacccgcaccctcttgccctctctgcccctccctgaaggatggtcttctcatctggacacccttggaagcaaatcctagttctcttcccacctgtcaacctgaattaaagtctacactgcctttgtg

SEQ ID NO: 123449 - protein, 537 aa, Artificial Sequence
  derived and/or modified sequence
MGCVQCKDKEATKLTEERDGSLNQSSGYRYGTDPTPQHYPSFGVTSIPNYNNFHAAGGQGLTVFGGVNSSSHTGTLRTRGGTGVTLFVALYDYEARTEDDLSFHKGEKFQILNSSEGDWWEARSLTTGETGYIPSNYVAPVDSIQAEEWYFGKLGRKDAERQLLSFGNPRGTFLIRESETTKGAYSLSIRDWDDMKGDHVKHYKIRKLDNGGYYITTRAQFETLQQLVQHYSERAAGLCCRLVVPCHKGMPRLTDLSVKTKDVWEIPRESLQLIKRLGNGQFGEVWMGTWNGNTKVAIKTLKPGTMSPESFLEEAQIMKKLKHDKLVQLYAVVSEEPIYIVTEYMNKGSLLDFLKDGEGRALKLPNLVDMAAQVAAGMAYIERMNYIHRDLRSANILVGNGLICKIADFGLARLIEDNEYTARQGAKFPIKWTAPEAALYGRFTIKSDVWSFGILLTELVTKGRVPYPGMNNREVLEQVERGYRMPCPQDCPISLHELMIHCWKKDPEERPTFEYLQSFLEDYFTATEPQYQPGENL

SEQ ID NO: 123450 - DNA, 3628 bp, Artificial Sequence
  derived and/or modified sequence
agagcatcagcaagagtagcagcgagcagccgcgctggtggcggcggcgcgtcgttgcagttgcgccatctgtcaggagcggagccggcgaggagggggctgccgcgggcgaggaggaggggtcgccgcgagccgaaggccttcgagacccgcccgccgcccggcggcgagagtagaggcgaggttgttgtgcgagcggcgcgtcctctcccgcccgggcgcgccgcgcttctcccagcgcaccgaggaccgcccgggcgcacacaaagccgccgcccgcgccgcaccgcccggcggccgccgcccgcgccagggagggattcggccgccgggccggggacaccccggcgccgccccctcggtgctctcggaaggcccaccggctcccgggcccgccggggaccccccggagccgcctcggccgcgccggaggagggcggggagaggaccatgtgagtgggctccggagcctcagcgccgcgcagtttttttgaagaagcaggatgctgatctaaacgtggaaaaagaccagtcctgcctctgttgtagaagacatgtggtgtatataaagtttgtgatcgttggcggacattttggaatttagataatgggctgtgtgcaatgtaaggataaagaagcaacaaaactgacggaggagagggacggcagcctgaaccagagctctgggtaccgctatggcacagaccccacccctcagcactaccccagcttcggtgtgacctccatccccaactacaacaacttccacgcagccgggggccaaggactcaccgtctttggaggtgtgaactcttcgtctcatacggggaccttgcgtacgagaggaggaacaggagtgacactctttgtggccctttatgactatgaagcacggacagaagatgacctgagttttcacaaaggagaaaaatttcaaatattgaacagctcggaaggagattggtgggaagcccgctccttgacaactggagagacaggttacattcccagcaattatgtggctccagttgactctatccaggcagaagagtggtactttggaaaacttggccgaaaagatgctgagcgacagctattgtcctttggaaacccaagaggtacctttcttatccgcgagagtgaaaccaccaaaggtgcctattcactttctatccgtgattgggatgatatgaaaggagaccatgtcaaacattataaaattcgcaaacttgacaatggtggatactacattaccacccgggcccagtttgaaacacttcagcagcttgtacaacattactcagagagagctgcaggtctctgctgccgcctagtagttccctgtcacaaagggatgccaaggcttaccgatctgtctgtcaaaaccaaagatgtctgggaaatccctcgagaatccctgcagttgatcaagagactgggaaatgggcagtttggggaagtatggatgggtacctggaatggaaacacaaaagtagccataaagactcttaaaccaggcacaatgtcccccgaatcattccttgaggaagcgcagatcatgaagaagctgaagcacgacaagctggtccagctctatgcagtggtgtctgaggagcccatctacatcgtcaccgagtatatgaacaaaggaagtttactggatttcttaaaagatggagaaggaagagctctgaaattaccaaatcttgtggacatggcagcacaggtggctgcaggaatggcttacatcgagcgcatgaattatatccatagagatctgcgatcagcaaacattctagtggggaatggactcatatgcaagattgctgacttcggattggcccgattgatagaagacaatgagtacacagcaagacaaggtgcaaagttccccatcaagtggacggcccccgaggcagccctgtacgggaggttcacaatcaagtctgacgtgtggtcttttggaatcttactcacagagctggtcaccaaaggaagagtgccatacccaggcatgaacaaccgggaggtgctggagcaggtggagcgaggctacaggatgccctgcccgcaggactgccccatctctctgcatgagctcatgatccactgctggaaaaaggaccctgaagaacgccccacttttgagtacttgcagagcttcctggaagactactttaccgcgacagagccccagtaccaacctggtgaaaacctgtaaggcccgggtctgcggagagaggccttgtcccagaggctgccccacccctccccattagctttcaattccgtagccagctgctccccagcagcggaaccgcccaggatcagattgcatgtgactctgaagctgacgaacttccatggccctcattaatgacacttgtccccaaatccgaacctcctctgtgaagcattcgagacagaaccttgttatttctcagactttggaaaatgcattgtatcgatgttatgtaaaaggccaaacctctgttcagtgtaaatagttactccagtgccaacaatcctagtgctttccttttttaaaaatgcaaatcctatgtgattttaactctgtcttcacctgattcaactaaaaaaaaaaaagtattattttccaaaagtggcctctttgtctaaaacaataaaattttttttcatgttttaacaaaaaccaatcaggacaggtgtttgtttttgttttcttttttataaatatgaatatatataatatatatgtccctgtacatatacaatgtgggtgctaatgtggagactgtggccggcctgagccaccaagctgcgggacccagagggaggattttactgcaagtcagcatcaaagcaccggtgttattctgaaaacaccagtggcctcatttttggcttttgcaaagcatgaattttttcatttggattgcactttcctggttcatgactgtacctgtaggtggttgttactttgactcttttcaggaaccaccccccaagctgaatttacaagttctgttagcactatttgcttcaacttactgcgatttgttctcaaaacttaaaaataagcaagcaaatggctgatactaccaagagaactggaagatggataccacacaaacttcttgtataaaaatatgaatgctgaaatgtttcagacatttttaatttaataaacctgtaaccacatttaagtgatctaaaacccatagcattgtagtcatggcaacccgctaaactttctcatgcaactaaaatttctgggggaaatgagggtgggggttgtacatttcccattgtaaaataagtgttttaaatgtcctgtactgctaacgaatgactttctatatgtccaggagttctccagtggaataactatgcactactttacatttcatggggatgcacaaaaacaaaaaagtattacatttttagttgctgtttgtaccaaccttaaattacatatgtttaacaacaacaaatcaaaaatcctatttctattgagtttttaatactgactagcaactctgaagtcttaattccttttttgttatgatttatttgtgagtttacatttttaaattgtttaactttcttaatttagtaattaaaaagagagcattttacatttgaa

SEQ ID NO: 123451 - DNA, 2416 bp, Artificial Sequence
  derived and/or modified sequence
aagagaacaaaagtgtctgagaaagccagagtgtgaccacgcggtttctatgctccaagggatttatttcagtggtaggtggagcagctctgtggagcacatggctaatgataatggattgactgaccagaagcaggagaggacctagcagaagccggaggtcaagctgccccaagactgggggacagcctgggtgaagactctggacctcatgaccatgtatattccagagggggatctaaagagccccagaaattcacaaaggaccagtcctgcctctgttgtagaagacatgtggtgtatataaagtttgtgatcgttggcggacattttggaatttagataatgggctgtgtgcaatgtaaggataaagaagcaacaaaactgacggaggagagggacggcagcctgaaccagagctctgggtaccgctatggcacagaccccacccctcagcactaccccagcttcggtgtgacctccatccccaactacaacaacttccacgcagccgggggccaaggactcaccgtctttggaggtgtgaactcttcgtctcatacggggaccttgcgtacgagaggaggaacaggagtgacactctttgtggccctttatgactatgaagcacggacagaagatgacctgagttttcacaaaggagaaaaatttcaaatattgaacagctcggaaggagattggtgggaagcccgctccttgacaactggagagacaggttacattcccagcaattatgtggctccagttgactctatccaggcagaagagtggtactttggaaaacttggccgaaaagatgctgagcgacagctattgtcctttggaaacccaagaggtacctttcttatccgcgagagtgaaaccaccaaaggtgcctattcactttctatccgtgattgggatgatatgaaaggagaccatgtcaaacattataaaattcgcaaacttgacaatggtggatactacattaccacccgggcccagtttgaaacacttcagcagcttgtacaacattactcagagagagctgcaggtctctgctgccgcctagtagttccctgtcacaaagggatgccaaggcttaccgatctgtctgtcaaaaccaaagatgtctgggaaatccctcgagaatccctgcagttgatcaagagactgggaaatgggcagtttggggaagtatggatgggtacctggaatggaaacacaaaagtagccataaagactcttaaaccaggcacaatgtcccccgaatcattccttgaggaagcgcagatcatgaagaagctgaagcacgacaagctggtccagctctatgcagtggtgtctgaggagcccatctacatcgtcaccgagtatatgaacaaaggaagtttactggatttcttaaaagatggagaaggaagagctctgaaattaccaaatcttgtggacatggcagcacaggtggctgcaggaatggcttacatcgagcgcatgaattatatccatagagatctgcgatcagcaaacattctagtggggaatggactcatatgcaagattgctgacttcggattggcccgattgatagaagacaatgagtacacagcaagacaaggtgcaaagttccccatcaagtggacggcccccgaggcagccctgtacgggaggttcacaatcaagtctgacgtgtggtcttttggaatcttactcacagagctggtcaccaaaggaagagtgccatacccaggcatgaacaaccgggaggtgctggagcaggtggagcgaggctacaggatgccctgcccgcaggactgccccatctctctgcatgagctcatgatccactgctggaaaaaggaccctgaagaacgccccacttttgagtacttgcagagcttcctggaagactactttaccgcgacagagccccagtaccaacctggtgaaaacctgtaaggcccgggtctgcggagagaggccttgtcccagaggctgccccacccctccccattagctttcaattccgtagccagctgctccccagcagcggaaccgcccaggatcagattgcatgtgactctgaagctgacgaacttccatggccctcattaatgacacttgtccccaaatccgaacctcctctgtgaagcattcgagacagaaccttgttatttctcagactttggaaaatgcattgtatcgatgttatgtaaaaggccaaacctctgttcagtgtaaatagttactccagtgccaacaatcctagtgctttccttttttaaaaatgcaaatcctatgtgattttaactctgtcttcacctgattcaactaaaaaaaaaaaagtattattttccaaaagtggcctctttgtctaaaacaataaaattttttttcatgttttaacaaaaaccaa

SEQ ID NO: 123452 - DNA, 1614 bp, Artificial Sequence
  derived and/or modified sequence
atggggtgcgtccagtgtaaagataaggaggccactaagctaaccgaggagagagatggtagtttaaatcaatctagcggataccgctatggaacagatccaacaccccaacactatcctagtttcggagtaacatcgattccgaactataataacttccacgccgcgggcggccagggactaaccgtgtttggaggtgtgaactcaagtagccataccggtactttacggacaaggggaggcactggggtgactttgtttgtagcactctacgattatgaagccaggacggaagacgacctctcgtttcataagggggagaaatttcagatcctcaattccagcgagggagactggtgggaagctagatctctcactaccggcgagacgggatatatccctagcaattacgtggcacctgtggatagcattcaggccgaggaatggtacttcggcaaactcggaagaaaggatgccgaacgccagctcctgagcttcggcaatccccgggggacgtttttgatccgtgagagtgagacaaccaaaggcgcctatagcctgtcaattagggactgggacgatatgaagggggatcacgtcaaacattacaagatcagaaagctcgacaatggaggctactatataacaaccagggctcagttcgagacactgcaacaactggtacagcactacagcgagagagcagcaggcctgtgttgccgcctggtggttccttgccataagggaatgccgagactgactgacctgagcgtcaaaactaaggatgtgtgggaaattcctcgtgagtccttacagctcatcaagaggctgggaaacgggcagtttggcgaggtttggatgggtacttggaatggaaacacaaaagtggccatcaaaactttaaaacctggcaccatgagccctgagtcgttccttgaggaggcccagataatgaaaaaactaaagcacgacaagctggttcagttatacgcagttgtatctgaagagccaatctatatcgtcacagaatatatgaacaagggaagcctgctggattttctgaaggatggagagggccgtgctctgaagttgcctaacctggttgacatggccgcccaggtggccgccgggatggcttatatagaacggatgaattatattcacagagacctacgctccgccaatatcctcgtggggaatggcctgatctgtaagattgctgatttcggcctcgctcgacttattgaagacaacgagtatacagctaggcagggtgcaaaattcccaatcaagtggaccgcccctgaagctgcgctgtatggccgcttcaccatcaagtccgacgtctggtctttcggcatactcctgactgagctggttacaaaggggcgggtgccgtatccagggatgaataatcgcgaggttctggagcaggtggagcgtggataccgtatgccatgtccccaggattgccccatctcactgcatgagctgatgattcactgctggaagaaggatccagaagagcggcccaccttcgaatacctgcagtcttttctggaggactactttacagctaccgaaccccagtaccagccaggcgagaacctgtag

SEQ ID NO: 123453 - DNA, 1614 bp, Artificial Sequence
  derived and/or modified sequence
atggggtgcgttcaatgtaaagacaaggaagcaacaaaactaaccgaggagcgcgacggctccctgaatcaaagtagtgggtataggtacggcaccgacccgacaccgcaacattatccatctttcggggtgacgagtatccctaactacaataatttccacgccgctggcggccaaggtttgactgtgttcggtggtgttaacagctcgagtcacacggggaccctccgtacgaggggtggcaccggcgtcaccctgtttgtggccctgtacgattatgaggcccgaaccgaggatgatttaagcttccacaaaggggaaaagttccagatcctcaacagctcagagggcgactggtgggaagctaggtcactgaccaccggagagacgggctacatcccttccaattatgtggcccccgtggactctatccaagctgaggagtggtactttggtaaactggggagaaaagatgccgagcggcagcttctgagcttcggaaaccctagaggcactttcctaatccgggaaagcgagacaactaagggagcctactcgttgtctatacgggattgggatgacatgaagggagaccacgttaagcactacaagatacgaaagctagataacggcggttattacatcacaacaagggcgcagtttgagaccctacaacagctggtacagcactacagcgagagggcggccggattgtgctgtagattagtggttccatgccacaaaggaatgcctagactgaccgacctgtctgttaagactaaggacgtttgggagataccaagagagtccctgcagctcatcaaaagactggggaacggacagtttggagaagtctggatgggcacttggaacggaaacactaaagttgcaatcaaaacactgaaacctgggaccatgtcacctgaaagcttcctcgaagaagcccaaattatgaagaaacttaaacatgataagctagttcagctctatgcagtggtgtcggaagagcctatctatatcgtgaccgaatacatgaataaaggcagtctgctcgacttcctcaaagacggagaaggcagagcactgaagcttccaaaccttgtggatatggcggcgcaggtggccgctggtatggcatacattgaacggatgaattatatccaccgtgacctgagatccgccaacattctggtaggaaacggattgatctgtaagatcgcagacttcgggctcgcccggctcattgaggacaatgaatataccgcccggcaaggcgcgaaattcccgattaagtggaccgccccagaagcagcactttacggccgattcacaataaagagcgatgtgtggagtttcggaatcctcctgacggagctggtaaccaaagggcgcgtgccgtatccaggcatgaataaccgggaagtgcttgaacaggtggagagagggtaccggatgccttgccctcaggactgcccaatctcccttcacgaattaatgattcactgttggaagaaggacccagaggaacgcccaacgtttgagtatctgcagtccttcctcgaggattatttcacagccactgagccgcagtatcagccaggtgaaaatctgtag

SEQ ID NO: 123454 - DNA, 1614 bp, Artificial Sequence
  derived and/or modified sequence
atgggctgtgtgcagtgcaaggacaaggaggccaccaagctgacagaggagagagatggcagcctgaaccagagcagcggctaccgctatggaacagaccccaccccccagcactaccccagctttggagtgaccagcatccccaactacaacaacttccacgccgccggcggccagggcctgactgtgtttggaggagtgaacagcagcagccacacaggcaccctgcggacccggggcggcaccggggtgaccctgtttgtggccctgtatgactatgaggccaggacagaagatgacctgtccttccacaagggggagaagttccagatcctgaacagcagcgagggggactggtgggaggcccggagcctgaccactggagagaccggctacatccccagcaactacgtggcccctgtggacagcatccaggccgaggagtggtactttgggaagctgggcaggaaggatgctgagcggcagctgctgagctttggaaacccccggggcaccttcctgatccgggagagcgagaccaccaagggggcctacagcctgagcatccgggactgggatgacatgaagggggaccacgtgaagcactacaagatcaggaagctggacaatggaggctactacatcaccacccgggcccagtttgagaccctgcagcagctggtgcagcactacagcgagagagctgctggcctgtgctgccgcctggtggtgccctgccacaagggcatgccccggctgacagacctgtctgtgaagaccaaggatgtgtgggagatcccccgggagagcctgcagctgatcaagaggctgggcaatggccagtttggagaggtgtggatgggcacctggaatggaaacaccaaggtggccatcaagaccctgaagccaggcaccatgagccctgagagcttcctggaggaggcccagatcatgaagaagctgaagcatgacaagctggtgcagctgtatgctgtggtgtctgaggagcccatctacatcgtgacagagtacatgaacaagggcagcctgctggacttcctgaaggatggagagggccgggccctgaagctgcccaacctggtggacatggccgcccaggtggccgccggcatggcctacattgaaagaatgaactacatccaccgggacctgcggagcgccaacatcctggtgggcaatggcctcatctgcaagattgctgactttggcctggcccggctgattgaggacaatgagtacacagcccggcagggcgccaagttccccatcaagtggacagcccctgaggccgccctgtatggccgcttcaccatcaagagtgatgtgtggagctttggcatcctgctgacagagctggtgaccaagggccgggtgccctacccaggcatgaacaaccgggaggtgctggagcaggtggagcggggctacaggatgccctgcccccaggactgccccatcagcctgcacgagctgatgatccactgctggaagaaggaccctgaggagcggcccacctttgagtacctgcagagcttcctggaggactacttcaccgccacagagccccagtaccagcctggagagaacctgtag

SEQ ID NO: 123455 - DNA, 1614 bp, Artificial Sequence
  derived and/or modified sequence
atgggctgcgtgcagtgcaaggacaaggaggccaccaagctgaccgaggagagagacggaagtctcaaccagtcctcaggctaccggtacggcacagacccgaccccccagcattatccctcattcggtgtgacgtcaattcctaactacaacaatttccatgcggctggaggccaggggctgaccgtctttggtggagttaattcttccagtcataccgggacactcaggacaagagggggcacgggggtgaccttgttcgtggctttatatgattacgaggcacggacagaggatgatctgtcatttcacaagggagaaaagttccaaatcttaaacagtagtgaaggagattggtgggaggcacgctccttgaccactggtgaaacgggctacattccgagtaattacgtcgctcctgtggatagcattcaggctgaggaatggtattttggtaaactgggcaggaaagatgcagagaggcaactactgtccttcggcaacccaagaggcacctttctgattcgtgaatccgagactaccaaaggcgcctacagcttaagtatccgagactgggacgatatgaaaggcgatcatgtgaagcactataagataagaaagctggataatggcggttattacatcaccacccgagctcaatttgagacgctacagcagctcgttcaacactattccgagcgcgcagccggtttgtgctgcaggctggttgtcccctgccacaaaggtatgccacgcctgactgatctctcggtgaagaccaaagacgtgtgggaaattcccagagagtccctccagctcattaaacgcctgggtaacggtcagtttggggaagtctggatgggtacatggaatgggaatacaaaggtcgccattaaaacactcaaacctgggaccatgtctcccgagagttttttggaagaggctcaaatcatgaagaagctcaaacacgacaagctggttcagctatacgccgtggtctccgaggaaccgatttacatcgtgacggagtatatgaataaagggagtcttcttgacttcctgaaagacggtgagggtcgcgctctgaagctgcctaacctcgtcgacatggctgcacaggttgctgctggaatggcgtatatcgagcgtatgaactatatccatcgggacctgcgcagtgctaacatcttagtcggtaatggcctcatctgcaagatagccgactttggcctagcacggctcatcgaggacaacgaatatacagcccgccagggtgctaaatttcctattaagtggacagcccctgaagctgctctgtatggtcgttttaccattaagtccgacgtgtggagcttcggtattttacttacggagcttgtcacaaaggggcgggtgccttacccaggaatgaataacagggaggtccttgagcaggtggagaggggatatcgtatgccctgcccccaggattgtcctatatcactccatgagctcatgatccattgttggaagaaggaccccgaagagagacccactttcgaatacctccagtccttcttagaagactatttcaccgccacagagccccaataccagccgggcgaaaacctatag

SEQ ID NO: 123456 - DNA, 1614 bp, Artificial Sequence
  derived and/or modified sequence
atgggctgcgtgcagtgcaaggacaaggaggccaccaagctgaccgaagagcgggacggctcccttaatcagtctagtggatacagatacgggacagaccccactccacaacattacccatccttcggcgtcacctctatcccaaattacaataacttccacgccgcaggcggccagggactcacggtttttgggggggtcaattcttctagccacaccggcactctccggactaggggtggcacgggggtcaccctgtttgtggccctctatgactacgaagctcgcacggaagatgatctcagttttcacaaaggggagaaatttcaaattctaaatagctccgagggggattggtgggaggctagatctctgaccaccggggagacgggatatattcccagcaactatgtggcgcctgtcgacagtattcaggccgaagaatggtattttggaaaacttggtcgaaaggacgccgagcgccagctcctgtcattcggtaatcccaggggtacctttctaatcagagagtctgagaccactaagggagcctactccctgagcattcgcgattgggatgacatgaaaggcgatcacgtcaagcactacaaaatccgtaagttggacaatggagggtattatattacaacgcgcgctcagttcgaaaccctccagcaactagtgcagcattattctgagcgagctgccggactttgctgtagactggtagtgccctgccacaaaggaatgcctaggcttaccgatctgagtgtaaaaacaaaagacgtttgggagattcctcgcgagtctcttcagctaattaagaggttgggcaacggacagtttggggaggtgtggatgggaacttggaatggaaatacaaaagtggccatcaaaactttgaagccaggtactatgtcccccgagtccttcctggaggaggctcaaatcatgaaaaaattgaagcatgacaaacttgtccagctgtacgccgtggtgagcgaagagccaatctacatcgttaccgagtacatgaacaaaggctcacttttggactttttaaaggacggcgagggtcgggcactgaaactcccaaacttggtggatatggctgcccaggtcgcagctgggatggcctatattgagcggatgaattatatccatcgagatctccggagcgcaaatatcctggtcggcaatgggctgatatgcaaaatcgctgatttcggcttggcccgcttgatagaagacaatgagtacaccgcgaggcaaggggctaagtttcccattaaatggacggcacccgaagctgccctgtacggcagattcaccattaagagtgacgtctggtcttttggtatcctcctgactgaactggtaactaaaggaagagttccttatcccggaatgaataatagagaggtgctggaacaggtggaacgcgggtatcgcatgccctgcccacaagattgcccgatttctctgcatgaactgatgatccactgttggaagaaagatcccgaggaacgccctacgttcgaatacctgcagtccttcctggaagactatttcaccgccacggagccacagtaccagccgggtgaaaacctctag

SEQ ID NO: 123457 - DNA, 1614 bp, Artificial Sequence
  derived and/or modified sequence
atgggctgcgtgcagtgtaaagacaaggaggccactaaattgacagaagagcgggatggctcactaaatcagagttcaggatatcgttacgggaccgatcccacgccacagcactacccaagttttggcgtgacctccatccctaactacaacaactttcatgctgccggtgggcagggcctaaccgtctttggcggagtcaattcatcatcccatactgggacactgcgaacccgtggagggaccggcgtgaccctgtttgttgccttgtatgactatgaggctcgtaccgaggatgacctatcttttcacaaaggcgagaagtttcagattctgaacagctccgagggggactggtgggaagcccgatcactgaccaccggcgaaaccgggtacatccccagtaactatgtcgcgccagtcgactctatccaggctgaggaatggtacttcgggaagcttggaaggaaagatgcggagcgacagcttctctccttcggaaatccccgaggtacgttccttattcgtgagagcgagaccacgaaaggcgcatactcactgagcatccgcgactgggacgacatgaagggcgatcacgtaaaacactacaaaatcaggaagctggacaatggaggctattatatcaccacaagggcccagtttgaaacattacaacagttagttcaacactattccgaaagagccgcaggcctctgctgccggctcgttgtgccttgccacaagggcatgcccaggttgaccgacctgtcagtgaagaccaaggacgtctgggagattcccagggaatccttgcaactcattaagcgcctgggaaatgggcagtttggggaagtttggatgggtacttggaacggaaataccaaagtagcgatcaagactcttaaaccaggcacaatgtcccctgaatccttcctcgaggaggcccagatcatgaaaaagttaaagcacgataaattagttcaactttatgcggtggttagcgaagagcccatctatatagtgacggagtatatgaacaagggttcactgcttgacttccttaaggacggggaaggcagagctcttaaactcccgaacctggtggacatggctgcccaggtggcagccggaatggcctacatcgaacggatgaactacattcacagggatctgagatctgcaaacatcctggtcggaaacgggctgatctgcaaaattgctgacttcgggctggccagactgattgaagataatgagtatacagctaggcagggcgcaaaatttcctattaagtggacagctcccgaagccgctctctacggcaggttcacaatcaagtctgatgtttggagttttgggatcttgctgacagaactcgtgacgaagggaagagtgccctaccctgggatgaataaccgggaagtgctggagcaagttgagcgcggatatcgaatgccctgccctcaggactgccccataagccttcacgagctgatgattcattgctggaagaaagatcccgaggagcggccaacattcgaatatcttcaatccttccttgaggactacttcaccgcaaccgagccgcagtatcagcccggagaaaacctgtag

SEQ ID NO: 123458 - DNA, 1614 bp, Artificial Sequence
  derived and/or modified sequence
atgggatgtgtgcagtgcaaagacaaggaagctaccaagcttacggaagagagggacgggagtcttaatcagagttcaggttatcgctacgggacagaccccacaccccagcattacccctcgtttggggtgacgagcataccaaactacaataacttccatgccgctggaggccagggcctgactgtgttcgggggagtcaactcttctagtcacaccggcactctcagaactcgtggcggaacgggcgtgacactttttgtcgccctctatgactatgaggcccgtaccgaggatgacctgtcctttcacaagggggagaaatttcagatccttaatagtagtgaaggtgactggtgggaggccaggtccctgaccaccggggagactggatacatccctagtaattatgtagctcctgtcgattctatccaggcggaggaatggtattttggtaagctagggcgaaaagatgcagaacgccagcttctctctttcggcaacccgaggggaacattcttgataagggagtctgaaaccacgaagggcgcatatagcttgagtattagagactgggacgacatgaagggcgaccacgtgaaacattataagatccggaaactggacaatggcggatactatattaccactagggcacaattcgagaccctgcagcaactcgttcagcattatagtgagcgcgctgcaggcctgtgttgtagacttgttgtcccttgtcataaaggaatgcctaggctcactgatctgtcagttaagacaaaggacgtatgggagataccgcgtgaatccctccagctgattaaaagactggggaacgggcagttcggcgaggtgtggatgggcacttggaacggaaatactaaggttgccatcaagaccctcaaaccaggaaccatgtctccagaatcgtttctcgaggaggctcaaatcatgaaaaagcttaagcatgacaagctggtgcagctatatgcagtggtcagcgaagagcccatttacattgtgacagaatacatgaataaagggtccctactggacttcctcaaggatggcgaaggccgagcactcaaactgcccaatctggtggacatggccgcacaagttgcagccggtatggcttacattgagagaatgaactatattcatagggatctgcggtctgccaacattcttgtcggcaacggccttatttgcaaaatcgcggacttcggtctcgctcggttgattgaggacaacgaatatacagctagacaaggcgcaaaatttcccatcaagtggaccgctcctgaagccgctttgtatggccgtttcaccataaaaagcgatgtgtggagtttcgggattcttctgaccgagctcgtaaccaagggacgtgtcccctatcctggcatgaacaacagggaggtgctggaacaggtggagcgcggttaccgaatgccatgccctcaggattgtccaatctccctgcatgaactcatgatccactgctggaagaaggatccggaggaaaggcctacttttgaatacctgcagtcttttctggaggattactttaccgctaccgagcctcaatatcagccaggagagaacctctag

SEQ ID NO: 123459 - DNA, 1614 bp, Artificial Sequence
  derived and/or modified sequence
atgggctgcgtgcagtgcaaggacaaggaggccaccaagctgaccgaggagagagacggcagcctgaaccagagcagcggctacagatacggcaccgaccccaccccccagcactaccccagcttcggcgtgaccagcatccccaactacaacaacttccacgccgccggcggccagggcctgaccgtgttcggcggcgtgaacagcagcagccacaccggcaccctgagaaccagaggcggcaccggcgtgaccctgttcgtggccctgtacgactacgaggccagaaccgaggacgacctgagcttccacaagggcgagaagttccagatcctgaacagcagcgagggcgactggtgggaggccagaagcctgaccaccggcgagaccggctacatccccagcaactacgtggcccccgtggacagcatccaggccgaggagtggtacttcggcaagctgggcagaaaggacgccgagagacagctgctgagcttcggcaaccccagaggcaccttcctgatcagagagagcgagaccaccaagggcgcctacagcctgagcatcagagactgggacgacatgaagggcgaccacgtgaagcactacaagatcagaaagctggacaacggcggctactacatcaccaccagagcccagttcgagaccctgcagcagctggtgcagcactacagcgagagagccgccggcctgtgctgcagactggtggtgccctgccacaagggcatgcccagactgaccgacctgagcgtgaagaccaaggacgtgtgggagatccccagagagagcctgcagctgatcaagagactgggcaacggccagttcggcgaggtgtggatgggcacctggaacggcaacaccaaggtggccatcaagaccctgaagcccggcaccatgagccccgagagcttcctggaggaggcccagatcatgaagaagctgaagcacgacaagctggtgcagctgtacgccgtggtgagcgaggagcccatctacatcgtgaccgagtacatgaacaagggcagcctgctggacttcctgaaggacggcgagggcagagccctgaagctgcccaacctggtggacatggccgcccaggtggccgccggcatggcctacatcgagagaatgaactacatccacagagacctgagaagcgccaacatcctggtgggcaacggcctgatctgcaagatcgccgacttcggcctggccagactgatcgaggacaacgagtacaccgccagacagggcgccaagttccccatcaagtggaccgcccccgaggccgccctgtacggcagattcaccatcaagagcgacgtgtggagcttcggcatcctgctgaccgagctggtgaccaagggcagagtgccctaccccggcatgaacaacagagaggtgctggagcaggtggagagaggctacagaatgccctgcccccaggactgccccatcagcctgcacgagctgatgatccactgctggaagaaggaccccgaggagagacccaccttcgagtacctgcagagcttcctggaggactacttcaccgccaccgagccccagtaccagcccggcgagaacctgtag

SEQ ID NO: 123460 - protein, 694 aa, Artificial Sequence
  derived and/or modified sequence
MSGGEVVCSGWLRKSPPEKKLKRYAWKRRWFVLRSGRLTGDPDVLEYYKNDHAKKPIRIIDLNLCQQVDAGLTFNKKEFENSYIFDINTIDRIFYLVADSEEEMNKWVRCICDICGFNPTEEDPVKPPGSSLQAPADLPLAINTAPPSTQADSSSATLPPPYQLINVPPHLETLGIQEDPQDYLLLINCQSKKPEPTRTHADSAKSTSSETDCNDNVPSHKNPASSQSKHGMNGFFQQQMIYDSPPSRAPSASVDSSLYNLPRSYSHDVLPKVSPSSTEADGELYVFNTPSGTSSVETQMRHVSISYDIPPTPGNTYQIPRTFPEGTLGQTSKLDTIPDIPPPRPPKPHPAHDRSPVETCSIPRTASDTDSSYCIPTAGMSPSRSNTISTVDLNKLRKDASSQDCYDIPRAFPSDRSSSLEGFHNHFKVKNVLTVGSVSSEELDENYVPMNPNSPPRQHSSSFTEPIQEANYVPMTPGTFDFSSFGMQVPPPAHMGFRSSPKTPPRRPVPVADCEPPPVDRNLKPDRKVKPAPLEIKPLPEWEELQAPVRSPITRSFARDSSRFPMSPRPDSVHSTTSSSDSHDSEENYVPMNPNLSSEDPNLFGSNSLDGGSSPMIKPKGDKQVEYLDLDLDSGKSTPPRKQKSSGSGSSVADERVDYVVVDQQKTLALKSTREAWTDGRQSTESETPAKSVK

SEQ ID NO: 123461 - protein, 591 aa, Artificial Sequence
  derived and/or modified sequence
MNKWVRCICDICGFNPTEEDPVKPPGSSLQAPADLPLAINTAPPSTQADSSSATLPPPYQLINVPPHLETLGIQEDPQDYLLLINCQSKKPEPTRTHADSAKSTSSETDCNDNVPSHKNPASSQSKHGMNGFFQQQMIYDSPPSRAPSASVDSSLYNLPRSYSHDVLPKVSPSSTEADGELYVFNTPSGTSSVETQMRHVSISYDIPPTPGNTYQIPRTFPEGTLGQTSKLDTIPDIPPPRPPKPHPAHDRSPVETCSIPRTASDTDSSYCIPTAGMSPSRSNTISTVDLNKLRKDASSQDCYDIPRAFPSDRSSSLEGFHNHFKVKNVLTVGSVSSEELDENYVPMNPNSPPRQHSSSFTEPIQEANYVPMTPGTFDFSSFGMQVPPPAHMGFRSSPKTPPRRPVPVADCEPPPVDRNLKPDRKVKPAPLEIKPLPEWEELQAPVRSPITRSFARDSSRFPMSPRPDSVHSTTSSSDSHDSEENYVPMNPNLSSEDPNLFGSNSLDGGSSPMIKPKGDKQVEYLDLDLDSGKSTPPRKQKSSGSGSSVADERVDYVVVDQQKTLALKSTREAWTDGRQSTESETPAKSVK

SEQ ID NO: 123462 - DNA, 2085 bp, Artificial Sequence
  derived and/or modified sequence
atgagtgggggcgaggtggtgtgttcggggtggctccgtaagagtccgcctgaaaaaaagctgaaaagatatgcatggaagaggagatggttcgtgttgcgttctggtcgcctaaccggtgatcccgatgtcctggagtactataagaacgatcatgccaaaaaacctatccgcattatcgacttgaacctgtgtcaacaggttgatgcaggattgacatttaacaaaaaagagttcgagaactcatatatattcgacatcaataccattgataggatcttctaccttgtggcagattcggaggaggagatgaataaatgggttcgatgtatttgtgacatctgcggtttcaacccaaccgaggaggacccagtaaaacctcccggatcttctcttcaggcaccagccgacctgccattagcaatcaatacggcccctccaagcacacaggccgatagttcaagcgccaccttaccccctccctatcagctgatcaatgtcccacctcatctggagacgcttggaattcaggaagacccacaggactatctgctcttgatcaattgtcagtccaagaagcctgaaccaactcggacccatgcggatagcgccaagagtaccagcagcgagaccgactgtaacgataatgtccctagccataagaacccagcctccagccaatctaaacacggtatgaatggcttcttccagcagcaaatgatttacgacagcccgccttcacgggcccccagtgcatcggtagactcgagtctgtacaacctgcctaggagctactcgcacgacgttctccctaaggtaagtccaagctctacagaggcggacggcgagctttacgtgtttaatacccccagtggaacttccagcgtggagacccagatgaggcatgtgtcgatctcctacgacatacccccaacccccggtaacacttatcagatccctaggacctttcctgaggggactctgggccagaccagtaaactggatacaatccctgacattcctcccccaaggcctccgaagccacatccggcccatgaccggagccctgtagaaacatgctccatcccccgcactgcctcagataccgatagctcgtattgtatacccacggccggcatgtctcccagccgtagcaatacaatctcaacagtagacctgaacaagttgaggaaggacgccagctcgcaggactgttatgatattcccagagccttcccttcagaccgatcttctagcctcgaaggcttccacaaccacttcaaagtgaaaaacgttctcaccgtcgggtcagtatcctcggaagaactcgatgagaactacgtgccaatgaacccgaattctcctcccaggcagcactcttcctcattcaccgaacccatccaggaagcgaattacgtgccgatgactcctgggacctttgatttctcttccttcgggatgcaggtccctccgcctgcacacatgggcttccgttcttcccccaaaacccctccccggcgccccgttccagtggctgactgtgagcctcctccggtcgacaggaatcttaagcccgacagaaaagtgaagccagccccacttgaaatcaagccgttaccagagtgggaagagcttcaggctcccgtgcgaagcccgatcacgagatctttcgcccgcgactccagccggtttcccatgtccccaaggccagattctgtgcattctactacctccagttcagactctcacgattccgaagaaaattacgtacccatgaaccccaacctgagttcagaagaccccaacctattcggttcaaacagtctggatgggggaagctcaccgatgattaagcccaaaggagataagcaggtggagtatctggacctggaccttgacagtgggaagtcgacaccccctcgcaaacaaaagtctagcggcagtggatcctccgtagcggacgagagggtggactatgttgttgtcgaccagcagaagacactcgcgctaaaatcaacacgtgaggcttggaccgatgggcgacagagcaccgagtccgaaacccctgctaaatcagtgaagtag

SEQ ID NO: 123463 - DNA, 1776 bp, Artificial Sequence
  derived and/or modified sequence
atgaacaaatgggtgcgatgcatctgtgacatctgcgggttcaacccaacggaagaggacccggtgaaacctccaggttcctctttgcaggcccccgcggacttgcctctggcaatcaacactgccccccctagtactcaagccgattcctcttccgccaccctaccaccaccttaccagcttattaacgtgcctccccatcttgaaacgctagggatacaagaggacccacaggattacctcctcctgattaactgtcagtcaaagaaaccggagcctacgcgaacgcacgctgattccgccaagtctacaagttccgaaacagactgtaacgacaacgtaccctctcataagaatccagcttcctctcagtccaaacatggcatgaacggctttttccaacagcagatgatttacgacagtcccccttcaagagcgccctctgccagcgtggatagctccttatacaatctgccccgcagctactcccacgatgtgcttcccaaagtctccccgagtagtacggaggccgatggggagctgtacgtgtttaatacaccttccggcacaagcagtgtggagacacagatgcgacacgtgtccatatcatacgacattccaccaacgcccggtaacacataccagatcccccgaactttcccggaaggcaccctcggtcaaacatctaaacttgacactatccccgacatccctccgcctcgaccaccaaaaccacatcccgcccatgaccgatcccctgtggagacgtgttctatccctcgtaccgctagcgacactgattccagctattgcattcccaccgccggaatgagccctagccggagtaacacaatctctacagttgatctgaataaactaaggaaggatgccagcagccaggactgttacgacattccacgggcctttccatcggaccgttcttcctctctggagggtttccataatcacttcaaagtgaaaaatgtcttaactgtcggctcagtgtcgtcagaggaactggacgagaactatgtgcctatgaatccaaacagcccaccacgccagcatagctcgagctttaccgaaccaatacaggaggcaaactatgttcccatgacccccggaacattcgatttctcctcatttggcatgcaggtgcccccccctgcccacatgggattccggtccagcccaaagacacccccaagacgcccagtaccagtggccgactgcgagccaccccccgtggaccgcaatttaaagccagaccggaaagtaaaaccggcccccctagaaatcaagccgcttcccgagtgggaggaactacaagcccccgtgaggagcccaattactcgctcattcgctcgtgactcgtcacggtttcccatgtcaccccgtccagattccgtgcactcaaccactagtagttctgacagtcacgattcagaagagaattatgtacccatgaacccaaacttgagctcagaggatcccaatctgttcggatccaacagtctggatggcggaagctctccgatgatcaagcccaaaggggacaaacaggtggaatacttggacctcgatttagattccggtaaatcaacgcctcctaggaagcagaagagctccggaagcggtagctcagtcgctgatgagcgcgtggactacgtggtggtagaccagcagaaaactctggccctgaagagtacacgggaggcctggaccgatggcaggcaaagcacggagagcgaaacacccgcaaagagcgttaaatag

SEQ ID NO: 123464 - DNA, 2648 bp, Artificial Sequence
  derived and/or modified sequence
gagtccgagcgctgctgaggcagctggcgagacggcacgtctggaggcgaggcgggcgcactgaaaggaggccggcgcgcccgcggccccggctcgcgttctgttcaggttcgtgggcctgcagaggagagactcgaactcgtggaacccgcgcaccgtggagtctgtccgcccagtccgtccggggtgcgcgaccaggagagctaggttctcgccactgcgcgctcggcaggcgtcggctgtgtcgggagcgcgcccgccgcccctcagctgcccggcccggagcccgagacgcgcgcaccatgagcggtggtgaagtggtctgctccggatggctccgcaagtcccccccggagaaaaagttgaagcgttatgcatggaagaggagatggttcgtgttacgcagtggccgtttaactggagatccagatgttttggaatattacaaaaatgatcatgccaagaagcctattcgtattattgatttaaatttatgtcaacaagtagatgctggattgacatttaacaaaaaagagtttgaaaacagctacatttttgatatcaacactattgaccggattttctacttggtagcagacagcgaggaggagatgaataagtgggttcgttgtatttgtgacatctgtgggtttaatccaacagaagaagatcctgtgaagccacctggcagctctttacaagcaccagctgatttacctttagctataaatacagcaccaccatccacccaggcagattcatcctctgctactctacctcctccatatcagctaatcaatgttccaccacacctggaaactcttggcattcaggaggatcctcaagactacctgttgctcatcaactgtcaaagcaagaagcccgaacccaccagaacgcatgctgattctgcaaaatccacctcttctgaaacagactgcaatgataacgtcccttctcataaaaatcctgcttcctcccagagcaaacatggaatgaatggcttttttcagcagcaaatgatatacgactctccaccttcacgtgccccatctgcttcagttgactccagcctttataacctgcccaggagttattcccatgatgttttaccaaaggtgtctccatcaagtactgaagcagatggagaactctatgtttttaataccccatctgggacatcgagtgtagagactcaaatgaggcatgtatctattagttatgacattcctccaacacctggtaatacttatcagattccacgaacatttccagaaggaaccttgggacagacatcaaagctagacactattccagatattcctccacctcggccaccgaaaccacatccagctcatgaccgatctcctgtggaaacgtgtagtatcccacgcaccgcctcagacactgacagtagttactgtatccctacagcagggatgtcgccttcacgtagtaataccatttccactgtggatttaaacaaattgcgaaaagatgctagttctcaagactgctatgatattccacgagcatttccaagtgatagatctagttcacttgaaggcttccataaccactttaaagtcaaaaatgtgttgacagtgggaagtgtttcaagtgaagaactggatgaaaattacgtcccaatgaatcccaattcaccaccacgacaacattccagcagttttacagaaccaattcaggaagcaaattatgtgccaatgactccaggaacatttgatttttcctcatttggaatgcaagttcctcctcctgctcatatgggcttcaggtccagcccaaaaacccctcccagaaggccagttcctgttgcagactgtgaaccaccccccgtggataggaacctcaagccagacagaaaagtcaagccagcgcctttagaaataaaacctttgccagaatgggaagaattacaagccccagttagatctcccatcactaggagttttgctcgagactcttccaggtttcccatgtccccccgaccagattcagtgcatagcacaacttcaagcagtgactcacacgacagtgaagagaattatgttcccatgaacccaaacctgtccagtgaagacccaaatctctttggcagtaacagtcttgatggaggaagcagccctatgatcaagcccaaaggagacaaacaggtggaatacttagatctcgacttagattctgggaaatccacaccaccacgtaagcaaaagagcagtggctcaggcagcagtgtagcagatgagagagtggattatgttgttgttgaccaacagaagaccttggctctaaagagtacccgggaagcctggacagatgggagacagtccacagaatcagaaacgccagcgaagagtgtgaaatgaaaatattgccttgccatttctgaacaaaagaaaactgaattgtaaagataaatcccttttgaagaatgacttgacacttccactctaggtagatcctcaaatgagtagagttgaagtcaaaggacctttctgacataatcaagcaatttagacttaagtggtgctttgtggtatctgaacaattcataacatgtaaataatgtgggaaaatagtattgtttagctcccagagaaacatttgttccacagttaacacactcg

SEQ ID NO: 123465 - DNA, 2477 bp, Artificial Sequence
  derived and/or modified sequence
attactttcctagactctagtcatgaacaggatgttggaagtcagaggtacagagaagctgcctttttaggccgctcacatgaaaggcatggaagaggagatggttcgtgttacgcagtggccgtttaactggagatccagatgttttggaatattacaaaaatgatcatgccaagaagcctattcgtattattgatttaaatttatgtcaacaagtagatgctggattgacatttaacaaaaaagagtttgaaaacagctacatttttgatatcaacactattgaccggattttctacttggtagcagacagcgaggaggagatgaataagtgggttcgttgtatttgtgacatctgtgggtttaatccaacagaagaagatcctgtgaagccacctggcagctctttacaagcaccagctgatttacctttagctataaatacagcaccaccatccacccaggcagattcatcctctgctactctacctcctccatatcagctaatcaatgttccaccacacctggaaactcttggcattcaggaggatcctcaagactacctgttgctcatcaactgtcaaagcaagaagcccgaacccaccagaacgcatgctgattctgcaaaatccacctcttctgaaacagactgcaatgataacgtcccttctcataaaaatcctgcttcctcccagagcaaacatggaatgaatggcttttttcagcagcaaatgatatacgactctccaccttcacgtgccccatctgcttcagttgactccagcctttataacctgcccaggagttattcccatgatgttttaccaaaggtgtctccatcaagtactgaagcagatggagaactctatgtttttaataccccatctgggacatcgagtgtagagactcaaatgaggcatgtatctattagttatgacattcctccaacacctggtaatacttatcagattccacgaacatttccagaaggaaccttgggacagacatcaaagctagacactattccagatattcctccacctcggccaccgaaaccacatccagctcatgaccgatctcctgtggaaacgtgtagtatcccacgcaccgcctcagacactgacagtagttactgtatccctacagcagggatgtcgccttcacgtagtaataccatttccactgtggatttaaacaaattgcgaaaagatgctagttctcaagactgctatgatattccacgagcatttccaagtgatagatctagttcacttgaaggcttccataaccactttaaagtcaaaaatgtgttgacagtgggaagtgtttcaagtgaagaactggatgaaaattacgtcccaatgaatcccaattcaccaccacgacaacattccagcagttttacagaaccaattcaggaagcaaattatgtgccaatgactccaggaacatttgatttttcctcatttggaatgcaagttcctcctcctgctcatatgggcttcaggtccagcccaaaaacccctcccagaaggccagttcctgttgcagactgtgaaccaccccccgtggataggaacctcaagccagacagaaaagtcaagccagcgcctttagaaataaaacctttgccagaatgggaagaattacaagccccagttagatctcccatcactaggagttttgctcgagactcttccaggtttcccatgtccccccgaccagattcagtgcatagcacaacttcaagcagtgactcacacgacagtgaagagaattatgttcccatgaacccaaacctgtccagtgaagacccaaatctctttggcagtaacagtcttgatggaggaagcagccctatgatcaagcccaaaggagacaaacaggtggaatacttagatctcgacttagattctgggaaatccacaccaccacgtaagcaaaagagcagtggctcaggcagcagtgtagcagatgagagagtggattatgttgttgttgaccaacagaagaccttggctctaaagagtacccgggaagcctggacagatgggagacagtccacagaatcagaaacgccagcgaagagtgtgaaatgaaaatattgccttgccatttctgaacaaaagaaaactgaattgtaaagataaatcccttttgaagaatgacttgacacttccactctaggtagatcctcaaatgagtagagttgaagtcaaaggacctttctgacataatcaagcaatttagacttaagtggtgctttgtggtatctgaacaattcataacatgtaaataatgtgggaaaatagtattgtttagctcccagagaaacatttgttccacagttaacacactcgtagtattactgtatttatgcactttttcatctaaaacattgttctgggttttcccaatgtaccttaccataattcctttgggagttcttgttttttgtcacactactttatataaca

SEQ ID NO: 123466 - DNA, 2085 bp, Artificial Sequence
  derived and/or modified sequence
atgtctggaggagaggtggtgtgcagcggctggctgaggaagagccccccagagaagaagctgaagagatatgcctggaagaggcgctggtttgtgctgcggagcggccgcctgactggagaccctgatgtgctggagtactacaagaatgaccacgccaagaagcccatccgcatcatcgacctgaacctgtgccagcaggtggatgctggcctgaccttcaacaagaaggagtttgagaacagctacatctttgacatcaacaccatcgaccgcatcttctacctggtggccgacagcgaggaggagatgaacaagtgggtgcgctgcatctgtgacatctgtggcttcaaccccacagaggaggaccctgtgaagcccccaggcagcagcctgcaggccccagctgacctgcccctggccatcaacacagccccacccagcacccaggccgacagcagcagcgccaccctgcccccaccctaccagctgatcaacgtgcccccccacctggagaccctgggcatccaggaggacccccaggactacctgctgctgatcaactgccagagcaagaagccagagcccaccaggacccatgctgacagcgccaagagcaccagcagcgagacagactgcaatgacaacgtgcccagccacaagaacccagccagcagccagagcaagcacggcatgaatggcttcttccagcagcagatgatctatgacagcccccccagccgggcccccagcgcctctgtggacagcagcctgtacaacctgcccaggagctacagccatgatgtgctgcccaaggtgagccccagcagcacagaagcagatggagagctgtatgtgttcaacaccccatctggcaccagctctgtggagacccagatgagacatgtgtccatctcctatgacatcccccccaccccaggcaacacctaccagatccccaggaccttccctgagggcaccctgggccagaccagcaagctggacaccatcccagacatccccccacccaggcctcccaagccccacccagcccatgacaggagccctgtggagacctgcagcatccccaggacagccagtgacacagacagcagctactgcatccccacagctggcatgagccccagccgcagcaacaccatcagcacagtggacctgaacaagctgaggaaggatgccagcagccaggactgctatgacatcccccgggccttccccagcgacaggagcagcagcctggagggcttccacaaccacttcaaggtgaagaatgtgctgactgtgggctctgtgagcagcgaggagctggatgaaaattatgtgcccatgaaccccaacagccccccccggcagcacagcagcagcttcacagagcccatccaggaggccaactacgtgcccatgaccccaggcacctttgacttcagcagctttggcatgcaggtgcccccaccagcccacatgggcttccgcagcagccccaagaccccaccccggcggcctgtgcctgtggccgactgtgagcccccacctgtggacaggaacctgaagccagacaggaaggtgaagccagcccccctggagatcaagcccctgcctgagtgggaggagctgcaggcccctgtgcgcagccccatcaccaggagctttgcccgggacagcagccgcttccccatgagccccaggccagacagcgtgcacagcaccaccagcagcagtgacagccatgattctgaagaaaattatgtgcccatgaaccccaacctgagcagcgaggaccccaacctgtttggcagcaacagcctggatggcggcagcagccccatgatcaagcccaagggggacaagcaggtggagtacctggacctggacctggacagcggcaagagcaccccacccaggaagcagaagagcagcggcagcggcagctctgtggctgatgagcgggtggactatgtggtggtggaccagcagaagaccctggccctgaagagcacccgggaggcctggacagatggccggcagagcacagagagcgagaccccagccaagtctgtgaagtag

SEQ ID NO: 123467 - DNA, 1776 bp, Artificial Sequence
  derived and/or modified sequence
atgaacaagtgggtgcgctgcatctgtgacatctgtggcttcaaccccacagaagaagatcctgtgaagcccccaggcagcagcctgcaggccccagctgacctgcccctggccatcaacacagccccacccagcacccaggccgacagcagcagcgccaccctgcccccaccctaccagctgatcaacgtgcccccccacctggagaccctgggcatccaggaggacccccaggactacctgctgctgatcaactgccagagcaagaagccagagcccaccaggacccacgccgacagcgccaagagcaccagcagcgagacagactgcaatgacaacgtgcccagccacaagaacccagccagcagccagagcaagcacggcatgaatggcttcttccagcagcagatgatctatgacagcccccccagccgggcccccagcgcctctgtggacagcagcctgtacaacctgcccaggagctacagccatgatgtgctgcccaaggtgagccccagcagcacagaagcagatggagagctgtatgtgttcaacacccccagcggcaccagctctgtggagacccagatgagacatgtgtccatctcctatgacatcccccccaccccaggcaacacctaccagatccccaggaccttccctgagggcaccctgggccagaccagcaagctggacaccatcccagacatccccccaccccggccccccaagccccacccagcccatgacaggagccctgtggagacctgcagcatccccaggacagccagtgacacagacagcagctactgcatccccacagctggcatgagccccagccgcagcaacaccatcagcacagtggacctgaacaagctgaggaaggatgccagcagccaggactgctatgacatcccccgggccttccccagcgacaggagcagcagcctggagggcttccacaaccacttcaaggtgaagaatgtgctgactgtgggctctgtgtcctctgaggagctggatgagaactacgtgcccatgaaccccaacagccccccccggcagcacagcagcagcttcacagagcccatccaggaggccaactacgtgcccatgaccccaggcacctttgacttcagcagctttggcatgcaggtgcccccaccagcccacatgggcttccgcagcagccccaagaccccaccaagaagacctgtgcctgtggccgactgtgagcccccacctgtggacaggaacctgaagccagacaggaaggtgaagccagcccccctggagatcaagcccctgcctgagtgggaggagctgcaggcccctgtgcgcagccccatcaccaggagctttgcccgggacagcagccgcttccccatgagccccaggccagattctgtgcacagcaccaccagcagcagtgacagccatgacagcgaggagaactacgtgcccatgaaccccaacctgagcagcgaggaccccaacctgtttggcagcaacagcctggatggcggcagcagccccatgatcaagcccaagggggacaagcaggtggagtacctggacctggacctggacagcggcaagagcaccccacccaggaagcagaagagcagcggcagcggcagctctgtggctgatgagcgggtggactatgtggtggtggaccagcagaagaccctggccctgaagagcacccgggaggcctggacagatggccggcagagcacagaaagtgagaccccagccaagtctgtgaagtag

SEQ ID NO: 123468 - DNA, 2085 bp, Artificial Sequence
  derived and/or modified sequence
atgagcggcggcgaggtggtgtgcagcggctggctgcggaagagcccccccgagaagaagctgaaaagatatgcgtggaagcggcgatggttcgtgttgaggtccgggcgattgacaggcgatcctgatgtactcgagtactataagaacgatcatgccaaaaagccaattaggattatcgacttgaacctgtgtcaacaggtggacgcgggcctgacctttaataaaaaggagtttgaaaacagctacatctttgacattaacactatcgatagaatcttctacttggtcgccgactctgaagaggagatgaataagtgggtgcgatgcatttgcgatatttgcgggttcaatccgaccgaggaagaccctgtcaaaccacccggaagttctctgcaggccccggccgacctccctctggctattaatacggcaccaccctctactcaggcagattcgagcagtgcgactctgcctcccccctaccagctgatcaatgttccaccacatttggagaccctgggaattcaggaggacccccaggattacctgctcttaatcaactgccaaagtaagaaacctgagcctacccgcacgcacgccgatagtgccaaatccaccagcagcgagacagactgtaatgacaatgtgcctagtcataaaaaccctgcctcaagccaaagcaagcatggcatgaatggtttctttcagcagcaaatgatctacgacagtccgcctagccgcgcgccatccgctagtgtggatagctctctgtacaatctgcctaggagttattcgcacgacgtactgccgaaggtatctccatccagtactgaggctgacggcgagctctacgtgttcaatacaccctcaggtacgagcagcgtggagacacagatgagacatgtgtccatttcttatgacataccccctaccccaggtaatacataccagatcccgcgcacgttccctgaagggactctgggacagacatccaaacttgatactataccggacatcccgccgccacgcccgccaaagccgcaccccgcacacgaccggtcgcccgtggagacctgctcgatccctcggacagcttccgacactgactctagctactgtattccaacggcaggcatgtctccatcaaggagtaacacaattagcaccgtggaccttaacaaactgaggaaggacgccagtagtcaggattgctacgacatccctcgggcttttcctagtgacaggtcctctagcctcgaagggtttcataaccactttaaggtgaaaaatgtactgaccgtggggtcagtgagcagtgaagagctcgacgaaaattatgtaccaatgaaccccaactcccctccacgacagcattccagttcctttaccgaacccattcaggaggctaactatgttcccatgactccgggcaccttcgatttttctagtttcggcatgcaagtgcctccccccgctcatatggggttcaggagcagtcccaaaactcctcctcggcgaccagtgcctgtcgctgattgtgagcctccccctgtcgatcggaatttaaaaccagacaggaaagttaagccagcaccgctagaaataaagcctctccctgagtgggaggaactgcaagcccctgtgagatccccgatcacccgctcatttgcgagagatagcagcaggtttccaatgagcccgcgcccagactcggtgcactccacgaccagcagtagtgacagccacgacagcgaggaaaactacgtcccaatgaatccaaacctgtcgtcagaggatccaaatctgttcggatctaattccttggatggcggaagcagtcccatgataaagccaaaaggggacaaacaagtggagtacctcgaccttgatctggattctggcaagagtactcctccccgcaagcagaagagcagcggatcagggtccagcgttgccgacgagcgcgtggactacgtcgttgtggaccaacagaaaacgctcgctcttaaatccacacgggaagcctggaccgatggtcgccagtctactgaaagcgagacgcctgctaaatcagtcaaatag

SEQ ID NO: 123469 - DNA, 1776 bp, Artificial Sequence
  derived and/or modified sequence
atgaacaagtgggtgcggtgcatctgcgacatctgcggcttcaaccctaccgaagaagatcccgtgaagccgcccggcagcagcctccaggcgccagccgacctgcccctggctataaatactgcaccccccagtactcaggccgactcctcgagcgccacactccctcctccctatcagctcatcaatgtacctccacacttggaaacgcttgggatccaggaagatcctcaggactacctgctgcttatcaactgtcaatccaagaaacctgagcctacgcgcacccacgcagacagtgcaaaatctacatccagcgagactgattgcaacgacaatgtgccaagccataagaaccctgcaagtagtcaaagcaagcacggtatgaacggattcttccaacagcagatgatatatgactcaccaccaagccgtgccccgtctgccagcgtcgactctagcttatacaatctgcctcgaagttacagccatgacgtgctccctaaggtgtcacctagctccaccgaagctgacggagaactctacgtcttcaacactccgtccggtacatcttctgtggaaacccagatgcggcacgtcagcatatcctacgatatcccgcccaccccgggcaatacctaccaaatccctcggacattccccgagggaactttggggcagaccagcaagcttgataccatcccagacattccccctcctagacctccaaagccacatcctgcccatgatcgatctcctgtcgaaacgtgcagtatccccaggactgcatcggacacagactcgtcatactgtatacccactgctgggatgagccctagtaggagcaacacaatcagcactgtggatctgaacaaactgcggaaagacgcttcttctcaggattgttatgatattccccgggcattcccttccgacaggtcctcttccctcgaagggttccataaccactttaaggtgaagaatgttcttacagtcggatccgtgagctctgaggagctggacgagaactacgtgcctatgaaccccaatagccctccacgccagcattcatcaagcttcactgaaccaatacaggaggctaattatgtccctatgactcctgggacctttgacttcagtagcttcgggatgcaggtaccaccgcctgcccacatgggtttcagaagtagccctaaaacgccacccagaaggcctgtgcctgtggccgattgcgagcctccaccggttgaccgaaatctgaagcctgatagaaaagtgaaacccgcccccctcgaaattaaaccacttccggagtgggaggaactccaggcccccgtgcgaagtccaatcacacggtctttcgcccgtgattccagcaggttcccaatgtctccacgacccgatagtgtacattcgaccaccagttccagtgacagtcacgattctgaagagaattatgttcctatgaaccccaatttgagctccgaggatccaaacctgttcggcagcaacagcttggatggggggtccagccctatgatcaaaccgaagggcgataagcaagtggagtatctggacctagacctggacagcggtaagtccactcccccacggaaacagaagtcgtcagggtctggatcatccgtcgccgacgagcgtgtagattacgtagttgtggatcagcagaagaccttggcgttaaaatctaccagggaagcatggaccgacggccgtcaatcaacggagagtgaaacaccggcgaaaagtgtcaagtag

SEQ ID NO: 123470 - DNA, 2085 bp, Artificial Sequence
  derived and/or modified sequence
atgagtggtggcgaggtagtatgctctggctggttacgtaagagcccacctgaaaaaaaactcaagcgttatgcttggaaacgtcgctggtttgtcctcaggagcggcagactaaccggggatcctgatgtgctggaatactataaaaatgatcacgcaaaaaaacccatccgcattattgacctcaacctgtgccagcaggtcgatgccggacttaccttcaataaaaaagagtttgaaaattcttacatcttcgacatcaataccattgaccggattttctatcttgtggccgactctgaagaagagatgaataagtgggtaaggtgtatttgtgacatctgcggctttaatccaactgaggaggacccggttaaaccaccaggtagttcattacaagctcccgctgacctgcccctggccattaacaccgcaccaccttccactcaggccgactcttcaagtgccaccttgccaccaccctaccaacttatcaacgtaccaccccacctcgagactctgggtattcaggaggaccctcaggattatcttctgctcattaactgccagtccaaaaagcctgagcccacccgaactcacgccgatagcgcaaagtccacctccagcgaaactgattgcaacgacaacgtgccatctcacaagaaccccgcaagttcacagtctaagcatggtatgaatggattttttcagcagcagatgatctacgactctccacctagtagagccccatccgctagcgtcgattcatccctgtacaacctgccgagatcctattctcacgatgttttgcctaaggtgagcccaagctcaacggaggctgatggcgaattgtacgtcttcaatacacccagcggtacttcctccgtagagacacagatgagacatgtgagcatttcttacgacattccccctacccccggaaacacgtatcagattccacgtaccttccccgaaggcacccttggacagactagcaagttagataccatcccagacattccccctccacggcctcccaagccacaccctgcccatgaccgatctccggtggagacgtgtagcataccgagaaccgcgtccgacaccgactccagctactgcatcccgacagcgggtatgagcccctcaaggagcaataccatcagtaccgtggaccttaacaagctgcggaaggatgccagctcccaggattgttacgacatccccagagctttccccagtgataggagctcctctctggaaggctttcacaaccattttaaagtaaagaatgtgctcacagtcggttcagtctcctcggaagagctcgatgagaattatgttcctatgaaccccaattctcctccccgtcagcactcatcctcatttactgaaccaatccaagaggctaactacgtccccatgacgcccggaactttcgattttagtagttttggaatgcaggtgccccctcccgctcacatgggtttccggtcgtctcccaaaactccccctcgaaggcccgtcccagtggcagactgtgaaccaccaccggttgaccgcaacctgaagcctgatcgaaaggtgaagccagctccactggagatcaagcccttacctgagtgggaggagctgcaggctcctgttaggtcacctatcactcggagttttgcaagggatagcagccgttttccgatgtccccccgtcctgactctgtgcacagcaccaccagctctagtgactcgcacgactctgaagaaaactatgtcccaatgaaccctaacctgagctccgaggacccaaatctcttcggatccaattccctggacggaggctcgtcccccatgataaaacctaaaggcgacaaacaggtggagtatctggatctcgatctcgattccggcaaatcgactccccctagaaagcaaaagtctagtggatccggctcgagcgttgctgacgagagggtcgattacgtggtcgtggatcagcagaagacactcgcactgaagagtactcgtgaagcctggacggatggtagacagagcaccgagtccgagactccggctaaatccgttaaatag

SEQ ID NO: 123471 - DNA, 1776 bp, Artificial Sequence
  derived and/or modified sequence
atgaataagtgggttaggtgtatatgtgatatctgcggctttaatccgacagaggaggatcctgtgaaacccccaggctcttccctccaagctcccgcagatttacctttagccattaacaccgccccaccatccacccaggctgatagctcctccgccacactgcctccgccataccagctgatcaacgtccctccacatctggagacactgggaattcaggaagacccacaggactacctacttctgataaactgtcagtctaaaaagccagagcccactcgcacccacgccgactcggctaaatcaacaagctctgaaaccgattgcaacgacaacgtaccaagtcacaaaaatcctgcttcatcccaaagcaaacacggtatgaacgggttttttcaacagcaaatgatttacgatagtccccctagtcgtgcaccatccgccagcgtggattccagcttatataatctgcccaggtcctactcccacgatgtgttaccaaaggtgagccccagttctaccgaggcagatggagagctgtacgtgttcaatacaccttccggtactagttccgtggagacacagatgcgacacgtgtccatcagctacgacatccctcctaccccaggtaacacttaccagattccaaggacgttcccagaaggcacactgggacagactagcaaactggacaccatccctgacattccaccgccaaggcctccaaagccccaccctgctcatgataggtcccctgtggaaacctgcagtattcctagaacggcctccgatacagacagttcttattgtatcccgaccgctggtatgtccccatctcgcagcaatactattagcactgtggacctgaataaactcagaaaagacgcatccagccaagactgttatgacattcccagagcttttccttctgatcgtagcagctccctggaaggctttcacaaccactttaaagtgaaaaatgtgctgactgtggggagcgtgagttctgaagaactcgacgagaactatgtgccaatgaacccaaactctccacctagacaacactcctccagcttcaccgagccaattcaggaagctaattacgtccccatgacccccggaacctttgacttcagcagctttggcatgcaggtgccgcctccagctcatatggggttccgaagcagccccaagacacccccaagacgcccagtgccggtggcagattgtgagcccccacccgtggaccgaaacctgaagcccgataggaaggtcaaaccagccccattagagatcaaaccgctgcccgaatgggaagagttgcaggccccagtccggtcacccatcacgcggtcttttgcaagagactcctcccgcttcccgatgagtccacgaccagattcagtgcatagtaccacctcttcctccgatagccacgacagcgaggagaattatgtcccaatgaatcctaacttgtcctccgaagacccgaacctgttcggtagcaatagcctggatgggggaagcagccccatgataaaaccaaagggcgataagcaggttgagtacctggatctcgatctcgatagcggtaaatcaaccccccctaggaagcagaagagctcggggtccggctcctccgtcgctgatgaacgagtcgactacgtggtggtggatcagcagaaaaccctcgcccttaaatctactagagaagcctggactgatggccgacagtctaccgagtctgaaacacccgctaagagcgtgaaatag

SEQ ID NO: 123472 - DNA, 2085 bp, Artificial Sequence
  derived and/or modified sequence
atgagcggcggcgaggtggtgtgcagcggctggctgagaaagagcccccccgagaagaagctgaagagatacgcctggaagagaagatggttcgtgctgagaagcggcagactgaccggcgaccccgacgtgctggagtactacaagaacgaccacgccaagaagcccatcagaatcatcgacctgaacctgtgccagcaggtggacgccggcctgaccttcaacaagaaggagttcgagaacagctacatcttcgacatcaacaccatcgacagaatcttctacctggtggccgacagcgaggaggagatgaacaagtgggtgagatgcatctgcgacatctgcggcttcaaccccaccgaggaggaccccgtgaagccccccggcagcagcctgcaggcccccgccgacctgcccctggccatcaacaccgccccccccagcacccaggccgacagcagcagcgccaccctgccccccccctaccagctgatcaacgtgcccccccacctggagaccctgggcatccaggaggacccccaggactacctgctgctgatcaactgccagagcaagaagcccgagcccaccagaacccacgccgacagcgccaagagcaccagcagcgagaccgactgcaacgacaacgtgcccagccacaagaaccccgccagcagccagagcaagcacggcatgaacggcttcttccagcagcagatgatctacgacagcccccccagcagagcccccagcgccagcgtggacagcagcctgtacaacctgcccagaagctacagccacgacgtgctgcccaaggtgagccccagcagcaccgaggccgacggcgagctgtacgtgttcaacacccccagcggcaccagcagcgtggagacccagatgagacacgtgagcatcagctacgacatcccccccacccccggcaacacctaccagatccccagaaccttccccgagggcaccctgggccagaccagcaagctggacaccatccccgacatccccccccccagaccccccaagccccaccccgcccacgacagaagccccgtggagacctgcagcatccccagaaccgccagcgacaccgacagcagctactgcatccccaccgccggcatgagccccagcagaagcaacaccatcagcaccgtggacctgaacaagctgagaaaggacgccagcagccaggactgctacgacatccccagagccttccccagcgacagaagcagcagcctggagggcttccacaaccacttcaaggtgaagaacgtgctgaccgtgggcagcgtgagcagcgaggagctggacgagaactacgtgcccatgaaccccaacagcccccccagacagcacagcagcagcttcaccgagcccatccaggaggccaactacgtgcccatgacccccggcaccttcgacttcagcagcttcggcatgcaggtgcccccccccgcccacatgggcttcagaagcagccccaagaccccccccagaagacccgtgcccgtggccgactgcgagcccccccccgtggacagaaacctgaagcccgacagaaaggtgaagcccgcccccctggagatcaagcccctgcccgagtgggaggagctgcaggcccccgtgagaagccccatcaccagaagcttcgccagagacagcagcagattccccatgagccccagacccgacagcgtgcacagcaccaccagcagcagcgacagccacgacagcgaggagaactacgtgcccatgaaccccaacctgagcagcgaggaccccaacctgttcggcagcaacagcctggacggcggcagcagccccatgatcaagcccaagggcgacaagcaggtggagtacctggacctggacctggacagcggcaagagcaccccccccagaaagcagaagagcagcggcagcggcagcagcgtggccgacgagagagtggactacgtggtggtggaccagcagaagaccctggccctgaagagcaccagagaggcctggaccgacggcagacagagcaccgagagcgagacccccgccaagagcgtgaagtag

SEQ ID NO: 123473 - DNA, 1776 bp, Artificial Sequence
  derived and/or modified sequence
atgaacaagtgggtgagatgcatctgcgacatctgcggcttcaaccccaccgaggaggaccccgtgaagccccccggcagcagcctgcaggcccccgccgacctgcccctggccatcaacaccgccccccccagcacccaggccgacagcagcagcgccaccctgccccccccctaccagctgatcaacgtgcccccccacctggagaccctgggcatccaggaggacccccaggactacctgctgctgatcaactgccagagcaagaagcccgagcccaccagaacccacgccgacagcgccaagagcaccagcagcgagaccgactgcaacgacaacgtgcccagccacaagaaccccgccagcagccagagcaagcacggcatgaacggcttcttccagcagcagatgatctacgacagcccccccagcagagcccccagcgccagcgtggacagcagcctgtacaacctgcccagaagctacagccacgacgtgctgcccaaggtgagccccagcagcaccgaggccgacggcgagctgtacgtgttcaacacccccagcggcaccagcagcgtggagacccagatgagacacgtgagcatcagctacgacatcccccccacccccggcaacacctaccagatccccagaaccttccccgagggcaccctgggccagaccagcaagctggacaccatccccgacatccccccccccagaccccccaagccccaccccgcccacgacagaagccccgtggagacctgcagcatccccagaaccgccagcgacaccgacagcagctactgcatccccaccgccggcatgagccccagcagaagcaacaccatcagcaccgtggacctgaacaagctgagaaaggacgccagcagccaggactgctacgacatccccagagccttccccagcgacagaagcagcagcctggagggcttccacaaccacttcaaggtgaagaacgtgctgaccgtgggcagcgtgagcagcgaggagctggacgagaactacgtgcccatgaaccccaacagcccccccagacagcacagcagcagcttcaccgagcccatccaggaggccaactacgtgcccatgacccccggcaccttcgacttcagcagcttcggcatgcaggtgcccccccccgcccacatgggcttcagaagcagccccaagaccccccccagaagacccgtgcccgtggccgactgcgagcccccccccgtggacagaaacctgaagcccgacagaaaggtgaagcccgcccccctggagatcaagcccctgcccgagtgggaggagctgcaggcccccgtgagaagccccatcaccagaagcttcgccagagacagcagcagattccccatgagccccagacccgacagcgtgcacagcaccaccagcagcagcgacagccacgacagcgaggagaactacgtgcccatgaaccccaacctgagcagcgaggaccccaacctgttcggcagcaacagcctggacggcggcagcagccccatgatcaagcccaagggcgacaagcaggtggagtacctggacctggacctggacagcggcaagagcaccccccccagaaagcagaagagcagcggcagcggcagcagcgtggccgacgagagagtggactacgtggtggtggaccagcagaagaccctggccctgaagagcaccagagaggcctggaccgacggcagacagagcaccgagagcgagacccccgccaagagcgtgaagtag

SEQ ID NO: 123474 - protein, 454 aa, Artificial Sequence
  derived and/or modified sequence
MTKREAEELIEIEIDGTEKAECTEESIVEQTYAPAECVSQAIDINEPIGNLKKLLEPRLQCSLDAHEICLQDIQLDPERSLFDQGVKTDGTVQLSVQVISYQGIEPKLNILEIVKPADTVEVVIDPDAHHAESEAHLVEEAQVITLDGTKHITTISDETSEQVTRWAAALEGYRKEQERLGIPYDPIQWSTDQVLHWVVWVMKEFSMTDIDLTTLNISGRELCSLNQEDFFQRVPRGEILWSHLELLRKYVLASQEQQMNEIVTIDQPVQIIPASVQSATPTTIKVINSSAKAAKVQRAPRISGEDRSSPGNRTGNNGQIQLWQFLLELLTDKDARDCISWVGDEGEFKLNQPELVAQKWGQRKNKPTMNYEKLSRALRYYYDGDMICKVQGKRFVYKFVCDLKTLIGYSAAELNRLVTECEQKKLAKMQLHGIAQPVTAVALATASLQTEKDN

SEQ ID NO: 123475 - DNA, 5182 bp, Artificial Sequence
  derived and/or modified sequence
cgaccggacgggtctaggtgagacagaagccaaacaggaggaggaagtggagggtaagtgcttccgggtcccctggcacagcctccgccatcttttcttcgcctaatttgacccgttctttttcccctccttgaaaccttgctctgtacgcatgcgctctttgagtggcctttcccctagttcaagctcccctccgagtcagcgtcctgttcgttagggttatcgaagtgtataaaggtgcagggaaagtgagactgtgtaaaacaaagcggattggggcgttgtgcttccttgtacctcgtgagcctccgttgccttgggcggtcgttttgcgcaccctgccgggagttgtagtcctggacccgaaggtgcctgggaggcgggaggggggttggggcttctcagcgccgattccgcgggaagggccctgggacctcacacttctagtcgcgggagctgcaggtcttacccggagagacgctgcacgtggagccctcgccgctgccgttctcagccggctctggagtgcgggcgggggcgacagggccgattccggagtgggactgatcctttgaaatactccagccatgactaaaagagaagcagaggagctgatagaaattgagattgatggaacagagaaagcagagtgcacagaagaaagcattgtagaacaaacctacgcgccagctgaatgtgtaagccaggccatagacatcaatgaaccaataggcaatttaaagaaactgctagaaccaagactacagtgttctttggatgctcatgaaatttgtctgcaagatatccagctggatccagaacgaagtttatttgaccaaggagtaaaaacagatggaactgtacagcttagtgtacaggtaatttcttaccaaggaattgaaccaaagttaaacatccttgaaattgttaaacctgcggacactgttgaggttgttattgatccagatgcccaccatgctgaatcagaagcacatcttgttgaagaagctcaagtgataactcttgatggcacaaaacacatcacaaccatttcagatgaaacttcagaacaagtgacaagatgggctgctgcactggaaggctataggaaagaacaagaacgccttgggataccctatgatcccatacagtggtccacagaccaagtcctgcattgggtggtttgggtaatgaaggaattcagcatgaccgatatagacctcaccacactcaacatttcggggagagaattatgtagtctcaaccaagaagatttttttcagcgggttcctcggggagaaattctctggagtcatctggaacttctccgaaaatatgtattggcaagtcaagaacaacagatgaatgaaatagttacaattgatcaacctgtgcaaattattccagcatcagtgcaatctgctacacctactaccattaaagttataaatagtagtgcgaaagcagccaaagtacaaagagcgccgaggatttcaggagaagatagaagctcacctgggaacagaacaggaaacaatggccaaatccaactatggcagtttttgctagaacttcttactgataaggacgctcgagactgcatttcttgggttggtgatgaaggtgaatttaagctaaatcagcctgaactggttgcacagaaatggggacagcgtaaaaataagcctacgatgaactatgagaaactcagtcgtgcattaagatattattacgatggggacatgatttgtaaagttcaaggcaagagatttgtgtacaagtttgtctgtgacttgaagactcttattggatacagtgcagcggagttgaaccgtttggtcacagaatgtgaacagaagaaacttgcaaagatgcagctccatggaattgcccagccagtcacagcagtagctctggctactgcttctctgcaaacggaaaaggataattgagccccaggacattctgagactccaaagtctttcttaaaatgtttagagcaagtatagctcttacctttattactgaatttgaatcttcttttatttctaggctgtacagtctgatgcatgatttttttataaatatttcatactcttgtgaatttggatctttttactttgagcatatattttagaatatgtgtatgttaaaggatctccacaatgtctgcagtgtgaaggcaggttcattgtggaatagtttaacagtcaggaaggctaaactggtcagtattaatgtgtagccctaccaaaaatagccagtagtatctgaaaatgaaaaataaatgaagtatctctaggaaacagtctggcttaactatttttgaaaatataactgtttcccctctctgctgctttagatgttgctttacatagaaccagaaaatggaatttctcagctaaagcatgtgtgcctgtttcatctaatcaagcagagctaaaatgttcataccgaataaatttatattaataaattactaaactaagagtatcaggttatttatatatttgcaagcaaaggacagtaagaagttgactggcaaaagagcagtgctgaaggaggagatccaggtttaaatctggcttattaactcaagccaattttaaggattttctgtatagattactcatgtcagaccaagaatttaaattattttgagagaggcatttaattctaataaaccagctgttataaaaattataaaatgatctctgtttttcctgtcagagatttaaaaaactgaaaaggtatacctcaacccaaaaataaaggtttgttttggtttgttatggcttccttttttaaaaaattaccctgtagtgccagtttattatgcaaagcagcttatattcctttgtttctgataaaatgaagactttaaatcagtcagtagtactttacctttcaaggcattagtaaattacttgcaaatagttttaaaaggaaaatacgacctttgttataggcagtcttctctttaagacaatacttttccacttgttttccttttccatattatatatgtgtattcatatagctgtatacatattcagttgatcattttataaacatatgaaggcataaagatatacagaagaaaaattattaaacaactcattttaagattcaaattaactaattcctgcatatatgacattccttacataagcgaacactaaacaaaaatggctagaaatgtctttttctttcttttctctctttgttgtttaaggtattaagcacgaattattacatgagactggcagatagctattaatcctcttacagatttgagaaagttgattctcaaatatttatgcaccttctccttcattgttttctttaaatctgtcctcttaaaaagcttcttaagagctcagttaatgcttttgacttaactaggagaaaaaggcatgataatacaggcaagatggcattgttagcaattctggtagtggtttggaatgaatcctaagaggcagggatcttaaggacaaggaagagaagagagagagggagggatctttgatctctttctctggtaatcttaatgcataattttactaaaacatgttctcaattcattcatattattaagctcttcctgcagttgatatctgagcagagtaagatttgtatttccatttttacttttttgaaagagaatatatggacagattattagtacaatttgggcactgtggttttaagaatatctgagtaaaataacaatatgaaataataaacagaagctctaacgtcaggtaacaaatagacagcaagaaaggttttgcaccatcctcttacggcctagagagttgacaagttgcttgtagttttaaaaaaataataaagtatacccttctggtatatcatcaagagcttaagaatcttggctttcatatttaaaatgcttttggggagacatatattaaaattttagccaagatgatagacatgtctcaattatatatgtgtgtgtatgtttttaaagctaaaaacattacttttagatccctagaatgaaaatttttttctcatctatgcaattcccatatggtttttttttaaatcatattttattcattttctccctttagcaattttcattttatttctcataatttgaacagagacagttctcatacatgatcagatgctttttttttcttcttaccatcatttatgcatgacataggtaatgtgactaatttctccagttgattcaagaaactcattactttgcctcaaattatatgtaaaatatttgttttacttaggttacagttatcagaaaggtagtttttttcttctattaaaatataacattgtgaaagaaaataaaatttatgctattctttgctttgtttttataaatgaatttttcatagaatttacagtatattcaaaggaagaaagataaaattattggtcatcatttgtaccttagaagtacaagaatttaagtaaaagaaatgttcatttttgttttaaaatttgttttccatgtgaagtttttattgagccaactttcatacatatcttgctagcctaaagtctaaatatttgtgttggcatcagaaaaacaaatgaggcagaattgctatgtgtggttgatcttcagataaattgactgatcacagttatttttgtatcagtctatgttattaggaaaaattgtttagttgttttctcccctgattaatggtgatattcaagtatgatacaaaaagaattgtaccaccaaatatttttgtgaggtctgctgttttccatattcattttatgctactgcctttaagaaagaactagtgtatccttgaaatagcacaaaaatgttttaaaattcataattgcaaaacaaatctgtgactaacttaatgtcttcagatctaaagggtgtaaaaatattgatacttcaatatttcacttgctgccaggaaaaacaaaattctcaatcttttgtaaatgggaggaggacttttgcatacatttttactctttaaataacgacaacgacacttatactgtcataataacaattatgtatttctttgtggttttaattttttttgtaattttacataaaacagttattttctatttttacgcagataaatatttgtgcataaaatgtaaaaatagtaaaatgagaaaaataaaactattatacagtaaa

SEQ ID NO: 123476 - DNA, 5120 bp, Artificial Sequence
  derived and/or modified sequence
gccccagccaggctgcgggcccgagacccccgggcctccctgccccccgcgccgccccgatttgccctcagagagggtatcgatcttatttctgggtctacggcaaactccaaggtctacaaacgtagaggtcagctgtgaccccgggccaggccgtgaaggtccccaggacacagagctgctctctcctcctagtaaaggtgagaggcagcccaggcctcgtgaaaaaacccagaactggagtcccaaaaggccacgctgatctagctaccctcccagtcaccttgcactcagtcccgagctgccaaagcctccgccgccaccacctccgctctacttccggccctggctccgcccccacacgcctacccgccatcgcaatgcattatgggccgccgtttcagtcggtcgacgctcaccggacaggaagcgtctcggagacagtctgcgaccggacgggtctaggtgagacagaagccaaacaggaggaggaagtggagggactgatcctttgaaatactccagccatgactaaaagagaagcagaggagctgatagaaattgagattgatggaacagagaaagcagagtgcacagaagaaagcattgtagaacaaacctacgcgccagctgaatgtgtaagccaggccatagacatcaatgaaccaataggcaatttaaagaaactgctagaaccaagactacagtgttctttggatgctcatgaaatttgtctgcaagatatccagctggatccagaacgaagtttatttgaccaaggagtaaaaacagatggaactgtacagcttagtgtacaggtaatttcttaccaaggaattgaaccaaagttaaacatccttgaaattgttaaacctgcggacactgttgaggttgttattgatccagatgcccaccatgctgaatcagaagcacatcttgttgaagaagctcaagtgataactcttgatggcacaaaacacatcacaaccatttcagatgaaacttcagaacaagtgacaagatgggctgctgcactggaaggctataggaaagaacaagaacgccttgggataccctatgatcccatacagtggtccacagaccaagtcctgcattgggtggtttgggtaatgaaggaattcagcatgaccgatatagacctcaccacactcaacatttcggggagagaattatgtagtctcaaccaagaagatttttttcagcgggttcctcggggagaaattctctggagtcatctggaacttctccgaaaatatgtattggcaagtcaagaacaacagatgaatgaaatagttacaattgatcaacctgtgcaaattattccagcatcagtgcaatctgctacacctactaccattaaagttataaatagtagtgcgaaagcagccaaagtacaaagagcgccgaggatttcaggagaagatagaagctcacctgggaacagaacaggaaacaatggccaaatccaactatggcagtttttgctagaacttcttactgataaggacgctcgagactgcatttcttgggttggtgatgaaggtgaatttaagctaaatcagcctgaactggttgcacagaaatggggacagcgtaaaaataagcctacgatgaactatgagaaactcagtcgtgcattaagatattattacgatggggacatgatttgtaaagttcaaggcaagagatttgtgtacaagtttgtctgtgacttgaagactcttattggatacagtgcagcggagttgaaccgtttggtcacagaatgtgaacagaagaaacttgcaaagatgcagctccatggaattgcccagccagtcacagcagtagctctggctactgcttctctgcaaacggaaaaggataattgagccccaggacattctgagactccaaagtctttcttaaaatgtttagagcaagtatagctcttacctttattactgaatttgaatcttcttttatttctaggctgtacagtctgatgcatgatttttttataaatatttcatactcttgtgaatttggatctttttactttgagcatatattttagaatatgtgtatgttaaaggatctccacaatgtctgcagtgtgaaggcaggttcattgtggaatagtttaacagtcaggaaggctaaactggtcagtattaatgtgtagccctaccaaaaatagccagtagtatctgaaaatgaaaaataaatgaagtatctctaggaaacagtctggcttaactatttttgaaaatataactgtttcccctctctgctgctttagatgttgctttacatagaaccagaaaatggaatttctcagctaaagcatgtgtgcctgtttcatctaatcaagcagagctaaaatgttcataccgaataaatttatattaataaattactaaactaagagtatcaggttatttatatatttgcaagcaaaggacagtaagaagttgactggcaaaagagcagtgctgaaggaggagatccaggtttaaatctggcttattaactcaagccaattttaaggattttctgtatagattactcatgtcagaccaagaatttaaattattttgagagaggcatttaattctaataaaccagctgttataaaaattataaaatgatctctgtttttcctgtcagagatttaaaaaactgaaaaggtatacctcaacccaaaaataaaggtttgttttggtttgttatggcttccttttttaaaaaattaccctgtagtgccagtttattatgcaaagcagcttatattcctttgtttctgataaaatgaagactttaaatcagtcagtagtactttacctttcaaggcattagtaaattacttgcaaatagttttaaaaggaaaatacgacctttgttataggcagtcttctctttaagacaatacttttccacttgttttccttttccatattatatatgtgtattcatatagctgtatacatattcagttgatcattttataaacatatgaaggcataaagatatacagaagaaaaattattaaacaactcattttaagattcaaattaactaattcctgcatatatgacattccttacataagcgaacactaaacaaaaatggctagaaatgtctttttctttcttttctctctttgttgtttaaggtattaagcacgaattattacatgagactggcagatagctattaatcctcttacagatttgagaaagttgattctcaaatatttatgcaccttctccttcattgttttctttaaatctgtcctcttaaaaagcttcttaagagctcagttaatgcttttgacttaactaggagaaaaaggcatgataatacaggcaagatggcattgttagcaattctggtagtggtttggaatgaatcctaagaggcagggatcttaaggacaaggaagagaagagagagagggagggatctttgatctctttctctggtaatcttaatgcataattttactaatacatgttctcaattcattcatattattaagctcttcctgcagttgatatctgagcagagtaagatttgtatttccatttttacttttttgaaagagaatatatggacagattattagtacaatttgggcactgtggttttaagaatatctgagtaaaataacaatatgaaataataaacagaagctctaacgtcaggtaacaaatagacagcaagaaaggttttgcaccatcctcttacggcctagagagttgacaagttgcttgtagttttaaaaaaataataaagtatacccttctggtatatcatcaagagcttaagaatcttggctttcatatttaaaatgcttttggggagacatatattaaaattttagccaagatgatagacatgtctcaattatatatgtgtgtgtatgtttttaaagctaaaaacattacttttagatccctagaatgaaaatttttttctcatctatgcaattcccatatggtttttttttaaatcatattttattcattttctccctttagcaattttcattttatttctcataatttgaacagagacagttctcatacatgatcagatgctttttttttcttcttaccatcatttatgcatgacataggtaatgtgactaatttctccagttgattcaagaaactcattactttgcctcaaattatatgtaaaatatttgttttacttaggttacagttatcagaaaggtagtttttttcttctattaaaatataacattgtgaaagaaaataaaatttatgctattctttgctttgtttttataaatgaatttttcatagaatttacagtatattcaaaggaagaaagataaaattattggtcatcatttgtaccttagaagtacaagaatttaagtaaaagaaatgttcatttttgttttaaaatttgttttccatgtgaagtttttattgagccaactttcatacatatcttgctagcctaaagtctaaatatttgtgttggcatcagaaaaacaaatgaggcagaattgctatgtgtggttgatcttcagataaattgactgatcacagttatttttgtatcagtctatgttattaggaaaaattgtttagttgttttctcccctgattaatggtgatattcaagtatgatacaaaaagaattgtaccaccaaatatttttgtgaggtctgctgttttccatattcattttatgctactgcctttaagaaagaactagtgtatccttgaaatagcacaaaaatgttttaaaattcataattgcaaaacaaatctgtgactaacttaatgtcttcagatctaaagggtgtaaaaatattgatacttcaatatttcacttgctgccaggaaaaacaaaattctcaatcttttgtaaatgggaggaggacttttgcatacatttttactctttaaataacgacaacgacacttatactgtcataataacaattatgtatttctttgtggttttaattttttttgtaattttacataaaacagttattttctatttttacgcagataaatatttgtgcataaaatgtaaaaatagtaaaatgagaaaaataaaactattatacagta

SEQ ID NO: 123477 - DNA, 4814 bp, Artificial Sequence
  derived and/or modified sequence
aggtgcctgggaggcgggaggggggttggggcttctcagcgccgattccgcgggaagggccctgggacctcacacttctagtcgcgggagctgcaggtcttacccggagagacgctgcacgtggagccctcgccgctgccgttctcagccggctctggagtgcgggcgggggcgacagggccgattccggagtgggactgatcctttgaaatactccagccatgactaaaagagaagcagaggagctgatagaaattgagattgatggaacagagaaagcagagtgcacagaagaaagcattgtagaacaaacctacgcgccagctgaatgtgtaagccaggccatagacatcaatgaaccaataggcaatttaaagaaactgctagaaccaagactacagtgttctttggatgctcatgaaatttgtctgcaagatatccagctggatccagaacgaagtttatttgaccaaggagtaaaaacagatggaactgtacagcttagtgtacaggtaatttcttaccaaggaattgaaccaaagttaaacatccttgaaattgttaaacctgcggacactgttgaggttgttattgatccagatgcccaccatgctgaatcagaagcacatcttgttgaagaagctcaagtgataactcttgatggcacaaaacacatcacaaccatttcagatgaaacttcagaacaagtgacaagatgggctgctgcactggaaggctataggaaagaacaagaacgccttgggataccctatgatcccatacagtggtccacagaccaagtcctgcattgggtggtttgggtaatgaaggaattcagcatgaccgatatagacctcaccacactcaacatttcggggagagaattatgtagtctcaaccaagaagatttttttcagcgggttcctcggggagaaattctctggagtcatctggaacttctccgaaaatatgtattggcaagtcaagaacaacagatgaatgaaatagttacaattgatcaacctgtgcaaattattccagcatcagtgcaatctgctacacctactaccattaaagttataaatagtagtgcgaaagcagccaaagtacaaagagcgccgaggatttcaggagaagatagaagctcacctgggaacagaacaggaaacaatggccaaatccaactatggcagtttttgctagaacttcttactgataaggacgctcgagactgcatttcttgggttggtgatgaaggtgaatttaagctaaatcagcctgaactggttgcacagaaatggggacagcgtaaaaataagcctacgatgaactatgagaaactcagtcgtgcattaagatattattacgatggggacatgatttgtaaagttcaaggcaagagatttgtgtacaagtttgtctgtgacttgaagactcttattggatacagtgcagcggagttgaaccgtttggtcacagaatgtgaacagaagaaacttgcaaagatgcagctccatggaattgcccagccagtcacagcagtagctctggctactgcttctctgcaaacggaaaaggataattgagccccaggacattctgagactccaaagtctttcttaaaatgtttagagcaagtatagctcttacctttattactgaatttgaatcttcttttatttctaggctgtacagtctgatgcatgatttttttataaatatttcatactcttgtgaatttggatctttttactttgagcatatattttagaatatgtgtatgttaaaggatctccacaatgtctgcagtgtgaaggcaggttcattgtggaatagtttaacagtcaggaaggctaaactggtcagtattaatgtgtagccctaccaaaaatagccagtagtatctgaaaatgaaaaataaatgaagtatctctaggaaacagtctggcttaactatttttgaaaatataactgtttcccctctctgctgctttagatgttgctttacatagaaccagaaaatggaatttctcagctaaagcatgtgtgcctgtttcatctaatcaagcagagctaaaatgttcataccgaataaatttatattaataaattactaaactaagagtatcaggttatttatatatttgcaagcaaaggacagtaagaagttgactggcaaaagagcagtgctgaaggaggagatccaggtttaaatctggcttattaactcaagccaattttaaggattttctgtatagattactcatgtcagaccaagaatttaaattattttgagagaggcatttaattctaataaaccagctgttataaaaattataaaatgatctctgtttttcctgtcagagatttaaaaaactgaaaaggtatacctcaacccaaaaataaaggtttgttttggtttgttatggcttccttttttaaaaaattaccctgtagtgccagtttattatgcaaagcagcttatattcctttgtttctgataaaatgaagactttaaatcagtcagtagtactttacctttcaaggcattagtaaattacttgcaaatagttttaaaaggaaaatacgacctttgttataggcagtcttctctttaagacaatacttttccacttgttttccttttccatattatatatgtgtattcatatagctgtatacatattcagttgatcattttataaacatatgaaggcataaagatatacagaagaaaaattattaaacaactcattttaagattcaaattaactaattcctgcatatatgacattccttacataagcgaacactaaacaaaaatggctagaaatgtctttttctttcttttctctctttgttgtttaaggtattaagcacgaattattacatgagactggcagatagctattaatcctcttacagatttgagaaagttgattctcaaatatttatgcaccttctccttcattgttttctttaaatctgtcctcttaaaaagcttcttaagagctcagttaatgcttttgacttaactaggagaaaaaggcatgataatacaggcaagatggcattgttagcaattctggtagtggtttggaatgaatcctaagaggcagggatcttaaggacaaggaagagaagagagagagggagggatctttgatctctttctctggtaatcttaatgcataattttactaatacatgttctcaattcattcatattattaagctcttcctgcagttgatatctgagcagagtaagatttgtatttccatttttacttttttgaaagagaatatatggacagattattagtacaatttgggcactgtggttttaagaatatctgagtaaaataacaatatgaaataataaacagaagctctaacgtcaggtaacaaatagacagcaagaaaggttttgcaccatcctcttacggcctagagagttgacaagttgcttgtagttttaaaaaaataataaagtatacccttctggtatatcatcaagagcttaagaatcttggctttcatatttaaaatgcttttggggagacatatattaaaattttagccaagatgatagacatgtctcaattatatatgtgtgtgtatgtttttaaagctaaaaacattacttttagatccctagaatgaaaatttttttctcatctatgcaattcccatatggtttttttttaaatcatattttattcattttctccctttagcaattttcattttatttctcataatttgaacagagacagttctcatacatgatcagatgctttttttttcttcttaccatcatttatgcatgacataggtaatgtgactaatttctccagttgattcaagaaactcattactttgcctcaaattatatgtaaaatatttgttttacttaggttacagttatcagaaaggtagtttttttcttctattaaaatataacattgtgaaagaaaataaaatttatgctattctttgctttgtttttataaatgaatttttcatagaatttacagtatattcaaaggaagaaagataaaattattggtcatcatttgtaccttagaagtacaagaatttaagtaaaagaaatgttcatttttgttttaaaatttgttttccatgtgaagtttttattgagccaactttcatacatatcttgctagcctaaagtctaaatatttgtgttggcatcagaaaaacaaatgaggcagaattgctatgtgtggttgatcttcagataaattgactgatcacagttatttttgtatcagtctatgttattaggaaaaattgtttagttgttttctcccctgattaatggtgatattcaagtatgatacaaaaagaattgtaccaccaaatatttttgtgaggtctgctgttttccatattcattttatgctactgcctttaagaaagaactagtgtatccttgaaatagcacaaaaatgttttaaaattcataattgcaaaacaaatctgtgactaacttaatgtcttcagatctaaagggtgtaaaaatattgatacttcaatatttcacttgctgccaggaaaaacaaaattctcaatcttttgtaaatgggaggaggacttttgcatacatttttactctttaaataacgacaacgacacttatactgtcataataacaattatgtatttctttgtggttttaattttttttgtaattttacataaaacagttattttctatttttacgcagataaatatttgtgcataaaatgtaaaaatagtaaaatgagaaaaataaaactattatacagta

SEQ ID NO: 123478 - DNA, 1365 bp, Artificial Sequence
  derived and/or modified sequence
atgaccaaaagggaggccgaggagttaattgagattgagatagatggtaccgaaaaggccgaatgcaccgaggagagtatcgtcgagcagacatacgctccagctgaatgtgtgagccaggccattgacataaacgagccgataggcaatctgaaaaaactcctcgagcctcggctgcagtgcagcttggacgctcacgaaatttgtctccaggacattcagctggatcctgagagatcgctatttgatcagggagtgaaaacagacgggacagtccagctgtccgtgcaagtgatatcataccaaggtattgaacctaaactgaatatcctggaaattgtgaaacctgctgataccgtggaggtagttatcgatccagatgcccaccacgctgagtcagaagcccatttagttgaagaagcacaggtcatcactctcgacggcacaaagcatatcaccacaatcagcgacgaaacaagcgaacaagtgacccggtgggccgcggccttggagggctatcgtaaggaacaggagagacttggaatcccatatgatcccatccagtggagcacagatcaggttctgcattgggtcgtttgggtgatgaaggaattctcaatgacggatatcgaccttaccacgctgaacatcagcgggcgagagctctgctctctgaaccaagaggatttctttcagagggtgcctcgcggagagatcctctggtcccacctggaactgctccggaaatatgtcctggcatctcaggagcaacaaatgaatgaaattgtgacgatcgatcaacccgtccagatcatcccagcctccgtccagtcagccaccccaacaactatcaaagtaatcaattcctcggcaaaggcagcaaaagtccaaagagctcccaggatttcgggagaggacaggtcctctcccgggaatcggaccggtaataacggccagatccagctctggcagtttctgctggagcttctcacagataaagacgccagagactgcattagttgggttggagacgagggtgagttcaagcttaatcagcctgaattggtggcacagaagtggggtcagaggaagaataagcccaccatgaattatgagaagctgtctcgcgccttgcggtactattacgacggagatatgatttgcaaagtccagggcaagaggtttgtgtacaagttcgtatgcgacctgaagaccctgatcgggtattctgctgccgagttaaacagacttgtgaccgaatgcgagcagaagaaattggccaagatgcagctgcacggaatagcccagccagtgactgctgttgccttggcaaccgctagcctgcagaccgaaaaagacaactag

SEQ ID NO: 123479 - DNA, 1365 bp, Artificial Sequence
  derived and/or modified sequence
atgacgaaacgggaggcagaagagctgatcgagatcgaaattgatggaacagagaaagcggaatgtacagaggaaagcattgttgagcaaacttatgcacctgctgagtgtgtgtcccaggctatcgatattaacgaacccatagggaacctgaagaagctgctggagcctagactgcaatgctctttggacgctcatgaaatctgtctccaggacatccagctggatccagaaaggtctctctttgaccagggcgtgaaaaccgacgggacagtgcaattatctgtccaggtgattagctatcagggcatcgaacctaagttgaacattctcgagatagtgaaacccgctgacaccgtcgaggttgttatcgatcctgatgcccaccacgcggaaagcgaagctcacttagttgaggaagcgcaggtgattacactggatggaaccaagcatataacaacaattagtgacgaaacaagtgagcaggtcactagatgggcagcggccctggagggctacaggaaagagcaggagagactgggaattccatatgatcctattcaatggagtaccgaccaggttctgcactgggtggtgtgggtgatgaaggaattttccatgaccgacatcgatctcaccactctaaacatttctgggagggaactgtgcagcctcaatcaggaagacttcttccaacgggtcccccgaggcgaaattctctggtctcatctggagcttcttcggaagtatgttctggcatcgcaggaacagcagatgaacgaaattgtcaccatcgaccagcctgtgcaaattattccggcttccgtccaaagtgctacgcctacaacaattaaagtgatcaattctagcgcaaaagcggccaaggttcaaagggccccccgcatctcgggtgaagataggtcatcgcccgggaatcgcacaggcaacaatggccagatacagctctggcaattcctgctcgagctgctaaccgataaggatgctagagactgcattagctgggtgggtgatgaaggagaatttaagctcaaccagccagagctggtggcacagaagtggggtcaacggaagaacaaaccgacaatgaactacgagaagctgtctagagctctcagatactattatgacggtgacatgatttgcaaggtgcaaggaaaaaggttcgtgtacaaattcgtgtgtgatctgaaaacgctgatcggctatagtgctgccgagttgaatagactagtaaccgagtgcgagcaaaaaaagttggctaaaatgcagttgcatggtattgcccaaccggtcactgcagtagctctcgccaccgcatccctgcaaacagaaaaagataactag

SEQ ID NO: 123480 - DNA, 1365 bp, Artificial Sequence
  derived and/or modified sequence
atgaccaagcgggaggccgaggagctgattgaaattgaaattgatggaacagagaaggcagaatgtacagaggagagcatcgtggagcagacctacgccccagcagaatgtgtgtcccaggccatcgacatcaatgagcccatcggcaacctgaagaagctgctggagccccggctgcagtgcagcctggatgcccacgagatctgcctgcaggacatccagctggaccctgagaggagcctgtttgaccagggcgtgaagacagatggcaccgtgcagctgtctgtgcaggtgatctcctaccagggcatcgagcccaagctgaacatcctggagatcgtgaagccagctgacacagtggaggtggtgattgatcctgatgcccaccacgccgagagcgaggcccacctggtggaggaggcccaggtgatcaccctggatggcaccaagcacatcaccaccatcagtgatgagaccagcgagcaggtgacccgctgggccgccgccctggagggctacaggaaggagcaggagcggctgggcatcccctatgaccccatccagtggagcacagaccaggtgctgcactgggtggtgtgggtgatgaaggagttctccatgacagacatcgacctgaccaccctgaacatcagcggccgggagctgtgcagcctgaaccaggaggacttcttccagagggtgcccagaggagagatcctgtggagccacctggagctgctgaggaaatatgtgctggccagccaggagcagcagatgaatgagatcgtgaccatcgaccagcctgtgcagatcatcccagcctctgtgcagagcgccacccccaccaccatcaaggtgatcaacagcagcgccaaggccgccaaggtgcagagggccccccgcatctctggagaagatagaagcagccctggcaacagaacaggcaacaacggccagatccagctgtggcagttcctgctggagctgctgacagacaaggatgcccgggactgcatctcctgggtgggagatgaaggagagttcaagctgaaccagcctgagctggtggcccagaagtggggccagaggaagaacaagcccaccatgaactatgagaagctgagccgggccctgcgctactactatgatggagacatgatctgcaaggtgcagggcaagagatttgtgtacaagtttgtgtgtgacctgaagaccctgattggctacagcgctgctgagctgaaccggctggtgacagaatgtgagcagaagaagctggccaagatgcagctgcacggcatcgcccagcctgtgacagctgtggccctggccacagccagcctgcagacagagaaggacaactag

SEQ ID NO: 123481 - DNA, 1365 bp, Artificial Sequence
  derived and/or modified sequence
atgaccaagcgggaggccgaggagctgatcgagatcgagatcgacggcacggagaaggctgagtgtaccgaagaatccatcgtagaacaaacgtacgcccctgccgaatgtgtgagtcaggctatcgacattaatgagccgattggcaatctcaagaaacttctggaacctagactccagtgtagccttgacgcccatgagatatgtttgcaggatatccaactggatccagaacggtctctgtttgatcagggagtgaaaacagatgggacagttcaactctcggttcaggttatatcctatcagggcatcgaaccaaagctgaatattcttgaaatcgttaaacctgctgatacagttgaagtggtgattgacccggacgcacaccacgccgagtccgaggctcacctggtcgaggaggcacaggtgatcaccttggacggaacgaagcacattacgaccatctctgatgaaacatccgaacaggtgacgcggtgggcagctgcactagaagggtataggaaagagcaggagaggttaggtatcccctacgatcccattcagtggtctaccgatcaagtgcttcactgggtagtgtgggttatgaaagaattcagcatgacagatatcgacctgactacactgaacatctctggtagggagttatgcagtttaaaccaagaagacttttttcagagggtgccaaggggtgaaattttgtggtcccaccttgagctgctgcgtaaatacgtccttgcctctcaagaacagcagatgaatgagatcgtgaccattgaccagcctgtccagatcatccccgctagcgttcaatccgcaacccctactacaataaaagtgatcaacagcagtgcaaaggctgcaaaggttcagcgggcaccacgcatctctggcgaagataggtcgagtccgggaaacagaacaggaaacaatggccagatccagctgtggcagttcctgctagagctgttgaccgataaggatgctcgcgactgcatttcctgggtaggcgacgagggcgagttcaaattgaaccagcccgaactcgtggcccagaagtggggtcaaaggaagaacaaaccaacgatgaattatgaaaaattgagccgagccctccggtactattacgacggagatatgatatgcaaagtgcagggaaagagattcgtctataagtttgtttgcgatctcaagaccctgattggttattccgcagcagagctcaatagactcgtgacagagtgtgaacagaaaaagctggcaaagatgcaacttcatgggatcgcccagcccgtcaccgctgtagccctggctactgcatcactgcagacggagaaggataactag

SEQ ID NO: 123482 - DNA, 1365 bp, Artificial Sequence
  derived and/or modified sequence
atgaccaagcgggaggccgaggagctgatcgagatcgagatcgacggtacagaaaaagccgagtgtacagaagagtctatagtggaacagacttatgcgccagccgagtgcgtgtcccaggctatcgatatcaacgagccgatcggcaatcttaaaaagctcttggagcctagactgcagtgctctttagatgcccacgaaatctgtctacaggatatccagctcgaccctgaacgtagtctctttgatcagggcgttaaaaccgacgggacagtgcaacttagcgtccaggtcatcagttaccagggcattgaacctaaactgaacatcctcgaaattgtgaagcccgccgacacagtagaggtggtcattgacccagacgcccaccatgcagagtctgaggctcacctcgtcgaagaggcacaagtcatcaccctggacggaactaagcacatcacgacaataagcgatgagacaagtgaacaggtcaccagatgggcggccgcactggagggctatcgcaaagagcaggagaggttggggatcccttatgatcccatacaatggagcaccgaccaggttctccactgggtagtttgggtaatgaaagaattcagcatgactgacatagacctgaccaccctgaatataagcggtcgcgaactctgcagcctgaatcaagaggatttcttccaacgggtgccacgtggtgaaattctgtggtcacacctcgaactattgaggaaatatgtccttgcctcccaagaacaacagatgaacgagatcgttacgattgaccagcctgtccagattatccccgcatcagtgcaaagtgctacgccaacaaccatcaaagtcataaattccagcgcaaaggccgcaaaggtgcagagggctccgcgtatttcaggcgaggaccggtccagcccaggaaaccgtaccggaaacaacggccagatccaactctggcagttccttcttgagctgctgacagacaaggatgctagagactgtatttcatgggtgggcgatgagggtgagtttaagctaaaccagccggagttagttgcacagaagtggggccaaaggaaaaataagccaactatgaattatgagaagctgtcacgtgccctgagatactattatgatggtgacatgatttgcaaggtgcagggcaagagatttgtttataaatttgtttgcgacctcaagacactaattggctatagcgctgccgaactgaataggctggttaccgaatgcgagcaaaagaagctcgcaaaaatgcaactgcacggaatcgcccagcctgtaactgctgtggcactggctaccgcttccctgcagaccgagaaagacaactag

SEQ ID NO: 123483 - DNA, 1365 bp, Artificial Sequence
  derived and/or modified sequence
atgacgaagagggaggctgaagagctcatcgaaatcgaaatcgatggaaccgagaaggctgaatgtaccgaagaaagtatcgttgagcagacatatgctcctgccgagtgtgtgtcacaggccatcgacatcaatgagccaatcggcaacctgaagaaactgctagagcctagactgcagtgctctctggatgcacatgagatctgcctgcaagacatacagcttgaccccgaacggtctctgtttgaccaaggcgtcaaaaccgatgggaccgttcagcttagtgtccaggttatctcgtaccaggggatcgagcccaagttgaacatcctcgaaatcgtgaaaccagctgacacagtcgaggtggtgatcgaccccgatgcccatcatgctgagagcgaggctcaccttgtggaggaggctcaggtaatcacactggacggcaccaaacatatcaccactattagtgacgagacctccgagcaagtgacgcgctgggccgctgctttagagggctaccgaaaggaacaggaacgactgggcattccctatgatcccatccagtggagcaccgatcaagtcttgcattgggtcgtttgggtgatgaaagagtttagcatgactgacattgatctgactacattgaatatcagcggaagagagctctgttcccttaatcaggaggacttttttcaacgggtgcctaggggcgaaattttatggtcccatctggaactgcttcggaagtatgttttggcttcccaagaacagcagatgaacgagatcgtaacaattgatcagcccgttcagatcattcctgcttccgtgcagtctgctacccctacaacaataaaggttattaatagttcggctaaggccgctaaggtccagcgggctcctaggatcagcggggaggatcggtcatcccccggaaatcggacaggcaacaacgggcaaatccagctttggcagttcttgttagagcttctaacagataaagatgcaagggactgtattagctgggtaggagatgaaggggaatttaaactgaaccagcccgagctggtggcgcagaaatgggggcagaggaagaacaaacctaccatgaactatgagaagcttagccgcgctctgcgctactattacgatggggatatgatttgtaaagtacagggcaagcgcttcgtgtacaaattcgtgtgcgatctcaagacgctgatcgggtattctgcagcggagctcaaccggcttgttaccgagtgcgaacagaagaagcttgcaaaaatgcaactgcacggcatagctcaaccagtgacggctgtggctctggccaccgctagtctgcaaacagagaaggacaactag

SEQ ID NO: 123484 - DNA, 1365 bp, Artificial Sequence
  derived and/or modified sequence
atgacgaagagagaagctgaggaacttatagaaatcgagatcgatggaacggagaaggctgagtgcacagaagaatccatcgtagagcagacctatgcaccagccgaatgtgtcagccaggccatagatatcaatgagccgatcgggaacctgaagaagctgctggagcccaggctccagtgctctctggacgcacatgaaatctgtctgcaggacattcaactggacccagagaggtctctgtttgaccagggggttaagaccgatggcactgtacaactgagtgtacaggtaatttcttatcaaggcattgagcccaagttgaatattttggagattgtcaagcccgctgacaccgttgaggttgtaattgaccccgacgcgcaccacgcagagtcagaggcacatctagttgaagaggcccaggtcattacactcgacggtaccaagcacattaccacgatcagcgatgaaacaagcgaacaggtgactcggtgggccgctgctttggagggctacagaaaagagcaggaacgattaggtataccctatgaccctattcagtggagtaccgatcaggtcctgcactgggttgtgtgggtcatgaaagagttcagcatgaccgatattgatctgaccaccctcaacatcagcggcagagagctgtgctccctgaatcaggaagattttttccagcgggtgccgagaggcgagatcctatggagccatctggagctgcttaggaaatatgttctggcctctcaggagcagcaaatgaatgaaatcgtgaccatcgaccaacccgtgcagatcatcccggcttccgtacaaagtgccacacctaccacaattaaggtcatcaactccagcgccaaggctgccaaggttcagagggctcccaggattagtggcgaagacaggtcaagcccgggaaaccgcacaggtaacaacggacagatccaactatggcagttcttactggagctccttaccgacaaagatgcaagagactgtattagttgggtgggcgacgagggcgaattcaagttgaatcagcccgagctcgtagctcagaaatggggccaaagaaagaataaacccactatgaactacgagaagctctccagggcactcagatactactacgacggcgacatgatttgcaaggtgcaggggaagcggttcgtgtacaagttcgtgtgtgatctgaagacactgattggctatagcgctgcagagctaaacagactcgttacagaatgcgaacaaaaaaagttggcaaaaatgcaactgcatgggatagcccagccagtcaccgcagttgccctggcaacagctagtctacaaaccgaaaaggacaactag

SEQ ID NO: 123485 - DNA, 1365 bp, Artificial Sequence
  derived and/or modified sequence
atgaccaagagagaggccgaggagctgatcgagatcgagatcgacggcaccgagaaggccgagtgcaccgaggagagcatcgtggagcagacctacgcccccgccgagtgcgtgagccaggccatcgacatcaacgagcccatcggcaacctgaagaagctgctggagcccagactgcagtgcagcctggacgcccacgagatctgcctgcaggacatccagctggaccccgagagaagcctgttcgaccagggcgtgaagaccgacggcaccgtgcagctgagcgtgcaggtgatcagctaccagggcatcgagcccaagctgaacatcctggagatcgtgaagcccgccgacaccgtggaggtggtgatcgaccccgacgcccaccacgccgagagcgaggcccacctggtggaggaggcccaggtgatcaccctggacggcaccaagcacatcaccaccatcagcgacgagaccagcgagcaggtgaccagatgggccgccgccctggagggctacagaaaggagcaggagagactgggcatcccctacgaccccatccagtggagcaccgaccaggtgctgcactgggtggtgtgggtgatgaaggagttcagcatgaccgacatcgacctgaccaccctgaacatcagcggcagagagctgtgcagcctgaaccaggaggacttcttccagagagtgcccagaggcgagatcctgtggagccacctggagctgctgagaaagtacgtgctggccagccaggagcagcagatgaacgagatcgtgaccatcgaccagcccgtgcagatcatccccgccagcgtgcagagcgccacccccaccaccatcaaggtgatcaacagcagcgccaaggccgccaaggtgcagagagcccccagaatcagcggcgaggacagaagcagccccggcaacagaaccggcaacaacggccagatccagctgtggcagttcctgctggagctgctgaccgacaaggacgccagagactgcatcagctgggtgggcgacgagggcgagttcaagctgaaccagcccgagctggtggcccagaagtggggccagagaaagaacaagcccaccatgaactacgagaagctgagcagagccctgagatactactacgacggcgacatgatctgcaaggtgcagggcaagagattcgtgtacaagttcgtgtgcgacctgaagaccctgatcggctacagcgccgccgagctgaacagactggtgaccgagtgcgagcagaagaagctggccaagatgcagctgcacggcatcgcccagcccgtgaccgccgtggccctggccaccgccagcctgcagaccgagaaggacaactag

SEQ ID NO: 123486 - protein, 360 aa, Artificial Sequence
  derived and/or modified sequence
MSLVDLGKKLLEAARAGQDDEVRILMANGAPFTTDWLGTSPLHLAAQYGHYSTTEVLLRAGVSRDARTKVDRTPLHMAASEGHASIVEVLLKHGADVNAKDMLKMTALHWATEHNHQEVVELLIKYGADVHTQSKFCKTAFDISIDNGNEDLAEILQIAMQNQINTNPESPDTVTIHAATPQFIIGPGGVVNLTGLVSSENSSKATDETGVSAVQFGNSSTSVLATLAALAEASAPLSNSSETPVVATEEVVTAESVDGAIQQVVSSGGQQVITIVTDGIQLGNLHSIPTSGIGQPIIVTMPDGQQVLTVPATDIAEETVISEEPPAKRQCIEIIENRVESAEIEVRSLLPGVLCRSHPK

SEQ ID NO: 123487 - DNA, 1392 bp, Artificial Sequence
  derived and/or modified sequence
ggggattttgggcgccgaccagacgcggcattttcggaaaatagcgccctgtgcagctgaagcgctttgtgtgtagcggggccgcgtcagcccggccgggtacgaggcgcctcgggtccccgcaccacctcctgctgccttcccgtcgccgctcccgaagcttttccagatgtccctggtagatttgggaaagaagcttttagaagcggcacgagcaggtcaagatgatgaagttcgtattttgatggcaaatggagctccctttactacagactggctgggaacttctccacttcatctagcagcacagtatggtcattattccaccacagaggtactgctgcgagctggtgtgagcagagatgccagaaccaaagtggaccgaacaccattacatatggcagcttctgagggccatgccagcatagtagaggttttacttaagcatggtgctgatgtcaatgcaaaggacatgttaaagatgacagctctccattgggccacagaacacaatcatcaagaggtggtggaacttttaatcaaatatggtgctgatgtacacacgcaaagtaaattttgtaaaactgcatttgatatttcaatagacaatggaaatgaagatttagcagagatattacagattgctatgcagaaccaaatcaacacaaacccagagagtcctgacactgtgacaatacatgctgcaacaccacagtttatcattggacctggaggggtggtgaacctaacaggtctggtatcttcagaaaattcatccaaggcaacagatgaaacgggtgtatctgctgttcagtttggaaactcttctacatcagtattagctacattagctgccttagctgaagcatctgctccattgtccaattcttcagaaactccagtagtggccacagaagaagtagttactgcagaatctgtggatggtgccattcagcaagtagttagttcagggggtcagcaagtcatcacaatagttacagatggaattcagcttggaaatttgcactctattccaaccagtggaattggtcagcccatcattgtgaccatgccagatggacaacaagtattaacagtaccagcaacagacattgctgaagaaactgttataagtgaagaaccaccagctaagagacaatgtatcgaaataattgaaaaccgggtggaatctgcagaaatagaagtaaggagtcttttacccggtgtgctttgccgcagtcatccaaaataaattcaattttttttgtcttttatatttattactgacagtattgttttgatacagaatgaaagtgcgtagtattttcattttgtttatttttgccttatacatatagcaagccctcaataaataaatattgaatgaatgaa

SEQ ID NO: 123488 - DNA, 1083 bp, Artificial Sequence
  derived and/or modified sequence
atgtcgcttgtggatctgggtaaaaagctcctagaagccgcccgcgccgggcaggatgatgaagtgcggatcctcatggctaacggagccccctttaccaccgattggcttggtacaagcccactccacctggctgcccagtacgggcactacagcaccaccgaggtgctgcttagagccggagtaagtcgggacgctagaactaaggtggatcggactcccttgcatatggccgcatccgagggtcatgcctcaatcgtggaagtgctgctgaagcacggggccgacgtgaatgcaaaagatatgctcaagatgacggccctgcattgggctactgagcataatcatcaagaagttgtggagctgctcattaaatacggagctgacgtgcacacacaatcgaaattctgcaaaactgcctttgatatctccatagataacggcaacgaagatttggcggagatcctgcagatcgccatgcagaatcagattaataccaaccccgagagccccgacactgtgacaatccacgctgcgaccccacagtttattatcggccctggcggcgtggtgaacctcactggtctcgtgagttcagaaaacagctctaaggccaccgatgagacaggggtttctgccgtgcagtttggtaacagcagtacgtccgtgttagccactctggctgccctggcggaagcaagcgcgcctctgagcaactcctctgagactccagtagtggcaacagaagaggtagtgaccgccgaatcagtggatggcgccattcagcaggttgtttccagcggggggcagcaggtcatcaccatcgttacagacggaatccagttgggtaatttgcatagcatcccaacatccgggatcgggcagcccatcattgttactatgccagacgggcagcaagtacttacagtgcctgcaacagacattgccgaagaaacagtgatctccgaagagcctccggcgaagcgccagtgtatcgagatcatcgagaatcgcgtggagtccgcagagattgaggtacggagccttcttcccggggtgctgtgcagatctcaccccaaatag

SEQ ID NO: 123489 - DNA, 1083 bp, Artificial Sequence
  derived and/or modified sequence
atgagcctggtggacctgggcaagaagctgctggaggccgcccgggccggccaggatgatgaggtgcgcatcctgatggccaacggggcccccttcaccacagactggctgggcaccagccccctgcacctggccgcccagtatggccactacagcaccacagaggtgctgctgcgggccggcgtgtccagagatgcccggaccaaggtggacaggacccccctgcacatggccgccagcgagggccacgccagcatcgtggaggtgctgctgaagcatggagcagatgtgaatgccaaggacatgctgaagatgacagccctgcactgggccacagagcacaaccaccaggaggtggtggagctgctgatcaagtacggggctgatgtgcacacccagagcaagttctgcaagacagcctttgacatcagcattgacaatggaaatgaagacctggccgagatcctgcagatcgccatgcagaaccagatcaacaccaaccctgagagcccagacacagtgaccatccacgccgccaccccccagttcatcatcggccctggaggagtggtgaacctgaccggcctggtgtcctctgagaacagcagcaaggccacagatgaaacaggagtgtctgctgtgcagtttggaaacagcagcacctctgtgctggccaccctggccgccctggccgaggccagcgcccccctgagcaacagcagcgagacccctgtggtggccacagaggaggtggtgacagctgagagcgtggatggagccatccagcaggtggtgtcctctgggggccagcaggtgatcaccatcgtgacagatggcatccagctgggcaacctgcacagcatccccaccagcggcatcggccagcccatcatcgtgaccatgccagatggccagcaggtgctgactgtgcctgccacagacattgctgaggagaccgtcatcagcgaggagcccccagccaagaggcagtgcatcgagatcatcgagaacagagtggagagcgctgagattgaggtgcgcagcctgctgcccggggtgctgtgccgcagccaccccaagtag

SEQ ID NO: 123490 - DNA, 1083 bp, Artificial Sequence
  derived and/or modified sequence
atgagcctggtggacctgggcaagaagctgctggaggccgcccgggccggacaagatgatgaggtgagaatcctcatggccaatggggcgccattcaccacggactggcttggtaccagccctctgcatctggcagctcagtacggccactatagcacaactgaagtactcttgcgtgcaggcgtgtccagggacgcgaggactaaagttgacaggacgccgttacacatggccgcgagtgaggggcacgcttcgattgtagaggtcctcctgaaacacggcgcagacgtcaacgccaaggatatgctcaaaatgaccgcgctgcactgggccactgagcataatcaccaggaggtggtggagttactgattaagtatggagccgacgtccatacacagagtaaattctgtaagacagcattcgacatctctattgataacgggaacgaggacttagctgagattctgcagattgccatgcagaaccagatcaacaccaatccagaaagccccgatacagtaacaatccacgcagcgacaccccagtttatcataggccctggcggagtggttaatctcacagggctggttagttcggagaactctagcaaggccactgatgagaccggcgtctcagctgtccaattcggcaactcgagcacatcagttctggctacgttggccgcactggcggaggcgagcgcaccactgtccaattcaagtgaaacccctgtagtagccactgaagaagtggtcactgctgaatctgtggacggcgccatacaacaggtcgtgagctccggaggtcagcaggttattactattgtcaccgacgggatccagctgggcaacctgcactccattcccaccagcggcataggccaacccatcatcgtgacaatgcctgatggtcagcaagtcctcacggtgccagccacagacatcgccgaagagacggtgattagcgaggagccaccagccaagcgacagtgcatcgagataatagaaaatagagttgagtctgcggagattgaggttcgaagcctgctgcccggggtgctgtgccggagccaccccaagtag

SEQ ID NO: 123491 - DNA, 1083 bp, Artificial Sequence
  derived and/or modified sequence
atgagcttggtggacctgggcaagaagctcctggaagccgcaagggccggacaggacgacgaggtgcggatcttgatggccaacggcgctccatttactacagactggctggggaccagtcctttgcacctggctgcacaatacggacattacagtactacagaggtgctgttgagagccggagtatctcgagatgccagaacaaaagtggatagaactcccctgcacatggccgctagcgaagggcacgcctctatcgtcgaggtgctcctaaaacacggagctgatgtgaacgcaaaggatatgcttaagatgacagctctgcattgggccaccgagcacaaccaccaggaggtagtggaactcctaatcaaatatggagctgatgtgcacactcagtccaaattctgcaaaacggcctttgacatatcaatagataacggtaacgaagaccttgccgagattctgcagatcgccatgcagaaccagattaataccaatcctgagtctccagataccgtgactattcatgctgccacacctcagtttattataggtcccggtggcgtcgtgaatctcaccggcctggtgtcttcggagaatagcagtaaggccaccgatgaaactggggtttctgctgtacaattcggtaattcgtctacctctgtgctggcaaccttagctgcactagccgaagccagtgccccactgtcaaattccagcgaaacaccggtagtggcgacagaggaggtagtaaccgctgaatctgtcgatggcgctatccagcaggttgtctcgtctggtggccagcaagtgatcaccatcgtgacagacggtattcagctgggcaatctacatagcatcccaacttccggtatcggtcagcctatcatcgtgaccatgcccgatgggcagcaagtgcttacggtacccgcaacagacatcgccgaggagaccgtaattagcgaagagcctccagctaagagacagtgcattgaaattatcgagaatagggtggagagcgccgagatcgaggttaggtccctgctgccaggagtcctctgtcgttctcatcctaaatag

SEQ ID NO: 123492 - DNA, 1083 bp, Artificial Sequence
  derived and/or modified sequence
atgagcctggtggacctgggcaagaagctgctggaggccgccagagccggccaggacgacgaggtgagaatcctgatggccaacggcgcccccttcaccaccgactggctgggcaccagccccctgcacctggccgcccagtacggccactacagcaccaccgaggtgctgctgagagccggcgtgagcagagacgccagaaccaaggtggacagaacccccctgcacatggccgccagcgagggccacgccagcatcgtggaggtgctgctgaagcacggcgccgacgtgaacgccaaggacatgctgaagatgaccgccctgcactgggccaccgagcacaaccaccaggaggtggtggagctgctgatcaagtacggcgccgacgtgcacacccagagcaagttctgcaagaccgccttcgacatcagcatcgacaacggcaacgaggacctggccgagatcctgcagatcgccatgcagaaccagatcaacaccaaccccgagagccccgacaccgtgaccatccacgccgccaccccccagttcatcatcggccccggcggcgtggtgaacctgaccggcctggtgagcagcgagaacagcagcaaggccaccgacgagaccggcgtgagcgccgtgcagttcggcaacagcagcaccagcgtgctggccaccctggccgccctggccgaggccagcgcccccctgagcaacagcagcgagacccccgtggtggccaccgaggaggtggtgaccgccgagagcgtggacggcgccatccagcaggtggtgagcagcggcggccagcaggtgatcaccatcgtgaccgacggcatccagctgggcaacctgcacagcatccccaccagcggcatcggccagcccatcatcgtgaccatgcccgacggccagcaggtgctgaccgtgcccgccaccgacatcgccgaggagaccgtgatcagcgaggagccccccgccaagagacagtgcatcgagatcatcgagaacagagtggagagcgccgagatcgaggtgagaagcctgctgcccggcgtgctgtgcagaagccaccccaagtag

SEQ ID NO: 123493 - protein, 479 aa, Artificial Sequence
  derived and/or modified sequence
MLAVPNMRFGIFLLWWGWVLATESRMHWPGREVHEMSKKGRPQRQRREVHEDAHKQVSPILRRSPDITKSPLTKSEQLLRIDDHDFSMRPGFGGPAIPVGVDVQVESLDSISEVDMDFTMTLYLRHYWKDERLSFPSTNNLSMTFDGRLVKKIWVPDMFFVHSKRSFIHDTTTDNVMLRVQPDGKVLYSLRVTVTAMCNMDFSRFPLDTQTCSLEIESYAYTEDDLMLYWKKGNDSLKTDERISLSQFLIQEFHTTTKLAFYSSTGWYNRLYINFTLRRHIFFFLLQTYFPATLMVMLSWVSFWIDRRAVPARVPLGITTVLTMSTIITGVNASMPRVSYIKAVDIYLWVSFVFVFLSVLEYAAVNYLTTVQERKEQKLREKLPCTSGLPPPRTAMLDGNYSDGEVNDLDNYMPENGEKPDRMMVQLTLASERSSPQRKSQRSSYVSMRIDTHAIDKYSRIIFPAAYILFNLIYWSIFS

SEQ ID NO: 123494 - DNA, 1440 bp, Artificial Sequence
  derived and/or modified sequence
atgctggccgtgccaaacatgcggtttggtattttcttgctgtggtgggggtgggtgctggctacagagtctaggatgcactggcccgggcgcgaagtgcacgagatgtcaaaaaagggtcgtcctcagcgccagagaagagaggtgcatgaggacgcacacaagcaggtgtctcccatcctgcggaggagtcccgacatcacaaagtcgcctttaacaaaaagcgagcagttattacggatcgatgaccatgacttctccatgaggccgggctttggcggaccagctatcccagtgggagttgatgttcaggtggagtccttggactcgatatcagaggtggatatggatttcacgatgaccctgtacttgcgccactattggaaggacgagcggctgtccttcccaagcactaataatctgagcatgacctttgacggccgcttagtgaagaagatctgggtgcctgatatgttttttgtccactctaaacggtcattcatccacgatacaaccacagataatgtgatgctccgggttcaacctgacggaaaggtgctgtactcccttcgtgtgacggtaacggccatgtgtaacatggacttctcccgctttcctctggacacacagacatgcagccttgaaatagagtcttacgcctatactgaggatgacttaatgctctactggaagaagggcaacgatagtctgaaaacggatgagcgaatctcattatctcagttcctgatccaggagtttcacacgactaccaagctggccttttacagctcaacggggtggtacaatcgattgtacatcaacttcaccctccgaaggcatattttcttctttcttctgcagacatatttcccggctaccctgatggtgatgttatcctgggtgagcttttggattgaccggcgtgcagttccagccagagtacctctcgggattactacagtcctgactatgagcaccataatcacaggggttaacgcttctatgccccgtgtgagctatatcaaggccgtagacatatatctgtgggtgagctttgtttttgtgtttcttagcgttttagagtatgccgcagtcaattatcttaccacagtgcaggaacggaaggaacagaaattacgcgagaagctaccctgtacatctggtctccctcccccccggactgccatgctggatggcaattactcagacggtgaagttaacgacttggataactatatgcccgagaatggtgaaaaacccgacagaatgatggtgcagctgactctcgcctcggagagatcctctccccaaagaaagtcgcagagatcctcatatgtctcaatgaggattgatacccatgctattgataaatacagtcgaatcatattccctgcagcatacattctgtttaatttgatctactggagcattttcagttag

SEQ ID NO: 123495 - DNA, 1823 bp, Artificial Sequence
  derived and/or modified sequence
caagatggccgaataggaacagctcccgtctacagctcccagcgtgagcgacgcagaagacggatatttttgatctgcacttggttgaatctacagatgtaaaacccacggatgcagagggctgactgtggctagaaaatgtgctgcagggagcacgtggaaacagctgatgagcacctgcagcccctgtttgggagcagctggggtgtgctgcctgccgttcacccatcagtcaaatcgaggcttcatgaaggcaaaggcagtggcatctcagaatttgacaaacctcctttcatcagtgactggttccatttcaggctggcccaaagtcaaagccccaaagacaaagacgagaagtacatgaagatgcccacaagcaagtcagcccaattctgagacgaagtcctgacatcaccaaatcgcctctgacaaagtcagaacagcttctgaggatagatgaccatgatttcagcatgaggcctggctttggaggccctgccattcctgttggtgtggatgtgcaggtggagagtttggatagcatctcagaggttgacatggactttacgatgaccctctacctgaggcactactggaaggacgagaggctgtcttttccaagcaccaacaacctcagcatgacgtttgacggccggctggtcaagaagatctgggtccctgacatgtttttcgtgcactccaaacgctccttcatccacgacaccaccacagacaacgtcatgttgcgggtccagcctgatgggaaagtgctctatagtctcagggttacagtaactgcaatgtgcaacatggacttcagccgatttcccttggacacacaaacgtgctctcttgaaattgaaagctatgcctatacagaagatgacctcatgctgtactggaaaaagggcaatgactccttaaagacagatgaacggatctcactctcccagttcctcattcaggaattccacaccaccaccaaactggctttctacagcagcacaggctggtacaaccgtctctacattaatttcacgttgcgtcgccacatcttcttcttcttgctccaaacttatttccccgctaccctgatggtcatgctgtcctgggtgtccttctggatcgaccgcagagccgtgcctgccagagtccccttaggtatcacaacggtgctgaccatgtccaccatcatcacgggcgtgaatgcctccatgccgcgcgtctcctacatcaaggccgtggacatctacctctgggtcagctttgtgttcgtgttcctctcggtgctggagtatgcggccgtcaactacctgaccactgtgcaggagaggaaggaacagaagctgcgggagaagcttccctgcaccagcggattacctccgccccgcactgcgatgctggacggcaactacagtgatggggaggtgaatgacctggacaactacatgccagagaatggagagaagcccgacaggatgatggtgcagctgaccctggcctcagagaggagctccccacagaggaaaagtcagagaagcagctatgtgagcatgagaatcgacacccacgccattgataaatactccaggatcatctttccagcagcatacattttattcaatttaatatactggtctattttctcctagatgcttgtaattctacaaatttcacatttccatggcatgcactacagaaataactgtataatgaaaaagtatttaaggatatggttaaaaaaaaatcccaggacccacccatgttttcactatcccttctgcagctttccaaagctacattgacgagacacttactggttt

SEQ ID NO: 123496 - DNA, 2820 bp, Artificial Sequence
  derived and/or modified sequence
tgagtaaacatccttctaataatgaacagaccaataatgtcttaagagagaaaaagaacaatcttttcctttttgctgtttctggagagagctgtttgaatttggaaacccatgttggctgtcccaaatatgagatttggcatctttcttttgtggtggggatgggttttggccactgaaagcagaatgcactggcccggaagagaagtccacgagatgtctaagaaaggcaggccccaaagacaaagacgagaagtacatgaagatgcccacaagcaagtcagcccaattctgagacgaagtcctgacatcaccaaatcgcctctgacaaagtcagaacagcttctgaggatagatgaccatgatttcagcatgaggcctggctttggaggccctgccattcctgttggtgtggatgtgcaggtggagagtttggatagcatctcagaggttgacatggactttacgatgaccctctacctgaggcactactggaaggacgagaggctgtcttttccaagcaccaacaacctcagcatgacgtttgacggccggctggtcaagaagatctgggtccctgacatgtttttcgtgcactccaaacgctccttcatccacgacaccaccacagacaacgtcatgttgcgggtccagcctgatgggaaagtgctctatagtctcagggttacagtaactgcaatgtgcaacatggacttcagccgatttcccttggacacacaaacgtgctctcttgaaattgaaagctatgcctatacagaagatgacctcatgctgtactggaaaaagggcaatgactccttaaagacagatgaacggatctcactctcccagttcctcattcaggaattccacaccaccaccaaactggctttctacagcagcacaggctggtacaaccgtctctacattaatttcacgttgcgtcgccacatcttcttcttcttgctccaaacttatttccccgctaccctgatggtcatgctgtcctgggtgtccttctggatcgaccgcagagccgtgcctgccagagtccccttaggtatcacaacggtgctgaccatgtccaccatcatcacgggcgtgaatgcctccatgccgcgcgtctcctacatcaaggccgtggacatctacctctgggtcagctttgtgttcgtgttcctctcggtgctggagtatgcggccgtcaactacctgaccactgtgcaggagaggaaggaacagaagctgcgggagaagcttccctgcaccagcggattacctccgccccgcactgcgatgctggacggcaactacagtgatggggaggtgaatgacctggacaactacatgccagagaatggagagaagcccgacaggatgatggtgcagctgaccctggcctcagagaggagctccccacagaggaaaagtcagagaagcagctatgtgagcatgagaatcgacacccacgccattgataaatactccaggatcatctttccagcagcatacattttattcaatttaatatactggtctattttctcctagatgcttgtaattctacaaatttcacatttccatggcatgcactacagaaataactgtataatgaaaaagtatttaaggatatggttaaaaaaaaatcccaggacccacccatgttttcactatcccttctgcagctttccaaagctacattgacgagacacttactggtttaatttgcacttattaaccatctattgaatacacagcattatattaggtgctgcaggaaatacgacactgtagcgactgatgttagttgttacccagatcccctggaaaagcacactaccagtgttgtgggcacatttagttccacccgttagacccttgatgctattcacatgaataatttattttcctcaagtgtcattacattgttcaggctacgtgaacttggaagcacctacaggccatttgcatgaaattcacatgcacctaaatcctcactttgacagaaactcatgcttcagtttataacctattacctattttgtatgcgactccacctccgcatgtttattttaataaaaggcaatgataacattcacattatttttctttatatgctgtggttcacaggctttaccccttcacaagaaaagctctttagattggcgcaattgcttctgattttggtgaaattttccctggtagggaaactttgaagataagagtacacacatgcattttgtctgttgtgtcatagaggtaactaggctagaaaatttgtgtttaaatgttccctattttatataatcaccacttcatgtttcttcttcttggagcatgtccttgttcaaagagaagtgctttctcagtgatgtgatatcttcactgaggaacttgggtagagaatgatttcttctgcataaacacttcaaggaaatacataatttgggactacttgtaactcattagaatgagaaatactcacatggtttcttaagagaaaaagaacatcggaaagcaaaataaatgggaagatatcactggacatctgcatttatactcgaaataccagcattttctatggaccagaaaactgccatcacctagaccacacagcccagataccaggcagacggatggcccaatggcaactgatgtcagggcatggggtaaaggagagggttctaatctggtgtatcacttaaaaacagttatttatattatatatctgctatatagatcaacctccaccaaacttacccaaacagcatttgttttatttgaaactcactttaataaagtgaattatatacacaataa

SEQ ID NO: 123497 - DNA, 1440 bp, Artificial Sequence
  derived and/or modified sequence
atgctggccgtgcccaacatgagatttggcatcttcctgctgtggtggggctgggtgctggccacagagagcaggatgcactggccaggccgggaggtgcatgagatgagcaagaagggccggccccagaggcagaggcgggaggtgcatgaagatgcccacaagcaggtgagccccatcctgcggcgcagcccagacatcaccaagagccccctgaccaagtctgagcagctgctgagaattgatgaccatgacttctccatgaggcctggctttggaggccctgccatccctgtgggcgtggatgtgcaggtggagagcctggacagcatcagcgaggtggacatggacttcaccatgaccctgtacctgcggcactactggaaggatgagcggctgtccttccccagcaccaacaacctgtccatgacctttgatggccgcctggtgaagaagatctgggtgcctgacatgttctttgtgcacagcaagaggagcttcatccatgacaccaccacagacaacgtgatgctgcgggtgcagccagatggcaaggtgctgtacagcctgcgggtgacagtgacagccatgtgcaacatggacttcagccgcttccccctggacacccagacctgcagcctggagattgagagctatgcctacacagaagatgacctgatgctgtactggaagaagggaaatgacagcctgaagacagatgagcgcatcagcctgagccagttcctgatccaggagttccacaccaccaccaagctggccttctacagcagcacaggctggtacaacagactctacatcaacttcaccctgcggcggcacatcttcttcttcctgctgcagacctacttccctgccaccctgatggtgatgctgtcctgggtgtccttctggattgacagaagagctgtgcctgcccgggtgcccctgggcatcaccaccgtgctgaccatgagcaccatcatcactggagtgaatgcctccatgccccgggtgtcctacatcaaggctgtggacatctacctgtgggtgtcctttgtgtttgtgttcctgtctgtgctggagtatgctgctgtgaactacctgaccaccgtgcaggagaggaaggagcagaagctgcgggagaagctgccctgcaccagcggcctgcccccacccaggacagccatgctggatggcaactacagtgatggagaggtgaatgacctggacaactacatgccagaaaatggagagaagccagacaggatgatggtgcagctgaccctggccagcgagaggagcagcccccagaggaagagccagaggagcagctatgtgtccatgagaattgacacccacgccatcgacaagtacagccgcatcatcttccctgctgcctacatcctcttcaacctgatctactggagcatcttctcctag

SEQ ID NO: 123498 - DNA, 1440 bp, Artificial Sequence
  derived and/or modified sequence
atgctggccgtgcccaacatgcggttcggcatcttcctgctgtggtgggggtgggtactcgccaccgagtctcgtatgcattggccagggcgcgaggtccacgaaatgagcaagaaaggtcggccgcaaagacagcgccgagaggttcatgaagatgcccataagcaggtgagccccatcctccgtaggtcacctgatatcacaaagagcccactcaccaaaagtgaacagctgctacgaattgatgatcatgatttctcgatgcgccctggattcggaggaccggcaatcccggtgggcgtggatgtccaggtggagagcctggatagcatttcggaggttgacatggactttaccatgacactgtaccttcggcactattggaaggatgaacgactgtctttccctagcacaaataatcttagtatgactttcgatggacggctcgtaaagaaaatttgggtccccgacatgttctttgtgcatagtaagagaagcttcattcatgatacaaccactgacaatgtgatgctacgggtccagcccgatggcaaggttttgtattcactaagggttacagtaaccgctatgtgtaatatggacttttccaggtttccgctagatactcagacctgctccctggagatcgagtcctacgcctacaccgaagatgacttaatgttgtactggaagaaggggaacgattccctgaaaactgatgagcgcattagcctgtcccagtttctgatccaagagttccacaccaccacaaaactggccttctactcctccacgggatggtataacaggctgtatatcaatttcacccttaggcggcacatattcttttttctgctgcaaacctactttccagctactctaatggttatgctgtcctgggtgtccttctggatcgacagacgggccgttccagccagggtgccattgggcataacaacggtactgactatgtctaccattataaccggggtgaatgcctctatgccaagggtgtcttatattaaggccgtggacatctatctgtgggtctcttttgtgttcgtcttcctgtccgtgctggagtatgccgctgtgaactatctcacaactgttcaagaaagaaaggagcagaaacttagggagaagctcccttgcacaagcgggctgcccccccctcgtactgccatgcttgacgggaattattcagatggggaggtgaatgatcttgataactacatgccagagaacggggagaagccagaccggatgatggtgcagttaacactagcctcagaacgaagctcaccccagaggaagagccaaaggagttcgtatgtctccatgcgtatagatacacacgctatcgacaaatacagccgcataatttttcccgccgcctacattttattcaatttaatctattggtcaattttttcgtag

SEQ ID NO: 123499 - DNA, 1440 bp, Artificial Sequence
  derived and/or modified sequence
atgcttgctgtgcctaacatgcgctttggaatctttctgctgtggtggggctgggtgttggctaccgaaagccgaatgcactggccgggacgggaggtgcatgaaatgtccaagaaagggaggccacagcgccaaaggagggaggtacacgaggacgctcataaacaagtgtccccaatcctacgcaggtcacccgatataactaagagcccactgaccaagtctgagcagctgttgcgcatcgacgatcacgatttttcaatgcgtccgggtttcggtggaccagcaattcccgtgggagtggacgtccaagtcgagtctttagatagcatttcggaggtcgatatggactttacaatgaccctgtatctccgccactactggaaggatgagcgtctcagcttcccatccaccaataatctgagcatgacttttgacggtcgactcgttaaaaaaatatgggtaccagatatgttcttcgttcattctaaacggtcgttcatacatgacaccactaccgataacgttatgctgagagttcagcccgacgggaaggtcctctactccctcagggtaacagtgacagcaatgtgcaacatggacttttcccgttttcctttagatacccagacttgctccctggagatagagagttacgcctacactgaggacgatctcatgttgtattggaagaagggcaatgatagtcttaagaccgatgagcggatttccctttcacagttcttaatccaggagttccacactaccacaaagcttgccttctatagttcgacgggttggtataatcgattgtatatcaactttaccttgcggaggcacatcttctttttcctgcttcaaacctacttccccgcaaccctcatggtcatgctgagctgggtgagcttttggattgaccgcagagccgttccagcaagggttcctctggggattacaaccgtgcttactatgtctacgattatcacaggcgtcaatgccagcatgccgagagtttcctatatcaaagcagtggatatctacctgtgggttagctttgtgttcgtgttcctgtccgtccttgagtacgctgctgttaactatttgaccactgttcaggaacgaaaggaacagaaattgcgcgaaaagctgccgtgcacctctgggctgcctccaccacgtacggctatgttagacgggaactattcagatggcgaagtcaatgacctggacaactacatgcccgaaaacggcgagaagccagaccggatgatggtgcagttgaccttggcctccgagcgctcctccccgcagagaaaatcgcagcggtctagctatgtttctatgaggattgatactcacgcgattgacaagtacagtcgtattatattccctgctgcttacatactgttcaacctcatctactggtccatttttagttag

SEQ ID NO: 123500 - DNA, 1440 bp, Artificial Sequence
  derived and/or modified sequence
atgctggccgtgcccaacatgagattcggcatcttcctgctgtggtggggctgggtgctggccaccgagagcagaatgcactggcccggcagagaggtgcacgagatgagcaagaagggcagaccccagagacagagaagagaggtgcacgaggacgcccacaagcaggtgagccccatcctgagaagaagccccgacatcaccaagagccccctgaccaagagcgagcagctgctgagaatcgacgaccacgacttcagcatgagacccggcttcggcggccccgccatccccgtgggcgtggacgtgcaggtggagagcctggacagcatcagcgaggtggacatggacttcaccatgaccctgtacctgagacactactggaaggacgagagactgagcttccccagcaccaacaacctgagcatgaccttcgacggcagactggtgaagaagatctgggtgcccgacatgttcttcgtgcacagcaagagaagcttcatccacgacaccaccaccgacaacgtgatgctgagagtgcagcccgacggcaaggtgctgtacagcctgagagtgaccgtgaccgccatgtgcaacatggacttcagcagattccccctggacacccagacctgcagcctggagatcgagagctacgcctacaccgaggacgacctgatgctgtactggaagaagggcaacgacagcctgaagaccgacgagagaatcagcctgagccagttcctgatccaggagttccacaccaccaccaagctggccttctacagcagcaccggctggtacaacagactgtacatcaacttcaccctgagaagacacatcttcttcttcctgctgcagacctacttccccgccaccctgatggtgatgctgagctgggtgagcttctggatcgacagaagagccgtgcccgccagagtgcccctgggcatcaccaccgtgctgaccatgagcaccatcatcaccggcgtgaacgccagcatgcccagagtgagctacatcaaggccgtggacatctacctgtgggtgagcttcgtgttcgtgttcctgagcgtgctggagtacgccgccgtgaactacctgaccaccgtgcaggagagaaaggagcagaagctgagagagaagctgccctgcaccagcggcctgcccccccccagaaccgccatgctggacggcaactacagcgacggcgaggtgaacgacctggacaactacatgcccgagaacggcgagaagcccgacagaatgatggtgcagctgaccctggccagcgagagaagcagcccccagagaaagagccagagaagcagctacgtgagcatgagaatcgacacccacgccatcgacaagtacagcagaatcatcttccccgccgcctacatcctgttcaacctgatctactggagcatcttcagctag

SEQ ID NO: 123501 - protein, 490 aa, Artificial Sequence
  derived and/or modified sequence
MVKPGGICSATGYWKAAFCLTDVHKMPYFTRLILFLFCLMVLVESRKPKRKRWTGQVEMPKPSHLYKKNLDVTKIRKGKPQQLLRVDEHDFSMRPAFGGPAIPVGVDVQVESLDSISEVDMDFTMTLYLRHYWKDERLAFSSASNKSMTFDGRLVKKIWVPDVFFVHSKRSFTHDTTTDNIMLRVFPDGHVLYSMRITVTAMCNMDFSHFPLDSQTCSLELESYAYTDEDLMLYWKNGDESLKTDEKISLSQFLIQKFHTTSRLAFYSSTGWYNRLYINFTLRRHIFFFLLQTYFPATLMVMLSWVSFWIDRRAVPARVSLGITTVLTMTTIITGVNASMPRVSYVKAVDIYLWVSFVFVFLSVLEYAAVNYLTTVQERKERKLREKFPCMCGMLHSKTMMLDGSYSESEANSLAGYPRSHILTEEERQDKIVVHLGLSGEANAARKKGLLKGQTGFRIFQNTHAIDKYSRLIFPASYIFFNLIYWSVFS

SEQ ID NO: 123502 - DNA, 1473 bp, Artificial Sequence
  derived and/or modified sequence
atggtcaagcccggaggaatctgcagtgctaccggctactggaaggcagcattttgtctcacggacgtccacaaaatgccgtacttcacgcgactcatcttatttctgttttgcctgatggtgctggtggagtcaagaaaaccaaagcgaaaacgctggaccgggcaggtagagatgccaaagcccagtcatctgtataagaagaacctcgacgtgaccaagattcgcaaagggaaaccccagcagctcctgcgcgtcgatgagcatgatttcagtatgaggcctgcttttggagggcccgccatccctgtgggcgtggacgtgcaagtagaaagtttagattcaatatctgaagtggatatggatttcacaatgacactctacctccgccactattggaaggacgagagactggcattctcatctgctagtaataagtcaatgacattcgatggtaggctggtgaaaaagatctgggtgccggatgtattcttcgttcattctaagcgttccttcacccatgacaccaccacggacaatattatgctcagggtcttccctgacggacacgtactgtattccatgcggataaccgtgacagcgatgtgtaatatggacttctcgcatttcccactggacagtcagacatgttcattagaactggagtcttatgcgtatactgacgaagacttaatgctttattggaaaaatggcgacgaatctctgaagaccgacgaaaaaatctccctgagccagttcctgattcaaaagtttcacacaacgtctcgtctggctttctacagttccacaggatggtacaacagattgtacatcaatttcaccctgcggcgacacatttttttttttctactgcagacttactttccagcaaccctgatggtaatgctctcctgggttagcttctggatagacagaagagccgtgccagctcgtgtcagtctgggaattactacggttctgactatgaccactataatcacgggggttaacgcgtcaatgccccgggtaagttacgtgaaggccgtggatatctacctctgggtgagcttcgtgtttgtgttccttagtgtgctcgagtacgcagcagtgaattatctcaccaccgtgcaggaaaggaaagaaaggaagctccgcgagaagttcccatgcatgtgtgggatgctgcacagcaaaacaatgatgttggatgggtcctactccgagtccgaagcaaattctctcgctgggtacccccggtcacacattttgacagaagaggagcggcaggacaaaattgtcgtgcatctcggcttaagcggcgaggccaatgccgcccgtaaaaagggattactgaaggggcagaccggttttcgtatctttcagaacacacacgcaatagacaaatactcccgcctgatcttcccagcaagttatattttttttaacctcatctactggtcggtgttcagctag

SEQ ID NO: 123503 - DNA, 1682 bp, Artificial Sequence
  derived and/or modified sequence
ggccagccttgccctcacagcccctcagagcagcccgtcaggaggcagcagatggatcaatggtcaagccaggggggatttgctctgccacaggctactggaaagcagctttttgcctcacagatgtccacaaaatgccttattttacaagactcattttgttcttgttttgcttgatggttctcgtggagagcagaaaacccaagaggaagcgatggacagggcaggtggaaatgcccaagccaagtcacttatataagaagaaccttgatgtgaccaagatccggaagggaaagcctcagcagcttctcagagtggacgagcacgacttcagcatgagacccgccttcggaggccctgccatcccggtgggcgtggacgtacaggtggagagcctggacagcatctccgaggtggacatggacttcactatgaccctgtacctgcggcattactggaaggatgagaggctagctttctccagcgccagcaacaagagcatgaccttcgatggccggctggtgaagaagatctgggtccctgatgtcttctttgttcactccaaaagatcgttcactcatgacaccaccactgacaacatcatgctgagggtgttcccagatggacacgtgctgtacagcatgaggattacggtcactgccatgtgcaacatggacttcagccactttcccctggactcccagacctgttctttggagctggagagctatgcctatacagatgaagatctaatgctgtactggaagaatggggatgaatccctaaaaacagatgagaagatctccttgtctcagtttctgattcagaaatttcacacaacttccaggctggccttctacagcagcactggctggtacaaccgtctgtacattaacttcacgttgcgtcgccacatcttcttcttcttgctccaaacatatttccctgccactctgatggtcatgctgtcctgggtgtccttctggatcgaccgcagagctgtgcctgccagagtttcactgggtatcacgacggtgctgaccatgaccaccatcatcacgggcgtgaatgcctccatgccgcgcgtctcctacgtcaaggccgtggacatctacctctgggtcagctttgtgttcgtgttcctctcggtgctggagtatgcggctgtcaactacctgaccaccgtgcaggagcgcaaggaacggaagctgcgggagaagttcccgtgcatgtgtggaatgcttcattcaaaaaccatgatgctggatggaagctacagtgagtctgaggccaacagcctggctgggtaccccagaagccatatcctgacagaagaagaaaggcaagacaaaatagtggtccacctgggcctgagtggtgaagccaacgctgccagaaagaaggggcttctgaagggccagacgggttttcgtatcttccagaatacccatgccattgacaaatactctaggttgatattccctgcctcctacatatttttcaacttaatttattggtcagtgttttcctaggggctccaaggctgttcctagaagagggcatagacatcgagggggcctggccagtcattgacagacggacttgttgaccacacgcccctcaccaaacaatgcagcagctactggaccaccctgagcagcactcatctctcagagaagccc

SEQ ID NO: 123504 - DNA, 1473 bp, Artificial Sequence
  derived and/or modified sequence
atggtgaagccaggcggcatctgcagcgccaccggctactggaaggccgccttctgcctgacagatgtgcacaagatgccctacttcaccaggctcatcctcttcctgttctgcctgatggtgctggtggagagcaggaagcccaagaggaagcgctggacaggccaggtggagatgcccaagcccagccacctgtacaagaagaacctggatgtgaccaagatcaggaagggcaagccccagcagctgctgcgggtggatgaacatgacttctccatgaggcctgcctttggaggccctgccatccctgtgggcgtggatgtgcaggtggagagcctggacagcatcagcgaggtggacatggacttcaccatgaccctgtacctgcggcactactggaaggatgagcggctggccttcagcagcgccagcaacaagtccatgacctttgatggccgcctggtgaagaagatctgggtgcctgatgtgttctttgtgcacagcaagaggagcttcacccatgacaccaccacagacaacatcatgctgcgggtcttcccagatggccacgtgctgtacagcatgaggatcaccgtgacagccatgtgcaacatggacttcagccacttccccctggacagccagacctgcagcctggagctggagagctatgcctacacagatgaggacctgatgctgtactggaagaatggagatgagagcctgaagacagatgagaagatcagcctgagccagttcctgatccagaagttccacaccaccagccggctggccttctacagcagcacaggctggtacaaccggctgtacatcaacttcaccctgcggcggcacatcttcttcttcctgctgcagacctacttccctgccaccctgatggtgatgctgtcctgggtgtccttctggattgaccggcgggctgtgcctgcccgggtgtccctgggcatcaccaccgtgctgaccatgaccaccatcatcaccggggtgaatgcctccatgccccgggtgtcctatgtgaaggctgtggacatctacctgtgggtgtcctttgtgtttgtgttcctgtctgtgctggagtatgctgctgtgaactacctgaccaccgtgcaggagaggaaggagaggaagctgcgggagaagttcccctgcatgtgtggcatgctgcacagcaagaccatgatgctggatggcagctacagcgagagcgaggccaacagcctggccggctaccccaggagccacatcctgacagaggaggagcggcaggacaagatcgtggtgcacctgggcctgtctggagaggccaatgctgccaggaagaagggcctgctgaagggccagacaggcttccgcatcttccagaacacccacgccatcgacaagtacagccgcctcatcttccctgccagctacatcttcttcaacctgatctactggagcgtcttctcctag

SEQ ID NO: 123505 - DNA, 1473 bp, Artificial Sequence
  derived and/or modified sequence
atggtgaagcccggcggcatctgcagcgccaccggctactggaaggcagcattctgccttaccgatgtgcacaaaatgccctattttacccgtctgattctgtttttgttctgcttgatggtgcttgtcgagagccgcaagcctaaacggaagcgttggactggtcaggtagagatgccaaaaccctcgcatctgtacaagaaaaatctcgatgttactaaaataagaaagggaaaaccacagcaactactccgcgtcgacgagcatgacttttcaatgaggcccgccttcggtggaccggcgatccctgtcggggtggacgtccaggtggagtcactggactccatcagcgaggtcgatatggattttactatgaccctttatctgcggcactactggaaggatgagcgcctcgctttcagctctgcgtcaaacaagtctatgacatttgacggacgactggttaagaagatctgggtccctgatgttttctttgtgcacagtaagcgatcgttcacgcacgacaccacgacagacaatattatgcttcgtgtttttccagatggccacgtgctctacagcatgcggattactgtgactgccatgtgcaacatggacttttctcattttcctttggactctcagacatgcagtctggaactggagagctacgcctacacggacgaggatctcatgctctactggaagaatggggacgaatccctgaagaccgacgaaaagatttccctgtcccaatttttaattcagaagtttcatacaacaagcaggttggcattttatagtagtacaggttggtataatcggttatacattaatttcacccttagacgccacatatttttttttctattacaaacttactttcccgcaacactcatggtgatgctgtcctgggtcagcttttggatagaccggcgagcagtgccggctcgcgtgtctcttgggattactacagtcttgacaatgaccacaatcatcacaggggtcaatgcttcgatgcccagagttagctatgttaaggccgtggacatctacctgtgggtttcttttgtgttcgtgtttctgtctgtcttagaatatgcagccgtgaactatctcaccaccgttcaggaacgaaaggagcgtaagcttagggagaagtttccatgtatgtgcgggatgttacacagcaagaccatgatgttagatggttcctatagcgaatccgaagctaactctctcgctggttaccctagaagccacatcctcaccgaggaagaacggcaagataagattgttgtgcatttgggcttatcaggcgaggccaatgcagccagaaagaagggactgctgaaaggacagaccggcttcaggatctttcagaatacgcacgccatcgataaatactcacggctcattttccccgcgagttacatcttcttcaacctaatttattggagtgtgttctcctag

SEQ ID NO: 123506 - DNA, 1473 bp, Artificial Sequence
  derived and/or modified sequence
atggtgaaacccggagggatttgctccgcaacgggatactggaaggctgcattttgcctgaccgatgtccacaagatgccctacttcacacgcttaatactcttccttttttgtcttatggtcttggtggagtcccgcaagcccaaacgaaaacgctggaccggacaggtggagatgcctaaaccatctcacctgtacaaaaaaaatctggatgtgactaagatccgcaaaggaaagccccagcagctacttcgggttgacgagcacgacttttccatgcgacccgcattcggaggccctgcgattcccgttggggttgatgtccaggtggagagtctcgattcaatatcagaggtcgacatggactttacaatgactctctatctgagacattactggaaggatgagaggctggccttctcctcagccagcaataaaagcatgacgtttgacggacggctcgtcaaaaagatatgggtcccggatgtattttttgtgcattcaaagagatcattcactcatgacactacgaccgacaatattatgctcagggtgtttcctgacggccatgtgctttacagcatgcgcatcacagtgactgccatgtgtaatatggatttcagtcattttccactggattcacaaacatgctcactcgaactcgagagctatgcttacacggacgaagatctgatgctgtactggaagaacggtgatgagtctttgaagaccgacgaaaagatatccctgtcacaatttctaatacagaagttccatacaacatctcgactggccttctacagttccactggctggtataatcgactctatataaatttcacattgaggcgccacattttctttttcctgcttcaaacctatttccccgctactcttatggtcatgctatcgtgggtgtcattttggatcgataggagagctgtcccagccagggtatctctggggatcacaaccgtcctgacaatgaccacaataataaccggcgtgaacgcttctatgccccgtgtctcttacgtgaaggccgtggacatctacctatgggtctcattcgtgttcgtgtttctgagcgtccttgaatacgccgctgtcaactacttaactacggtgcaagaacgaaaagaaaggaagcttagagagaagtttccttgcatgtgcggtatgctgcattccaaaactatgatgttggacgggagctacagtgaatcagaagctaacagtcttgccggttatcctcgatcccatatcctcacagaggaggagcgccaagataaaattgttgtccacctaggactgtccggagaagcaaatgcagccaggaaaaaaggcttacttaagggtcagacggggttcaggatttttcagaacacccacgcaatcgacaagtacagccggcttatcttccctgcctcatatatttttttcaatcttatatattggagtgtgttttcttag

SEQ ID NO: 123507 - DNA, 1473 bp, Artificial Sequence
  derived and/or modified sequence
atggtgaagcccggcggcatctgcagcgccaccggctactggaaggccgccttctgcctgaccgacgtgcacaagatgccctacttcaccagactgatcctgttcctgttctgcctgatggtgctggtggagagcagaaagcccaagagaaagagatggaccggccaggtggagatgcccaagcccagccacctgtacaagaagaacctggacgtgaccaagatcagaaagggcaagccccagcagctgctgagagtggacgagcacgacttcagcatgagacccgccttcggcggccccgccatccccgtgggcgtggacgtgcaggtggagagcctggacagcatcagcgaggtggacatggacttcaccatgaccctgtacctgagacactactggaaggacgagagactggccttcagcagcgccagcaacaagagcatgaccttcgacggcagactggtgaagaagatctgggtgcccgacgtgttcttcgtgcacagcaagagaagcttcacccacgacaccaccaccgacaacatcatgctgagagtgttccccgacggccacgtgctgtacagcatgagaatcaccgtgaccgccatgtgcaacatggacttcagccacttccccctggacagccagacctgcagcctggagctggagagctacgcctacaccgacgaggacctgatgctgtactggaagaacggcgacgagagcctgaagaccgacgagaagatcagcctgagccagttcctgatccagaagttccacaccaccagcagactggccttctacagcagcaccggctggtacaacagactgtacatcaacttcaccctgagaagacacatcttcttcttcctgctgcagacctacttccccgccaccctgatggtgatgctgagctgggtgagcttctggatcgacagaagagccgtgcccgccagagtgagcctgggcatcaccaccgtgctgaccatgaccaccatcatcaccggcgtgaacgccagcatgcccagagtgagctacgtgaaggccgtggacatctacctgtgggtgagcttcgtgttcgtgttcctgagcgtgctggagtacgccgccgtgaactacctgaccaccgtgcaggagagaaaggagagaaagctgagagagaagttcccctgcatgtgcggcatgctgcacagcaagaccatgatgctggacggcagctacagcgagagcgaggccaacagcctggccggctaccccagaagccacatcctgaccgaggaggagagacaggacaagatcgtggtgcacctgggcctgagcggcgaggccaacgccgccagaaagaagggcctgctgaagggccagaccggcttcagaatcttccagaacacccacgccatcgacaagtacagcagactgatcttccccgccagctacatcttcttcaacctgatctactggagcgtgttcagctag

SEQ ID NO: 123508 - protein, 434 aa, Artificial Sequence
  derived and/or modified sequence
MFNSKFGSIPKFYVRAPGRVNIIGEHIDYCGYSVLPMAVEQDVLIAVEPVKTYALQLANTNPLYPDFSTSANNIQIDKTKPLWHNYFLCGLKGIQEHFGLSNLTGMNCLVDGNIPPSSGLSSSSALVCCAGLVTLTVLGRNLSKVELAEICAKSERYIGTEGGGMDQSISFLAEEGTAKLIEFSPLRATDVKLPSGAVFVIANSCVEMNKAATSHFNIRVMECRLAAKLLAKYKSLQWDKVLRLEEVQAKLGISLEEMLLVTEDALHPEPYNPEEICRCLGISLEELRTQILSPNTQDVLIFKLYQRAKHVYSEAARVLQFKKICEEAPENMVQLLGELMNQSHMSCRDMYECSCPELDQLVDICRKFGAQGSRLTGAGWGGCTVSMVPADKLPSFLANVHKAYYQRSDGSLAPEKQSLFATKPGGGALVLLEA

SEQ ID NO: 123509 - protein, 207 aa, Artificial Sequence
  derived and/or modified sequence
MNCLVDGNIPPSSGLSSSSALVCCAGLVTLTVLGRNLSKVELAEICAKSERYIGTEGGGMDQSISFLAEEGTAKLIEFSPLRATDVKLPSGAVFVIANSCVEMNKAATSHFNIRVMECRLAAKLLAKYKSLQWDKVLRLEEVQAKLGISLEEMLLVTEDALHPEPYNPEEICRCLGISLEELRTQILSPNTQDDGVVLYRPGWSATA

SEQ ID NO: 123510 - protein, 458 aa, Artificial Sequence
  derived and/or modified sequence
MATESPATRRVQVAEHPRLLKLKEMFNSKFGSIPKFYVRAPGRVNIIGEHIDYCGYSVLPMAVEQDVLIAVEPVKTYALQLANTNPLYPDFSTSANNIQIDKTKPLWHNYFLCGLKGIQEHFGLSNLTGMNCLVDGNIPPSSGLSSSSALVCCAGLVTLTVLGRNLSKVELAEICAKSERYIGTEGGGMDQSISFLAEEGTAKLIEFSPLRATDVKLPSGAVFVIANSCVEMNKAATSHFNIRVMECRLAAKLLAKYKSLQWDKVLRLEEVQAKLGISLEEMLLVTEDALHPEPYNPEEICRCLGISLEELRTQILSPNTQDVLIFKLYQRAKHVYSEAARVLQFKKICEEAPENMVQLLGELMNQSHMSCRDMYECSCPELDQLVDICRKFGAQGSRLTGAGWGGCTVSMVPADKLPSFLANVHKAYYQRSDGSLAPEKQSLFATKPGGGALVLLEA

SEQ ID NO: 123511 - DNA, 2043 bp, Artificial Sequence
  derived and/or modified sequence
tagtcagcttcgcacgtgctctgcgcaggggctcctgcgaggccctagtccctccctgggagctaagagcaggacggaggctgtacctgactgctgcttggagggaaccctggctgagtccagggaggaggagccagaggaggggccgattggaagcagccacctcagcgaagctgcaggatttccgcagggcgggagctgtttatctcccggaagaaaacggctcctgtcacagaagtctcgtgattgctctgggagctttgcttagacacttgaaactacaggagaaagaaggatctagcgaaatatggctacagagagccctgctacgcgtcgggtccaggtggcagaacatcctaggttactgaagctaaaggagatgtttaactccaagtttggatctattcccaagttttatgttcgagcaccaggaagagtcaacataataggagagcatatagattattgtggatattctgttcttcctatggctgtagaacaagatgtgctaatagctgtagaacctgtgaaaacgtacgctctccaactggccaatacaaatcccttgtatccggacttcagtactagtgctaataacatccagattgataaaaccaagcctttgtggcacaactatttcttatgtggacttaaaggaattcaggaacactttggtcttagtaacctgactggaatgaactgcctggtagatggaaatatcccaccaagttctggcctctccagctccagtgctttggtctgttgtgctggcttggtgacgctcacagtgctgggaaggaatctatccaaggtggaacttgcagaaatctgtgccaagagtgagcgttacattggcactgaaggaggaggcatggaccagtctatatcatttcttgcagaagaaggaactgccaagttgatagaatttagtcctctgagggcaaccgatgtaaaactcccaagtggagcagtgtttgtgattgccaacagttgtgtggagatgaataaggcagcaacttcccatttcaatatcagggtgatggagtgtcggctggctgcgaagctcctggctaaatacaaaagcttgcaatgggacaaagtactgaggctggaggaggtgcaggctaaactagggattagtctagaagaaatgctgttggtcacagaagatgcccttcatcctgaaccctataaccctgaggagatctgcaggtgtctgggaattagcctggaggaactccgaacccaaatcctgagtccaaacactcaagatgtgctcatcttcaaactctatcagcgggcaaagcatgtgtacagcgaggctgcgcgagtgctccagtttaagaagatatgtgaagaagcacctgaaaacatggtccagctgctgggagagttgatgaaccagagccacatgagctgccgggacatgtatgagtgcagctgccccgagctggatcagctggtggacatctgtcggaagtttggggctcaagggtcacgacttactggagcaggatggggaggctgcacagtatcaatggtacctgcggacaagctgcccagctttctagcaaatgtgcacaaagcttattaccagaggagtgatggaagcttagcaccggagaagcaaagtttgtttgctaccaaacctggaggtggggctttggttttgcttgaggcctgaaaaaatgtaaaaagtctgagagaaactacttagggcacttaggaattggcaggactttctgtgccacagtaaattaatcttccttctgttttgtattatgatgaacggttgctattatatcaagatatattttcaaagaaatggttgaaagctctctatgcttcataatgattctttttccatcttaaaatatggttttactattaagagccaagatcatgcttggacagatcttttaagaataacttactgagatttattgatttgaagattttaaagatgaatggtaaaacacactcttaatactgattacatggattggacttgaattaaatatattgttacaattaaactgatac

SEQ ID NO: 123512 - DNA, 1377 bp, Artificial Sequence
  derived and/or modified sequence
atggccactgagtctcctgccactcgacgcgttcaggttgcagagcatccccggttattgaaactaaaggagatgtttaactctaaatttggctcaatcccaaaattctatgtgagagccccagggcgggtgaatataatcggcgagcacatcgattactgcggttattcagtcttgcccatggctgtcgaacaggatgtcctgatagccgtggaaccagttaagacatatgccttgcaactggctaatactaacccactgtatcccgacttcagtaccagcgccaataatattcagatcgataagactaagccgttgtggcacaactacttcttgtgcggtctcaagggcattcaggagcattttggtttgtctaacttaacaggaatgaattgccttgttgacggaaatattcctccctcctctgggctgtctagctctagcgccctcgtgtgttgtgccggtctggtgaccctgacggtgctcgggagaaatcttagtaaagtggagctggcagagatttgtgctaagagcgaaagatatattggcacagagggtggcggcatggaccagtccatctcatttctggctgaagaaggcactgcaaagctgatcgaattctccccgttaagagccactgacgtgaagcttcccagtggagctgtgtttgttatcgctaactcatgcgtggagatgaacaaggcagctacctcccatttcaatatcagggtcatggagtgtcggctcgctgcgaagttattggcaaaatacaagtccttgcagtgggataaagttctacggctggaggaggtccaggcaaaattggggattagcctggaagaaatgctgctcgttaccgaggacgcactccatcctgagccctacaatccagaggagatatgccgctgcctgggcattagcttagaagagttgcggacccagattttgagcccaaacacccaggatgtactcatcttcaagctgtaccagagggcaaaacacgtgtattctgaagccgccagagtgctacagttcaagaaaatttgcgaggaagccccagagaatatggtgcagctgctgggcgaactgatgaatcaatcacatatgtcttgtagggatatgtatgaatgctcttgtcccgagctcgatcagttggtggatatttgccggaagttcggtgcacaagggtcgcggcttacaggtgctgggtggggcgggtgcaccgtaagtatggtcccagccgacaaactgcctagcttcctggctaacgtgcacaaggcctattatcagcggtctgacggcagcctggccccagagaagcagtccctgttcgcaaccaagcctgggggcggcgcgctggtcctgctggaggcatag

SEQ ID NO: 123513 - DNA, 1377 bp, Artificial Sequence
  derived and/or modified sequence
atggccacagagagccctgccaccaggagagtgcaggtggccgagcacccccggctgctgaagctgaaggagatgttcaacagcaagtttggcagcatccccaagttctacgtgcgggcccctggccgggtgaacatcattggagagcacatcgactactgcggctacagcgtgctgcccatggctgtggagcaggatgtgctgattgctgtggagcctgtgaagacctacgccctgcagctggccaacaccaaccccctgtacccagacttcagcaccagcgccaacaacatccagattgacaagaccaagcccctgtggcacaactacttcctgtgtggcctgaagggcatccaggagcacttcggcctgagcaacctgaccggcatgaactgcctggtggatggcaacatcccccccagcagcggcctgagcagcagcagcgccctggtgtgctgtgccggcctggtgaccctgactgtgctgggcaggaacctgagcaaggtggagctggccgagatctgtgccaagtctgagcgctacatcggcacagagggcggcggcatggaccagagcatctccttcctggccgaggagggcacagccaagctgattgagttcagccccctgcgggccacagatgtgaagctgcccagcggggctgtgtttgtgattgccaacagctgtgtggagatgaacaaggccgccaccagccacttcaacatccgggtgatggagtgccgcctggccgccaagctgctggccaagtacaagagcctgcagtgggacaaggtgctgcggctggaggaggtgcaggccaagctgggcatcagcctggaggagatgctgctggtgacagaagatgccctgcaccctgagccctacaaccctgaggagatctgccgctgcctgggcatcagcctggaggagctgcggacccagatcctgagccccaacacccaggatgtgctgatcttcaagctgtaccagagggccaagcacgtgtacagcgaggccgcccgggtgctgcagttcaagaagatctgtgaggaggcccctgagaacatggtgcagctgctgggggagctgatgaaccagagccacatgagctgccgggacatgtatgagtgcagctgcccagagctggaccagctggtggacatctgcaggaagtttggagcccagggcagccggctgaccggggccggctggggcggctgcaccgtgtccatggtgcctgctgacaagctgcccagcttcctggccaacgtgcacaaggcctactaccagaggagtgatggcagcctggcccctgagaagcagagcctgtttgccaccaagccaggcggcggggccctggtgctgctggaggcctag

SEQ ID NO: 123514 - DNA, 1377 bp, Artificial Sequence
  derived and/or modified sequence
atggccaccgagagccccgccacccggcgggtgcaggtggccgagcaccctcgcctcctgaagctgaaagagatgtttaattcaaagtttggttccatcccaaagttttacgttcgggcccctggtcgagtgaatatcatcggggagcacattgattattgtggatactccgttctgccaatggctgttgaacaggacgtgctgattgcagtggaacctgtgaaaacatatgccttgcagctcgctaatacaaatccactctatcccgattttagcacatccgctaataacatacagattgacaaaacaaagcccttgtggcacaactatttcttgtgtgggctgaagggaatccaggaacatttcggcctaagtaatctgaccgggatgaactgtttagtggacgggaacattccaccatcgtccgggctgagctcatcatcagctctggtgtgctgcgcaggattagtgacgttaaccgttctgggccgcaacctcagcaaagttgagctcgcagagatttgcgctaaatccgaaagatatataggtacggagggaggggggatggaccaatctatctcattcttggcagaggaagggaccgctaaattgatagagtttagccccctacgggccaccgacgtgaaactgccctcaggagccgtgttcgtgatcgcaaattcctgcgttgagatgaacaaggcagccacctcccactttaacatcagggtgatggagtgcaggctcgcggctaagctcctggccaagtacaaatcactgcagtgggacaaggtactgcgcctggaagaagtgcaggccaagttgggcatttctctagaggagatgctccttgtgacagaagacgctcttcatcccgagccatataaccccgaggaaatttgtagatgccttgggatttccttggaagagcttaggacccagatactgtcacccaatacccaggatgttctgatttttaaactctatcaaagggccaagcatgtgtattcggaggctgcacgggtgctccagttcaagaagatctgcgaagaagctcctgaaaatatggtgcagctcctgggggaactgatgaaccaatctcatatgtcctgccgcgatatgtatgaatgctcatgtcctgagttagaccaactggtggacatatgccgcaaatttggggctcagggaagtaggttaacaggagccggctggggcggatgtactgtttcgatggttccagctgacaagctgcccagcttcctggccaacgtgcataaggcctactaccagaggagtgatggaagtctcgcgcctgagaaacagtcattgttcgccaccaagcctggtggcggtgcccttgtcctcttagaagcgtag

SEQ ID NO: 123515 - DNA, 1377 bp, Artificial Sequence
  derived and/or modified sequence
atggccacagagagtcccgcaactcgcagggtgcaggtggcagagcaccccagactgctaaaattgaaggagatgttcaacagcaaattcggctccattccaaagttttatgttagggctcccggtagagtgaacatcatcggggagcacatcgactattgtggatatagtgtgttacccatggcagtggagcaagatgtactgattgcagttgagccagttaagacctacgctttgcagctggccaatacgaaccctctgtatccggacttctctaccagtgctaacaacatccagattgacaaaacaaaaccattgtggcacaactatttcctgtgtggtctcaaaggcattcaggaacactttgggctgagcaacttgaccggcatgaactgcctggtcgatggtaacattccccctagctcaggcctttctagctcaagcgccctggtctgttgcgcaggactcgtcaccttaacagttctggggagaaacctgagcaaggttgagctggcagagatttgtgccaaatccgagaggtatatcggcacggaagggggaggaatggaccagtctatctcttttctggctgaggaaggaaccgccaagctgatcgaattttccccacttagggccacagatgtgaaattgccatcaggcgctgtctttgtgattgccaacagttgcgtggaaatgaataaggccgcaacctctcattttaatattcgagttatggagtgtcgactggctgctaaactgctcgccaagtataaaagtcttcaatgggacaaagtgcttagactggaggaagtccaagcaaaactaggcatatccttagaagagatgctcttggtgactgaagatgcactgcatcctgaaccgtacaaccccgaagaaatatgccgatgtctgggcatctccttagaggaactgaggactcagattttatctccaaatacacaggacgtcttgatttttaaactgtatcagcgggctaaacacgtttactccgaagctgcgagggtcctccagtttaaaaaaatttgcgaggaggcacctgaaaatatggtccagctgctcggtgagctaatgaatcagtcacatatgagttgtcgagatatgtatgagtgcagctgtcccgagctggaccaacttgttgatatttgccgcaaattcggcgcacagggtagccgcttgacaggcgctggatggggtggctgtactgtgtcgatggttcctgcggataaactgccttcatttctcgcaaatgtgcacaaagcctactaccaaagatcagatgggagcctagccccagagaagcagagcctgttcgccacaaagcctggagggggtgcactggtattgctggaggcatag

SEQ ID NO: 123516 - DNA, 1377 bp, Artificial Sequence
  derived and/or modified sequence
atggccaccgagagccccgccaccagaagagtgcaggtggccgagcaccccagactgctgaagctgaaggagatgttcaacagcaagttcggcagcatccccaagttctacgtgagagcccccggcagagtgaacatcatcggcgagcacatcgactactgcggctacagcgtgctgcccatggccgtggagcaggacgtgctgatcgccgtggagcccgtgaagacctacgccctgcagctggccaacaccaaccccctgtaccccgacttcagcaccagcgccaacaacatccagatcgacaagaccaagcccctgtggcacaactacttcctgtgcggcctgaagggcatccaggagcacttcggcctgagcaacctgaccggcatgaactgcctggtggacggcaacatcccccccagcagcggcctgagcagcagcagcgccctggtgtgctgcgccggcctggtgaccctgaccgtgctgggcagaaacctgagcaaggtggagctggccgagatctgcgccaagagcgagagatacatcggcaccgagggcggcggcatggaccagagcatcagcttcctggccgaggagggcaccgccaagctgatcgagttcagccccctgagagccaccgacgtgaagctgcccagcggcgccgtgttcgtgatcgccaacagctgcgtggagatgaacaaggccgccaccagccacttcaacatcagagtgatggagtgcagactggccgccaagctgctggccaagtacaagagcctgcagtgggacaaggtgctgagactggaggaggtgcaggccaagctgggcatcagcctggaggagatgctgctggtgaccgaggacgccctgcaccccgagccctacaaccccgaggagatctgcagatgcctgggcatcagcctggaggagctgagaacccagatcctgagccccaacacccaggacgtgctgatcttcaagctgtaccagagagccaagcacgtgtacagcgaggccgccagagtgctgcagttcaagaagatctgcgaggaggcccccgagaacatggtgcagctgctgggcgagctgatgaaccagagccacatgagctgcagagacatgtacgagtgcagctgccccgagctggaccagctggtggacatctgcagaaagttcggcgcccagggcagcagactgaccggcgccggctggggcggctgcaccgtgagcatggtgcccgccgacaagctgcccagcttcctggccaacgtgcacaaggcctactaccagagaagcgacggcagcctggcccccgagaagcagagcctgttcgccaccaagcccggcggcggcgccctggtgctgctggaggcctag

SEQ ID NO: 123517 - protein, 238 aa, Artificial Sequence
  derived and/or modified sequence
MLCCMRRTKQVEKNDDDQKIEQDGIKPEDKAHKAATKIQASFRGHITRKKLKGEKKDDVQAAEAEANKKDEAPVADGVEKKGEGTTTAEAAPATGSKPDEPGKAGETPSEEKKGEGDAATEQAAPQAPASSEEKAGSAETESATKASTDNSPSSKAEDAPAKEEPKQADVPAAVTAAAATTPAAEDAAAKATAQPPTETGESSQAEENIEAVDETKPKESARQDEGKEEEPEADQEHA

SEQ ID NO: 123518 - DNA, 717 bp, Artificial Sequence
  derived and/or modified sequence
atgctctgctgtatgcggagaactaaacaggtggagaaaaacgacgacgaccagaagatagagcaggatggcatcaaacccgaagataaggcccacaaggctgctaccaagatccaggcgagcttcaggggacacattaccagaaaaaagctgaaaggcgaaaagaaagacgacgtccaagctgcggaggccgaagccaacaaaaaggatgaagccccggtcgccgacggcgtggagaagaaaggggaaggcacaactacggctgaggccgctccagccactggcagtaaacctgacgagcccggcaaggccggcgagactcctagtgaggagaagaagggagagggcgatgctgcaactgagcaggccgccccacaggctcctgctagcagcgaagaaaaggcgggctctgcagaaacagagtcagcaactaaggcttcgacggataattcacccagttcaaaagcggaagatgcccccgcgaaagaggagcctaaacaagctgacgtccctgctgctgtgaccgcagctgccgccaccacccccgccgcagaggacgccgccgccaaagcaaccgctcagccacctactgagacaggtgagagcagtcaggccgaggagaacatcgaggccgtcgacgaaactaagcccaaggagtctgccagacaggacgaagggaaggaggaggagcctgaagctgatcaggaacacgcctag

SEQ ID NO: 123519 - DNA, 1691 bp, Artificial Sequence
  derived and/or modified sequence
tccgagaaagagacggagagagagggaagaaaaagacagatagatagatattggggggaaggagaaaaaaggagaagagagggaagagaggacagcggagagagagcaccagagagagagggagagagagagagagcgctagagagagggagcgagcatgtgcgatgagcaatagctgtggaccttacagttgctgctaactgccctggtgtgtgtgagggagagagagggagggagggagagagagcgcgctagcgcgagagagcgagtgagcaagcgagcagaaaagaggtggagagggggggaataagaaagagagagaaggaaaggagagaaggcaggaagaaggcaagggacgagacaaccatgctgtgctgtatgagaagaaccaaacaggttgaaaaaaatgatgacgaccaaaagattgaacaagatggtatcaaaccagaagataaagctcataaggccgcaaccaaaattcaggctagcttccgtggacacataacaaggaaaaagctcaaaggagagaagaaggatgatgtccaagctgctgaggctgaagctaataagaaggatgaagcccctgttgccgatggggtggagaagaagggagaaggcaccactactgccgaagcagccccagccactggctccaagcctgatgagcccggcaaagcaggagaaactccttccgaggagaagaagggggagggtgatgctgccacagagcaggcagccccccaggctcctgcatcctcagaggagaaggccggctcagctgagacagaaagtgccactaaagcttccactgataactcgccgtcctccaaggctgaagatgccccagccaaggaggagcctaaacaagccgatgtgcctgctgctgtcactgctgctgctgccaccacccctgccgcagaggatgctgctgccaaggcaacagcccagcctccaacggagactggggagagcagccaagctgaagagaacatagaagctgtagatgaaaccaaacctaaggaaagtgcccggcaggacgagggtaaagaagaggaacctgaggctgaccaagaacatgcctgaactctaagaaatggctttccacatccccaccctcccctctcctgagcctgtctctccctaccctcttctcagctccactctgaagtcccttcctgtcctgctcacgtctgtgagtctgtcctttcccacccactagccctctttctctctgtgtggcaaacatttaaaaaaaaaaaaaaaaagcaggaaagatcccaagtcaaacagtgtggcttaaacattttttgtttcttggtgttgttatggcaagtttttggtaatgatgattcaatcattttgggaaattcttgcactgtatccaagttatttgatctggtgcgtgtggccctgtgggagtccactttcctctctctctctctctctgttccaagtgtgtgtgcaatgttccgttcatctgaggagtccaaaatatcgagtgaattcaaaatcatttttgttttcctccttttcaatgtgatggaatgaacaaaaaggaaaaaattcaaaaaacccagtttgttttaaaaataaataaataaagcaaatgtgccaattagcgtaaacttgcggctctaaggctcctttttcaacccgaatattaataaatcatgagagtaatcaaggtccaa

SEQ ID NO: 123520 - DNA, 717 bp, Artificial Sequence
  derived and/or modified sequence
atgctgtgctgcatgaggaggaccaagcaggtggagaagaatgatgatgaccagaagattgagcaggacggcatcaagccagaggacaaggcccacaaggccgccaccaagatccaggccagcttccggggccacatcaccaggaagaagctgaagggggagaagaaggatgatgtgcaggccgctgaggccgaggccaacaagaaggatgaggcccctgtggctgatggagtggagaagaagggggagggcaccaccacagctgaggccgccccagccaccggcagcaagccagatgagcccgggaaggccggggagaccccatctgaggagaagaagggggagggagatgctgccacagagcaggccgccccccaggccccagccagcagcgaggagaaggccggcagcgctgagacagagagcgccaccaaggccagcacagacaacagccccagcagcaaggcagaagatgccccagccaaggaggagcccaagcaggctgatgtgcctgctgctgtgacagctgctgctgccaccaccccagctgctgaagatgctgctgccaaggccacagcccagcccccaacagaaacaggagagagcagccaggccgaggagaacattgaagctgtggatgagaccaagcccaaggagagcgcccggcaggatgagggcaaggaggaggagcctgaggccgaccaggagcacgcctag

SEQ ID NO: 123521 - DNA, 717 bp, Artificial Sequence
  derived and/or modified sequence
atgctgtgctgcatgcggcggaccaagcaggtggagaagaacgacgacgatcagaagatagagcaagacgggatcaagcctgaggacaaagcacataaagccgcaaccaagatacaggcatcatttcgaggccacattaccaggaagaaactgaaaggcgaaaagaaagacgacgtgcaggccgcggaggccgaggctaataagaaggatgaggcccctgtggcagacggtgtggagaagaagggcgagggaaccactactgccgaagcagcgcctgctactggctctaagcctgacgagcccggcaaggcaggcgagaccccttccgaagagaagaaaggggagggagatgcggccaccgaacaggcagctccccaagctccggcctcaagtgaagagaaagcaggctctgccgagactgagtccgcaacgaaagcatccacagacaatagcccgagttccaaggctgaagatgcccctgcaaaggaggaacctaaacaggctgacgtgcctgccgccgtgacggccgctgctgctaccactccggctgccgaggatgcagcggctaaagccacagcccagcctccaaccgaaactggtgaaagtagccaagccgaggaaaacatcgaagcggtggacgagaccaagcccaaagaaagcgcaagacaggatgagggcaaggaggaggagcctgaggcagatcaagagcatgcatag

SEQ ID NO: 123522 - DNA, 717 bp, Artificial Sequence
  derived and/or modified sequence
atgctgtgttgtatgagaagaacgaagcaggtggaaaaaaatgacgacgaccaaaaaattgaacaggacggaattaaaccggaggataaggcccacaaagccgcaactaaaattcaggcttccttcagggggcatattacgcgaaagaaactgaagggcgagaagaaagatgacgtccaggcagcagaagctgaggcaaacaaaaaagacgaggcccctgtcgccgacggcgtggaaaagaaaggggaaggaacgaccaccgcggaggccgctcctgcaacaggtagcaaacccgatgagccaggcaaggctggcgagactcctagcgaagagaagaaaggcgagggagatgccgcaactgagcaggcagccccacaggccccagcttcctccgaggagaaagccggtagcgctgaaaccgaaagtgcgactaaagcttctactgacaattctccgtcaagcaaggcggaggatgcacccgctaaagaggagcccaaacaggcggatgtgcctgcagccgttacagcggcagctgccactaccccagccgctgaggatgcagcagcaaaggcgacagcccagccacctaccgagacaggcgaatcttcccaggctgaggaaaacatcgaggccgtggacgaaactaagccgaaggaatccgccagacaggacgagggcaaggaggaagagccagaggccgatcaggagcacgcctag

SEQ ID NO: 123523 - DNA, 717 bp, Artificial Sequence
  derived and/or modified sequence
atgctgtgctgcatgagaagaaccaagcaggtggagaagaacgacgacgaccagaagatcgagcaggacggcatcaagcccgaggacaaggcccacaaggccgccaccaagatccaggccagcttcagaggccacatcaccagaaagaagctgaagggcgagaagaaggacgacgtgcaggccgccgaggccgaggccaacaagaaggacgaggcccccgtggccgacggcgtggagaagaagggcgagggcaccaccaccgccgaggccgcccccgccaccggcagcaagcccgacgagcccggcaaggccggcgagacccccagcgaggagaagaagggcgagggcgacgccgccaccgagcaggccgccccccaggcccccgccagcagcgaggagaaggccggcagcgccgagaccgagagcgccaccaaggccagcaccgacaacagccccagcagcaaggccgaggacgcccccgccaaggaggagcccaagcaggccgacgtgcccgccgccgtgaccgccgccgccgccaccacccccgccgccgaggacgccgccgccaaggccaccgcccagccccccaccgagaccggcgagagcagccaggccgaggagaacatcgaggccgtggacgagaccaagcccaaggagagcgccagacaggacgagggcaaggaggaggagcccgaggccgaccaggagcacgcctag

SEQ ID NO: 123524 - protein, 739 aa, Artificial Sequence
  derived and/or modified sequence
MPSPRPVLLRGARAALLLLLPPRLLARPSLLLRRSLSAASCPPISLPAAASRSSMDGAGAEEVLAPLRLAVRQQGDLVRKLKEDKAPQVDVDKAVAELKARKRVLEAKELALQPKDDIVDRAKMEDTLKRRFFYDQAFAIYGGVSGLYDFGPVGCALKNNIIQTWRQHFIQEEQILEIDCTMLTPEPVLKTSGHVDKFADFMVKDVKNGECFRADHLLKAHLQKLMSDKKCSVEKKSEMESVLAQLDNYGQQELADLFVNYNVKSPITGNDLSPPVSFNLMFKTFIGPGGNMPGYLRPETAQGIFLNFKRLLEFNQGKLPFAAAQIGNSFRNEISPRSGLIRVREFTMAEIEHFVDPSEKDHPKFQNVADLHLYLYSAKAQVSGQSARKMRLGDAVEQGVINNTVLGYFIGRIYLYLTKVGISPDKLRFRQHMENEMAHYACDCWDAESKTSYGWIEIVGCADRSCYDLSCHARATKVPLVAEKPLKEPKTVNVVQFEPSKGAIGKAYKKDAKLVMEYLAICDECYITEMEMLLNEKGEFTIETEGKTFQLTKDMINVKRFQKTLYVEEVVPNVIEPSFGLGRIMYTVFEHTFHVREGDEQRTFFSFPAVVAPFKCSVLPLSQNQEFMPFVKELSEALTRHGVSHKVDDSSGSIGRRYARTDEIGVAFGVTIDFDTVNKTPHTATLRDRDSMRQIRAEISELPSIVQDLANGNITWADVEARYPLFEGQETGKKETIEE

SEQ ID NO: 123525 - DNA, 2220 bp, Artificial Sequence
  derived and/or modified sequence
atgccttcgccaagaccagttctgctgcggggcgctcgcgcggccctgctcctgctgcttcctccccgactgctggcccgtcccagcctgctcctgagaagaagcctgtccgccgcctcctgcccacctatctccctgcctgcagctgccagcagatcaagcatggacggggcaggggcggaggaggtcctcgcaccactgaggcttgccgtccgacaacagggagatctcgtaagaaagttgaaggaggataaggcacctcaagtggatgtcgacaaagcagtggctgaactgaaggcccgaaagcgagtgctcgaggccaaagaactcgcccttcagcccaaggacgacatagtagaccgggcgaagatggaggataccctgaaaagacggttcttctatgatcaagccttcgccatctatggcggagtgtcgggattgtacgacttcggcccagtcggatgtgccctaaaaaataacatcattcaaacctggcggcaacattttatccaggaagaacagatcttagaaatagattgcacaatgctgacgccagaacccgttctcaagacttccggacacgtggataagttcgccgattttatggtgaaagacgtgaagaacggcgaatgtttccgggctgaccacttgctgaaggcccatctgcagaagctgatgtccgataagaagtgcagcgtggagaaaaaatccgagatggaaagtgtgctcgctcagctcgacaattacggccaacaggagctagccgacttattcgttaactataatgtaaaaagtcctatcaccgggaatgatctatccccaccggtttcttttaatttgatgtttaagaccttcatcgggccaggaggtaacatgccgggctacctccgcccagagacagctcaaggtatttttctgaacttcaaacgactgttggagtttaaccagggcaagttgccctttgccgctgcgcaaatcggcaactcatttagaaatgaaatcagtccacgatcagggctaatcagagttagagaattcaccatggccgagatcgaacactttgttgacccgagtgaaaaagatcatcccaaattccagaacgttgccgacttgcacctctatctgtatagtgccaaagcgcaggtttccggacagtcggccagaaagatgcgcctgggcgacgctgtggaacagggcgtcatcaacaatacagtacttggatatttcattggaagaatttatctgtacctgacgaaagtaggtatcagtccggataagctgagattcagacaacacatggaaaacgagatggcccattacgcatgcgattgttgggacgccgaatcaaaaacatcctacgggtggatcgaaatagtcgggtgcgccgatagatcctgttacgacctcagctgccatgcccgggcgacaaaagtgccactcgtggcagagaagcccctgaaagagccaaagacagtgaatgtcgttcagtttgagcccagcaaaggcgccattggaaaagcttataaaaaggatgccaaactagtgatggagtatttagcaatttgtgacgaatgctacattacagagatggagatgctgctgaatgagaagggcgaattcacaattgagaccgagggcaaaacattccagctgaccaaggacatgatcaacgttaaacgctttcaaaagacgctgtatgtggaagaagttgttccaaacgttatagagcccagcttcggacttggtcgtatcatgtacacagtctttgagcatacattccacgtccgagagggggatgaacagcggacgttcttttccttccctgccgtcgttgctccttttaaatgcagcgttctacccctgtcccagaatcaggaattcatgccgtttgtgaaagaactctcagaggcactgacccggcatggcgtttcccataaggtcgacgatagttctggatcaatcggcagacggtatgcacggaccgatgaaattggggtggccttcggagtgacaatcgatttcgatacggtgaacaaaaccccccatactgcaactctgcgagacagagactccatgcggcagattcgtgcagagatcagtgaattgccatctatagtccaggaccttgctaacggtaacatcacatgggcagacgtcgaggcccgatatcctctatttgaagggcaggagacgggaaagaaagagactatcgaagagtag

SEQ ID NO: 123526 - DNA, 2634 bp, Artificial Sequence
  derived and/or modified sequence
gcaaatctgttcgctcgcaaccctacctacctctctcccgaaccggagaaaaccttcggcggggtccttccgggttttgtgtcgaatctgcggcggcgacccggcgccgcgtcacgcggtggtgaatgtgcggcagcacgcgcgccgcgtcgtttacgcggcgatttcatcatgctccgagccgggcggcgcgcgccgcttccgtcgccaccctctctggacagcccagggccgcaggctcatgccctctccgcgtccagtgctgcttagaggtgctcgcgccgctctgctgctgctgctgccgccccggctcttagcccgaccctcgctcctgctccgccggtccctcagcgcggcctcctgccccccgatctccttgcccgccgccgcctcccggagcagcatggacggcgcgggggctgaggaggtgctggcacctctgaggctagcagtgcgccagcagggagatcttgtgcgaaaactcaaagaagataaagcaccccaagtagacgtagacaaagcagtggctgagctcaaagcccgcaagagggttctggaagcaaaggagctggcgttacagcccaaagatgatattgtagaccgagcaaaaatggaagataccctgaagaggaggtttttctatgatcaagcttttgctatttatggaggtgttagtggtctgtatgactttgggccagttggctgtgctttgaagaacaatattattcagacctggaggcagcactttatccaagaggaacagatcctggagatcgattgcaccatgctcacccctgagccagttttaaagacctctggccatgtagacaaatttgctgacttcatggtgaaagacgtaaaaaatggagaatgttttcgtgctgaccatctattaaaagctcatttacagaaattgatgtctgataagaagtgttctgtcgaaaagaaatcagaaatggaaagtgttttggcccagcttgataactatggacagcaagaacttgcggatctttttgtgaactataatgtaaaatctcccattactggaaatgatctatcccctccagtgtcttttaacttaatgttcaagactttcattgggcctggaggaaacatgcctgggtacttgagaccagaaactgcacaggggattttcttgaatttcaaacgacttttggagttcaaccaaggaaagttgccttttgctgctgcccagattggaaattcttttagaaatgagatctcccctcgatctggactgatcagagtcagagaattcacaatggcagaaattgagcactttgtagatcccagtgagaaagaccaccccaagttccagaatgtggcagaccttcacctttatttgtattcagcaaaagcccaggtcagcggacagtccgctcggaaaatgcgcctgggagatgctgttgaacagggtgtgattaataacacagtattaggctatttcattggccgcatctacctctacctcacgaaggttggaatatctccagataaactccgcttccggcagcacatggagaatgagatggcccattatgcctgtgactgttgggatgcagaatccaaaacatcctacggttggattgagattgttggatgtgctgatcgttcctgttatgacctctcctgtcatgcacgagccaccaaagtcccacttgtagctgagaaacctctgaaagaacccaaaacagtcaatgttgttcagtttgaacccagtaagggagcaattggtaaggcatataagaaggatgcaaaactggtgatggagtatcttgccatttgtgatgagtgctacattacagaaatggagatgctgctgaatgagaaaggggaattcacaattgaaactgaagggaaaacatttcagttaacaaaagacatgatcaatgtgaagagattccagaaaacactatatgtggaagaagttgttccgaatgtaattgaaccttccttcggcctgggtaggatcatgtatacggtatttgaacatacattccatgtacgagaaggagatgaacagagaacattcttcagtttccctgctgtagttgctccattcaaatgttccgtcctcccactgagccaaaaccaggagttcatgccatttgtcaaggaattatcggaagccctgaccaggcatggagtatctcacaaagtagacgattcctctgggtcaatcggaaggcgctatgccaggactgatgagattggcgtggcttttggtgtcaccattgactttgacacagtgaacaagaccccccacactgcaactctgagggaccgtgactcaatgcggcagataagagcagagatctctgagctgcccagcatagtccaagacctagccaatggcaacatcacatgggctgatgtggaggccaggtatcctctgtttgaagggcaagagactggtaaaaaagagacaatcgaggaatgaggacaattttgacaacttttgaccacttgcgctaataaaaaaaaaaaaaaactactcttatgtccactttacaaaagaaaacagcattgtgattactcccagggaccgtattttatcttcagtggctgcctgattttacccccacaattaaagttgaaggaatcctgaacaaa

SEQ ID NO: 123527 - DNA, 2220 bp, Artificial Sequence
  derived and/or modified sequence
atgcccagccccaggcctgtgctgctgcggggggcccgggccgccctgctgctgctgctgcccccccggctgctggcccggcccagcctgctgctgcggcgcagcctgtctgctgccagctgcccccccatcagcctgcctgctgctgccagccgcagctccatggatggagctggagctgaggaggtgctggcccccctgcggctggccgtgcggcagcagggcgacctggtgaggaagctgaaggaggacaaggccccccaggtggatgtggacaaggctgtggccgagctgaaggccaggaagagggtgctggaggccaaggagctggccctgcagcccaaggatgacatcgtggaccgggccaagatggaggacaccctgaagaggcgcttcttctatgaccaggcctttgccatctatggaggagtgtctggcctgtatgactttggacctgtgggctgtgccctgaagaacaacatcatccagacctggaggcagcacttcatccaggaggagcagatcctggagattgactgcaccatgctgaccccagagcctgtgctgaagaccagcggccacgtggacaagtttgctgacttcatggtgaaggatgtgaagaatggagagtgcttccgggctgaccacctgctgaaggcccacctgcagaagctgatgtctgacaagaagtgcagcgtggagaagaagtctgagatggagagcgtgctggcccagctggacaactacggccagcaggagctggccgacctgtttgtgaactacaacgtgaagagccccatcactggaaatgacctgagcccccctgtgtccttcaacctgatgttcaagaccttcatcggccctgggggcaacatgcctggctacctgcggcctgagacagcccagggcatcttcctgaacttcaagaggctgctggagttcaaccagggcaagctgccctttgctgctgcccagatcggcaacagcttcagaaatgagatcagccccaggagcggcctcatccgggtgcgggagttcaccatggccgagattgagcactttgtggaccccagcgagaaggaccaccccaagttccagaatgtggccgacctgcacctgtacctgtacagcgccaaggcccaggtgtctggccagagcgccaggaagatgaggctgggagatgctgtggagcagggcgtcatcaacaacacagtgctgggctacttcatcggccgcatctacctgtacctgaccaaggtgggcatcagcccagacaagctgcgcttccggcagcacatggagaatgagatggcccactacgcctgtgactgctgggatgctgagagcaagaccagctatggctggattgagatcgtgggctgtgccgacaggagctgctatgacctgagctgccacgcccgggccaccaaggtgcccctggtggccgagaagcccctgaaggagcccaagacagtgaatgtggtgcagtttgagcccagcaaaggagccatcggcaaggcctacaagaaggatgccaagctggtgatggagtacctggccatctgtgatgagtgctacatcacagagatggagatgctgctgaatgaaaaaggagagttcaccatcgagacagagggcaagaccttccagctgaccaaggacatgatcaacgtgaagcgcttccagaagaccctgtatgtggaggaggtggtgcccaacgtgattgagcccagctttggcctgggccgcatcatgtacacagtgtttgagcacaccttccacgtgcgggagggagatgagcagaggaccttcttctccttccctgctgtggtggcccccttcaagtgcagcgtgctgcccctgagccagaaccaggagttcatgccctttgtgaaggagctgtctgaggccctgaccaggcatggagtgagccacaaggtggatgacagcagcggcagcatcggccgccgctatgccaggacagatgaaattggagtggccttcggcgtgaccatcgactttgacacagtgaacaagaccccccacacagccaccctgcgggaccgggacagcatgaggcagatccgggcagagatcagcgagctgcccagcatcgtgcaggacctggccaatggaaacatcacctgggcagatgtggaggcccgctaccccctgtttgagggccaggagaccgggaagaaggagaccatcgaggagtag

SEQ ID NO: 123528 - DNA, 2220 bp, Artificial Sequence
  derived and/or modified sequence
atgcccagcccccggcccgtgctgctgcggggcgcccgggccgccctgctgctgctcttgccccccagactccttgcccgcccctcgctgctattgaggcggtctctgtctgcggcctcttgtccgcccatctccctgcccgcggctgcctctcggtcttcaatggatggtgccggcgcagaggaggtgttggcacccctgaggttagccgtcaggcaacagggcgatctcgtgagaaaattaaaggaggataaagccccacaggtggatgtagataaggctgttgccgagttgaaggcgaggaagcgcgtgttggaagcaaaggaacttgctctgcagcccaaagatgacatcgtggatcgcgctaaaatggaagatacacttaaacgtagattcttttacgaccaagcttttgcgatatatggtggtgtttcaggcctctacgattttggtccagtggggtgtgcactgaaaaacaacatcattcagacctggcggcagcattttatacaggaagagcagatcctggaaatcgattgcacaatgctgactccagaacccgttttaaaaacgtcgggtcacgtggacaagtttgctgacttcatggtcaaggatgtgaaaaacggagagtgttttcgagccgaccatctcttgaaagctcatctgcagaagctgatgagcgacaagaaatgttctgtcgagaagaagagcgagatggaatcagtcctcgctcagttagacaattatggtcaacaggagttggccgatctgttcgtgaattacaatgtaaaatcgcccattaccggcaacgatctgagtccaccagtttcctttaacctcatgttcaaaacatttatcggtccgggagggaatatgccaggatacctgcgccctgagaccgcacagggaatttttctgaattttaaaagactgttggaatttaatcagggcaaattgccatttgctgccgcccagataggtaacagcttccgcaatgagatcagcccgaggagtggtttaataagagttcgggagtttaccatggccgagattgaacacttcgtggatccctcggaaaaagatcaccctaagttccagaacgtagccgatttgcatctctacctgtacagcgcaaaggcccaggtgagcggtcagtccgcaagaaagatgcggttgggggatgctgtggaacagggtgtcattaataataccgtgttgggatatttcattgggagaatctacttgtacctaactaaggtgggaataagccccgataagctgcggtttcgccagcatatggaaaatgagatggctcattacgcgtgtgactgttgggacgccgagtccaagacctcgtatgggtggattgagatcgtcggatgcgctgaccgttcttgctatgacctttcatgtcatgcacgtgccaccaaggtccctctcgtggcagaaaaaccactgaaagagcccaagacagttaatgtggtgcaatttgaacccagcaagggcgcaatagggaaagcttacaagaaagacgcgaagttagtaatggagtacttggcaatctgtgacgagtgttacatcacagaaatggaaatgctgttgaacgagaaaggagagtttaccatcgagacagagggcaaaacctttcagcttacaaaggatatgattaatgtaaagcgatttcaaaagactctttatgttgaagaggtcgtaccaaatgtgattgaaccgtcattcggactgggacgtattatgtacactgtgtttgagcacacattccacgtcagagagggcgatgaacagcgcaccttcttctcctttcctgcagttgtcgcccctttcaagtgttctgtgctgcccctgagccagaatcaggaatttatgccattcgttaaagagctcagtgaggccctgacccgacacggagtgtctcataaagtggatgacagtagtgggagtattgggcgtaggtatgcaagaaccgatgagatcggcgtggcctttggggtgaccattgattttgatactgttaacaaaacaccgcacactgccacattgagagatagagattccatgcgccagattagagccgaaatatccgagcttccttccatcgtacaggaccttgccaacggaaacattacttgggcagatgtagaagcccgatacccattgttcgaaggccaggaaacagggaagaaggagaccatagaggagtag

SEQ ID NO: 123529 - DNA, 2220 bp, Artificial Sequence
  derived and/or modified sequence
atgccttcccctaggcctgtgttgctaagaggagccagagccgcactgctgctcctcctaccccctagattactggccagaccatctctgctcttgcgcaggtccttatcggctgcctcctgtccacccatttctctccctgcggctgctagccgttcctctatggatggcgcaggagccgaggaagtgcttgctcccctcagactggctgtgaggcaacaaggtgatttggtgcgcaagcttaaggaagacaaggcaccacaggtggacgttgacaaagctgtggccgagctgaaggcccgaaagagagtccttgaggccaaggaattggcccttcagcccaaggatgacatagttgacagagctaaaatggaagatacactgaaaagacgcttcttctatgaccaagcatttgcaatctacggcggagttagcggactttacgacttcggtcctgtgggctgcgctctcaagaataatatcatccagacatggcgacagcatttcattcaggaggagcagatcctggagattgattgcactatgcttaccccagagccagtactgaagacgtctgggcatgtggacaagttcgctgatttcatggtgaaagacgtaaaaaatggtgagtgtttcagagccgaccatctccttaaggcccatctgcagaaactcatgtctgacaagaagtgctccgtggagaaaaagtccgaaatggaatctgttcttgcacagctggacaattacggtcagcaagaactggcagatctatttgtgaactataatgttaaaagcccaatcactggcaacgatttatctcccccagtctctttcaatcttatgtttaaaacattcattggccctggcggtaatatgcctgggtacctgaggcctgagaccgctcagggcatttttctgaacttcaaacgcttgcttgagtttaaccagggaaagctgcctttcgctgccgcacagattggtaattcatttcgaaatgaaatcagtcccaggtctggcctcatacgggtccgcgaattcaccatggcagaaatcgagcactttgtggacccctccgaaaaggaccacccaaaattccagaacgtggccgaccttcacttatatctttactccgcgaaggcccaggtgtctggccagagcgccagaaagatgcgcctcggggatgctgtagaacagggagtgatcaataacacagtgctgggctattttatcggccgtatttatttgtacttaaccaaagttggtatcagccccgacaagttgagattccgtcaacacatggaaaacgagatggctcattacgcatgcgactgctgggacgcagaaagcaaaacttcatacggatggatagaaatagtaggctgtgctgataggtcctgctatgaccttagttgtcatgctcgggcaaccaaagtgccactggtggcagagaaaccccttaaagaacccaagaccgtgaacgtggtgcagtttgagccctccaagggagcgatcggcaaggcctacaagaaagacgccaagttagttatggagtatcttgctatctgcgacgagtgctatatcaccgagatggagatgttactgaatgagaaaggcgagttcacaattgaaaccgaaggcaagacattccagctgaccaaggatatgattaacgtgaagcgctttcagaagacgctttatgtggaggaggtcgtccctaatgtcatcgagccctccttcgggcttgggaggattatgtatacggtgttcgagcataccttccatgtgcgggagggcgatgaacagcgtacctttttctcttttcctgccgtggtggcgccattcaagtgttctgtgctgccgctctcacagaatcaggaattcatgccattcgtgaaagagctgtctgaggctcttacccgacacggggtctctcacaaagtggacgactcatcaggaagcatcggacggcgatacgcccgaaccgatgaaataggtgtggcttttggggtcacgattgattttgataccgtgaataagactccccacacagccaccctgcgggatagagatagtatgcgccagatacgtgccgagatctccgagctgcctagtattgttcaggatctagccaacggcaacataacgtgggctgacgtggaggcgagataccccctgtttgagggccaggagactggaaagaaggagactatagaggagtag

SEQ ID NO: 123530 - DNA, 2220 bp, Artificial Sequence
  derived and/or modified sequence
atgcccagccccagacccgtgctgctgagaggcgccagagccgccctgctgctgctgctgccccccagactgctggccagacccagcctgctgctgagaagaagcctgagcgccgccagctgcccccccatcagcctgcccgccgccgccagcagaagcagcatggacggcgccggcgccgaggaggtgctggcccccctgagactggccgtgagacagcagggcgacctggtgagaaagctgaaggaggacaaggccccccaggtggacgtggacaaggccgtggccgagctgaaggccagaaagagagtgctggaggccaaggagctggccctgcagcccaaggacgacatcgtggacagagccaagatggaggacaccctgaagagaagattcttctacgaccaggccttcgccatctacggcggcgtgagcggcctgtacgacttcggccccgtgggctgcgccctgaagaacaacatcatccagacctggagacagcacttcatccaggaggagcagatcctggagatcgactgcaccatgctgacccccgagcccgtgctgaagaccagcggccacgtggacaagttcgccgacttcatggtgaaggacgtgaagaacggcgagtgcttcagagccgaccacctgctgaaggcccacctgcagaagctgatgagcgacaagaagtgcagcgtggagaagaagagcgagatggagagcgtgctggcccagctggacaactacggccagcaggagctggccgacctgttcgtgaactacaacgtgaagagccccatcaccggcaacgacctgagcccccccgtgagcttcaacctgatgttcaagaccttcatcggccccggcggcaacatgcccggctacctgagacccgagaccgcccagggcatcttcctgaacttcaagagactgctggagttcaaccagggcaagctgcccttcgccgccgcccagatcggcaacagcttcagaaacgagatcagccccagaagcggcctgatcagagtgagagagttcaccatggccgagatcgagcacttcgtggaccccagcgagaaggaccaccccaagttccagaacgtggccgacctgcacctgtacctgtacagcgccaaggcccaggtgagcggccagagcgccagaaagatgagactgggcgacgccgtggagcagggcgtgatcaacaacaccgtgctgggctacttcatcggcagaatctacctgtacctgaccaaggtgggcatcagccccgacaagctgagattcagacagcacatggagaacgagatggcccactacgcctgcgactgctgggacgccgagagcaagaccagctacggctggatcgagatcgtgggctgcgccgacagaagctgctacgacctgagctgccacgccagagccaccaaggtgcccctggtggccgagaagcccctgaaggagcccaagaccgtgaacgtggtgcagttcgagcccagcaagggcgccatcggcaaggcctacaagaaggacgccaagctggtgatggagtacctggccatctgcgacgagtgctacatcaccgagatggagatgctgctgaacgagaagggcgagttcaccatcgagaccgagggcaagaccttccagctgaccaaggacatgatcaacgtgaagagattccagaagaccctgtacgtggaggaggtggtgcccaacgtgatcgagcccagcttcggcctgggcagaatcatgtacaccgtgttcgagcacaccttccacgtgagagagggcgacgagcagagaaccttcttcagcttccccgccgtggtggcccccttcaagtgcagcgtgctgcccctgagccagaaccaggagttcatgcccttcgtgaaggagctgagcgaggccctgaccagacacggcgtgagccacaaggtggacgacagcagcggcagcatcggcagaagatacgccagaaccgacgagatcggcgtggccttcggcgtgaccatcgacttcgacaccgtgaacaagaccccccacaccgccaccctgagagacagagacagcatgagacagatcagagccgagatcagcgagctgcccagcatcgtgcaggacctggccaacggcaacatcacctgggccgacgtggaggccagataccccctgttcgagggccaggagaccggcaagaaggagaccatcgaggagtag

SEQ ID NO: 123531 - protein, 345 aa, Artificial Sequence
  derived and/or modified sequence
MVAALLGGGGEARGGTVPGAWLCLMALLQLLGSAPRGSGLAHGRRLICWQALLQCQGEPECSYAYNQYAEACAPVLAQHGGGDAPGAAAAAFPASAASFSSRWRCPSHCISALIQLNHTRRGPALEDCDCAQDENCKSTKRAIEPCLPRTSGGGAGGPGAGGVMGCTEARRRCDRDSRCNLALSRYLTYCGKVFNGLRCTDECRTVIEDMLAMPKAALLNDCVCDGLERPICESVKENMARLCFGAELGNGPGSSGSDGGLDDYYDEDYDDEQRTGGAGGEQPLDDDDGVPHPPRPGSGAAASGGRGDLPYGPGRRSSGGGGRLAPRGAWTPLASILLLLLGPLF

SEQ ID NO: 123532 - DNA, 288 bp, Artificial Sequence
  derived and/or modified sequence
atggcccacttcaaggacgacctgcagaccaacgtggagatcatccccggtgagtccgcccctagaaaagagtctccccgccctcctgcccccccctctagcgcagctggcgtagggggatgctctaatcacagtccttctgtacaggagagtccgctctctccaccagcactggcccagctcggctctgctcagcaaccatctatgcgtacagagctgagcttctctgagaagaaggacacgatgatcatttggcagattacgataactgtctggtgccaaagatag

SEQ ID NO: 123533 - DNA, 1038 bp, Artificial Sequence
  derived and/or modified sequence
atggtcgcggccctgctgggcgggggaggagaagcgagaggaggcactgtacctggggcgtggctttgtctgatggctcttcttcagctgcttggcagcgctccccgcggaagtggcctggcgcacgggcgacgcctgatctgctggcaagccctcctgcagtgtcagggggaacccgaatgctcctacgcatacaaccaatatgctgaggcctgtgcgccagtgctggcccaacacgggggaggtgacgctcccggtgctgctgctgccgcattccctgccagtgctgcttcgtttagctcacgctggcgctgcccctcccattgcattagtgccttgattcagctgaaccacacccggaggggcccagctcttgaagattgcgactgtgctcaggatgaaaattgtaagtccactaagcgggccattgaaccttgtctacctcggacttccggtgggggggctgggggacctggcgccgggggggtaatgggttgtaccgaagcccggaggcggtgcgacagggattcaaggtgtaacctggccttaagcaggtacttaacatattgtggtaaggtgtttaacggcctgaggtgtacagacgaatgtcgcaccgtgatagaagacatgcttgcaatgccgaaagctgccctgttaaatgattgcgtgtgtgatgggctcgaaaggcctatctgtgaatcagtcaaggaaaatatggcaagactttgtttcggagccgaactgggcaatggtcccgggtccagcggctctgacggcggtctggacgactactacgatgaggactatgatgatgaacagagaactggcggagccggaggtgagcagcctctggatgatgacgacggggtgccccatccaccgagaccagggagcggggctgccgcgtccgggggaaggggagatctaccatacggccctggcaggagaagttcaggcggaggaggaagactggctccgagaggtgcctggacacccctggcaagcatactactgctcctgctgggacccttgttctag

SEQ ID NO: 123534 - DNA, 2826 bp, Artificial Sequence
  derived and/or modified sequence
agcagccggcacggggacagccggccgcacaacggatctgcaggcgcggagcaaaatgcacccgccgcgccgcgcggtcctgcagccccgccacggccccgcggcccgcacccccccggggcgacagtgagcctctcccgccaccaccgggggccgagcggagggctctcgggtgggagagcgggaccagatctcgacagctgttcatttccaggaagccaccgcagccagagcgaaaggggaccttctgccaccagcggggcatcagccagcggcgcgcatggatttatgaagacactcatgcaagaagtgggcaggacttggacaaacttttccaccggctccgcgtccgccgctccccgcgcctcgtctcctttcccctcctctcccggcggccgccgctgcccgcgatggtggccgcgctgctgggcggcggcggcgaggcccgcggggggacagtgccgggcgcctggctgtgcctgatggcgctgctgcagctgctgggctcggcgccgcggggatcggggctggcgcacggccgccgcctcatctgctggcaggcgctgctgcagtgccagggggagccggagtgcagctacgcctacaaccagtacgccgaggcgtgcgcgccggtgctggcgcagcacggcgggggcgacgcgcccggggccgccgccgccgctttcccggcctcggccgcctctttctcgtcgcgctggcgctgcccgagtcactgcatctcggccctcattcagctcaaccacacgcgccgcgggcccgccctggaggactgtgactgcgcgcaggacgagaactgcaagtccaccaagcgcgccattgagccgtgcctgccccggacgagcggcggcggcgcgggcggccccggcgcgggcggggtcatgggctgcaccgaggcccggcggcgctgcgaccgcgacagccgctgcaacctggcgctgagccgctacctgacctactgcggcaaagtcttcaacgggctgcgctgcacggacgaatgccgcaccgtcattgaggacatgctggctatgcccaaggcggcgctgctcaacgactgcgtgtgcgacggcctcgagcggcccatctgcgagtcggtcaaggagaacatggcccgcctgtgcttcggcgccgagctgggcaacggccccggcagcagcggctcggacgggggcctggacgactactacgatgaggactacgatgacgagcagcgcaccgggggcgcgggtggtgagcagccgctggacgacgacgacggcgtcccgcacccaccgcgcccgggcagcggcgctgctgcatcgggcggccgcggggacctgccctatgggcctgggcgcaggagcagcggcggcggcggccgcttggcgccccggggcgcctggaccccactcgcctccatcttgctgctgctgcttgggccgctcttttagccctcgcgccccccgccgttggctgcgggagagcccgcgtcccactcccgtgctcgcctcgaccccgcgccgggcacctgtggcttgggacagatagaagggatggttggggatacttcccaaaactttttccaagtcaacttggtgtagccggttccccggccacgactctgggcacttcccctgaagctcctctccggagcttgacttcttggacctcctcccccgccccaattccaagctccagaaactcccaactcgtctgccgtccagaaagctagctgcagtgttcaggacgtccgggaggaagcaagcatgtgggggacagaacagtagtcctggactcgaaagggaaggtgctgaccagtggggccttagcaatttgaagggttgggaaggaggaattatatttgcaaaggggctgtctattagcatatttcctttgagggggcaaaaaaaagtgccagtatcgacttttacagattgtggccagtgaggatattataatcctatgtaaacagaaaagtcccacttaccgattcattctttcactgtttgtatctgcgcccagaattctcagtgacgtgggggtgagggtgggtggcgattgccttagagggaacccctaaattggttttggataagtttgagcccttgaccttaatttcattgctaccactctgatctcttagcacatttcttaggattaagggtccaaaaatgctgatctaaggggttgccatggtgttgaacaatgcaactttttatttaaaaaagctctgcactgccatgtatgaaagtctctttatgatgtttgtttttttgtcatttttgttctttacatcaagaaattttatgtttaaatatgcggagaatgtatattgcctctgctcctatcagggttgctaaaccctggtacatcgtatataaaatgtattaaaactggggtttgttaccagttgctgtactttgtatatagaatttttataaattgtatgcttcagaaataatttatttttaaaaagaaattaaaagttttaaactcacatccatattacacctttcccccctgaaatgtatagaatccatttgtcatcaggaatcaaaacccacagtccattgtgaagtgtgctatatttagaacagtcttaaaatgtacagtgtattttatagaattgaagttaacattcttattttcaagagaatttatggacgttgtagaaatgtacaaatgcatttccaaactgccttaaacgttgtatttttatagacatgttttttaaaaatcctaagtttttaaataactatggatttgtgtattttttttggttatttgttttattaaaacatgtacatcagtaaagagttttaaacaatg

SEQ ID NO: 123535 - DNA, 1038 bp, Artificial Sequence
  derived and/or modified sequence
atggtggccgccctgctgggcggcggcggggaggcccggggcggcaccgtgcctggggcctggctgtgcctgatggccctgctgcagctgctgggcagcgccccccggggcagcggcctggcccacggccggcggctcatctgctggcaggccctgctgcagtgccagggcgagcctgagtgcagctatgcctacaaccagtatgcagaggcctgtgcccctgtgctggcccagcacggcggcggagatgcccctggagctgctgctgctgccttccctgccagcgctgccagcttcagcagccgctggcgctgccccagccactgcatcagcgccctgatccagctgaaccacacccggcggggccctgccctggaggactgtgactgtgcccaggatgagaactgcaagagcaccaagagggccatcgagccctgcctgcccaggaccagcggcggcggggccggcggccctggggccggcggcgtgatgggctgcacagaggccaggagaagatgtgaccgggacagccgctgcaacctggccctgagccgctacctgacctactgtgggaaggtgttcaacggcctgcgctgcacagatgagtgcaggacagtgattgaggacatgctggccatgcccaaggccgccctgctgaatgactgtgtgtgtgatggcctggagcggcccatctgtgagagcgtgaaggagaacatggcccggctgtgcttcggggctgagctgggcaatggacctggcagcagcggcagtgatggcggcctggatgactactatgatgaagattatgatgatgagcagaggactggaggagctggaggagagcagcccctggatgatgatgatggagtgccccaccccccccggcccggcagcggggctgctgccagcggcggccgcggggacctgccctacggccctggaagaagaagcagcggcggcggcggccgcctggcccccaggggggcctggacccccctggccagcatcctgctgctgctgctgggccccctcttctag

SEQ ID NO: 123536 - DNA, 1038 bp, Artificial Sequence
  derived and/or modified sequence
atggtggccgccctgctgggcggcggcggcgaggcccggggcggcaccgttccaggggcctggctgtgccttatggcactactgcagctgctgggatctgccccacgggggtctggactggcccacggcagacggctgatctgctggcaagcgctcctgcagtgccagggcgagccggaatgttcatacgcatacaatcagtacgccgaggcttgcgcacctgtgttagcacagcatggcgggggggacgccccgggcgccgcagctgcagcgttccctgcatccgctgcatccttttcctcccggtggcgctgcccatctcactgtatctcagccctcattcagctaaatcacacaaggcgtggccctgcactggaggattgtgactgtgcccaagacgaaaactgtaagagcacaaagagagccatagaaccttgtcttcctcgaacaagcggcggcggtgccggggggccaggtgccggcggtgtcatggggtgcacggaggcccggagacggtgtgatagggacagtagatgcaatctggccctgtcacgctatctgacatactgcggcaaagttttcaatggtctgcgctgtacagacgaatgccgcactgttatcgaagatatgttggccatgccgaaagccgctctgttgaacgactgtgtgtgcgacgggctggaacggccgatctgtgagtccgtgaaggagaatatggcacggttatgtttcggcgcagaactgggtaatggccccggctcgtctggctccgatggcggtctcgatgactactacgatgaggattacgacgatgaacagcggacgggaggtgccggcggggaacagcccttagacgatgacgatggggttccacatcccccacgaccagggtccggggctgccgcttccggcggccgtggcgaccttccatacggaccaggacggcggagcagcggaggaggcggtagattggccccccgcggcgcatggacacccctcgcttctatcttactgcttctgctggggcctttattctag

SEQ ID NO: 123537 - DNA, 1038 bp, Artificial Sequence
  derived and/or modified sequence
atggtggctgcgttattaggtgggggaggcgaggctcgcggaggaacagtccccggtgcctggctttgtctcatggccctgcttcagctcctgggctcagctcccaggggatcgggcctcgctcatggccgaagactcatctgttggcaggcattactgcagtgccagggcgagcctgaatgttcctatgcttataaccagtatgcagaggcttgtgcacctgttctagcccagcatgggggaggagacgccccaggggcagctgccgcagctttccctgcctctgcggcttccttttccagtcggtggcgttgccctagccattgcatatctgctctaattcaattgaaccacaccaggagaggcccagctctggaagattgtgactgtgcccaggacgaaaattgcaagtcaactaaaagagccatagagccttgcttacccaggacttcaggtggcggtgcaggaggccctggtgccggaggtgttatgggctgcacagaagcccgtagaaggtgtgaccgggattccaggtgcaacttggccctgtccaggtacctcacatattgcggaaaagttttcaatgggcttcgctgtaccgatgagtgccggaccgtaatcgaagacatgctcgcaatgcccaaggccgcactgctaaacgattgcgtgtgtgatgggctggaacgcccaatctgtgaatccgtgaaagagaacatggcaaggctgtgttttggcgcagagttgggcaatggcccaggcagcagcggatcagacggtggactagacgattactacgacgaggactacgatgatgaacagcgcaccggcggagctggtggcgaacagccacttgacgatgatgatggggttccccatccgccaagaccaggatctggcgctgcagcatcgggcggacgcggagatcttccatacgggccaggtcgtagatctagcggcggtggaggtcggctggccccacgaggagcatggacccctttagcctcaattctgctcctcctgttgggacctttgttctag

SEQ ID NO: 123538 - DNA, 1038 bp, Artificial Sequence
  derived and/or modified sequence
atggtggccgccctgctgggcggcggcggcgaggccagaggcggcaccgtgcccggcgcctggctgtgcctgatggccctgctgcagctgctgggcagcgcccccagaggcagcggcctggcccacggcagaagactgatctgctggcaggccctgctgcagtgccagggcgagcccgagtgcagctacgcctacaaccagtacgccgaggcctgcgcccccgtgctggcccagcacggcggcggcgacgcccccggcgccgccgccgccgccttccccgccagcgccgccagcttcagcagcagatggagatgccccagccactgcatcagcgccctgatccagctgaaccacaccagaagaggccccgccctggaggactgcgactgcgcccaggacgagaactgcaagagcaccaagagagccatcgagccctgcctgcccagaaccagcggcggcggcgccggcggccccggcgccggcggcgtgatgggctgcaccgaggccagaagaagatgcgacagagacagcagatgcaacctggccctgagcagatacctgacctactgcggcaaggtgttcaacggcctgagatgcaccgacgagtgcagaaccgtgatcgaggacatgctggccatgcccaaggccgccctgctgaacgactgcgtgtgcgacggcctggagagacccatctgcgagagcgtgaaggagaacatggccagactgtgcttcggcgccgagctgggcaacggccccggcagcagcggcagcgacggcggcctggacgactactacgacgaggactacgacgacgagcagagaaccggcggcgccggcggcgagcagcccctggacgacgacgacggcgtgccccacccccccagacccggcagcggcgccgccgccagcggcggcagaggcgacctgccctacggccccggcagaagaagcagcggcggcggcggcagactggcccccagaggcgcctggacccccctggccagcatcctgctgctgctgctgggccccctgttctag

SEQ ID NO: 123539 - protein, 413 aa, Artificial Sequence
  derived and/or modified sequence
MEFPGLGSLGTSEPLPQFVDPALVSSTPESGVFFPSGPEGLDAAASSTAPSTATAAAAALAYYRDAEAYRHSPVFQVYPLLNCMEGIPGGSPYAGWAYGKTGLYPASTVCPTREDSPPQAVEDLDGKGSTSFLETLKTERLSPDLLTLGPALPSSLPVPNSAYGGPDFSSTFFSPTGSPLNSAAYSSPKLRGTLPLPPCEARECVNCGATATPLWRRDRTGHYLCNACGLYHKMNGQNRPLIRPKKRLIVSKRAGTQCTNCQTTTTTLWRRNASGDPVCNACGLYYKLHQVNRPLTMRKDGIQTRNRKASGKGKKKRGSSLGGTGAAEGPAGGFMVVAGGSGSGNCGEVASGLTLGPPGTAHLYQGLGPVVLSGPVSHLMPFPGPLLGSPTGSFPTGPMPPTTSTTVVAPLSS

SEQ ID NO: 123540 - protein, 122 aa, Artificial Sequence
  derived and/or modified sequence
  misc_feature (1)..(1): Xaa can be any naturally occurring amino acid
XQNRPLIRPKKRLIVSKRAGTQCTNCQTTTTTLWRRNASGDPVCNACGLYYKLHQVNRPLTMRKDGIQTRNRKASGKGKKKRGSSLGGTGAAEGPALLWWLRSAHEGTEHGLQRRGGVLLLL

SEQ ID NO: 123541 - DNA, 1501 bp, Artificial Sequence
  derived and/or modified sequence
gacaccccctgggatcacactgagcttgccacatccccaaggcggccgaaccctccgcaaccaccagcccaggttaatccccagaggctccatggagttccctggcctggggtccctggggacctcagagcccctcccccagtttgtggatcctgctctggtgtcctccacaccagaatcaggggttttcttcccctctgggcctgagggcttggatgcagcagcttcctccactgccccgagcacagccaccgctgcagctgcggcactggcctactacagggacgctgaggcctacagacactccccagtctttcaggtgtacccattgctcaactgtatggaggggatcccagggggctcaccatatgccggctgggcctacggcaagacggggctctaccctgcctcaactgtgtgtcccacccgcgaggactctcctccccaggccgtggaagatctggatggaaaaggcagcaccagcttcctggagactttgaagacagagcggctgagcccagacctcctgaccctgggacctgcactgccttcatcactccctgtccccaatagtgcttatgggggccctgacttttccagtaccttcttttctcccaccgggagccccctcaattcagcagcctattcctctcccaagcttcgtggaactctccccctgcctccctgtgaggccagggagtgtgtgaactgcggagcaacagccactccactgtggcggagggacaggacaggccactacctatgcaacgcctgcggcctctatcacaagatgaatgggcagaacaggcccctcatccggcccaagaagcgcctgattgtcagtaaacgggcaggtactcagtgcaccaactgccagacgaccaccacgacactgtggcggagaaatgccagtggggatcccgtgtgcaatgcctgcggcctctactacaagctacaccaggtgaaccggccactgaccatgcggaaggatggtattcagactcgaaaccgcaaggcatctggaaaagggaaaaagaaacggggctccagtctgggaggcacaggagcagccgaaggaccagctggtggctttatggtggtggctgggggcagcggtagcgggaattgtggggaggtggcttcaggcctgacactgggccccccaggtactgcccatctctaccaaggcctgggccctgtggtgctgtcagggcctgttagccacctcatgcctttccctggacccctactgggctcacccacgggctccttccccacaggccccatgccccccaccaccagcactactgtggtggctccgctcagctcatgagggcacagagcatggcctccagaggaggggtggtgtccttctcctcttgtagccagaattctggacaacccaagtctctgggccccaggcaccccctggcttgaaccttcaaagcttttgtaaaataaaaccaccaaagtcctgaaaaaaaaaaaaaaaaaaaaaaaa

SEQ ID NO: 123542 - DNA, 1005 bp, Artificial Sequence
  derived and/or modified sequence
atggagttccccggcctgggcagcctgggcaccagcgagcccctgccccagttcgtggaccccgccctggtgagcagcacccccgagagcggcgtgttcttccccagcggccccgagggcctggacgccgccgccagcagcaccgcccccagcaccgccaccgccgccgccgccgccctggcctactacagagacgccgaggcctacagacacagccccgtgttccaggtgtaccccctgctgaactgcatggagggcatccccggcggcagcccctacgccggctgggcctacggcaagaccggcctgtaccccgccagcaccgtgtgccccaccagagaggacagccccccccaggccgtggaggacctggacggcaagggcagcaccagcttcctggagaccctgaagaccgagagactgagccccgacctgctgaccctgggccccgccctgcccagcagcctgcccgtgcccaacagcgcctacggcggccccgacttcagcagcaccttcttcagccccaccggcagccccctgaacagcgccgcctacagcagccccaagctgagaggcaccctgcccctgcccccctgcgaggccagagagtgcgtgaactgcggcgccaccgccacccccctgtggagaagagacagaaccggccactacctgtgcaacgcctgcggcctgtaccacaagatgaacggccagaacagacccctgatcagacccaagaagagactgatcgtgagcaagagagccggcacccagtgcaccaactgccagaccaccaccaccaccctgtggagaagaaacgccagcggcgaccccgtgtgcaacgcctgcggcctgtactacaagctgcaccagcactactgcggcggcagcgcccagctgatgagagcccagagcatggccagcagaggcggcgtggtgagcttcagcagctgcagccagaacagcggccagcccaagagcctgggccccagacaccccctggcctag

SEQ ID NO: 123543 - DNA, 1242 bp, Artificial Sequence
  derived and/or modified sequence
atggagttccccggcctgggcagcctgggcaccagcgagcccctgccccagttcgtggaccccgccctggtgagcagcacccccgagagcggcgtgttcttccccagcggccccgagggcctggacgccgccgccagcagcaccgcccccagcaccgccaccgccgccgccgccgccctggcctactacagagacgccgaggcctacagacacagccccgtgttccaggtgtaccccctgctgaactgcatggagggcatccccggcggcagcccctacgccggctgggcctacggcaagaccggcctgtaccccgccagcaccgtgtgccccaccagagaggacagccccccccaggccgtggaggacctggacggcaagggcagcaccagcttcctggagaccctgaagaccgagagactgagccccgacctgctgaccctgggccccgccctgcccagcagcctgcccgtgcccaacagcgcctacggcggccccgacttcagcagcaccttcttcagccccaccggcagccccctgaacagcgccgcctacagcagccccaagctgagaggcaccctgcccctgcccccctgcgaggccagagagtgcgtgaactgcggcgccaccgccacccccctgtggagaagagacagaaccggccactacctgtgcaacgcctgcggcctgtaccacaagatgaacggccagaacagacccctgatcagacccaagaagagactgatcgtgagcaagagagccggcacccagtgcaccaactgccagaccaccaccaccaccctgtggagaagaaacgccagcggcgaccccgtgtgcaacgcctgcggcctgtactacaagctgcaccaggtgaacagacccctgaccatgagaaaggacggcatccagaccagaaacagaaaggccagcggcaagggcaagaagaagagaggcagcagcctgggcggcaccggcgccgccgagggccccgccggcggcttcatggtggtggccggcggcagcggcagcggcaactgcggcgaggtggccagcggcctgaccctgggcccccccggcaccgcccacctgtaccagggcctgggccccgtggtgctgagcggccccgtgagccacctgatgcccttccccggccccctgctgggcagccccaccggcagcttccccaccggccccatgccccccaccaccagcaccaccgtggtggcccccctgagcagctag

SEQ ID NO: 123544 - DNA, 369 bp, Artificial Sequence
  derived and/or modified sequence
tgacagaacagacccctgatcagacccaagaagagactgatcgtgagcaagagagccggcacccagtgcaccaactgccagaccaccaccaccaccctgtggagaagaaacgccagcggcgaccccgtgtgcaacgcctgcggcctgtactacaagctgcaccaggtgaacagacccctgaccatgagaaaggacggcatccagaccagaaacagaaaggccagcggcaagggcaagaagaagagaggcagcagcctgggcggcaccggcgccgccgagggccccgccctgctgtggtggctgagaagcgcccacgagggcaccgagcacggcctgcagagaagaggcggcgtgctgctgctgctgtag

SEQ ID NO: 123545 - DNA, 1005 bp, Artificial Sequence
  derived and/or modified sequence
atggagtttcccggactgggaagcttaggcacttccgaacctctgccccaatttgtggacccagcactggtgagctctacgccagaaagcggggtttttttcccctctgggcccgaggggttggacgctgctgccagctcgactgctccttcaacagcaaccgccgccgccgcagccctggcttattaccgcgatgccgaggcctaccgacactcacccgtttttcaggtgtacccacttttaaactgcatggagggtatccctgggggctccccttatgccggttgggcctacggtaaaactggcctctatcccgcctccacagtctgtcctacacgtgaggactcacccccgcaagccgtagaagacctggatggcaagggcagtacctcctttctggaaacgctcaagaccgaacgtctaagtccagatttgttgactctgggccctgcccttccaagtagcctccctgtaccaaattccgcctatggcgggcccgacttctcatcgacctttttcagcccaaccgggagccccctcaacagcgccgcctacagctccccgaagctgagggggacactgcccttgcctccatgtgaggcccgcgagtgcgtgaactgcggcgccacagccacccccctttggaggcgtgatcgaaccggacactatctgtgtaatgcttgtggcctgtatcacaaaatgaatgggcaaaacagacctcttatccgtcctaagaaacgcctcatagtgtcaaagcgcgctggaactcagtgtacaaactgtcagactacaacaactaccctgtggcggagaaatgcctctggtgaccctgtatgcaatgcatgcggactctactacaaattgcatcaacattactgtggggggagtgcccagctgatgcgcgcacagtccatggcatctagggggggggtcgtgtccttttccagttgctcccagaactcaggacagcccaaaagccttggaccccgacacccactggcctag

SEQ ID NO: 123546 - DNA, 1242 bp, Artificial Sequence
  derived and/or modified sequence
atggagtttccgggcctgggttcactgggcacaagcgaaccacttcctcagttcgtggaccctgccctggtgtcatcaacgcctgaaagtggagtcttcttcccctccgggcccgaaggtctcgatgccgccgcaagtagcactgcacctagcactgccacagctgctgctgccgctctggcttactaccgcgatgccgaagcttacaggcatagccctgtcttccaggtctaccccctcttaaattgcatggaggggatacctggaggaagtccatacgcaggatgggcctatggtaaaacaggcctctacccagcaagcacggtgtgcccaacccgcgaggatagtccaccccaagctgtcgaggatcttgacggtaaggggtcaacatcattcctggagactctgaaaacggagagactctcacctgacctactgacactggggcccgccctgccaagcagtcttcctgtgccgaattccgcttatggaggacccgatttctcctcaacattttttagtccgaccgggtcacctctcaatagtgccgcatacagcagcccaaaactgcggggtactcttcctttgcctccctgtgaagcacgcgaatgtgtcaactgcggggctacagctacacccctttggcgccgcgatagaaccggccactacctgtgcaatgcttgtgggctgtatcacaaaatgaatggacagaaccgtcctctcattagaccaaaaaagcgcctcatcgtgtcgaagcgagccggcacacagtgcactaattgccagacgaccaccactacactctggaggaggaatgcctctggggaccctgtctgtaatgcctgcggtctgtattataagctgcatcaggtgaacaggcctttgaccatgcggaaggacggaatccagactcgcaatcgcaaggcttccgggaaaggcaagaagaaaaggggcagttctttaggcggtacgggcgctgctgagggaccggccgggggattcatggtagtggccgggggctcagggtctggcaattgcggtgaggtggcctccggactgacactaggtcctcctggaaccgcacacctgtaccagggcttgggtcctgtagtgttgtctgggcccgtctctcatctgatgccattccctggacctctgctggggagcccgaccgggagcttccctacaggaccaatgccgcccaccacttcgacaaccgtagtggctcctctttcttcatag

SEQ ID NO: 123547 - DNA, 369 bp, Artificial Sequence
  derived and/or modified sequence
tgacagaacagacctctgattaggccaaaaaagagacttatagtttcaaagcgtgccggcacgcaatgtaccaattgccaaactactactaccaccctttggaggcgtaacgcttctggtgaccctgtgtgcaacgcctgtgggctttattataaactccaccaggtgaacagaccacttactatgcggaaggacggcatccaaacccggaatcgcaaagcatccggcaaaggcaaaaagaaacgtggcagctctttgggagggacaggcgccgctgagggccctgcccttctctggtggctgaggagcgcacacgaggggacagaacacgggctgcaacggcgcggaggagtgctgctgttactgtag

SEQ ID NO: 123548 - DNA, 1138 bp, Artificial Sequence
  derived and/or modified sequence
ggacaccccctgggatcacactgagcttgccacatccccaaggcggccgaaccctccgcaaccaccagcccaggttaatccccagaggctccatggagttccctggcctggggtccctggggacctcagagcccctcccccagtttgtggatcctgctctggtgtcctccacaccagaatcaggggttttcttcccctctgggcctgagggcttggatgcagcagcttcctccactgccccgagcacagccaccgctgcagctgcggcactggcctactacagggacgctgaggcctacagacactccccagtctttcaggtgtacccattgctcaactgtatggaggggatcccagggggctcaccatatgccggctgggcctacggcaagacggggctctaccctgcctcaactgtgtgtcccacccgcgaggactctcctccccaggccgtggaagatctggatggaaaaggcagcaccagcttcctggagactttgaagacagagcggctgagcccagacctcctgaccctgggacctgcactgccttcatcactccctgtccccaatagtgcttatgggggccctgacttttccagtaccttcttttctcccaccgggagccccctcaattcagcagcctattcctctcccaagcttcgtggaactctccccctgcctccctgtgaggccagggagtgtgtgaactgcggagcaacagccactccactgtggcggagggacaggacaggccactacctatgcaacgcctgcggcctctatcacaagatgaatgggcagaacaggcccctcatccggcccaagaagcgcctgattgtcagtaaacgggcaggtactcagtgcaccaactgccagacgaccaccacgacactgtggcggagaaatgccagtggggatcccgtgtgcaatgcctgcggcctctactacaagctacaccagcactactgtggtggctccgctcagctcatgagggcacagagcatggcctccagaggaggggtggtgtccttctcctcttgtagccagaattctggacaacccaagtctctgggccccaggcaccccctggcttgaaccttcaaagcttttgtaaaataaaaccaccaaagtcctga

SEQ ID NO: 123549 - DNA, 1497 bp, Artificial Sequence
  derived and/or modified sequence
caaaggccaaggccagccaggacaccccctgggatcacactgagcttgccacatccccaaggcggccgaaccctccgcaaccaccagcccaggttaatccccagaggctccatggagttccctggcctggggtccctggggacctcagagcccctcccccagtttgtggatcctgctctggtgtcctccacaccagaatcaggggttttcttcccctctgggcctgagggcttggatgcagcagcttcctccactgccccgagcacagccaccgctgcagctgcggcactggcctactacagggacgctgaggcctacagacactccccagtctttcaggtgtacccattgctcaactgtatggaggggatcccagggggctcaccatatgccggctgggcctacggcaagacggggctctaccctgcctcaactgtgtgtcccacccgcgaggactctcctccccaggccgtggaagatctggatggaaaaggcagcaccagcttcctggagactttgaagacagagcggctgagcccagacctcctgaccctgggacctgcactgccttcatcactccctgtccccaatagtgcttatgggggccctgacttttccagtaccttcttttctcccaccgggagccccctcaattcagcagcctattcctctcccaagcttcgtggaactctccccctgcctccctgtgaggccagggagtgtgtgaactgcggagcaacagccactccactgtggcggagggacaggacaggccactacctatgcaacgcctgcggcctctatcacaagatgaatgggcagaacaggcccctcatccggcccaagaagcgcctgattgtcagtaaacgggcaggtactcagtgcaccaactgccagacgaccaccacgacactgtggcggagaaatgccagtggggatcccgtgtgcaatgcctgcggcctctactacaagctacaccaggtgaaccggccactgaccatgcggaaggatggtattcagactcgaaaccgcaaggcatctggaaaagggaaaaagaaacggggctccagtctgggaggcacaggagcagccgaaggaccagctggtggctttatggtggtggctgggggcagcggtagcgggaattgtggggaggtggcttcaggcctgacactgggccccccaggtactgcccatctctaccaaggcctgggccctgtggtgctgtcagggcctgttagccacctcatgcctttccctggacccctactgggctcacccacgggctccttccccacaggccccatgccccccaccaccagcactactgtggtggctccgctcagctcatgagggcacagagcatggcctccagaggaggggtggtgtccttctcctcttgtagccagaattctggacaacccaagtctctgggccccaggcaccccctggcttgaaccttcaaagcttttgtaaaataaaaccaccaaagtcctg

SEQ ID NO: 123550 - DNA, 463 bp, Artificial Sequence
  derived and/or modified sequence
ggcagaacaggcccctcatccggcccaagaagcgcctgattgtcagtaaacgggcaggtactcagtgcaccaactgccagacgaccaccacgacactgtggcggagaaatgccagtggggatcccgtgtgcaatgcctgcggcctctactacaagctacaccaggtgaaccggccactgaccatgcggaaggatggtattcagactcgaaaccgcaaggcatctggaaaagggaaaaagaaacggggctccagtctgggaggcacaggagcagccgaaggaccagcactactgtggtggctccgctcagctcatgagggcacagagcatggcctccagaggaggggtggtgtccttctcctcttgtagccagaattctggacaacccaagtctctgggccccaggcaccccctggcttgaaccttcaaagcttttgtaaaataaaaccaccaaagtcctgaaa

SEQ ID NO: 123551 - DNA, 1005 bp, Artificial Sequence
  derived and/or modified sequence
atggagttccctggcctgggcagcctgggcaccagcgagcccctgccccagtttgtggaccctgccctggtgagcagcaccccagagagcggggtcttcttccccagcggccctgagggcctggatgctgctgccagcagcacagcccccagcacagccacagctgctgctgctgccctggcctactacagagatgctgaggcctaccgccacagccctgtgttccaggtgtaccccctgctgaactgcatggagggcatccctgggggcagcccctatgccggctgggcctacggcaagacaggcctgtacccagccagcacagtgtgccccacccgggaggacagccccccccaggccgtggaggacctggatggcaagggcagcaccagcttcctggagaccctgaagacagagcggctgagcccagacctgctgaccctgggccctgccctgcccagcagcctgcctgtgcccaacagcgcctatggaggccctgacttcagcagcaccttcttcagccccaccggcagccccctgaacagcgctgcctacagcagccccaagctgcggggcaccctgcccctgcccccctgtgaggccagagaatgtgtgaactgtggggccacagccacccccctgtggaggcgggacagaacaggccactacctgtgcaatgcctgtggcctgtaccacaagatgaatggccagaaccggcccctcatccggcccaagaagaggctgattgtgtccaagagagctggcacccagtgcaccaactgccagaccaccaccaccaccctgtggaggagaaatgccagcggggaccctgtgtgcaatgcctgtggcctgtactacaagctgcaccagcactactgcggcggcagcgcccagctgatgagggcccagagcatggccagcagaggaggagtggtgtccttcagcagctgcagccagaacagcggccagcccaagagcctgggccccaggcaccccctggcctag

SEQ ID NO: 123552 - DNA, 1242 bp, Artificial Sequence
  derived and/or modified sequence
atggagttccctggcctgggcagcctgggcaccagcgagcccctgccccagtttgtggaccctgccctggtgagcagcaccccagagagcggggtcttcttccccagcggccctgagggcctggatgctgctgccagcagcacagcccccagcacagccacagctgctgctgctgccctggcctactacagagatgctgaggcctaccgccacagccctgtgttccaggtgtaccccctgctgaactgcatggagggcatccctgggggcagcccctatgccggctgggcctacggcaagacaggcctgtacccagccagcacagtgtgccccacccgggaggacagccccccccaggccgtggaggacctggatggcaagggcagcaccagcttcctggagaccctgaagacagagcggctgagcccagacctgctgaccctgggccctgccctgcccagcagcctgcctgtgcccaacagcgcctatggaggccctgacttcagcagcaccttcttcagccccaccggcagccccctgaacagcgctgcctacagcagccccaagctgcggggcaccctgcccctgcccccctgtgaggccagagaatgtgtgaactgtggggccacagccacccccctgtggaggcgggacagaacaggccactacctgtgcaatgcctgtggcctgtaccacaagatgaatggccagaaccggcccctcatccggcccaagaagaggctgattgtgtccaagagagctggcacccagtgcaccaactgccagaccaccaccaccaccctgtggaggagaaatgccagcggggaccctgtgtgcaatgcctgtggcctgtactacaagctgcaccaggtgaaccggcccctgaccatgaggaaggatggcatccagaccaggaacaggaaggccagcggcaagggcaagaagaagaggggcagcagcctgggcggcaccggggctgctgagggccctgctgggggcttcatggtggtggccggcggcagcggcagcggcaactgtggggaggtggccagcggcctgaccctgggccccccaggcacagcccacctgtaccagggcctgggccctgtggtgctgagcggccctgtgagccacctgatgcccttccctggccccctgctgggcagccccaccggcagcttccccaccggccccatgccacccaccaccagcaccaccgtggtggcccccctgagcagctag

SEQ ID NO: 123553 - DNA, 369 bp, Artificial Sequence
  derived and/or modified sequence
tgacagaaccggcccctcatccggcccaagaagaggctcatcgtgtccaagagagctggcacccagtgcaccaactgccagaccaccaccaccaccctgtggaggagaaatgccagcggggaccctgtgtgcaatgcctgtggcctgtactacaagctgcaccaggtgaaccggcccctgaccatgaggaaggatggcatccagaccaggaacaggaaggccagcggcaagggcaagaagaagaggggcagcagcctgggcggcactggagctgctgagggccctgccctgctgtggtggctgcggagcgcccacgagggcacagagcacggcctgcagaggcggggcggcgtgctgctgctgctgtag

SEQ ID NO: 123554 - DNA, 1005 bp, Artificial Sequence
  derived and/or modified sequence
atggagttccccggcctgggcagcctgggcaccagcgagcccctgccccagtttgtagatcctgccctggtttcttcaacacctgaatctggcgtgttttttccaagtggtccagagggcctagacgctgccgccagcagtaccgcccctagcacggccacagccgccgccgctgctctggcatattatagggacgctgaggcctatcggcactctcctgtgtttcaagtctacccactactcaattgcatggaggggattccagggggaagcccatacgctgggtgggcctacgggaaaacaggcctgtatcccgctagcacagtgtgcccaacaagagaggactcccctccccaagctgtcgaggatctggacggtaaaggcagcacttccttcctcgaaactttgaagaccgaacggctgagtcctgacctactcacactcggcccagccctccctagtagcttgccggttccaaattcagcctacggaggaccagacttcagctccactttttttagcccaacaggaagtcccctgaatagcgccgcatacagctctccaaagttgagggggactctccccctgcctccatgcgaggcacgggaatgcgtcaattgtggggcaacagcaacccccctgtggcgtagagataggaccggtcactacctgtgtaatgcctgcggtctgtatcataagatgaacggccagaatagacctcttatcagacctaagaaaaggctgattgtcagcaagcgggcaggtacccagtgcacaaactgccaaactactacgacgactttgtggcgccgcaatgcaagcggcgaccctgtctgtaatgcctgcgggctgtactacaagcttcaccagcattattgtgggggtagcgcgcaattaatgagggctcaatccatggccagccgagggggagttgtctcatttagttcatgttcccagaattccgggcagccaaagagtctggggccccgtcaccccttggcttag

SEQ ID NO: 123555 - DNA, 1242 bp, Artificial Sequence
  derived and/or modified sequence
atggagttccccggcctgggcagcctgggcaccagcgagcccctgcctcagttcgtcgacccagctcttgtcagctcaactccggaatcaggggtgtttttcccaagcggcccagaaggtttagacgcagctgcatcttcaacagcaccatccactgcaacagctgcagcagcggcactcgcatattatagagacgcggaagcctacagacattctcctgtcttccaggtttatcccctgcttaattgcatggagggaatccctggaggctccccttacgctggttgggcatatggtaaaaccggtctgtatcccgccagcaccgtgtgtcccacccgcgaagatagcccccctcaggccgttgaggacctagacgggaagggcagcacatcattcctcgaaaccttaaagactgagcgtctgtctcccgatctactgactctgggcccagctttaccatccagtttaccagttccaaactctgcctacgggggacccgatttttcctccacttttttttcccccacaggctcacccttaaattcggcggcctactcaagccccaagttgagaggaaccctgcctttacctccctgcgaagcccgtgaatgcgtgaattgtggcgctacggcaacccccttgtggagacgcgatcgcaccggccattatctctgtaacgcttgtggactgtaccataaaatgaatggtcagaacaggcccctcatccggccaaagaagcgcctcattgtcagtaagagagcaggtacacagtgtactaactgtcagaccactactactacgctgtggagaaggaatgccagtggtgatccagtttgtaatgcatgtgggctctattacaagctccatcaggtgaaccgcccgctgacaatgcgcaaggatggcattcagacaagaaatagaaaggctagcggtaaaggtaagaaaaaaaggggaagctccttgggggggactggcgctgcagagggacccgcaggtggtttcatggtagttgccgggggcagtggtagtgggaactgcggagaggttgcctccggtctcacactaggaccgcccggtaccgcgcatctttaccagggtctggggcccgtggtgctgagtggtccagtctcccacctgatgccattccctggtcctcttttagggtctcctacaggctcattcccaacagggcctatgccacccacaacttcaactactgtcgtcgcccctctctctagctag

SEQ ID NO: 123556 - DNA, 369 bp, Artificial Sequence
  derived and/or modified sequence
tgacagaaccggcccctgatccggcccaagaagcggctgatcgtgagtaagagggcaggcacacaatgcacgaattgccagaccacaactactacgctgtggagaaggaacgcgtccggcgaccccgtgtgcaacgcctgtggactatactacaagctacaccaagtgaatcgacctcttacaatgcggaaggatggaatacaaaccaggaatcgaaaggcttcaggcaaaggcaaaaaaaaacgagggtctagtctgggaggtactggcgcggccgaggggcctgccctcctgtggtggcttaggtctgctcatgagggcacagaacatggcctacagaggaggggaggcgtgctgctgctgctgtag

SEQ ID NO: 123557 - DNA, 1005 bp, Artificial Sequence
  derived and/or modified sequence
atggagttccccggtctcggttctctggggacctcagaaccactgccccagttcgtggaccctgccctcgtgagcagtactccggaatctggcgtgttctttcccagcggacctgagggacttgatgccgcagcctcctccactgcacccagtacggcaaccgccgctgcggcagccctggcatactatcgggacgcggaggcctacagacacagtcctgtctttcaggtgtaccccttattgaactgtatggagggaatcccaggagggagcccatacgccggttgggcctatggtaaaactgggctttatccagcgtccactgtgtgcccaacaagagaggattctccacctcaggctgtcgaggacctcgatggcaagggcagtacttctttcctcgaaacactcaagaccgagcgactcagccccgacctcctgacgttgggcccagctctgccgtcaagtctgccagtgcctaattccgcttacggcggacccgacttctcttctactttcttctcgccgaccgggagtccgctgaatagtgctgcgtactcatcaccgaaactgcgtggtaccctgccactccctccctgtgaggcgcgagaatgcgtgaattgtggggcaaccgccacaccactctggcgcagagaccgaactggtcattacttatgcaatgcatgcggactgtatcacaagatgaatggccaaaatcgtcccctcatccgcccaaagaagcggctgatagtgtccaaaagagctggcactcaatgcaccaattgtcaaacgacaacaacaactctgtggaggaggaatgcgagcggtgacccagtctgcaacgcatgcggcctgtattacaagctccaccagcattattgcggcggtagcgcgcaactgatgcgcgcacagagcatggcgagcaggggcggtgtggtttctttttcatcttgttcccagaactccggccaaccaaaatcacttgggccaaggcaccccttggcatag

SEQ ID NO: 123558 - DNA, 1242 bp, Artificial Sequence
  derived and/or modified sequence
atggagtttccgggactaggaagccttggtacctcagagccactcccccagttcgtggaccccgctctcgtgagcagcacacccgagtccggggtgtttttcccctccggccctgaggggctcgacgccgctgctagctcaaccgccccttcgaccgccaccgctgctgccgctgctcttgcgtattacagagatgcagaagcctaccgccactcacctgtctttcaggtataccccctcctaaactgtatggaaggaattccgggaggttcaccctatgctggatgggcgtacggcaaaaccggcctctaccccgctagtacagtctgccctactcgtgaggactctccccctcaggccgtggaagacttagacggcaaggggagcactagctttctggaaacccttaagacggagcgccttagccctgacctcctcacgctcggtcccgctctgccgagcagcctgcctgtccctaacagtgcctacggagggcctgacttcagcagcaccttcttttctcctacaggctctcccttgaacagcgcagcttacagctctcccaaactgcggggaacgctgcccctgccaccgtgtgaggcccgagaatgcgtcaactgcggcgcaactgccacaccactttggagacgtgataggaccggtcactatttatgtaatgcatgcggcctgtaccacaagatgaatggccaaaatcgaccgctgattagacccaagaagaggttgattgtgtctaagcgcgcagggacccagtgtaccaactgtcagacaacgaccaccaccctgtggcgaaggaacgccagtggcgatcccgtgtgcaacgcttgtggcctttattacaaactccatcaagtcaatcgaccactgacaatgagaaaagatggcatccagacacggaaccgcaaggcttctggaaagggcaagaaaaaacggggtagctctttggggggtactggggctgccgagggcccagccggaggttttatggtagtggctggcggaagcggaagcgggaattgtggggaggttgcttccggactgacactagggccacccggaacagctcacctatatcagggcctaggtcccgttgtcctgagtggcccagtctctcacttaatgccattccccggtccgctactcggctcaccaaccggaagcttcccaacaggccctatgccccctactacctccactaccgtagtcgcgccactcagctcctag

SEQ ID NO: 123559 - DNA, 369 bp, Artificial Sequence
  derived and/or modified sequence
tgacagaatcgtcccctgatccgtcccaaaaaacggttgatcgtgtccaagcgggcaggcacacaatgcaccaactgccaaaccacaaccactactctttggagaagaaatgcaagcggcgatccggtgtgtaacgcctgtggtctatactacaagctgcatcaggtcaaccgtccccttaccatgcggaaagacggcatacagacaaggaaccggaaagcctcaggcaagggcaagaaaaaacggggttcctcactggggggtactggagcagcagaaggcccagcactgttatggtggctccgcagcgctcacgaaggtacagagcacgggctgcagaggagaggtggcgtactgcttctactttag

SEQ ID NO: 123560 - protein, 443 aa, Artificial Sequence
  derived and/or modified sequence
MEVTADQPRWVSHHHPAVLNGQHPDTHHPGLSHSYMDAAQYPLPEEVDVLFNIDGQGNHVPPYYGNSVRATVQRYPPTHHGSQVCRPPLLHGSLPWLDGGKALGSHHTASPWNLSPFSKTSIHHGSPGPLSVYPPASSSSLSGGHASPHLFTFPPTPPKDVSPDPSLSTPGSAGSARQDEKECLKYQVPLPDSMKLESSHSRGSMTALGGASSSTHHPITTYPPYVPEYSSGLFPPSSLLGGSPTGFGCKSRPKARSSTGRECVNCGATSTPLWRRDGTGHYLCNACGLYHKMNGQNRPLIKPKRRLSAARRAGTSCANCQTTTTTLWRRNANGDPVCNACGLYYKLHNINRPLTMKKEGIQTRNRKMSSKSKKCKKVHDSLEDFPKNSSFNPAALSRHMSSLSHISPFSHSSHMLTTPTPMHPPSSLSFGPHHPSSMVTAMG

SEQ ID NO: 123561 - DNA, 3067 bp, Artificial Sequence
  derived and/or modified sequence
ggcgccgtcttgatactttcagaaagaatgcattccctgtaaaaaaaaaaaaaaaatactgagagagggagagagagagagaagaagagagagagacggagggagagcgagacagagcgagcaacgcaatctgaccgagcaggtcgtacgccgccgcctcctcctcctctctgctcttcgctacccaggtgacccgaggagggactccgcctccgagcggctgaggaccccggtgcagaggagcctggctcgcagaattgcagagtcgtcgcccctttttacaacctggtcccgttttattctgccgtacccagtttttggatttttgtcttccccttcttctctttgctaaacgacccctccaagataatttttaaaaaaccttctcctttgctcacctttgcttcccagccttcccatccccccaccgaaagcaaatcattcaacgacccccgaccctccgacggcaggagccccccgacctcccaggcggaccgccctccctccccgcgcgcgggttccgggcccggcgagagggcgcgagcacagccgaggccatggaggtgacggcggaccagccgcgctgggtgagccaccaccaccccgccgtgctcaacgggcagcacccggacacgcaccacccgggcctcagccactcctacatggacgcggcgcagtacccgctgccggaggaggtggatgtgctttttaacatcgacggtcaaggcaaccacgtcccgccctactacggaaactcggtcagggccacggtgcagaggtaccctccgacccaccacgggagccaggtgtgccgcccgcctctgcttcatggatccctaccctggctggacggcggcaaagccctgggcagccaccacaccgcctccccctggaatctcagccccttctccaagacgtccatccaccacggctccccggggcccctctccgtctaccccccggcctcgtcctcctccttgtcggggggccacgccagcccgcacctcttcaccttcccgcccaccccgccgaaggacgtctccccggacccatcgctgtccaccccaggctcggccggctcggcccggcaggacgagaaagagtgcctcaagtaccaggtgcccctgcccgacagcatgaagctggagtcgtcccactcccgtggcagcatgaccgccctgggtggagcctcctcgtcgacccaccaccccatcaccacctacccgccctacgtgcccgagtacagctccggactcttcccccccagcagcctgctgggcggctcccccaccggcttcggatgcaagtccaggcccaaggcccggtccagcacaggcagggagtgtgtgaactgtggggcaacctcgaccccactgtggcggcgagatggcacgggacactacctgtgcaacgcctgcgggctctatcacaaaatgaacggacagaaccggcccctcattaagcccaagcgaaggctgtctgcagccaggagagcagggacgtcctgtgcgaactgtcagaccaccacaaccacactctggaggaggaatgccaatggggaccctgtctgcaatgcctgtgggctctactacaagcttcacaatattaacagacccctgactatgaagaaggaaggcatccagaccagaaaccgaaaaatgtctagcaaatccaaaaagtgcaaaaaagtgcatgactcactggaggacttccccaagaacagctcgtttaacccggccgccctctccagacacatgtcctccctgagccacatctcgcccttcagccactccagccacatgctgaccacgcccacgccgatgcacccgccatccagcctgtcctttggaccacaccacccctccagcatggtcaccgccatgggttagagccctgctcgatgctcacagggcccccagcgagagtccctgcagtccctttcgacttgcatttttgcaggagcagtatcatgaagcctaaacgcgatggatatatgtttttgaaggcagaaagcaaaattatgtttgccactttgcaaaggagctcactgtggtgtctgtgttccaaccactgaatctggaccccatctgtgaataagccattctgactcatatcccctatttaacagggtctctagtgctgtgaaaaaaaaaatgctgaacattgcatataacttatattgtaagaaatactgtacaatgactttattgcatctgggtagctgtaaggcatgaaggatgccaagaagtttaaggaatatgggagaaatagtgtggaaattaagaagaaactaggtctgatattcaaatggacaaactgccagttttgtttcctttcactggccacagttgtttgatgcattaaaagaaaataaaaaaaagaaaaaagagaaaagaaaaaaaaagaaaaaagttgtaggcgaatcatttgttcaaagctgttggcctctgcaaaggaaataccagttctgggcaatcagtgttaccgttcaccagttgccgttgagggtttcagagagcctttttctaggcctacatgctttgtgaacaagtccctgtaattgttgtttgtatgtataattcaaagcaccaaaataagaaaagatgtagatttatttcatcatattatacagaccgaactgttgtataaatttatttactgctagtcttaagaactgctttctttcgtttgtttgtttcaatattttccttctctctcaatttttggttgaataaactagattacattcagttggcctaaggtggttgtgctcggagggtttcttgtttcttttccattttgtttttggatgatatttattaaatagcttctaagagtccggcggcatctgtcttgtccctattcctgcagcctgtgctgagggtagcagtgtatgagctaccagcgtgcatgtcagcgaccctggcccgacaggccacgtcctgcaatcggcccggctgcctcttcgccctgtcgtgttctgtgttagtgatcactgcctttaatacagtctgttggaataatattataagcataataataaagtgaaaatattttaaaactacaa

SEQ ID NO: 123562 - DNA, 1332 bp, Artificial Sequence
  derived and/or modified sequence
atggaggtgaccgccgaccagcccagatgggtgagccaccaccaccccgccgtgctgaacggccagcaccccgacacccaccaccccggcctgagccacagctacatggacgccgcccagtaccccctgcccgaggaggtggacgtgctgttcaacatcgacggccagggcaaccacgtgcccccctactacggcaacagcgtgagagccaccgtgcagagatacccccccacccaccacggcagccaggtgtgcagaccccccctgctgcacggcagcctgccctggctggacggcggcaaggccctgggcagccaccacaccgccagcccctggaacctgagccccttcagcaagaccagcatccaccacggcagccccggccccctgagcgtgtacccccccgccagcagcagcagcctgagcggcggccacgccagcccccacctgttcaccttcccccccaccccccccaaggacgtgagccccgaccccagcctgagcacccccggcagcgccggcagcgccagacaggacgagaaggagtgcctgaagtaccaggtgcccctgcccgacagcatgaagctggagagcagccacagcagaggcagcatgaccgccctgggcggcgccagcagcagcacccaccaccccatcaccacctaccccccctacgtgcccgagtacagcagcggcctgttcccccccagcagcctgctgggcggcagccccaccggcttcggctgcaagagcagacccaaggccagaagcagcaccggcagagagtgcgtgaactgcggcgccaccagcacccccctgtggagaagagacggcaccggccactacctgtgcaacgcctgcggcctgtaccacaagatgaacggccagaacagacccctgatcaagcccaagagaagactgagcgccgccagaagagccggcaccagctgcgccaactgccagaccaccaccaccaccctgtggagaagaaacgccaacggcgaccccgtgtgcaacgcctgcggcctgtactacaagctgcacaacatcaacagacccctgaccatgaagaaggagggcatccagaccagaaacagaaagatgagcagcaagagcaagaagtgcaagaaggtgcacgacagcctggaggacttccccaagaacagcagcttcaaccccgccgccctgagcagacacatgagcagcctgagccacatcagccccttcagccacagcagccacatgctgaccacccccacccccatgcacccccccagcagcctgagcttcggcccccaccaccccagcagcatggtgaccgccatgggctag

SEQ ID NO: 123563 - DNA, 393 bp, Artificial Sequence
  derived and/or modified sequence
atggaggtgaccgccgaccagcccagatgggtgagccaccaccaccccgccgtgctgaacggccagcaccccgacacccaccaccccggcctgagccacagctacatggacgccgcccagtaccccctgcccgaggaggtggacgtgctgttcaacatcgacggccagggcaaccacgtgcccccctactacggcaacagcgtgagagccaccgtgcagagatacccccccacccaccacggcagccaggtgtgcagaccccccctgctgcacggcagcctgccctggctggacggcggcaaggccctgggcagccaccacaccgccagcccctggaacctgagaccctgcctgcagtgcctgtgggccctgctgcaggccagccagtgctag

SEQ ID NO: 123564 - DNA, 1332 bp, Artificial Sequence
  derived and/or modified sequence
atggaggtgacagccgatcagccccgatgggtctcgcaccatcaccccgcagtgttgaacggccagcatccagatacacaccaccccgggttgagtcatagttacatggatgcggcccagtaccccctgccagaggaagtggacgttctctttaatatcgatggccaggggaatcatgtcccaccctattacgggaactccgttagggctactgtacaacggtatcccccaacacaccatgggagtcaggtatgcagacccccattattgcacggctctcttccttggctcgacggcggcaaagcgttgggatctcaccataccgcctctccctggaacctctctcccttttctaaaacgtctatacaccatgggtcacctgggcctctgtcagtgtacccacccgcttccagcagctcactgagtggaggacatgctagtccacacttattcacgttcccgcctactcctccaaaagatgtcagtcctgatcctagccttagcacacctggttcagcgggctctgccaggcaggacgaaaaagagtgtttaaagtaccaggtacccctccccgactcaatgaagctggaaagttcccatagccggggcagtatgaccgctctcggtggagccagttcttcaactcaccatcccattaccacataccccccatacgtcccagaatactctagcggactatttccaccttccagtctcttggggggtagtcccacaggattcggctgtaagagcaggcccaaagctcgctctagtactggaagagagtgtgtgaactgcggcgctactagtacgcctctgtggcgccgtgacgggaccggccactacctgtgcaacgcttgcggactctaccacaaaatgaatggacagaataggcccctgattaaacccaagcggcggttgtcagcagcccgccgggctggcacatcatgcgccaactgtcagaccactaccactacgctctggcggcggaacgccaatggagacccagtgtgcaatgcatgcggtctctattacaaactgcataacatcaatcgcccactcaccatgaaaaaggaggggattcagacgcggaacagaaagatgtcttccaagagcaaaaaatgcaagaaggttcatgatagtctggaagattttcccaagaatagctccttcaaccccgccgccctgagccgccatatgtcgtcactgtcccacatctcccctttctcgcattctagtcacatgctaacaacccctactcccatgcatcccccatctagtctgtccttcggaccccatcaccccagcagcatggtaactgcaatgggctag

SEQ ID NO: 123565 - DNA, 393 bp, Artificial Sequence
  derived and/or modified sequence
atggaagttactgccgatcagcctcggtgggtatcacaccatcatcctgcggtgttaaatggccagcaccccgatacacatcatcccggcctctcacatagttacatggacgcagctcagtatccgttaccagaggaggtcgacgttctttttaacattgatggccaggggaatcacgttcccccgtactatgggaactctgtgagagctaccgtgcagcgataccctccaacccatcatggatcccaggtctgtcgccctcctctgttgcatggcagcctgccctggcttgatggtggaaaagccctcggttcacaccacactgcttccccctggaacctacgcccctgtcttcagtgcctgtgggccctcctgcaggcctctcaatgttag

SEQ ID NO: 123566 - DNA, 2654 bp, Artificial Sequence
  derived and/or modified sequence
gagagcgagacagagcgagcaacgcaatctgaccgagcaggtcgtacgccgccgcctcctcctcctctctgctcttcgctacccaggtgacccgaggagggactccgcctccgagcggctgaggaccccggtgcagaggagcctggctcgcagaattgcagagtcgtcgcccctttttacaacctggtcccgttttattctgccgtacccagtttttggatttttgtcttccccttcttctctttgctaaacgacccctccaagataatttttaaaaaaccttctcctttgctcacctttgcttcccagccttcccatccccccaccgaaagcaaatcattcaacgacccccgaccctccgacggcaggagccccccgacctcccaggcggaccgccctccctccccgcgcgcgggttccgggcccggcgagagggcgcgagcacagccgaggccatggaggtgacggcggaccagccgcgctgggtgagccaccaccaccccgccgtgctcaacgggcagcacccggacacgcaccacccgggcctcagccactcctacatggacgcggcgcagtacccgctgccggaggaggtggatgtgctttttaacatcgacggtcaaggcaaccacgtcccgccctactacggaaactcggtcagggccacggtgcagaggtaccctccgacccaccacgggagccaggtgtgccgcccgcctctgcttcatggatccctaccctggctggacggcggcaaagccctgggcagccaccacaccgcctccccctggaatctcagccccttctccaagacgtccatccaccacggctccccggggcccctctccgtctaccccccggcctcgtcctcctccttgtcggggggccacgccagcccgcacctcttcaccttcccgcccaccccgccgaaggacgtctccccggacccatcgctgtccaccccaggctcggccggctcggcccggcaggacgagaaagagtgcctcaagtaccaggtgcccctgcccgacagcatgaagctggagtcgtcccactcccgtggcagcatgaccgccctgggtggagcctcctcgtcgacccaccaccccatcaccacctacccgccctacgtgcccgagtacagctccggactcttcccccccagcagcctgctgggcggctcccccaccggcttcggatgcaagtccaggcccaaggcccggtccagcacaggcagggagtgtgtgaactgtggggcaacctcgaccccactgtggcggcgagatggcacgggacactacctgtgcaacgcctgcgggctctatcacaaaatgaacggacagaaccggcccctcattaagcccaagcgaaggctgtctgcagccaggagagcagggacgtcctgtgcgaactgtcagaccaccacaaccacactctggaggaggaatgccaatggggaccctgtctgcaatgcctgtgggctctactacaagcttcacaatattaacagacccctgactatgaagaaggaaggcatccagaccagaaaccgaaaaatgtctagcaaatccaaaaagtgcaaaaaagtgcatgactcactggaggacttccccaagaacagctcgtttaacccggccgccctctccagacacatgtcctccctgagccacatctcgcccttcagccactccagccacatgctgaccacgcccacgccgatgcacccgccatccagcctgtcctttggaccacaccacccctccagcatggtcaccgccatgggttagagccctgctcgatgctcacagggcccccagcgagagtccctgcagtccctttcgacttgcatttttgcaggagcagtatcatgaagcctaaacgcgatggatatatgtttttgaaggcagaaagcaaaattatgtttgccactttgcaaaggagctcactgtggtgtctgtgttccaaccactgaatctggaccccatctgtgaataagccattctgactcatatcccctatttaacagggtctctagtgctgtgaaaaaaaaaatgctgaacattgcatataacttatattgtaagaaatactgtacaatgactttattgcatctgggtagctgtaaggcatgaaggatgccaagaagtttaaggaatatgggagaaatagtgtggaaattaagaagaaactaggtctgatattcaaatggacaaactgccagttttgtttcctttcactggccacagttgtttgatgcattaaaagaaaataaaaaaaagaaaaaagagaaaagaaaaaaaaagaaaaaagttgtaggcgaatcatttgttcaaagctgttggcctctgcaaaggaaataccagttctgggcaatcagtgttaccgttcaccagttgccgttgagggtttcagagagcctttttctaggcctacatgctttgtgaacaagtccctgtaattgttgtttgtatgtataattcaaagcaccaaaataagaaaagatgtagatttatttcatcatattatacagaccgaactgttgtataaatttatttactgctagtcttaagaactgctttctttcgtttgtttgtttcaatattttccttctctctcaatttttggttgaataaactagattacattcagttggc

SEQ ID NO: 123567 - DNA, 947 bp, Artificial Sequence
  derived and/or modified sequence
ggcgccgtcttgatactttcagaaagaatgcattccctgtaaaaaaaaaaaaaaaatactgagagagggagagagagagagaagaagagagagagacggagggagagcgagacagagcgagcaacgcaatctgaccgagcaggtcgtacgccgccgcctcctcctcctctctgctcttcgctacccaggtgacccgaggagggactccgcctccgagcggctgaggaccccggtgcagaggagcctggctcgcagaattgcagagtcgtcgcccctttttacaacctggtcccgttttattctgccgtacccagtttttggatttttgtcttccccttcttctctttgctaaacgacccctccaagataatttttaaaaaaccttctcctttgctcacctttgcttcccagccttcccatccccccaccgaaagcaaatcattcaacgacccccgaccctccgacggcaggagccccccgacctcccaggcggaccgccctccctccccgcgcgcgggttccgggcccggcgagagggcgcgagcacagccgaggccatggaggtgacggcggaccagccgcgctgggtgagccaccaccaccccgccgtgctcaacgggcagcacccggacacgcaccacccgggcctcagccactcctacatggacgcggcgcagtacccgctgccggaggaggtggatgtgctttttaacatcgacggtcaaggcaaccacgtcccgccctactacggaaactcggtcagggccacggtgcagaggtaccctccgacccaccacgggagccaggtgtgccgcccgcctctgcttcatggatccctaccctggctggacggcggcaaagccctgggcagccaccacaccgcctccccctggaatctcagaccctgtctgcaatgcctgtgggctctactacaagcttcacaatgt

SEQ ID NO: 123568 - DNA, 1332 bp, Artificial Sequence
  derived and/or modified sequence
atggaggtgacagctgaccagccccgctgggtgagccaccaccaccctgctgtgctgaatggccagcacccagacacccaccaccctggcctgagccacagctacatggatgctgcccagtaccccctgcctgaggaggtggatgtgctcttcaacattgatggccagggcaaccacgtgcccccctactacggcaacagcgtgcgggccaccgtgcagcgctacccacccacccaccacggcagccaggtgtgcaggcctcccctgctgcacggcagcctgccctggctggatggcggcaaggccctgggcagccaccacacagccagcccctggaacctgagccccttcagcaagaccagcatccaccacggcagccctggccccctgtctgtgtaccccccagccagcagcagcagcctgagcggcggccacgccagcccccacctgttcaccttcccccccaccccacccaaggatgtgtccccagaccccagcctgagcaccccaggcagcgctggcagcgcccggcaggatgagaaggagtgcctgaagtaccaggtgcccctgcctgacagcatgaagctggagagcagccacagccggggctccatgacagccctgggcggggccagcagcagcacccaccaccccatcaccacctacccaccctacgtgcctgagtacagcagcggcctcttcccccccagcagcctgctgggcggcagccccactggatttggctgcaagagccggcccaaggcccggagcagcacaggccgggagtgtgtgaactgtggggccaccagcacccccctgtggaggagagatggcaccggccactacctgtgcaatgcctgtggcctgtaccacaagatgaatggccagaaccggcccctcatcaagcccaagaggcggctgtctgctgccaggagagctggcaccagctgtgccaactgccagaccaccaccaccaccctgtggaggagaaatgccaatggagaccctgtgtgcaatgcctgtggcctgtactacaagctgcacaacatcaaccggcccctgaccatgaagaaggagggcatccagaccaggaacaggaagatgagcagcaagagcaagaagtgcaagaaggtgcatgacagcctggaggacttccccaagaacagcagcttcaacccagctgccctgagccgccacatgagcagcctgagccacatcagccccttcagccacagcagccacatgctgaccacccccacccccatgcacccccccagcagcctgagctttggcccccaccaccccagctccatggtgacagccatgggctag

SEQ ID NO: 123569 - DNA, 393 bp, Artificial Sequence
  derived and/or modified sequence
atggaggtgacagctgaccagccccgctgggtgagccaccaccaccctgctgtgctgaatggccagcacccagacacccaccaccctggcctgagccacagctacatggatgctgcccagtaccccctgcctgaggaggtggatgtgctcttcaacattgatggccagggcaaccacgtgcccccctactacggcaacagcgtgcgggccaccgtgcagcgctacccacccacccaccacggcagccaggtgtgcaggcctcccctgctgcacggcagcctgccctggctggatggcggcaaggccctgggcagccaccacacagccagcccctggaacctgcggccctgcctgcagtgcctgtgggccctgctgcaggccagccagtgctag

SEQ ID NO: 123570 - DNA, 1332 bp, Artificial Sequence
  derived and/or modified sequence
atggaggtgaccgccgaccagccccggtgggtgagccaccaccaccccgcagtgttaaatggacaacatcccgacacacaccatcccggcctttctcacagttacatggacgctgcacagtatcctctacctgaggaagtggacgtcctgtttaatattgatgggcagggaaatcatgtgcccccatattatggcaacagcgtgagagctaccgtgcaaagatacccacccacccaccatggcagccaggtgtgccgcccgccactgctgcacggctctcttccttggctagacggcggcaaggccttgggatcccatcacactgcaagtccatggaatttatcacctttcagcaaaacttccattcatcacgggagtcctgggcctctgagtgtgtatcctcctgcctcttcctcaagtctgtctggagggcacgcgagcccccaccttttcacgtttcctccaaccccacccaaagatgtttcacctgatccatctctcagtactcccggaagcgccggcagtgctcgccaggatgagaaagaatgtctaaaatatcaggtccctcttcccgactccatgaagctagagtctagtcatagtcgcggcagcatgacagcattgggtggcgcgagctcaagtacccaccatcccattacaacttatccaccgtatgtacctgagtactcctctggactcttccctccctcctccctgctgggtggcagcccaaccgggttcggatgtaaatctcgcccaaaagcgcggtcatccaccggccgagagtgcgttaactgcggggcgacttccactccgctgtggaggcgtgatggaactggccattatctgtgtaacgcctgtgggctctaccacaaaatgaacggacagaatcgcccgctgattaaacccaagcggaggctgtccgccgctcggagggcaggtacctcctgtgccaattgtcagaccacgaccacgacactgtggaggcgtaatgccaacggggacccagtgtgcaatgcttgcggtctgtactacaagctacacaatatcaatcggccgctcacaatgaagaaagagggcatacagactcgcaaccgcaagatgtcttctaagtctaagaagtgcaaaaaggttcacgacagcctggaggatttccccaaaaatagctctttcaacccagctgctctctctagacacatgtcttccctttcccatatcagccctttttcacacagctcccacatgctgaccacacctactcctatgcatccgccatcttctttgagtttcggaccacaccacccatcatctatggtgacagcaatgggctag

SEQ ID NO: 123571 - DNA, 393 bp, Artificial Sequence
  derived and/or modified sequence
atggaggtgaccgccgaccagccccggtgggtgagccaccaccaccctgctgtgctgaatggtcagcacccagacacccaccatcccggcttgtcacacagctatatggatgcagctcagtacccattacctgaagaggtggacgtactgttcaacattgacggtcaggggaatcacgtgccaccctattacggaaacagcgttcgagcaaccgtccagaggtaccccccaacccatcatgggagtcaagtttgtaggcccccgctcttgcacggatccctgccatggcttgatggaggcaaagctttggggtcacatcataccgcctctccttggaatctcagaccttgcctgcaatgtctgtgggccctgctgcaggcctctcaatgttag

SEQ ID NO: 123572 - DNA, 1332 bp, Artificial Sequence
  derived and/or modified sequence
atggaggtgaccgccgatcagcccagatgggtttcccaccatcatcctgccgttctgaatggtcagcatcccgatacccaccaccccggattatcacacagctatatggacgccgctcagtatcccttgcctgaggaggtcgatgtattattcaacatcgatggtcaaggtaaccacgtgccaccctattacggcaacagcgtgagggctaccgtccagaggtacccacctacccaccacggaagtcaggtgtgtagaccgcctttgctccacggttctcttccatggctggatggaggcaaggctctcggatcgcatcacacagccagcccttggaacctctcacctttctccaagacctcaattcaccacggaagccccggtccactgtccgtttacccccctgcctcgtcctcctctctaagtggtgggcatgcctccccacatctcttcaccttcccaccaacgccccctaaggacgtgagccccgacccatctctctcaactcccggaagcgcagggtcagctaggcaggatgaaaaagaatgcttgaagtaccaggtgcccttgcctgattccatgaagctggagagcagccattcgaggggtagtatgactgccctggggggtgcgtcttcatccactcaccatcccattacaacctatccgccatatgtgccagaatacagctctggtttattcccaccgtcttccctgttggggggatcaccaactggatttggctgcaagtcgcggcctaaggcgaggagtagcactggacgagaatgtgtgaattgcggggctacgtcgacgccattatggcgtcgggacggcacaggccattatctgtgtaatgcatgcggcctataccataagatgaacgggcagaatcggccacttatcaaaccgaaacgcagactgagcgcagcacggagagccggtaccagctgcgctaattgtcagaccactaccaccactctctggcggcgaaatgctaacggtgatcccgtgtgcaacgcttgcggactttactataagttgcacaatatcaatcggcctctcaccatgaagaaggagggtatccagactcgaaaccgtaaaatgtcctctaaatccaaaaagtgtaaaaaggtgcacgattcccttgaggattttcctaagaactcctcctttaatcctgccgcactgtcccgacatatgtcgtccctttctcatatatcgccattctctcattcatcccatatgttgacaaccccaaccccaatgcacccaccttcatcattatcgtttgggccacatcatcccagttcaatggtaactgcaatgggatag

SEQ ID NO: 123573 - DNA, 393 bp, Artificial Sequence
  derived and/or modified sequence
atggaggtgacggcagaccaacccaggtgggtctcccaccaccatccggcagtgcttaatggacagcatcctgatacccatcaccccggtctgtcccattcatatatggatgcggctcaatatcccttgcctgaagaggtggatgttctgttcaatatcgatggtcaaggcaaccacgttcccccatattatggcaactcagtccgagccactgtccagagatacccacctacccatcacggaagccaggtttgtagacctccactgctgcacggttcattgccctggctggacggcggtaaggctctcggctcgcatcataccgcgtccccctggaatctacgtccttgcttacaatgcctgtgggccctacttcaggcctcacaatgctag

SEQ ID NO: 123574 - protein, 441 aa, Artificial Sequence
  derived and/or modified sequence
MYQSLPWPPTTGRPPVPTRRAAPAPSCTARAPRPRQSTCPHRGALLRAGPVLPPGRRRGLCVRRASGGSSGGAASGAGPGTQQGSPGWSQAGADGAAYTPPPVSPRFSFPGTTGSLAAAAAAAAAREAAAYSSGGGAAGAGLAGREQYGRAGFAGSYSSPYPAYMADVGASWAAAAAASAGPFDSPVLHSLPGRANPAARHPNLDMFDDFSEGRECVNCGAMSTPLWRRDGTGHYLCNACGLYHKMNGINRPLIKPQRRLSASRRVGLSCANCQTTTTTLWRRNAEGEPVCNACGLYMKLHGVPRPLAMRKEGIQTRKRKPKNLNKSKTPAAPSGSESLPPASGASSNSSNATTSSSEEMRPIKTEPGLSSHYGHSSSVSQTFSVSAMSGHGPSIHPVLSALKLSPQGYASPVSQSPQTSSKQDSWNSLVLADSHGDIITA

SEQ ID NO: 123575 - protein, 442 aa, Artificial Sequence
  derived and/or modified sequence
MYQSLAMAANHGPPPGAYEAGGPGAFMHGAGAASSPVYVPTPRVPSSVLGLSYLQGGGAGSASGGASGGSSGGAASGAGPGTQQGSPGWSQAGADGAAYTPPPVSPRFSFPGTTGSLAAAAAAAAAREAAAYSSGGGAAGAGLAGREQYGRAGFAGSYSSPYPAYMADVGASWAAAAAASAGPFDSPVLHSLPGRANPAARHPNLDMFDDFSEGRECVNCGAMSTPLWRRDGTGHYLCNACGLYHKMNGINRPLIKPQRRLSASRRVGLSCANCQTTTTTLWRRNAEGEPVCNACGLYMKLHGVPRPLAMRKEGIQTRKRKPKNLNKSKTPAAPSGSESLPPASGASSNSSNATTSSSEEMRPIKTEPGLSSHYGHSSSVSQTFSVSAMSGHGPSIHPVLSALKLSPQGYASPVSQSPQTSSKQDSWNSLVLADSHGDIITA

SEQ ID NO: 123576 - DNA, 3419 bp, Artificial Sequence
  derived and/or modified sequence
ttggaggcggccggcgcaggggccgcgagaggcttcgtcgccgctgcagctccgggggctcccaggggagcgtgcgcggaacctccaggcccagcaggaccccggctgcggcgaggaggaaggagccagcctagcagcttctgcgcctgtggccgcgggtgtcctggaggcctctcggtgtgacgagtgggggacccgaaggctcgtgcgccacctccaggcctggacgctgccctccgtcttctgcccccaataggtgcgccggaccttcaggccctggggtgaattcagctgctcctacatcagcttccggaaccaccaaaaattcaaattgggattttccggagtaaacaagagcctagagccctttgctcaatgctggatttaatacgtatatatttttaagcgagttggttttttcccctttgatttttgatcttcgcgacagttcctcccacgcatattatcgttgttgccgtcgttttctctccccgcgtggctccttgacctgcgagggagagagaggacaccgaagccgggagctcgcagggaccatgtatcagagcttggccatggccgccaaccacgggccgccccccggtgcctacgaggcgggcggccccggcgccttcatgcacggcgcgggcgccgcgtcctcgccagtctacgtgcccacaccgcgggtgccctcctccgtgctgggcctgtcctacctccagggcggaggcgcgggctctgcgtccggaggcgcctcgggcggcagctccggtggggccgcgtctggtgcggggcccgggacccagcagggcagcccgggatggagccaggcgggagccgacggagccgcttacaccccgccgccggtgtcgccgcgcttctccttcccggggaccaccgggtccctggcggccgccgccgccgctgccgcggcccgggaagctgcggcctacagcagtggcggcggagcggcgggtgcgggcctggcgggccgcgagcagtacgggcgcgccggcttcgcgggctcctactccagcccctacccggcttacatggccgacgtgggcgcgtcctgggccgcagccgccgccgcctccgccggccccttcgacagcccggtcctgcacagcctgcccggccgggccaacccggccgcccgacaccccaatctcgatatgtttgacgacttctcagaaggcagagagtgtgtcaactgtggggctatgtccaccccgctctggaggcgagatgggacgggtcactatctgtgcaacgcctgcggcctctaccacaagatgaacggcatcaaccggccgctcatcaagcctcagcgccggctgtccgcctcccgccgagtgggcctctcctgtgccaactgccagaccaccaccaccacgctgtggcgccgcaatgcggagggcgagcctgtgtgcaatgcctgcggcctctacatgaagctccacggggtccccaggcctcttgcaatgcggaaagaggggatccaaaccagaaaacggaagcccaagaacctgaataaatctaagacaccagcagctccttcaggcagtgagagccttcctcccgccagcggtgcttccagcaactccagcaacgccaccaccagcagcagcgaggagatgcgtcccatcaagacggagcctggcctgtcatctcactacgggcacagcagctccgtgtcccagacgttctcagtcagtgcgatgtctggccatgggccctccatccaccctgtcctctcggccctgaagctctccccacaaggctatgcgtctcccgtcagccagtctccacagaccagctccaagcaggactcttggaacagcctggtcttggccgacagtcacggggacataatcactgcgtaatcttccctcttccctcctcaaattcctgcacggacctgggacttggaggatagcaaagaaggaggccctgggctcccaggggccggcctcctctgcctggtaatgactccagaacaacaactgggaagaaacttgaagtcgacaatctggttaggggaagcgggtgttggattttctcagatgcctttacacgctgatgggactggagggagcccacccttcagcacgagcacactgcatctctcctgtgagttggagacttctttcccaagatgtccttgtcccctgcgttccccactgtggcctagaccgtgggttttgcattgtgtttctagcaccgaggatctgagaacaagcggagggccgggccctgggacccctgctccagcccgaatgacggcatctgtttgccatgtacctggatgcgacgggcccctggggacaggcccttgccccatccatccgcttgaggcatggcaccgccctgcatccctaataccaaatctgactccaaaattgtggggtgtgacatacaagtgactgaacacttcctggggagctacaggggcacttaacccaccacagcacagcctcatcaaaatgcagctggcaacttctcccccaggtgccttccccctgctgccggcctttgctccttcacttccaacatctctcaaaataaaaatccctcttcccgctctgagcgattcagctctgcccgcagcttgtacatgtctctcccctggcaaaacaagagctgggtagtttagccaaacggcaccccctcgagttcactgcagacccttcgttcaccgtgtcacacatagaggggttctgagtaagaacaaaacgttctgctgctcaagccagtctggcaagcactcagcccagcctcgaggtccttctggggagagtgtaagtggacagagtcctggtcagggggcaggagtgtcccaagggctggcccacctgctgtctgtctgctcctcctagcccttggtcagatggcagccagagtccctcaggacctgcagcctcgccccggcagaagtcttttgtccaggaggcaaaaagccagagattctgcaacacgaattcgaagcaaacaaacacaacacaacagaattcctggaaagaagacgactgctaagacacggcaggggggcctggagggagcctccgactctgagctgctccgggatctgccgcgttctcctctgcacattgctgtttctgcccctgatgctggagctcaaggagactccttcctctttctcagcagagctgtagctgactgtggcattactacgcctccccacacgcccagacccctcactccaaaatcctactggctgtagcagagaatacctttgaaccaagattctgttttaatcatcatttacattgttttcttccaaaggccccctcgtataccctccctaacccacaaacctgttaacattgtcttaaggtgaaatggctggaaaatcagtatttaactaataaatttatctgtattcctcttaaaaaaaaaaa

SEQ ID NO: 123577 - DNA, 1326 bp, Artificial Sequence
  derived and/or modified sequence
atgtaccagagtctgccatggcctcccactactggtcgacctcctgtgcccactcggcgagccgcccccgcgccttcctgcactgcccgggctccccgaccccgtcagtctacctgcccacacagaggtgcattgctgagggccgggcctgtcttaccccccggccgaaggaggggtttgtgcgttcgtcgggcaagtggtgggtcctccggcggcgccgcctcaggagcggggcccggaacacagcagggcagtccagggtggtcccaggccggagccgatggtgcggcatatacccctcctcctgtaagcccaagatttagctttcctggcacaaccggcagtctcgccgccgctgcagccgccgctgccgctagagaggctgccgcctattctagtggcggcggggcagctggggctgggctggccggccgcgagcaatacggacgcgcagggttcgccgggtcttatagcagcccctatcccgcctatatggccgacgtgggcgcctcatgggccgctgcagcggccgcatccgctggtcctttcgatagtccagtactccactcccttcctggacgcgcaaacccagccgcacgccaccctaatttggatatgtttgatgactttagtgagggaagagagtgcgtgaactgcggagccatgtcgacaccactgtggcgaagagacggcaccggtcattacctttgcaacgcctgcggattatatcataagatgaacggaataaatcgtccactcatcaaaccacagcgccgtctatctgcctctcggagggtcggattatcttgcgccaattgtcagacgactacaactaccttgtggcgcagaaatgctgagggtgaacccgtgtgcaacgcatgtggactttatatgaagctccacggagttccgcggccactcgccatgagaaaggagggtatccaaaccaggaagcgtaagcctaaaaacctcaacaagtccaagacccccgctgccccatccggcagcgaatcactgccacctgcctctggcgcttcaagcaatagctcaaatgccacaacctcctcttcagaggaaatgagaccaatcaagacagagcctggcctgagcagccactatgggcactcctcaagtgtttcgcagaccttctctgtgagcgcaatgagcggccacggaccttcaattcacccggtgttatccgcccttaagcttagcccacagggctacgcgtctcctgtcagtcaatcgccccagacctcatcgaaacaagactcttggaattcgctcgtcctggctgactcgcatggagacataatcaccgcttag

SEQ ID NO: 123578 - DNA, 1329 bp, Artificial Sequence
  derived and/or modified sequence
atgtaccagtctctggccatggcagcaaaccatggtcctcccccaggcgcatacgaagctggagggcccggagccttcatgcacggcgcaggagctgccagctctcccgtatacgtgcccacacctcgggttccaagctccgtcttagggttgtcatacttgcaggggggcggggccgggtccgcaagtggtggtgcatccggtggatcttccggcggagccgcgtctggagccggacctgggacacagcaaggatctcccggatggtcccaggcaggcgccgacggcgcggcttacaccccccctcctgtgtctccacgcttcagctttccgggaacaacaggcagtctggccgccgccgcagcagccgccgctgctagagaagcagcggcctattccagtggcggaggcgctgcgggcgcaggacttgccggccgtgagcaatacggaagagctggcttcgctggctcctattcttctccataccccgcctatatggccgatgttggcgcaagttgggccgcggccgccgccgctagtgccggtccatttgacagccccgtattgcactctcttccaggaagggcgaatcctgcagccagacaccctaacctagacatgtttgacgacttttccgagggccgtgaatgcgtgaactgtggggctatgagcactccactgtggcgacgcgatggaaccggccactatctctgtaacgcctgtggactctaccataaaatgaatggcattaacagacctttaattaagccccagaggcgcctgtcagcaagtcgacgtgtggggctgtcctgcgctaactgccagaccaccacaaccactctgtggcggcgcaatgccgagggcgaacctgtgtgtaacgcttgtggtctgtacatgaagctgcacggcgtgcctcggcctttagctatgcggaaggaagggatacagaccagaaagcggaaacccaaaaaccttaataaatctaagacccctgcggcgccgagtggctctgagagcctcccccctgcctcgggtgcttcgtcaaattctagcaacgccactaccagttcaagcgaagagatgcggcccatcaagaccgagcctggattatccagccattacggtcactcttctagcgtgtcccagacatttagcgtgagtgcaatgagtggccatgggcccagcatccatccagtattgtcggcactgaaattgtcccctcagggatacgcctctccagtgagccagagcccacaaacatcatcaaaacaggacagctggaattccctggtgcttgccgactcccacggcgacatcatcactgcatag

SEQ ID NO: 123579 - DNA, 354 bp, Artificial Sequence
  derived and/or modified sequence
atgtaccaatcccttgcgatggctgcgaatcacggccctcctcccggcgcatacgaggcaggtggcccaggggccttcatgcacggcgccggagcagccagtagtccagtttatgtccccaccccacgggttccttctagtgtgctgggactctcgtatctgcagggaggaggagccggatcagcttccggaggcgcttctggtggatccagcggcggagccgccagcggcgcagggcccggcacgcagcaaggctccccaggatggtcacaggccggggccgacggagcagcctataccccacctcctgttagtccaaggttctcattcccaggcactacgggctccctgtag

SEQ ID NO: 123580 - DNA, 1865 bp, Artificial Sequence
  derived and/or modified sequence
ggaccttcaggccctggggtgaattcagctgctcctacatcagcttccggaaccaccaaaaattcaaattgggattttccggagtaaacaagagcctagagccctttgctcaatgctggatttaatacgtatatatttttaagcgagttggttttttcccctttgatttttgatcttcgcgacagttcctcccacgcatattatcgttgttgccgtcgttttctctccccgcgtggctccttgacctgcgagggagagagaggacaccgaagccgggagctcgcagggaccatgtatcagagcttgccatggccgccaaccacgggccgccccccggtgcctacgaggcgggcggccccggcgccttcatgcacggcgcgggcgccgcgtcctcgccagtctacgtgcccacaccgcggtgccctcctccgtgctgggcctgtcctacctccagggcggaggcgcgggctctgcgtccggagggcctcgggcggcagctccggtggggccgcgtctggtgcggggcccgggacccagcagggcagcccgggatggagccaggcgggagccgacggagccgcttacaccccgccgccggtgtcgccgcgcttctccttcccggggaccaccgggtccctggcggccgccgccgccgctgccgcggcccgggaagctgcggcctacagcagtggcggcggagcggcgggtgcgggcctggcgggccgcgagcagtacgggcgcgccggcttcgcgggctcctactccagcccctacccggcttacatggccgacgtgggcgcgtcctgggccgcagccgccgccgcctccgccggccccttcgacagcccggtcctgcacagcctgcccggccgggccaacccggccgcccgacaccccaatctcgatatgtttgacgacttctcagaaggcagagagtgtgtcaactgtggggctatgtccaccccgctctggaggcgagatgggacgggtcactatctgtgcaacgcctgcggcctctaccacaagatgaacggcatcaaccggccgctcatcaagcctcagcgccggctgtccgcctcccgccgagtgggcctctcctgtgccaactgccagaccaccaccaccacgctgtggcgccgcaatgcggagggcgagcctgtgtgcaatgcctgcggcctctacatgaagctccacggggtccccaggcctcttgcaatgcggaaagaggggatccaaaccagaaaacggaagcccaagaacctgaataaatctaagacaccagcagctccttcaggcagtgagagccttcctcccgccagcggtgcttccagcaactccagcaacgccaccaccagcagcagcgaggagatgcgtcccatcaagacggagcctggcctgtcatctcactacgggcacagcagctccgtgtcccagacgttctcagtcagtgcgatgtctggccatgggccctccatccaccctgtcctctcggccctgaagctctccccacaaggctatgcgtctcccgtcagccagtctccacagaccagctccaagcaggactcttggaacagcctggtcttggccgacagtcacggggacataatcactgcgtaatcttccctcttccctcctcaaattcctgcacggacctgggacttggaggatagcaaagaaggaggccctgggctcccaggggccggcctcctctgcctggtaatgactccagaacaacaactgggaagaaacttgaagtcgacaatctggttaggggaagcgggtgttggattttctcagatgcctttacacgctgatgggactggagggagcccacccttcagcacgagcacactgcatctctcctg

SEQ ID NO: 123581 - DNA, 3414 bp, Artificial Sequence
  derived and/or modified sequence
ggacttggaggcggccggcgcaggggccgcgagaggcttcgtcgccgctgcagctccgggggctcccaggggagcgtgcgcggaacctccaggcccagcaggaccccggctgcggcgaggaggaaggagccagcctagcagcttctgcgcctgtggccgcgggtgtcctggaggcctctcggtgtgacgagtgggggacccgaaggctcgtgcgccacctccaggcctggacgctgccctccgtcttctgcccccaataggtgcgccggaccttcaggccctggggtgaattcagctgctcctacatcagcttccggaaccaccaaaaattcaaattgggattttccggagtaaacaagagcctagagccctttgctcaatgctggatttaatacgtatatatttttaagcgagttggttttttcccctttgatttttgatcttcgcgacagttcctcccacgcatattatcgttgttgccgtcgttttctctccccgcgtggctccttgacctgcgagggagagagaggacaccgaagccgggagctcgcagggaccatgtatcagagcttggccatggccgccaaccacgggccgccccccggtgcctacgaggcgggcggccccggcgccttcatgcacggcgcgggcgccgcgtcctcgccagtctacgtgcccacaccgcgggtgccctcctccgtgctgggcctgtcctacctccagggcggaggcgcgggctctgcgtccggaggcgcctcgggcggcagctccggtggggccgcgtctggtgcggggcccgggacccagcagggcagcccgggatggagccaggcgggagccgacggagccgcttacaccccgccgccggtgtcgccgcgcttctccttcccggggaccaccgggtccctggcggccgccgccgccgctgccgcggcccgggaagctgcggcctacagcagtggcggcggagcggcgggtgcgggcctggcgggccgcgagcagtacgggcgcgccggcttcgcgggctcctactccagcccctacccggcttacatggccgacgtgggcgcgtcctgggccgcagccgccgccgcctccgccggccccttcgacagcccggtcctgcacagcctgcccggccgggccaacccggccgcccgacaccccaatctcgatatgtttgacgacttctcagaaggcagagagtgtgtcaactgtggggctatgtccaccccgctctggaggcgagatgggacgggtcactatctgtgcaacgcctgcggcctctaccacaagatgaacggcatcaaccggccgctcatcaagcctcagcgccggctgtccgcctcccgccgagtgggcctctcctgtgccaactgccagaccaccaccaccacgctgtggcgccgcaatgcggagggcgagcctgtgtgcaatgcctgcggcctctacatgaagctccacggggtccccaggcctcttgcaatgcggaaagaggggatccaaaccagaaaacggaagcccaagaacctgaataaatctaagacaccagcagctccttcaggcagtgagagccttcctcccgccagcggtgcttccagcaactccagcaacgccaccaccagcagcagcgaggagatgcgtcccatcaagacggagcctggcctgtcatctcactacgggcacagcagctccgtgtcccagacgttctcagtcagtgcgatgtctggccatgggccctccatccaccctgtcctctcggccctgaagctctccccacaaggctatgcgtctcccgtcagccagtctccacagaccagctccaagcaggactcttggaacagcctggtcttggccgacagtcacggggacataatcactgcgtaatcttccctcttccctcctcaaattcctgcacggacctgggacttggaggatagcaaagaaggaggccctgggctcccaggggccggcctcctctgcctggtaatgactccagaacaacaactgggaagaaacttgaagtcgacaatctggttaggggaagcgggtgttggattttctcagatgcctttacacgctgatgggactggagggagcccacccttcagcacgagcacactgcatctctcctgtgagttggagacttctttcccaagatgtccttgtcccctgcgttccccactgtggcctagaccgtgggttttgcattgtgtttctagcaccgaggatctgagaacaagcggagggccgggccctgggacccctgctccagcccgaatgacggcatctgtttgccatgtacctggatgcgacgggcccctggggacaggcccttgccccatccatccgcttgaggcatggcaccgccctgcatccctaataccaaatctgactccaaaattgtggggtgtgacatacaagtgactgaacacttcctggggagctacaggggcacttaacccaccacagcacagcctcatcaaaatgcagctggcaacttctcccccaggtgccttccccctgctgccggcctttgctccttcacttccaacatctctcaaaataaaaatccctcttcccgctctgagcgattcagctctgcccgcagcttgtacatgtctctcccctggcaaaacaagagctgggtagtttagccaaacggcaccccctcgagttcactgcagacccttcgttcaccgtgtcacacatagaggggttctgagtaagaacaaaacgttctgctgctcaagccagtctggcaagcactcagcccagcctcgaggtccttctggggagagtgtaagtggacagagtcctggtcagggggcaggagtgtcccaagggctggcccacctgctgtctgtctgctcctcctagcccttggtcagatggcagccagagtccctcaggacctgcagcctcgccccggcagaagtcttttgtccaggaggcaaaaagccagagattctgcaacacgaattcgaagcaaacaaacacaacacaacagaattcctggaaagaagacgactgctaagacacggcaggggggcctggagggagcctccgactctgagctgctccgggatctgccgcgttctcctctgcacattgctgtttctgcccctgatgctggagctcaaggagactccttcctctttctcagcagagctgtagctgactgtggcattactacgcctccccacacgcccagacccctcactccaaaatcctactggctgtagcagagaatacctttgaaccaagattctgttttaatcatcatttacattgttttcttccaaaggccccctcgtataccctccctaacccacaaacctgttaacattgtcttaaggtgaaatggctggaaaatcagtatttaactaataaatttatctgtattcctctttc

SEQ ID NO: 123582 - DNA, 1010 bp, Artificial Sequence
  derived and/or modified sequence
cgcaggggccgcgagaggcttcgtcgccgctgcagctccgggggctcccaggggagcgtgcgcggaacctccaggcccagcagttatgaaagaaaaaaaattacattatcttgaagaactgcaggagttgagtattccagaaaatgcaatgaaataggtcagctacttgattttaaaagtcaaatactggatcttttattaaggaccccggctgcggcgaggaggaaggagccagcctagcagcttctgcgcctgtggccgcgggtgtcctggaggcctctcggtgtgacgagtgggggacccgaaggctcgtgcgccacctccaggcctggacgctgccctccgtcttctgcccccaataggtgcgccggaccttcaggccctggggtgaattcagctgctcctacatcagcttccggaaccaccaaaaattcaaattgggattttccggagtaaacaagagcctagagccctttgctcaatgctggatttaatacgtatatatttttaagcgagttggttttttcccctttgatttttgatcttcgcgacagttcctcccacgcatattatcgttgttgccgtcgttttctctccccgcgtggctccttgacctgcgagggagagagaggacaccgaagccgggagctcgcagggaccatgtatcagagcttggccatggccgccaaccacgggccgccccccggtgcctacgaggcgggcggccccggcgccttcatgcacggcgcgggcgccgcgtcctcgccagtctacgtgcccacaccgcgggtgccctcctccgtgctgggcctgtcctacctccagggcggaggcgcgggctctgcgtccggaggcgcctcgggcggcagctccggtggggccgcgtctggtgcggggcccgggacccagcagggcagcccgggatggagccaggcgggagccgacggagccgcttacaccccgccgccggtgtcgccgcgcttctccttcccggggaccaccgggtccct

SEQ ID NO: 123583 - DNA, 1326 bp, Artificial Sequence
  derived and/or modified sequence
atgtaccagagcctgccctggccacccaccaccggccggccccctgtgcccaccaggagagctgccccagcccccagctgcacagcccgggccccccggccccggcagagcacctgcccccacagaggagccctgctgcgggccggccctgtgctgcccccaggaagaagaagaggcctgtgtgtgagaagagccagcggcggcagcagcggcggggccgccagcggggccggccctggcacccagcagggcagccctggctggagccaggccggggctgatggagctgcctacaccccacctcctgtgagcccccgcttctccttccctggcaccaccggcagcctggccgctgctgctgctgctgctgctgcccgggaggccgccgcctacagcagcggcggcggggccgccggggccggcctggccggccgggagcagtatggccgggccggctttgctggcagctacagcagcccctacccagcctacatggctgatgtgggcgcctcctgggccgctgctgctgctgccagcgctggcccctttgacagccctgtgctgcacagcctgcccggccgggccaacccagctgcccggcaccccaacctggacatgtttgatgacttcagcgagggcagagaatgtgtgaactgtggggccatgagcacccccctgtggaggagagatggcaccggccactacctgtgcaatgcctgtggcctgtaccacaagatgaatggcatcaaccggcccctcatcaagccccagaggcggctgagcgccagccggcgggtgggcctgagctgtgccaactgccagaccaccaccaccaccctgtggaggagaaatgctgagggggagcctgtgtgcaatgcctgtggcctgtacatgaagctgcatggagtgccccggcccctggccatgaggaaggagggcatccagaccaggaagaggaagcccaagaacctgaacaagagcaagaccccagctgcccccagcggcagcgagagcctgcccccagccagcggggccagcagcaacagcagcaatgccaccaccagcagcagcgaggagatgaggcccatcaagacagagcccggcctgagcagccactacggccacagcagctctgtgtcccagaccttctctgtgtctgccatgagcggccacggccccagcatccaccctgtgctgagcgccctgaagctgagcccccagggctacgccagccctgtgtcccagagcccccagaccagcagcaagcaggacagctggaacagcctggtgctggccgacagccatggagacatcatcacagcctag

SEQ ID NO: 123584 - DNA, 1329 bp, Artificial Sequence
  derived and/or modified sequence
atgtaccagagcctggccatggccgccaaccacggccccccacctggggcctatgaggccggcggccctggggccttcatgcacggggccggggccgccagcagccctgtgtatgtgcccaccccccgggtgcccagctctgtgctgggcctgagctacctgcagggcggcggggccggcagcgccagcggcggggccagcggcggcagcagtggaggagctgccagcggggccggccctggcacccagcagggcagccctggctggagccaggccggggctgatggagctgcctacaccccacctcctgtgagcccccgcttctccttccctggcaccaccggcagcctggccgctgctgctgctgctgctgctgcccgggaggccgccgcctacagcagcggcggcggcgctgctggagctggcctggccggccgggagcagtatggccgggccggctttgctggcagctacagcagcccctacccagcctacatggctgatgtgggcgcctcctgggccgctgctgctgctgccagcgctggcccctttgacagccctgtgctgcacagcctgcccggccgggccaacccagctgcccggcaccccaacctggacatgtttgatgacttcagcgagggccgggagtgtgtgaactgtggggccatgagcacccccctgtggaggagagatggcaccggccactacctgtgcaatgcctgtggcctgtaccacaagatgaatggcatcaaccggcccctcatcaagccccagaggcggctgagcgccagcagaagagtgggcctgagctgtgccaactgccagaccaccaccaccaccctgtggaggagaaatgctgagggggagcctgtgtgcaatgcctgtggcctgtacatgaagctgcacggcgtgccccggcccctggccatgaggaaggagggcatccagaccaggaagaggaagcccaagaacctgaacaagagcaagaccccagctgcccccagcggcagcgagagcctgcccccagccagcggggccagcagcaacagcagcaatgccaccaccagcagcagcgaggagatgaggcccatcaagacagagcccggcctgagcagccactacggccacagcagctctgtgtcccagaccttctctgtgtctgccatgagcggccacggccccagcatccaccctgtgctgagcgccctgaagctgagcccccagggctacgccagccctgtgtcccagagcccccagaccagcagcaagcaggacagctggaacagcctggtgctggccgacagccacggggacatcatcacagcctag

SEQ ID NO: 123585 - DNA, 354 bp, Artificial Sequence
  derived and/or modified sequence
atgtaccagagcctggccatggccgccaaccacggccccccacctggggcctatgaggccggcggccctggggccttcatgcacggggccggggccgccagcagccctgtgtatgtgcccaccccccgggtgcccagctctgtgctgggcctgagctacctgcagggcggcggggccggcagcgccagcggcggggccagcggcggcagcagtggaggagctgccagcggggccggccctggcacccagcagggcagccctggctggagccaggccggggctgatggagctgcctacaccccacctcctgtgagcccccgcttctccttccctggcaccaccggcagcctgtag

SEQ ID NO: 123586 - DNA, 1326 bp, Artificial Sequence
  derived and/or modified sequence
atgtaccagagcctgccctggccccccaccaccggccggccccccgtgccaactaggagagcagccccagccccttcatgtactgcccgggccccacgccccagacagtccacctgcccccacaggggggccctgctccgggcaggacctgtgctccctcccgggcggcgtcgggggttatgtgttaggcgggctagcggaggctccagcggtggtgcggcgtccggggcgggacccggcacgcaacagggcagtcccggatggtctcaggccggggccgatggggctgcttataccccgccacccgtgagcccccgcttttctttcccaggcaccactgggagtctggctgccgcagccgccgcagcggctgccagggaggcggctgcctacagcagtggtggaggcgccgcaggagccggcttagccggccgcgaacaatacgggcgagcaggttttgccgggagctacagtagtccatatcctgcctatatggcggatgtgggcgcctcatgggcggccgccgcggctgcaagcgccggccccttcgactccccagtgcttcactcactccccgggagagccaaccccgcggcacggcatcccaatctggacatgtttgatgatttttcagaaggccgcgagtgtgtcaattgtggagctatgagtacccccctgtggcggcgtgacggaaccgggcactatctgtgtaacgcctgcggtctgtatcataagatgaatggcatcaatcgccctctgatcaagccgcagcgtcgtctatccgctagtcgccgcgtaggattgtcctgtgctaattgtcaaaccactacgacaacactctggaggcgaaacgccgaaggggagcccgtctgcaacgcctgtgggctctatatgaagctgcacggagtgccgcggcctctcgccatgagaaaggagggcatacagacacgcaagcggaagccaaagaacttgaacaaatctaaaacccccgccgcaccctcaggaagcgaaagcctgcctcccgcaagtggggccagcagtaattccagcaacgctaccacgagctccagtgaggagatgcggcctatcaaaactgagccaggactgagctctcactatgggcactcttctagcgtctcccagacctttagtgttagtgcgatgagtggacacggaccctccatccatccagtgctgagcgccctcaagctgtcgccacaaggatacgcctctccagtgagccagagcccgcaaacttctagcaagcaggactcttggaattctctagtcctggctgattcccatggcgacatcataaccgcctag

SEQ ID NO: 123587 - DNA, 1329 bp, Artificial Sequence
  derived and/or modified sequence
atgtaccagagcctggccatggccgccaaccacggccccccccccggagcatatgaggcaggtggacctggcgcattcatgcatggagccggggccgctagctctccagtttacgtgccaaccccaagggtgccctcctcagtcctgggtttatcatatcttcaaggggggggtgccggctccgctagcggaggagctagtgggggatcctccggcggagccgcaagtggcgcagggccgggtactcagcaaggcagccccgggtggagccaggctggggccgatggcgccgcctacacccctccccctgtaagtcccaggttttcattccccggcacaacagggtccctggccgccgccgcagccgccgcagctgctagggaggccgccgcctatagtagcggcggtggagccgcaggtgctggcctggcaggccgggagcagtacgggagagccggatttgccgggagctactcgtccccctatccggcctacatggcggatgtgggcgcaagttgggctgccgctgcggcagctagtgctggccccttcgatagtcctgtactgcattctctgcccggtagagccaatccggctgctaggcatcccaatctggacatgtttgatgatttcagcgaaggccgagaatgcgtaaattgcggtgccatgagcacgcccctttggagacgcgacggcaccggccattacttatgcaacgcctgtggtctgtaccataaaatgaacgggattaaccggcctttaattaaaccgcagcgtcgcctctccgcaagcagaagggtggggctttcttgtgcgaattgccagacaacaacgaccacgctgtggcgccggaacgctgaaggggaacctgtatgcaacgcctgtggattgtacatgaaactgcacggtgtccccagacccctcgccatgcggaaagaggggattcagacccggaaaaggaagcctaagaaccttaacaagtcaaaaaccccagctgctccgagtggtagcgaaagcctcccacccgcttccggagcctcgtcaaattcatccaatgcaactacgtcttcctctgaggaaatgagaccgatcaaaaccgagcctggcctgagttcacactatggccattctagctccgtgagccaaaccttttcggtttctgccatgagtggccatgggccttcaatacaccctgtgctatctgcactcaaactgagcccacaaggatacgccagccctgtgtcccagtctcctcagactagcagcaaacaggacagctggaattctctggtgttggccgattcccacggggatattatcactgcttag

SEQ ID NO: 123588 - DNA, 354 bp, Artificial Sequence
  derived and/or modified sequence
atgtaccagagcctggccatggccgccaaccacggccccccccccggggcctacgaggctggcggacccggcgcatttatgcacggcgctggcgccgcctctagcccagtatacgtacctacaccaagggtcccaagcagcgttctgggcctctcatatctgcagggaggtggagccggtagcgccagcgggggcgcttccgggggtagcagtgggggagcggcgagtggggcaggtcccggaactcagcagggctcacccggatggtctcaggcgggggctgatggtgccgcgtacaccccacctcccgtttccccccggttctcatttccaggcacgacagggagcctgtag

SEQ ID NO: 123589 - DNA, 1326 bp, Artificial Sequence
  derived and/or modified sequence
atgtaccagtccctgccttggccacccacgaccggaagacccccagtgccaactcggagggccgcaccagcacccagctgcacggccagagctcccaggccacgtcagtccacttgtcctcatagaggtgctctgctcagggcaggaccagtcctgcccccaggccgtcggcgtgggttgtgtgtgagacgggcatccggaggatcgagtggaggggctgcaagtggtgctggaccaggcacacagcaggggtcccctgggtggtcgcaggcgggagcagatggggcagcttatacgccccctccagtttcaccaaggttcagtttcccaggaacaacagggtcattggcagccgctgctgccgcagctgccgcaagggaggcagctgcctattcctccggcggaggtgcggcaggcgcaggcctcgcaggcagggaacagtacggccgagccggttttgccggttcttactcatccccttatcccgcatatatggcggacgtcggagcgagttgggccgcagcagccgcagcgtctgctggccctttcgacagcccagtcctgcattctctgcccggacgagcaaatccagcagcccgacatcccaatctggatatgtttgacgacttttccgaaggaagagaatgcgtgaattgcggcgcaatgagcactccactctggcggagagacgggactggacattacttgtgcaatgcttgtggcctgtatcataagatgaacgggatcaacagaccactgattaagccacagcgccgattgagcgctagtaggcgggtcggattatcttgtgctaattgccaaaccacgacaacgaccctttggaggcggaacgctgagggcgagccggtctgtaacgcctgcggcttgtacatgaagctccatggcgtacctagacccctggccatgagaaaggaggggatacagaccaggaagaggaagcctaaaaatttgaacaagtctaaaactcctgcagctccaagtggaagcgagtccctgccacccgcaagcggggcttcctcgaattcaagtaatgcaactacatcgagtagcgaagaaatgcgccctattaagacagagcctggactgtccagtcactatggccattcttcttccgtctctcaaaccttcagcgtgtctgccatgtcaggccacggaccaagtatacacccagtgctttccgcattaaaactaagcccccaaggctatgccagccccgttagccagagccctcaaacctcctccaagcaggattcatggaactccctggttctcgctgattctcacggggacattatcacggcctag

SEQ ID NO: 123590 - DNA, 1329 bp, Artificial Sequence
  derived and/or modified sequence
atgtatcagagcctggccatggcggctaatcacgggccacctcctggtgcatatgaggcagggggaccaggggcattcatgcatggtgccggagccgcatcatctccagtatacgttcctacgcctcgggtgccgagtagtgtgctgggcctgagctacctacagggcggtggggcaggcagcgcctccggtggagcctccggcggatcatccggaggtgccgcatcaggtgcgggacctggcactcagcaggggtctcccggttggtctcaggcaggggctgatggggctgcttacacacctccacccgtgtctcctcgtttttctttcccgggaacgaccggaagcctcgctgcagcagctgccgctgccgcagctcgggaagcagcagcctattcctcgggaggcggagccgcaggtgcaggcctcgcaggacgggaacagtacgggcgagctggtttcgccggttcctactcgagcccctaccccgcttatatggcagacgttggagctagctgggcggctgctgcagcagcaagtgcagggccttttgattccccagttctgcactccctaccgggacgtgcgaacccagcagccagacaccccaacctcgacatgttcgatgacttttctgaaggcagagagtgcgtgaactgcggcgctatgagtactccgctgtggcggagagacggcaccggccattacctgtgtaatgcgtgtggcctttaccataaaatgaatgggatcaatcgaccgcttatcaaacctcaacgaaggctgagcgcctccagaagagtagggctgagctgtgctaactgtcaaaccactactaccactctatggcgtaggaatgctgaaggggagccagtttgcaacgcttgcggcctctacatgaagctgcacggggtcccgcgacccctggcaatgagaaaggaaggcatccagacacgcaagcgcaagcccaaaaacctgaataaatcaaaaacgccggcagcgcctagtggttcagagagtctccctcccgctagtggggcaagcagtaattcaagcaatgctacaacatctagtagtgaagaaatgagacccattaaaaccgaaccaggcttaagttctcattacgggcactctagcagtgtaagccagaccttctcagtgagtgctatgtcaggccacggccctagcatccacccagtgcttagcgccctgaagttgagccctcaaggctacgcatcaccagtcagccagagcccgcagacgtcatccaagcaggatagctggaacagcttggttttggctgacagtcacggcgacatcattacggcatag

SEQ ID NO: 123591 - DNA, 354 bp, Artificial Sequence
  derived and/or modified sequence
atgtaccagtcgctagccatggctgccaatcacgggcctcctccaggcgcatatgaagctggtggtcccggagccttcatgcacggtgctggggcagcaagttcaccggtgtacgttccaacaccacgggtccctagttcagttctgggcctgagctacttacagggagggggagccggtagcgcctctggcggagcgagcggtgggtcttccggcggagctgcaagtggagccggacctggaacccaacaaggatcccccggatggagccaggccggagctgacggcgctgcgtacacaccacctcccgtgtcccccaggttcagcttccctgggaccaccggctcgttgtag

SEQ ID NO: 123592 - DNA, 1326 bp, Artificial Sequence
  derived and/or modified sequence
atgtaccagagcctgccctggccccccaccaccggcagaccccccgtgcccaccagaagagccgcccccgcccccagctgcaccgccagagcccccagacccagacagagcacctgcccccacagaggcgccctgctgagagccggccccgtgctgccccccggcagaagaagaggcctgtgcgtgagaagagccagcggcggcagcagcggcggcgccgccagcggcgccggccccggcacccagcagggcagccccggctggagccaggccggcgccgacggcgccgcctacacccccccccccgtgagccccagattcagcttccccggcaccaccggcagcctggccgccgccgccgccgccgccgccgccagagaggccgccgcctacagcagcggcggcggcgccgccggcgccggcctggccggcagagagcagtacggcagagccggcttcgccggcagctacagcagcccctaccccgcctacatggccgacgtgggcgccagctgggccgccgccgccgccgccagcgccggccccttcgacagccccgtgctgcacagcctgcccggcagagccaaccccgccgccagacaccccaacctggacatgttcgacgacttcagcgagggcagagagtgcgtgaactgcggcgccatgagcacccccctgtggagaagagacggcaccggccactacctgtgcaacgcctgcggcctgtaccacaagatgaacggcatcaacagacccctgatcaagccccagagaagactgagcgccagcagaagagtgggcctgagctgcgccaactgccagaccaccaccaccaccctgtggagaagaaacgccgagggcgagcccgtgtgcaacgcctgcggcctgtacatgaagctgcacggcgtgcccagacccctggccatgagaaaggagggcatccagaccagaaagagaaagcccaagaacctgaacaagagcaagacccccgccgcccccagcggcagcgagagcctgccccccgccagcggcgccagcagcaacagcagcaacgccaccaccagcagcagcgaggagatgagacccatcaagaccgagcccggcctgagcagccactacggccacagcagcagcgtgagccagaccttcagcgtgagcgccatgagcggccacggccccagcatccaccccgtgctgagcgccctgaagctgagcccccagggctacgccagccccgtgagccagagcccccagaccagcagcaagcaggacagctggaacagcctggtgctggccgacagccacggcgacatcatcaccgcctag

SEQ ID NO: 123593 - DNA, 1329 bp, Artificial Sequence
  derived and/or modified sequence
atgtaccagagcctggccatggccgccaaccacggccccccccccggcgcctacgaggccggcggccccggcgccttcatgcacggcgccggcgccgccagcagccccgtgtacgtgcccacccccagagtgcccagcagcgtgctgggcctgagctacctgcagggcggcggcgccggcagcgccagcggcggcgccagcggcggcagcagcggcggcgccgccagcggcgccggccccggcacccagcagggcagccccggctggagccaggccggcgccgacggcgccgcctacacccccccccccgtgagccccagattcagcttccccggcaccaccggcagcctggccgccgccgccgccgccgccgccgccagagaggccgccgcctacagcagcggcggcggcgccgccggcgccggcctggccggcagagagcagtacggcagagccggcttcgccggcagctacagcagcccctaccccgcctacatggccgacgtgggcgccagctgggccgccgccgccgccgccagcgccggccccttcgacagccccgtgctgcacagcctgcccggcagagccaaccccgccgccagacaccccaacctggacatgttcgacgacttcagcgagggcagagagtgcgtgaactgcggcgccatgagcacccccctgtggagaagagacggcaccggccactacctgtgcaacgcctgcggcctgtaccacaagatgaacggcatcaacagacccctgatcaagccccagagaagactgagcgccagcagaagagtgggcctgagctgcgccaactgccagaccaccaccaccaccctgtggagaagaaacgccgagggcgagcccgtgtgcaacgcctgcggcctgtacatgaagctgcacggcgtgcccagacccctggccatgagaaaggagggcatccagaccagaaagagaaagcccaagaacctgaacaagagcaagacccccgccgcccccagcggcagcgagagcctgccccccgccagcggcgccagcagcaacagcagcaacgccaccaccagcagcagcgaggagatgagacccatcaagaccgagcccggcctgagcagccactacggccacagcagcagcgtgagccagaccttcagcgtgagcgccatgagcggccacggccccagcatccaccccgtgctgagcgccctgaagctgagcccccagggctacgccagccccgtgagccagagcccccagaccagcagcaagcaggacagctggaacagcctggtgctggccgacagccacggcgacatcatcaccgcctag

SEQ ID NO: 123594 - DNA, 354 bp, Artificial Sequence
  derived and/or modified sequence
atgtaccagagcctggccatggccgccaaccacggccccccccccggcgcctacgaggccggcggccccggcgccttcatgcacggcgccggcgccgccagcagccccgtgtacgtgcccacccccagagtgcccagcagcgtgctgggcctgagctacctgcagggcggcggcgccggcagcgccagcggcggcgccagcggcggcagcagcggcggcgccgccagcggcgccggccccggcacccagcagggcagccccggctggagccaggccggcgccgacggcgccgcctacacccccccccccgtgagccccagattcagcttccccggcaccaccggcagcctgtag

SEQ ID NO: 123595 - protein, 180 aa, Artificial Sequence
  derived and/or modified sequence
MKSIYFVAGLFVMLVQGSWQRSLQDTEEKSRSFSASQADPLSDPDQMNEDKRHSQGTFTSDYSKYLDSRRAQDFVQWLMNTKRNRNNIAKRHDEFERHAEGTFTSDVSSYLEGQAAKEFIAWLVKGRGRRDFPEEVAIVEELGRRHADGSFSDEMNTILDNLAARDFINWLIQTKITDRK

SEQ ID NO: 123596 - protein, 110 aa, Artificial Sequence
  derived and/or modified sequence
MKWVSFISLLFLFSSAYSGSLDKRHGEGTFTSDVSSYLEGQAAKEFIAWLVKGRSSSSKAPPPSLPSPSRLPGPSDTPILPQSSSSKAPPPSLPSPSRLPGPSDTPILPQ

SEQ ID NO: 123597 - protein, 125 aa, Artificial Sequence
  derived and/or modified sequence
MKWVSFISLLFLFSSAYSGSLDKRHGEGTFTSDVSSYLEEQAAKEFIAWLVKGGGGGGGSGGGGSGGGGSSSSKAPPPSLPSPSRLPGPSDTPILPQSSSSKAPPPSLPSPSRLPGPSDTPILPQ

SEQ ID NO: 123598 - protein, 110 aa, Artificial Sequence
  derived and/or modified sequence
MKWVSFISLLFLFSSAYSGSLDKRHAEGTFTSDVSSYLEGQAAKEFIAWLVKGRSSSSKAPPPSLPSPSRLPGPSDTPILPQSSSSKAPPPSLPSPSRLPGPSDTPILPQ

SEQ ID NO: 123599 - protein, 113 aa, Artificial Sequence
  derived and/or modified sequence
MKWVSFISLLFLFSSAYSGSLDKRHGDGSFSDEMNTILDNLAARDFINWLIQTKITDSSSSKAPPPSLPSPSRLPGPSDTPILPQSSSSKAPPPSLPSPSRLPGPSDTPILPQ

SEQ ID NO: 123600 - protein, 146 aa, Artificial Sequence
  derived and/or modified sequence
MKWVSFISLLFLFSSAYSGSLDKRHGDGSFSDEMNTILDNLAARDFINWLIQTKITDHGDGSFSDEMNTILDNLAARDFINWLIQTKITDSSSSKAPPPSLPSPSRLPGPSDTPILPQSSSSKAPPPSLPSPSRLPGPSDTPILPQ

SEQ ID NO: 123601 - protein, 143 aa, Artificial Sequence
  derived and/or modified sequence
MATGSRTSLLLAFGLLCLPWLQEGSASSSSKAPPPSLPSPSRLPGPSDTPILPQHGDGSFSDEMNTILDNLAARDFINWLIQTKITDSSSSKAPPPSLPSPSRLPGPSDTPILPQSSSSKAPPPSLPSPSRLPGPSDTPILPQ

SEQ ID NO: 123602 - DNA, 171 bp, Artificial Sequence
  derived and/or modified sequence
atgaagtgggtgagcttcatctcgcttctctttctgttctcctcagcctacagcggctcgttggataaacggcacggagacgggtccttctcagatgaaatgaacaccattctggacaatctggcggcacgcgacttcatcaactggctcatccagaccaagatcactgac

SEQ ID NO: 123603 - DNA, 171 bp, Artificial Sequence
  derived and/or modified sequence
atgaagtgggtgagtttcatttctttgctgtttctgttctcatctgcgtattcaggaagtctcgacaagagacacggcgacggcagttttagcgacgaaatgaacaccatcctagacaacctggccgctagggattttatcaactggcttattcagacaaagatcaccgac

SEQ ID NO: 123604 - DNA, 171 bp, Artificial Sequence
  derived and/or modified sequence
atgaaatgggtgtctttcatctccctcctatttttgttctccagtgcctatagcggctctcttgacaagcgccatggcgacggaagcttcagcgacgaaatgaacacaatcctggacaatctggcagcgagagactttattaactggctgattcagacaaaaattacggac

SEQ ID NO: 123605 - DNA, 171 bp, Artificial Sequence
  derived and/or modified sequence
atgaagtgggtgtccttcattagcctgctgtttttgttctcgagcgcgtactcgggctccctggataagagacacggagatggatccttttccgatgaaatgaataccatcctcgataatctcgcagccagagactttatcaactggctcatccagactaagattaccgat

SEQ ID NO: 123606 - DNA, 171 bp, Artificial Sequence
  derived and/or modified sequence
atgaagtgggtttcattcatatctctactcttcttgtttagcagcgcttatagcgggagcctagacaagcgccatggcgatggaagtttttccgacgaaatgaacactatcctagacaaccttgctgcgcgcgattttattaactggctgatacagacgaagatcacagat

SEQ ID NO: 123607 - DNA, 171 bp, Artificial Sequence
  derived and/or modified sequence
atgaagtgggtttcttttatctcactcctctttcttttctcttcggcctacagcggctctctggataagcggcatggagacgggtcgttcagcgacgagatgaacacaattttagacaacctggcagcccgggactttatcaattggctgatccagacgaagatcactgac

SEQ ID NO: 123608 - DNA, 171 bp, Artificial Sequence
  derived and/or modified sequence
atgaagtgggtgtccttcatatcacttttgtttcttttttccagcgcttactccgggtcgcttgataagcggcatggagacgggtcttttagcgatgagatgaacaccatcctggacaatctcgccgcccgtgatttcattaactggctcatccagactaaaatcaccgat

SEQ ID NO: 123609 - DNA, 171 bp, Artificial Sequence
  derived and/or modified sequence
atgaaatgggtctctttcatttccctgttgttcctgttcagctctgcttatagcgggagtctcgataaaagacacggcgacggatcgttcagcgatgagatgaacacaatacttgataatctcgcagcgcgggacttcatcaattggctgatacagacaaagatcaccgat

SEQ ID NO: 123610 - DNA, 171 bp, Artificial Sequence
  derived and/or modified sequence
atgaagtgggtgtcatttatctccttgctctttctcttttcgtctgcgtactcaggatccctggataaaaggcatggagacggctccttttcagacgagatgaacaccatcctcgacaatcttgctgcaagagacttcataaactggcttattcaaacgaagataactgat

SEQ ID NO: 123611 - DNA, 171 bp, Artificial Sequence
  derived and/or modified sequence
atgaagtgggtgtcttttatctcgctccttttcctgtttagctctgcctacagtggcagcctagataagagacacggggacggcagtttttcagatgaaatgaacacgattttggataaccttgctgcaagggatttcatcaattggctaattcaaaccaagatcacagat

SEQ ID NO: 123612 - DNA, 171 bp, Artificial Sequence
  derived and/or modified sequence
atgaaatgggtttcatttatcagccttctgtttctgttttcaagcgcatactccggatccctggataagagacacggcgatggatccttctcggacgaaatgaacaccattttggacaatcttgctgcgcgcgacttcataaactggctcattcagacgaagattaccgat

SEQ ID NO: 123613 - DNA, 171 bp, Artificial Sequence
  derived and/or modified sequence
atgaagtgggtgagtttcatctcactactgtttctgttcagttcagcttattcaggaagcttagataaaaggcacggtgacggctccttctctgatgagatgaacacgatcctggacaacctggcggcccgtgattttatcaactggctgatccagactaagatcactgac

SEQ ID NO: 123614 - DNA, 171 bp, Artificial Sequence
  derived and/or modified sequence
atgaagtgggtttccttcattagccttctctttcttttttcgtcagcttacagcggttccctggacaaaagacatggagacggctcattttccgacgaaatgaataccatcttggataacctggccgcacgtgatttcatcaactggctgattcaaacgaagataactgat

SEQ ID NO: 123615 - DNA, 171 bp, Artificial Sequence
  derived and/or modified sequence
atgaagtgggtgtcgtttatctcgctcctgttcttgttcagcagcgcatactccggatcgttggataagcggcatggagacggatcctttagcgacgaaatgaataccattcttgataaccttgcagcccgtgactttatcaactggctgatccagaccaagataaccgat

SEQ ID NO: 123616 - DNA, 171 bp, Artificial Sequence
  derived and/or modified sequence
atgaagtgggtgagcttcatatcgctgttgtttcttttctcttccgcgtactccgggtctctggataagcggcatggggacggaagtttttcagatgagatgaataccattcttgacaatctggctgcccgagactttatcaattggctcatccaaacaaaaatcacggac

SEQ ID NO: 123617 - DNA, 171 bp, Artificial Sequence
  derived and/or modified sequence
atgaagtgggtgtcgtttatcagcctgctcttcctctttagctcggcgtactccggatcactggacaagaggcacggtgatgggtccttctccgatgaaatgaacaccattctggataaccttgccgcccgagacttcattaactggctgattcaaaccaagataaccgat

SEQ ID NO: 123618 - DNA, 171 bp, Artificial Sequence
  derived and/or modified sequence
atgaagtgggtttcttttataagcttgctttttctgttttcttcggcttattccggctccttagataaaagacacggtgatggtagttttagtgatgagatgaatacgatcctagataatctagccgcaagagattttatcaattggctgattcaaacgaagattacagat

SEQ ID NO: 123619 - DNA, 171 bp, Artificial Sequence
  derived and/or modified sequence
atgaagtgggtgtcattcatctccctgctgtttctcttctcgtccgcatactcgggctcactggacaaacgccatggagacggatccttttccgacgagatgaataccattctggacaacctggcggcccgcgactttatcaactggctgatccagactaagatcactgac

SEQ ID NO: 123620 - DNA, 171 bp, Artificial Sequence
  derived and/or modified sequence
atgaaatgggtgagcttcatttccttgcttttcctctttagctctgcatactctggaagtcttgacaaaagacacggggacggatcttttagtgatgagatgaatacaatactggataatttggcagctcgggatttcatcaattggctgatccagacaaaaatcacagat

SEQ ID NO: 123621 - DNA, 171 bp, Artificial Sequence
  derived and/or modified sequence
atgaagtgggtgtcctttatctccctactgttcctttttagcagtgcttactctggttcattggacaagcgccacggcgacggatctttctctgacgaaatgaacactattttagacaacctggccgcccgggacttcatcaactggttaattcaaacaaagattacagac

SEQ ID NO: 123622 - DNA, 171 bp, Artificial Sequence
  derived and/or modified sequence
atgaagtgggtgtcattcattagcctgctttttctgttctcgtcagcctacagcggtagccttgacaagcgccacggcgacggatcattctccgatgaaatgaacactatcctggacaacctggcggcccgggactttatcaattggctcatccaaacgaagataacggat

SEQ ID NO: 123623 - DNA, 171 bp, Artificial Sequence
  derived and/or modified sequence
atgaaatgggtgagctttatctcactgctctttcttttctcatcggcctactccggtagcttggataagagacatggagatggttccttttccgatgagatgaataccatcctcgacaacctcgccgcacgcgacttcatcaactggctgattcaaacgaagattactgac

SEQ ID NO: 123624 - DNA, 171 bp, Artificial Sequence
  derived and/or modified sequence
atgaaatgggtgagtttcatttcactcttgttccttttttcctcggcctacagtggaagcctggataagagacacggcgacgggtcgtttagcgatgaaatgaacactatcctggataacctcgctgcgcgggacttcatcaattggctgatccagacgaagatcaccgac

SEQ ID NO: 123625 - DNA, 171 bp, Artificial Sequence
  derived and/or modified sequence
atgaagtgggtgtcgttcatctccctgctcttcctgttctccagcgcctactccggctcgttggacaagcgacacggggacgggagcttctccgatgaaatgaataccatccttgacaacctcgcagctagagactttatcaactggctgattcaaactaaaatcacggat

SEQ ID NO: 123626 - DNA, 171 bp, Artificial Sequence
  derived and/or modified sequence
atgaagtgggtgagctttatctcattgctgttcctcttttctagtgcatattctggctctctggataagcgccatggagacggtagcttctctgacgagatgaataccattctggacaacttagccgcacgcgacttcatcaattggttgatacagacaaaaattaccgat

SEQ ID NO: 123627 - DNA, 171 bp, Artificial Sequence
  derived and/or modified sequence
atgaagtgggtctcattcatctcactgctgtttctattttcttctgcctactcgggatccctcgacaaacgtcatggtgacggctcattttctgacgagatgaacactattctggataacctggccgctcgagatttcatcaattggctgattcaaacaaagattacagac

SEQ ID NO: 123628 - DNA, 171 bp, Artificial Sequence
  derived and/or modified sequence
atgaagtgggtctctttcatatctctcttattcctgttctcgtcggcatactctggtagcctcgataagaggcatggtgatggttcgttctctgatgaaatgaacacaatcttggataacctggcagcccgcgatttcatcaactggctgatccagaccaagatcaccgac

SEQ ID NO: 123629 - DNA, 171 bp, Artificial Sequence
  derived and/or modified sequence
atgaagtgggtgtcctttatcagtctcctgttcctcttttcatcggcttactccggaagcctcgacaaaagacatggtgatggcagcttctcggacgaaatgaacactattctcgacaatctcgcggcccgggacttcatcaactggctcatccaaacgaagattaccgat

SEQ ID NO: 123630 - DNA, 171 bp, Artificial Sequence
  derived and/or modified sequence
atgaaatgggtatcgttcatctcgctcctgtttctcttctcaagcgcgtactccggatccctcgataagagacacggagacggatcgtttagcgatgaaatgaacactatacttgataacctggctgccagggatttcatcaattggctcattcagaccaagatcaccgac

SEQ ID NO: 123631 - DNA, 171 bp, Artificial Sequence
  derived and/or modified sequence
atgaagtgggtgtcgtttatctcccttctgtttctgttttcctccgcgtacagcggatcacttgataaacgccatggggatggctcattttccgatgaaatgaacaccattctggacaaccttgcagcacgagatttcatcaactggctgatccaaaccaagattactgac

SEQ ID NO: 123632 - DNA, 171 bp, Artificial Sequence
  derived and/or modified sequence
atgaaatgggtgagcttcatttcgctgctgttcctgttctcatctgcttacagcggatcccttgacaaaagacatggagacggatcgttttccgatgaaatgaacaccatcctcgacaatctggccgcgcgggactttatcaactggctgatccagactaagattacggac

SEQ ID NO: 123633 - DNA, 171 bp, Artificial Sequence
  derived and/or modified sequence
atgaaatgggtgagttttatatctctgctgtttctattctcttccgcctatagtggttctctcgacaaacggcacggtgacggatcattcagtgacgagatgaacactatactagacaaccttgctgcccgcgactttattaattggctgatacagacaaagatcaccgac

SEQ ID NO: 123634 - DNA, 171 bp, Artificial Sequence
  derived and/or modified sequence
atgaagtgggtgagcttcatctcgctgctttttctgtttagctccgcttactccggatcgctggacaagcgccatggcgatggctcattctcagacgaaatgaacactatcctggacaatttggcagctagggacttcatcaactggctcattcagactaagattaccgat

SEQ ID NO: 123635 - DNA, 171 bp, Artificial Sequence
  derived and/or modified sequence
atgaaatgggtctcgtttatctctctgctgttccttttctctagcgcatacagtggatcgctggataagcgccacggtgatggatcattcagcgatgagatgaacactattctggataacttggctgctagagactttataaactggctgatccagacaaaaataactgac

SEQ ID NO: 123636 - DNA, 171 bp, Artificial Sequence
  derived and/or modified sequence
atgaaatgggtgtcctttatctccctcctctttctgttctcttcggcatactcggggtcgctggataagcgccacggagacggctcattctcggatgagatgaacaccatactcgacaatcttgcggccagagacttcatcaactggctgatccagactaagattaccgac

SEQ ID NO: 123637 - DNA, 171 bp, Artificial Sequence
  derived and/or modified sequence
atgaaatgggtgtcgtttatctccctcttgttcctcttttcctccgcatactcgggatcactggacaagaggcacggcgacgggagcttctcagatgaaatgaataccatcttggacaacctggctgcgcgggatttcatcaactggctgatacagacgaagatcactgac

SEQ ID NO: 123638 - DNA, 171 bp, Artificial Sequence
  derived and/or modified sequence
atgaaatgggtatcgtttatatcgttattatttttattttcgtcggcgtattcgggttcgctagataaacgacatggtgatggttcgttttcggatgaaatgaatacgatattagataatctagcggcgcgagattttataaattggttaatacaaacgaaaataacggat

SEQ ID NO: 123639 - DNA, 171 bp, Artificial Sequence
  derived and/or modified sequence
atgaagtgggtgagcttcatcagcctgcttttcctcttctccagcgcatactcagggtcgctcgataagcggcacggggatggttccttttcggatgaaatgaacaccattctggataatcttgcagcacgggactttatcaactggctgatacagaccaaaatcactgac

SEQ ID NO: 123640 - DNA, 171 bp, Artificial Sequence
  derived and/or modified sequence
atgaagtgggtgtcttttatctccctccttttcctattctccagcgcatatagcggttccctggacaagcggcatggcgatgggagcttctcagacgaaatgaatactatccttgacaatctggcggccagagactttattaactggctaatccagacgaagatcaccgac

SEQ ID NO: 123641 - DNA, 171 bp, Artificial Sequence
  derived and/or modified sequence
atgaagtgggtctcctttatctcactgctgttcttgttttcgtccgcatacagtggctcattagataaacggcacggagatgggtcgttttccgatgagatgaataccattcttgacaacctcgcagcccgagactttattaattggttgatccagacaaaaattactgat

SEQ ID NO: 123642 - DNA, 171 bp, Artificial Sequence
  derived and/or modified sequence
atgaagtgggtgtcatttatctctctcctgtttcttttctcgagcgcatactcaggatcgctggacaaacggcacggtgacggctcattctccgatgagatgaacactatcctcgacaatctggcggcccgagatttcatcaactggttgatccaaacgaagatcaccgac

SEQ ID NO: 123643 - DNA, 171 bp, Artificial Sequence
  derived and/or modified sequence
atgaaatgggtgtcatttatcagcctgctttttctcttctcgtccgcctactcgggtagccttgacaagcgccacggtgatggttcctttagcgatgaaatgaacacgatcctggacaacctggcagcgagggatttcattaactggcttattcagaccaaaatcaccgat

SEQ ID NO: 123644 - DNA, 171 bp, Artificial Sequence
  derived and/or modified sequence
atgaagtgggtcagctttatctccttgctttttctgttctcttcggcctacagcggatcactggataagaggcatggggatggatctttttcagacgaaatgaacacgatccttgacaatctggcggcacgcgacttcattaactggcttatccaaactaagattactgat

SEQ ID NO: 123645 - DNA, 171 bp, Artificial Sequence
  derived and/or modified sequence
atgaagtgggtatcgtttatctcgctgctctttctcttcagtagcgcttattcgggttccctcgacaaacgccacggtgatggctccttctcagacgagatgaacaccatcctcgataacttagccgctcgagactttataaattggctaattcagacaaaaattacagac

SEQ ID NO: 123646 - DNA, 171 bp, Artificial Sequence
  derived and/or modified sequence
atgaaatgggtttctttcatttcattactttttcttttctctagtgcatattcaggaagtcttgataaaagacatggggatggatcctttagtgatgaaatgaatactattttagataatttagcagcaagagattttattaattggcttattcaaactaaaataactgat

SEQ ID NO: 123647 - DNA, 171 bp, Artificial Sequence
  derived and/or modified sequence
atgaagtgggtcagcttcatttcactcctgttccttttttcctcggcctactccggcagcctggacaagcgacacggagatggctcattttcggatgaaatgaacacgattctggacaaccttgctgcacgcgacttcatcaattggctgatacagactaagattaccgac

SEQ ID NO: 123648 - DNA, 171 bp, Artificial Sequence
  derived and/or modified sequence
atgaaatgggtcagcttcatctccttgctgtttctcttctctagcgcgtactcaggttctctggataagagacacggagacggatccttcagtgatgaaatgaatacaatcttggataacctggccgcccgtgacttcattaactggctgatccagactaagatcaccgac

SEQ ID NO: 123649 - DNA, 171 bp, Artificial Sequence
  derived and/or modified sequence
atgaaatgggtaagttttatcagccttttattcttgttctccagtgcttactcaggttcactcgataagcgacatggggacggcagtttttccgatgagatgaacactattctggataacctagccgctcgcgatttcattaattggctgattcagaccaaaatcactgac

SEQ ID NO: 123650 - DNA, 171 bp, Artificial Sequence
  derived and/or modified sequence
atgaaatgggtttcctttataagtctcctttttctgtttagttccgcatatagtggaagtttggataagcgtcacggagacggttctttttccgacgaaatgaacactatccttgataatttggctgctcgcgatttcatcaactggctcatccagacaaagatcactgac

SEQ ID NO: 123651 - DNA, 171 bp, Artificial Sequence
  derived and/or modified sequence
atgaagtgggtctccttcatctccctgctcttcctgttttcttcagcctacagcggaagtcttgacaagagacatggagacggcagctttagcgacgaaatgaacactattttagacaatctggccgcaagagatttcattaactggttgatacagactaagatcactgac

SEQ ID NO: 123652 - DNA, 171 bp, Artificial Sequence
  derived and/or modified sequence
atgaaatgggtgtcctttatctcacttctgttccttttttcgtcagcttactctggtagcctggacaagagacacggcgacggatcgttctcggacgagatgaataccatcctggacaacctggcggcccgcgatttcatcaactggctgatccagactaagatcacggat

SEQ ID NO: 123653 - DNA, 171 bp, Artificial Sequence
  derived and/or modified sequence
atgaagtgggtgtcgtttatcagtctcctttttctgttcagctctgcatattccggctcattagataaaaggcacggagatggtagcttctcagacgaaatgaacaccatcctagataatcttgctgcaagggactttattaactggctaatacagacgaagatcacagac

SEQ ID NO: 123654 - DNA, 171 bp, Artificial Sequence
  derived and/or modified sequence
atgaaatgggttagttttatctcactgctcttcctgttctcatccgcgtatagtggcagtctggacaagagacacggcgacggctccttctctgacgagatgaacacaatcttagacaacttggcagcacgagatttcatcaactggctgatacagacaaaaattactgac

SEQ ID NO: 123655 - DNA, 171 bp, Artificial Sequence
  derived and/or modified sequence
atgaagtgggtgtctttcatctcgcttctgttcttgttctcttccgcgtacagcggatcgctggataaaagacacggcgacggatctttctcagacgaaatgaataccatcttggataacctggcagctagggactttatcaactggctgattcagaccaagatcactgac

SEQ ID NO: 123656 - DNA, 171 bp, Artificial Sequence
  derived and/or modified sequence
atgaagtgggtatcattcatatctctgctctttctgttctcctctgcctattctggatctctagataaacgtcacggagatgggtcgttcagtgatgaaatgaacactatactggataaccttgccgctagggatttcataaactggctaatacagacaaaaataactgat

SEQ ID NO: 123657 - DNA, 171 bp, Artificial Sequence
  derived and/or modified sequence
atgaagtgggtgagctttatttcgttgctttttctgttttcgtccgcttattctggttcccttgacaagcgccacggagatggttcctttagcgacgagatgaacactattctggataacttagccgcccgagacttcatcaattggctgatacagactaagatcactgat

SEQ ID NO: 123658 - DNA, 171 bp, Artificial Sequence
  derived and/or modified sequence
atgaagtgggtctcttttatctcattgctgttcctgttcagtagcgcctattccgggtcgctcgacaagagacacggcgatggttccttctccgacgagatgaacacaatccttgataaccttgctgccagagattttattaattggctcatccagacgaagataaccgat

SEQ ID NO: 123659 - DNA, 171 bp, Artificial Sequence
  derived and/or modified sequence
atgaaatgggtgtccttcatcagcctcctctttcttttttcctctgcctatagcgggagtctggataaaagacacggagacgggtccttttccgacgagatgaacactattcttgacaaccttgccgccagagatttcatcaattggctgattcaaacaaaaattaccgac

SEQ ID NO: 123660 - DNA, 171 bp, Artificial Sequence
  derived and/or modified sequence
atgaagtgggtgtccttcatttcactgctgttcctcttttcatcggcctactccggaagcctggacaaacggcacggagacgggtccttttccgatgagatgaatactatccttgacaacctggccgcccgcgacttcatcaattggctcattcagaccaagatcactgac

SEQ ID NO: 123661 - DNA, 171 bp, Artificial Sequence
  derived and/or modified sequence
atgaagtgggtgtctttcatatctctcctcttccttttctcgagcgcatattcgggctccctggacaaacgccacggagacggatcatttagcgacgaaatgaacaccatcctggataatctggccgcccgggactttatcaattggctcatccaaactaagattactgat

SEQ ID NO: 123662 - DNA, 171 bp, Artificial Sequence
  derived and/or modified sequence
atgaaatgggtctctttcatttcactccttttcctcttttcttcagcgtacagtggctcacttgacaaacgtcacggagatggcagtttttccgatgaaatgaatacgattcttgacaatcttgcagcccgcgattttatcaattggctgatccaaactaaaattacagat

SEQ ID NO: 123663 - DNA, 171 bp, Artificial Sequence
  derived and/or modified sequence
atgaagtgggtgtcctttatctcactgctgtttctgtttagctccgcctactccggcagtcttgacaaaaggcacggggatggcagcttttctgacgagatgaatacaattcttgataacttggctgctcgagactttatcaactggcttatccagaccaaaatcactgac

SEQ ID NO: 123664 - DNA, 171 bp, Artificial Sequence
  derived and/or modified sequence
atgaaatgggtaagctttatctctttactgttccttttctcatccgcttactccggatcactggataagaggcacggggatggctccttttccgatgaaatgaacaccattcttgataacttggcagcacgagatttcataaactggctgatccagacaaagatcacagac

SEQ ID NO: 123665 - DNA, 171 bp, Artificial Sequence
  derived and/or modified sequence
atgaagtgggtttcttttatcagtctcttgttccttttctcttctgcctatagtgggtcacttgacaagcgccatggagatggcagttttagtgatgaaatgaacaccatcctggacaacctagcagcccgtgactttataaattggctcatacaaaccaagatcaccgat

SEQ ID NO: 123666 - DNA, 171 bp, Artificial Sequence
  derived and/or modified sequence
atgaagtgggtctcattcatatcactgctctttctgttcagttccgcctatagtggtagtctagacaagcgacatggggacgggtctttcagtgatgaaatgaacaccatcctagataacttggccgctagagactttattaattggctgattcaaacaaaaattacagat

SEQ ID NO: 123667 - DNA, 171 bp, Artificial Sequence
  derived and/or modified sequence
atgaagtgggtcagcttcatctccctcctcttcctgttctccagtgcatactcgggttcgctggataaacgccacggagacggctcgttctcagacgaaatgaacactattctggataatctggccgcgagggactttatcaactggctcatacagacgaagatcaccgat

SEQ ID NO: 123668 - DNA, 171 bp, Artificial Sequence
  derived and/or modified sequence
atgaagtgggtgagtttcatatcattgctgttcttattttccagtgcttatagtgggtcactcgacaagaggcacggcgacgggtcattctccgacgaaatgaataccatcttagacaacttggctgccagagattttatcaactggttgattcagaccaaaatcaccgat

SEQ ID NO: 123669 - DNA, 171 bp, Artificial Sequence
  derived and/or modified sequence
atgaagtgggtctcttttattagcctacttttcttattctcttccgcctactccggaagtctggacaagcggcacggagacggttccttcagtgacgaaatgaacactatcttggacaatctggcggcacgggacttcatcaactggctgatccagactaagatcacagat

SEQ ID NO: 123670 - DNA, 171 bp, Artificial Sequence
  derived and/or modified sequence
atgaagtgggtgtcgtttatctccctgctgtttctcttctcctcagcctactctggcagcctcgacaaacggcatggtgatggatcgttttcagatgagatgaacactattctcgacaacctggccgcaagagacttcatcaattggttgattcaaactaagataaccgat

SEQ ID NO: 123671 - DNA, 171 bp, Artificial Sequence
  derived and/or modified sequence
atgaagtgggtgagcttcatctcgttgctgtttctgttttcaagcgcatactcgggttcactggacaaaagacacggtgacggcagcttctcagatgaaatgaacactatcctggacaatctggctgcccgggatttcattaactggctcatccaaacgaaaatcactgac

SEQ ID NO: 123672 - DNA, 171 bp, Artificial Sequence
  derived and/or modified sequence
atgaagtgggttagcttcatctcgctgctgttcttgtttagctccgcctatagcggttccctggacaaaaggcatggagacggtagcttttccgacgagatgaacacgattctggataacctggctgcgcgcgactttatcaactggttgattcaaaccaagattaccgac

SEQ ID NO: 123673 - DNA, 171 bp, Artificial Sequence
  derived and/or modified sequence
atgaaatgggtgtccttcatcagcctcctcttcctgttctcatccgcatactccggatcgctggacaagcggcacggggatggatcattctccgacgaaatgaacactatcctcgacaacctggcggcgagagacttcattaactggctgatccaaaccaagattacggat

SEQ ID NO: 123674 - DNA, 171 bp, Artificial Sequence
  derived and/or modified sequence
atgaagtgggtctcctttattagcctccttttccttttctcttcagcgtatagcggatctcttgacaaacgacatggcgacggctcattttccgacgaaatgaatacaattctagataatctcgccgccagggattttattaattggctgatccagaccaaaattaccgac

SEQ ID NO: 123675 - DNA, 171 bp, Artificial Sequence
  derived and/or modified sequence
atgaaatgggtttcattcatctccctgctctttttgttctcaagcgcttactccgggtcgctggacaaacgccatggggacgggtccttctccgacgagatgaacaccatcctggacaatctggccgccagagattttatcaactggttgatccagaccaagataacggat

SEQ ID NO: 123676 - DNA, 171 bp, Artificial Sequence
  derived and/or modified sequence
atgaagtgggtgtccttcatttcactgctcttcctgtttagtagcgcgtattccggttctctggacaaaaggcatggggacggctcattcagtgacgaaatgaataccattctggacaacctggctgcacgggactttattaattggctcattcagactaagatcacagac

SEQ ID NO: 123677 - DNA, 171 bp, Artificial Sequence
  derived and/or modified sequence
atgaaatgggtgagttttatatcactccttttccttttttcttccgcttactccgggagtctcgataagagacacggggatggatcgttctcagatgaaatgaacacaattctcgataatctcgctgcaagggatttcataaactggctcattcagacaaaaatcactgat

SEQ ID NO: 123678 - DNA, 171 bp, Artificial Sequence
  derived and/or modified sequence
atgaaatgggtgagctttatctccctgcttttcctctttagctcagcatactctggatccctggataagagacacggagatggctcattcagtgatgaaatgaataccatactggacaacctggccgcccgcgatttcattaactggctcatccagactaagatcactgac

SEQ ID NO: 123679 - DNA, 171 bp, Artificial Sequence
  derived and/or modified sequence
atgaaatgggtgagctttatcagccttctttttcttttttcatccgcttactcaggctcgcttgacaagagacatggagacggttcgttcagcgatgagatgaacactatcctggacaaccttgcagcaagggactttatcaattggcttattcagaccaagattaccgac

SEQ ID NO: 123680 - DNA, 171 bp, Artificial Sequence
  derived and/or modified sequence
atgaaatgggtgagcttcattagcctgctgtttcttttctcgagcgcatactcgggctcacttgacaagcgccatggcgacggatcgttcagcgatgaaatgaataccatactggacaatctcgctgcacgggactttatcaattggctgattcagacgaaaatcaccgat

SEQ ID NO: 123681 - DNA, 171 bp, Artificial Sequence
  derived and/or modified sequence
atgaagtgggtttctttcatctctttgctattcttgttttcatccgcatattctggcagccttgataagaggcacggcgatggcagtttcagcgacgaaatgaacactattctggacaacttggctgctcgagattttatcaactggctcatacaaactaaaatcaccgac

SEQ ID NO: 123682 - DNA, 171 bp, Artificial Sequence
  derived and/or modified sequence
atgaagtgggtatcctttatttctcttctttttctgtttagttccgcgtattctggttctctggataagcgacacggtgatggttccttttcagatgaaatgaacaccattcttgataacctggctgctcgcgactttatcaactggttgattcaaaccaagatcaccgat

SEQ ID NO: 123683 - DNA, 171 bp, Artificial Sequence
  derived and/or modified sequence
atgaaatgggtgagtttcatctccctgctgttcctttttagctcagcctactctggatccctggataagaggcacggggatggaagcttttctgacgagatgaatacaatcctcgacaacctcgctgctagggacttcatcaattggctgatccaaactaagatcacagac

SEQ ID NO: 123684 - DNA, 171 bp, Artificial Sequence
  derived and/or modified sequence
atgaagtgggtgtcctttattagcctcctgttcctatttagttccgcttactccggatccctggataaacgccatggcgatggcagttttagcgacgagatgaataccatcctcgataacttggctgcgagggatttcattaactggcttatccagactaagattaccgat

SEQ ID NO: 123685 - DNA, 171 bp, Artificial Sequence
  derived and/or modified sequence
atgaagtgggtttcatttatctcactgctcttcctgtttagctccgcttacagcgggagcctcgataaacgccacggcgacggttctttctcggacgaaatgaacaccatattggacaatctggccgcgcgggattttattaattggttgatacagacaaaaattacagat

SEQ ID NO: 123686 - DNA, 171 bp, Artificial Sequence
  derived and/or modified sequence
atgaagtgggtgagttttatttcccttcttttcctgttcagctcagcgtactcaggaagtctggacaaacgccacggggacggtagcttttctgatgaaatgaataccattctcgataatctcgctgctcgcgacttcatcaactggctgatccagaccaaaataactgac

SEQ ID NO: 123687 - DNA, 171 bp, Artificial Sequence
  derived and/or modified sequence
atgaaatgggtcagttttatctccctcttgttcctctttagctcagcatattccggcagtctggacaaaaggcatggcgacggatcatttagtgatgaaatgaacaccattctggataatcttgcggctagggatttcattaactggctgatccagaccaagatcacagac

SEQ ID NO: 123688 - DNA, 165 bp, Artificial Sequence
  derived and/or modified sequence
atgccatcatcagtgtcatggggaattctgctgctggcaggtctttgttgtttggtgccggtgtcccttgctcacgcagaaggaacttttacttccgatgtgtcgagctacttggagggacaggccgcgaaggaattcatagcatggctggtccgggggcgagga

SEQ ID NO: 123689 - DNA, 165 bp, Artificial Sequence
  derived and/or modified sequence
atgccatcaagcgtgtcctggggtatcctgctcctagccgggctgtgttgcctggtgccagtctctttggctcacgcagagggtaccttcaccagcgatgtaagtagctacctggaggggcaggcagccaaggaattcatagcctggctggtaagggggaggggg

SEQ ID NO: 123690 - DNA, 165 bp, Artificial Sequence
  derived and/or modified sequence
atgccatctagtgtgagttggggcatcttgttgctggcgggtctgtgctgccttgtacccgttagtctggctcacgcagagggaacgtttacctctgacgtgtcctcatatttggaagggcaggccgccaaagaattcatagcctggctggtgcgtggtcgggga

SEQ ID NO: 123691 - DNA, 165 bp, Artificial Sequence
  derived and/or modified sequence
atgcccagcagcgtgagttggggtattctcctgctcgcgggtctgtgctgcctcgtaccggtgtcactggcgcacgcagagggaacattcacgtctgatgtgtccagctatctggaaggacaggcggctaaagaatttatcgcatggctggtgagggggagaggt

SEQ ID NO: 123692 - DNA, 165 bp, Artificial Sequence
  derived and/or modified sequence
atgccgtcgtcggtatcgtggggtatattactattagcgggtttatgttgtttagttccggtttcgttagcgcatgcggaaggtacgtttacgtcggatgtttcgtcgtatttagaaggtcaagcggcgaaagaatttatagcgtggctagtacgtggtcgaggt

SEQ ID NO: 123693 - DNA, 165 bp, Artificial Sequence
  derived and/or modified sequence
atgccaagctcagtgtcttggggaatcttgctgttggccggtctttgctgcctggtgccggtgtccctcgcccatgccgagggaacttttaccagcgacgtgtcatcgtacctcgaaggccaggccgccaaggagttcattgcgtggctggtgaggggacgcgga

SEQ ID NO: 123694 - DNA, 165 bp, Artificial Sequence
  derived and/or modified sequence
atgccttcctccgtgtcatggggtattctgctgcttgcaggcctctgttgcctggtgcctgtgtccttggcccacgctgaaggcacttttacttccgacgtttcgagctaccttgaaggtcaagcagccaaggagttcatcgcttggctcgtgcgcgggcgtgga

SEQ ID NO: 123695 - DNA, 165 bp, Artificial Sequence
  derived and/or modified sequence
atgccaagcagcgtgagctggggaatcctgctcctggccggcctctgctgtctcgtcccggtgtcccttgctcatgcggaaggaacgtttacctccgacgtcagctcctacctggaggggcaggcggcgaaggagttcatcgcttggcttgtgcgcggtcgcggt

SEQ ID NO: 123696 - DNA, 165 bp, Artificial Sequence
  derived and/or modified sequence
atgcctagctcggtgtcctggggcattctcctgcttgcaggactgtgctgtctcgttcctgtctcgctggcccatgcagaaggtacttttacgtccgatgtgtcatcctacctggaaggacaggcagcaaaggaattcatcgcgtggttggtcagaggccgaggc

SEQ ID NO: 123697 - DNA, 165 bp, Artificial Sequence
  derived and/or modified sequence
atgccatcctcggttagctggggaattctgctgctcgcaggtctgtgttgccttgtgcccgtttcgctggcgcatgccgaaggaactttcacctccgatgtgtccagttacctcgaaggtcaagctgcaaaggagtttatcgcctggttggtcagaggacgtggc

SEQ ID NO: 123698 - DNA, 165 bp, Artificial Sequence
  derived and/or modified sequence
atgccttcaagcgtgtcatggggcattcttttgctggcaggactttgctgtcttgtccccgtgtccctcgcacatgctgaaggaacgtttacctcagatgtctcgtcgtacctggaaggacaggcagcgaaggaattcatcgcttggctcgtcagaggaaggggc

SEQ ID NO: 123699 - DNA, 165 bp, Artificial Sequence
  derived and/or modified sequence
atgcctagcagcgtatcctggggcattctccttctggcgggtctgtgctgcttagtcccagtgtccctcgcgcatgccgaaggcaccttcacgtccgacgtcagctcctatctggagggccaggcggcgaaagaattcatcgcttggctcgtcagaggcaggggt

SEQ ID NO: 123700 - DNA, 165 bp, Artificial Sequence
  derived and/or modified sequence
atgcctagcagcgtcagctggggaatcctccttctcgccggactttgctgtctggtgccagtatcgctggctcatgcagaaggaacctttacttctgatgtctcatcgtacctggagggccaagctgccaaggaattcattgcatggctggtccgcgggagaggt

SEQ ID NO: 123701 - DNA, 165 bp, Artificial Sequence
  derived and/or modified sequence
atgcccagcagtgtatcgtggggaatccttttgctcgccggcctgtgctgcctcgtcccggtctccttggctcacgcagaaggcacattcaccagcgacgtcagtagctaccttgaggggcaggcagccaaggaatttatcgcgtggctcgtgcgaggcagaggc

SEQ ID NO: 123702 - DNA, 165 bp, Artificial Sequence
  derived and/or modified sequence
atgccttcatctgtgtcttggggtattctcctccttgctggtctgtgctgcttggttcccgtttcactggcacatgctgagggcaccttcacttctgatgtcagttcgtatctggagggccaggcagccaaggagtttatcgcctggcttgtgcgcggaagaggc

SEQ ID NO: 123703 - DNA, 165 bp, Artificial Sequence
  derived and/or modified sequence
atgccctcttccgtgagctggggcatcctgttgctggccggcctgtgctgtctcgtgcctgtttctctggctcatgctgagggaacctttaccagcgatgtgtcttcctacctggaaggacaggcggccaaggagttcatcgcctggctcgttagaggaaggggc

SEQ ID NO: 123704 - DNA, 165 bp, Artificial Sequence
  derived and/or modified sequence
atgccgagctcagtcagctggggaatcctgctcctggccggactttgttgtcttgtgccagtgagtcttgcgcatgcagaaggcacattcacatcagacgtcagtagctatctcgaaggccaagctgccaaagagtttatagcctggctggtccgaggacgcggc

SEQ ID NO: 123705 - DNA, 165 bp, Artificial Sequence
  derived and/or modified sequence
atgccctcctccgtgagctggggcatcctgctcttggcgggtctgtgctgcctggtgccggtgtccctggctcatgcagaaggaacctttactagcgatgtgagttcctaccttgagggccaggccgcaaaagaattcattgcttggcttgttagaggaagagga

SEQ ID NO: 123706 - DNA, 165 bp, Artificial Sequence
  derived and/or modified sequence
atgccttcaagcgtttcttggggtattctactcctggccggtctgtgttgcctggttccagttagcctcgcacacgctgagggcacgttcacatctgacgtgtcctcgtacctggagggccaagcagcaaaggagttcatcgcctggcttgtcaggggtcggggg

SEQ ID NO: 123707 - DNA, 165 bp, Artificial Sequence
  derived and/or modified sequence
atgccaagctcagtctcatggggaattctcttgctggccggtttgtgttgcctcgtccctgtgtcgcttgctcatgctgagggcacctttactagcgatgtttcctcgtacctcgaaggacaagcggcaaaggaattcatcgcatggcttgtgaggggccgaggt

SEQ ID NO: 123708 - DNA, 165 bp, Artificial Sequence
  derived and/or modified sequence
atgccctcttccgtgagctggggcattctcttgcttgccggattgtgttgccttgttccagtttccctcgcacacgccgaaggaacattcacatccgatgtgtcttcttatctggagggtcaagccgccaaagaatttatagcctggcttgtccggggtcgcgga

SEQ ID NO: 123709 - DNA, 165 bp, Artificial Sequence
  derived and/or modified sequence
atgccctcctcagtgtcttggggcatactcctcctcgcgggactgtgttgcctcgttcctgtgtctctcgcacatgcggaggggaccttcacctccgacgttagctcatacctcgaaggtcaggccgcaaaggagttcatagcctggctggtgcgaggcagaggg

SEQ ID NO: 123710 - DNA, 165 bp, Artificial Sequence
  derived and/or modified sequence
atgccatcatcagtctcatggggtattcttctcctggctgggctctgctgtctggtgcctgtgagcttggcccatgcagagggtacctttacctcagacgttagctcctatctagaaggacaggccgctaaagaattcatcgcctggctcgtccgcgggaggggt

SEQ ID NO: 123711 - DNA, 165 bp, Artificial Sequence
  derived and/or modified sequence
atgccaagctccgtcagctgggggatcctactcctggcaggtctatgttgtctggtgccggtgtcgctggcccacgctgagggcacctttactagtgacgtgtctagttatctggaggggcaggcagccaaggagtttattgcatggctcgtaagaggacggggg

SEQ ID NO: 123712 - DNA, 165 bp, Artificial Sequence
  derived and/or modified sequence
atgccatcttcagtcagctggggtattctcttacttgctggtttgtgttgtcttgtccccgtaagtctagctcatgcagaaggaacttttacctcggatgtaagctcttatcttgagggacaagctgcgaaagagtttattgcctggctcgttcgaggacgagga

SEQ ID NO: 123713 - DNA, 165 bp, Artificial Sequence
  derived and/or modified sequence
atgccgtcatcggtgtcctggggaatcctcttgctggcgggcctctgctgcttggtccctgtgtcactcgctcacgctgaaggaaccttcacgagtgacgtctcgtcataccttgaagggcaggcagcgaaggagtttattgcctggctggtgcgcggacggggt

SEQ ID NO: 123714 - DNA, 165 bp, Artificial Sequence
  derived and/or modified sequence
atgccatcatccgtgagctgggggattcttctgctggcaggactctgctgtctggtcccagtctcccttgcccatgccgagggaaccttcacctcggacgtctcgagctacctcgaaggtcaagcagcgaaagaattcattgcctggcttgtgagaggtagagga

SEQ ID NO: 123715 - DNA, 165 bp, Artificial Sequence
  derived and/or modified sequence
atgccgtcgtcagtctcctgggggatcctcctcctggccggactgtgctgcctggtgccggtgtccctcgcccacgccgaaggcaccttcacgtccgatgtctcatcgtacctggaaggccaggctgcaaaggaatttatcgcgtggctggtgcgaggtagggga

SEQ ID NO: 123716 - DNA, 165 bp, Artificial Sequence
  derived and/or modified sequence
atgccctctagcgtgtcctggggaatcctgcttctggccggcttgtgctgtttagtgccagtatccttagcccacgccgagggcacctttactagcgacgtgagttcttatttggagggacaagccgccaaagagttcatcgcgtggctggtgcggggtcggggc

SEQ ID NO: 123717 - DNA, 165 bp, Artificial Sequence
  derived and/or modified sequence
atgccatcctcagttagctggggcatcctattgctcgccggcctctgttgtctcgttccagtgtcgctggcccatgctgagggaactttcacctcagatgtgtcatcctatttagaaggacaggccgccaaggagttcatcgcttggctggtgcggggcaggggc

SEQ ID NO: 123718 - DNA, 165 bp, Artificial Sequence
  derived and/or modified sequence
atgccgtcgagcgttagctggggaatcctgctgctcgccggactgtgctgtttggtgcctgtcagccttgcgcacgcagagggtaccttcacttcggacgtttcatcctatctggaaggccaggccgcgaaggagttcatcgcctggctcgtgagggggagagga

SEQ ID NO: 123719 - DNA, 165 bp, Artificial Sequence
  derived and/or modified sequence
atgccaagttcagtgtcgtggggcatcctgttgcttgctggcttgtgttgccttgtgcctgtgtccctggctcacgcagaagggacctttacttcagatgtgtcgtcatacctcgaaggccaggcggcgaaagagttcatcgcgtggctcgtgcggggacgcggt

SEQ ID NO: 123720 - DNA, 165 bp, Artificial Sequence
  derived and/or modified sequence
atgccctcttccgtttcctggggcatcttgttgcttgcgggactgtgctgtctggtcccagtgtccctcgcccatgctgaggggacctttactagcgatgtgtcatcctaccttgaggggcaggcggcaaaggaattcattgcgtggctggtcagaggacgagga

SEQ ID NO: 123721 - DNA, 165 bp, Artificial Sequence
  derived and/or modified sequence
atgcctagttctgtaagctggggtatactgctgttggccggtctgtgttgcctggttcccgtgtcgctggctcacgctgaaggaacgttcacctccgacgtcagctcatacttggagggccaagcggccaaagaattcattgcctggctcgtacgcggcaggggt

SEQ ID NO: 123722 - DNA, 165 bp, Artificial Sequence
  derived and/or modified sequence
atgccgtcttctgtgagttggggcatactgctcctcgcaggcctgtgttgtctggttcctgtgtcgctggcccatgcggagggtacctttacctccgacgtttcttcttatctggaaggtcaggccgccaaggaatttattgcctggctggtgcgcggtcgcggt

SEQ ID NO: 123723 - DNA, 165 bp, Artificial Sequence
  derived and/or modified sequence
atgccctctagcgtctcctggggcattctgctgctcgcaggcctctgctgtctggtacccgttagccttgcacatgccgaggggacctttactagcgatgtttcatcctatctcgaaggacaggctgccaaggagtttatcgcttggctcgtgcgcgggcgagga

SEQ ID NO: 123724 - DNA, 165 bp, Artificial Sequence
  derived and/or modified sequence
atgccctcctcagtgtcttggggtatcctgctcctggcaggactgtgttgcctcgtccctgtctctcttgcccatgctgagggaacctttacttcagatgtgtcgtcctacctcgaaggccaagcggccaaggaattcatagcatggcttgtgaggggtagaggc

SEQ ID NO: 123725 - DNA, 165 bp, Artificial Sequence
  derived and/or modified sequence
atgccaagctcagtgtcctggggcatcttgctgctggcgggactgtgttgcctcgtgcccgtctcccttgcacacgcggaaggcaccttcacctcggatgtctcgtcatacctggaagggcaggccgcgaaagaattcattgcgtggctcgttcgcggacgcggg

SEQ ID NO: 123726 - DNA, 165 bp, Artificial Sequence
  derived and/or modified sequence
atgcccagttccgtgtcatggggcatactgttgcttgccggcttgtgctgcctggtacccgtgtccctcgcccatgcggaaggaacattcacctctgacgtgtcatcatacctcgagggccaggcagccaaggagttcatagcgtggttggtacgcggccgggga

SEQ ID NO: 123727 - DNA, 165 bp, Artificial Sequence
  derived and/or modified sequence
atgccctctagcgtctcatggggcatattattgctcgctgggctgtgttgtctggtccctgtgagcttggcccacgcagaaggaacattcacctctgatgtgtctagttacctcgaggggcaggctgccaaagagtttattgcctggctggtgcggggacggggg

SEQ ID NO: 123728 - DNA, 165 bp, Artificial Sequence
  derived and/or modified sequence
atgccatcgtccgtcagctggggcatcttgctgcttgcgggactctgttgcctggtcccggtgagcctggcccacgcggaggggacttttacctcggacgtgtcatcctacctcgaaggacaggctgcaaaggaattcatcgcctggctggtgcgcggtcgggga

SEQ ID NO: 123729 - DNA, 165 bp, Artificial Sequence
  derived and/or modified sequence
atgccctcgtccgtgagctggggaattctgctcttggctggtttgtgctgtcttgtgccggttagtctcgcgcacgccgagggtaccttcacttctgacgtctcatcgtacttggaagggcaggctgcaaaggagtttatcgcctggctcgtgcggggccgcgga

SEQ ID NO: 123730 - DNA, 165 bp, Artificial Sequence
  derived and/or modified sequence
atgcccagttcagtgtcttggggcatccttctgctggctggtctctgctgtcttgtgccagtgagcctcgcccacgcagaggggacctttacttctgacgtctcctcttacttggagggccaagccgcaaaagaatttatagcctggctagtcagaggcaggggc

SEQ ID NO: 123731 - DNA, 165 bp, Artificial Sequence
  derived and/or modified sequence
atgcccagctccgtctcttggggtatattgctgctagcgggtctgtgctgtttggtaccagtctcgctggcccatgccgagggtacgttcacctctgacgtgtcctcttacttggagggtcaggcagctaaggagtttatcgcatggttggttcgggggagggga

SEQ ID NO: 123732 - DNA, 165 bp, Artificial Sequence
  derived and/or modified sequence
atgccatcatcagtgtcatggggaattctgcttttggccggcctctgctgtctcgttcctgtgagcctggcacatgctgaaggtacttttacctcggatgtcagctcctaccttgagggacaagcggcaaaggaattcatcgcatggctcgtaagaggacgcggg

SEQ ID NO: 123733 - DNA, 165 bp, Artificial Sequence
  derived and/or modified sequence
atgccttcaagcgtctcatggggaattctcctcttggccggcctgtgctgtctcgtcccagtctccctggctcacgccgagggtacgttcacttccgatgtcagcagctatctagagggccaagcagctaaggagttcatagcctggctcgttcgcgggcggggg

SEQ ID NO: 123734 - DNA, 165 bp, Artificial Sequence
  derived and/or modified sequence
atgccgtcatctgtgagctgggggattctgctgctggccggactctgttgcctggttccagtgtctctggctcatgctgagggcacgttcaccagcgatgtctccagctatctggagggacaggccgcaaaggaattcattgcatggttggtgagaggccgcgga

SEQ ID NO: 123735 - DNA, 165 bp, Artificial Sequence
  derived and/or modified sequence
atgccctcatcagtgtcatggggtatcctcctgctggccggactgtgttgccttgtacccgtttcactggctcacgctgagggcaccttcacttccgacgtgtcctcttacctcgaaggccaagctgctaaggaattcattgcctggttggttcgcggtaggggc

SEQ ID NO: 123736 - DNA, 165 bp, Artificial Sequence
  derived and/or modified sequence
atgccttcctctgtcagctggggaatcttacttcttgccggactttgctgtctggtgccggtgagcttagcgcacgctgagggaacatttactagcgatgtttcgagttacctggaaggacaggcggcgaaggagttcatcgcctggctggttagagggagaggt

SEQ ID NO: 123737 - DNA, 165 bp, Artificial Sequence
  derived and/or modified sequence
atgccttcttcagtaagttgggggattttacttttagcaggtttatgttgtttagttccagtatctcttgcacatgctgaaggtacattcacttcagatgtatcaagttatttagaaggacaagctgcaaaagaatttattgcttggttagtaagaggaagagga

SEQ ID NO: 123738 - DNA, 165 bp, Artificial Sequence
  derived and/or modified sequence
atgccgagctctgtctcctggggaatcctcctgcttgctggactgtgctgcctggtgccggtcagcttggcccacgccgaagggacgttcaccagcgacgtgtcgtcatacctggaaggtcaggccgccaaagaattcatcgcctggttggtgcgcggaagggga

SEQ ID NO: 123739 - DNA, 165 bp, Artificial Sequence
  derived and/or modified sequence
atgccctcatcagtttcttggggtattctgctcctggcgggcctctgttgcttggtccccgtgtccttagctcacgctgagggcacctttacttcggatgtcagcagctacctggagggccaggcagccaaggagtttatcgcatggctagtgcgcggtcgaggc

SEQ ID NO: 123740 - DNA, 165 bp, Artificial Sequence
  derived and/or modified sequence
atgccgtcaagtgtttcgtggggaattcttctcctcgcaggactctgttgcctcgtgcctgtatcgctagcccatgcggagggtacgttcacatctgatgtgtcgtcttaccttgaaggtcaagcagcgaaagagtttatcgcatggctcgttcgcggacggggg

SEQ ID NO: 123741 - DNA, 165 bp, Artificial Sequence
  derived and/or modified sequence
atgccctcatcggtgtcatggggaattttattactagcagggctgtgttgccttgtacccgtttctcttgcacacgccgaagggacatttacttctgatgtgtcatcttacctggaagggcaagccgccaaagaatttatcgcctggctagtcagggggagaggg

SEQ ID NO: 123742 - DNA, 165 bp, Artificial Sequence
  derived and/or modified sequence
atgccatcgtccgtgtcatggggaatcctgctcctggccggactgtgttgcctggtgccagtgtcacttgcccacgcggagggaacttttacctcggatgtgtcatcgtaccttgaaggacaagcagcgaaggaattcattgcttggctggtgagaggcaggggc

SEQ ID NO: 123743 - DNA, 165 bp, Artificial Sequence
  derived and/or modified sequence
atgcctagcagcgtgagctgggggatcttgctcctggcagggctctgttgcctcgttccagtgagcctcgcccacgccgagggcacttttacttccgatgtgagcagctacctcgagggccaggcagccaaagagttcatcgcatggctggtccgagggcgcggc

SEQ ID NO: 123744 - DNA, 165 bp, Artificial Sequence
  derived and/or modified sequence
atgcctagctccgtttcctggggaatactcctcttggcaggtctctgttgccttgttcctgtttctcttgcccatgccgagggcacgtttacttcggacgtctcttcatatctggaggggcaggctgcaaaggaattcattgcgtggcttgtaaggggaagggga

SEQ ID NO: 123745 - DNA, 165 bp, Artificial Sequence
  derived and/or modified sequence
atgccctcctctgtctcatgggggatcttgctcctcgcaggactctgctgtctggtgcctgtgtccctcgcacacgcagaaggaacttttacttccgatgtgtcttcctatctcgaagggcaggcagctaaggaatttatagcatggctcgtccgaggaagagga

SEQ ID NO: 123746 - DNA, 165 bp, Artificial Sequence
  derived and/or modified sequence
atgcctagctctgtctcctggggaatcctcctgcttgccggattgtgctgcttggttccggtgagcctggctcacgcagaaggcacctttacttcagacgtgtcgtcgtacctggagggccaggcggcaaaggaattcatcgcctggttggtgagaggacgcggg

SEQ ID NO: 123747 - DNA, 165 bp, Artificial Sequence
  derived and/or modified sequence
atgccgtcatcggtcagctggggaatcctgctcctggccggactgtgctgcctcgtgccagtgtccctcgcacacgccgaaggaacctttactagcgatgtgagctcgtacctggagggccaagcagcaaaagagttcatcgcgtggttggtccgcggtagagga

SEQ ID NO: 123748 - DNA, 165 bp, Artificial Sequence
  derived and/or modified sequence
atgccgtcctccgtcagctggggtatcctgctgctggcaggtctttgctgtcttgtgccagtgtcactggcacatgccgaaggtacctttacgagcgacgtgtcaagctacctggaaggtcaagcagcaaaggagttcattgcctggttggtgagaggacggggg

SEQ ID NO: 123749 - DNA, 165 bp, Artificial Sequence
  derived and/or modified sequence
atgccatcgtcggtgtcctggggaattctgctgctggccggcctgtgctgtttggtcccagtgtcacttgcgcacgctgaaggaaccttcacttccgatgtttccagctacctcgagggacaagccgcaaaggagttcattgcctggttggtgagagggcgggga

SEQ ID NO: 123750 - DNA, 165 bp, Artificial Sequence
  derived and/or modified sequence
atgccctcaagcgtctcatggggcatcctcctgctcgccggactgtgctgtttggtgccggtgagcctggctcatgccgagggaaccttcacttcggatgtgtcctcgtacctcgagggacaagccgctaaggagttcattgcatggcttgtgcgcggacgggga

SEQ ID NO: 123751 - DNA, 165 bp, Artificial Sequence
  derived and/or modified sequence
atgccctccagtgtatcatggggtatcctgctcctggccggcctttgctgcttggtgcccgtgtccttggctcacgctgagggtacctttacgtcagatgtgagctcataccttgagggacaggcggcaaaagagtttatagcatggctggtgcggggcagaggg

SEQ ID NO: 123752 - DNA, 165 bp, Artificial Sequence
  derived and/or modified sequence
atgccttcctccgtctcctggggtattctgcttctggcgggactgtgttgcctcgtgcccgtgagtctggctcatgccgaggggacgtttactagcgatgtgtcaagctaccttgaaggccaggcagcaaaggagtttatcgcttggctcgtgcgcggccgggga

SEQ ID NO: 123753 - DNA, 165 bp, Artificial Sequence
  derived and/or modified sequence
atgccaagctcagtttcctggggaatcctcctgttggccggactgtgctgtttggtcccggtgtcgctggcgcacgcggagggcacctttacgagcgacgtgtccagttacctggagggccaggccgccaaggaattcattgcttggctggttagaggacgcggg

SEQ ID NO: 123754 - DNA, 165 bp, Artificial Sequence
  derived and/or modified sequence
atgccttcgtccgtttcatggggtatcctccttctcgctggtttgtgctgtttggtgcctgtgtcacttgcacacgcggaaggaacgtttaccagcgacgtgtcgtcgtacctcgaaggccaggcagcaaaggagttcattgcctggctggtgagaggccgggga

SEQ ID NO: 123755 - DNA, 165 bp, Artificial Sequence
  derived and/or modified sequence
atgccgtcatccgtctcgtgggggatactgttactcgctggcttgtgttgcctcgtccccgtttcactggcccacgccgagggaacctttacgagtgacgtgtcctcttacctggagggtcaagccgccaaggaatttattgcttggctcgtccgtggcagggga

SEQ ID NO: 123756 - DNA, 165 bp, Artificial Sequence
  derived and/or modified sequence
atgccatcatccgtgtcttggggcatcctcttgttggctggtctctgctgcctcgtccccgtatctctcgcacatgctgaaggcacttttacaagcgacgtgtctagctatctcgagggacaggccgccaaagaatttatagcctggctggtgagaggaagggga

SEQ ID NO: 123757 - DNA, 165 bp, Artificial Sequence
  derived and/or modified sequence
atgcctagctccgtgtcctggggcattctgcttctcgctgggctgtgctgtctggtgcctgtgtcgcttgcacacgcagaagggaccttcacttcggatgtgtcatcataccttgaaggtcaagcagcaaaggagttcatcgcttggctcgtgcgaggtcgtgga

SEQ ID NO: 123758 - DNA, 165 bp, Artificial Sequence
  derived and/or modified sequence
atgccatcatccgtgtcctggggtatcttgcttctggccggcctttgttgtttggtgcccgtgagtctcgcccacgcggagggcactttcactagcgatgtatcatcatacttggagggacaggctgccaaggagttcatagcctggctggtgagaggtagaggc

SEQ ID NO: 123759 - DNA, 165 bp, Artificial Sequence
  derived and/or modified sequence
atgcccagcagcgtgtcatggggaatattgcttcttgctggtctgtgctgtctggtgcccgtgagtctagcccacgcggagggaacgttcacatctgatgtctcaagctatcttgaggggcaggcagctaaggaattcatcgcctggctcgtccgcggcagaggt

SEQ ID NO: 123760 - DNA, 165 bp, Artificial Sequence
  derived and/or modified sequence
atgccttcatctgtcagctggggaatcctcctgttggcaggcctctgctgtcttgtgccggttagccttgctcacgccgaggggacctttacttcagacgtgtccagctacctcgaaggacaggccgcaaaggaattcatcgcctggctggtccgcggacggggc

SEQ ID NO: 123761 - DNA, 165 bp, Artificial Sequence
  derived and/or modified sequence
atgccttcgtcagttagttgggggatcctcttgctcgcaggcctgtgctgcctcgtgcctgtatccctggcccacgcagaaggtacttttacatccgatgtgagctcctatctcgagggccaagccgcaaaggagtttatcgcatggctggtgaggggacgcggg

SEQ ID NO: 123762 - DNA, 165 bp, Artificial Sequence
  derived and/or modified sequence
atgccctcatccgtgagctgggggattctactcctagccggcctgtgttgccttgtacctgttagtctagcgcatgccgagggaactttcacctcggatgtgtccagctacctggagggccaagccgccaaggagtttatcgcttggctggtgcgcgggcgtgga

SEQ ID NO: 123763 - DNA, 165 bp, Artificial Sequence
  derived and/or modified sequence
atgccttccagcgtgtcctgggggatactcttgctggccgggttgtgttgcttagttccggtctctctggctcacgcagagggaaccttcaccagtgatgtgtcatcgtacctcgaggggcaggcagccaaggaattcatcgcttggcttgttaggggacgcggc

SEQ ID NO: 123764 - DNA, 165 bp, Artificial Sequence
  derived and/or modified sequence
atgccgagctcagttagctggggaatactgttgctggctggcctctgttgcctggtccctgtgtctttagcacatgcggaaggcaccttcacatctgatgtcagctcctacctcgagggccaagccgccaaggaattcattgcttggctcgtgagggggagaggg

SEQ ID NO: 123765 - DNA, 165 bp, Artificial Sequence
  derived and/or modified sequence
atgccgtccagcgtatcttggggcatcctgctcttagcgggactgtgttgtcttgttccggtgtctcttgcacatgccgagggaacatttacttcggatgtgtcttcgtatttagagggacaggcagcaaaagagtttatcgcatggcttgtacggggacgaggt

SEQ ID NO: 123766 - DNA, 165 bp, Artificial Sequence
  derived and/or modified sequence
atgcctagcagtgtgtcatgggggatactgctgcttgcaggtctctgctgcttggtgccggtgagccttgcgcatgccgaagggacttttacatctgacgtttcgtcttatctggaaggacaggccgctaaggaattcatagcttggctggtgcggggtaggggt

SEQ ID NO: 123767 - DNA, 165 bp, Artificial Sequence
  derived and/or modified sequence
atgccgtcgtctgtgtcatggggaatcctcctgctggccgggctgtgttgcctggtgccggtcagcctggcccacgcagagggaactttcacttcagacgtgtcatcgtaccttgagggccaagcggccaaggagtttatcgcctggctggtgagaggacggggc

SEQ ID NO: 123768 - DNA, 165 bp, Artificial Sequence
  derived and/or modified sequence
atgccaagctcagtgtcttgggggatactgctgctggccggactatgctgcttggtgccagtaagcctcgctcatgccgaggggacgtttactagtgacgtgagtagctacctggagggccaggctgccaaggagttcattgcctggctggtgagaggccgtggc

SEQ ID NO: 123769 - DNA, 165 bp, Artificial Sequence
  derived and/or modified sequence
atgccatccagcgtgtcttggggcattttgttactcgctggtctctgttgtctggtgccggtttcgcttgcccatgccgagggcaccttcacctcggacgtgtcgagttatctggaggggcaggcagctaaagagtttattgcctggctggttagagggagggga

SEQ ID NO: 123770 - DNA, 165 bp, Artificial Sequence
  derived and/or modified sequence
atgcctagctctgtgagctggggaatactgctactcgctggactgtgttgtctggttcccgtctcgctggcccacgccgagggaacgttcaccagcgacgtctcctcttacttggagggccaagctgctaaggagtttattgcttggctggttcgcgggagggga

SEQ ID NO: 123771 - DNA, 165 bp, Artificial Sequence
  derived and/or modified sequence
atgccgtcgtcagtgtcctggggcattcttctgctggctggcctctgttgcctggttcctgtttcgctggctcacgcggagggaacctttacttcggacgtctcttcctaccttgaaggtcaggcagccaaggagttcatcgcgtggttggtgcggggacgcgga

SEQ ID NO: 123772 - DNA, 165 bp, Artificial Sequence
  derived and/or modified sequence
atgccttcctcagtgtcttgggggatcttgctgctggcgggcttgtgttgtctggtgccggtaagtctcgcccacgcagagggaacattcacatctgatgtatcatcgtacctggagggccaggccgccaaggaatttatcgcctggttagtccgcggaagagga

SEQ ID NO: 123773 - DNA, 165 bp, Artificial Sequence
  derived and/or modified sequence
atgccttcgtcagtgtcgtggggcattctcctcctggcaggactgtgttgccttgtgcccgtgtctctcgcgcacgctgaaggaaccttcacctctgatgtgtcctcgtacctggaggggcaagcagcaaaagagtttatcgcctggcttgtccgcggtcggggg

SEQ ID NO: 123774 - DNA, 165 bp, Artificial Sequence
  derived and/or modified sequence
atgaaatgggtgtctttcatctctttgctctttctgttctccagtgcgtactcaggaagccttgacaaacgccatgctgaagggacctttacatctgatgtgtcctcctaccttgaagggcaggctgcaaaagaattcattgcgtggcttgtgaaagggcgcgga

SEQ ID NO: 123775 - DNA, 165 bp, Artificial Sequence
  derived and/or modified sequence
atgaagtgggtctccttcatatctctgttattcctgttttcctcagcctacagtggtagcctggacaagagacacgcagaggggacatttacctcagacgtgtcttcttatctcgagggtcaggcggcgaaagaattcatcgcctggctcgtgaagggacgtggc

SEQ ID NO: 123776 - DNA, 165 bp, Artificial Sequence
  derived and/or modified sequence
atgaaatgggtgtccttcattagccttctgttcctgttctctagcgcttatagtgggagcctggataagcgccacgccgaagggactttcacaagcgatgtgagctcatatctagagggtcaggcagccaaagagtttatcgcttggttggtaaaggggagaggg

SEQ ID NO: 123777 - DNA, 165 bp, Artificial Sequence
  derived and/or modified sequence
atgaagtgggtgtcattcatctccctgctctttctgttttcgagcgcatacagcggatcacttgacaaaagacatgctgaagggaccttcacttcggatgtgtcctcgtatcttgaagggcaagcggccaaagagtttatagcatggttggtgaagggccggggc

SEQ ID NO: 123778 - DNA, 165 bp, Artificial Sequence
  derived and/or modified sequence
atgaagtgggtgtcatttatctcccttctgtttctgttcagctccgcctatagcggttcccttgataagaggcacgcagaaggaacctttacctcagacgtgtccagctacctcgagggccaagcagcaaaggagtttattgcgtggctggtcaagggcagagga

SEQ ID NO: 123779 - DNA, 165 bp, Artificial Sequence
  derived and/or modified sequence
atgaagtgggtcagcttcatctcgttgctctttctgttctccagcgcgtactccgggtcactggataagcggcacgcagaaggcactttcacctcagacgtgtcgtcgtacctcgaaggacaggccgccaaggagttcatcgcttggctggtgaaaggtcgcgga

SEQ ID NO: 123780 - DNA, 165 bp, Artificial Sequence
  derived and/or modified sequence
atgaagtgggttagtttcatatcattattgttcctattcagtagcgcctatagtggttctctggacaaaagacatgccgaaggcactttcacaagcgacgtgagcagttatcttgaggggcaggccgctaaagaattcatcgcatggcttgtaaaggggagggga

SEQ ID NO: 123781 - DNA, 165 bp, Artificial Sequence
  derived and/or modified sequence
atgaaatgggtctcattcatttccctgctgttcctgtttagctccgcctactctgggagtctggacaagcgacatgcagaaggaaccttcacatccgacgtgtcctcctaccttgagggacaagccgctaaagaattcattgcctggctggtgaaaggaagaggg

SEQ ID NO: 123782 - DNA, 165 bp, Artificial Sequence
  derived and/or modified sequence
atgaaatgggtctcctttatcagtttgttatttctgttttccagtgcatatagtggatcactggacaaacgtcacgccgagggcacgttcacctctgatgtgtcctcctacctcgaaggccaggcggctaaggagttcatcgcgtggctggtcaaggggaggggg

SEQ ID NO: 123783 - DNA, 165 bp, Artificial Sequence
  derived and/or modified sequence
atgaagtgggtgagcttcatatcccttttgtttcttttttcctcagcatactcgggctcactcgataagagacacgctgaaggtacgtttaccagcgacgtgtcatcatacctcgagggacaagccgccaaggagtttattgcgtggctggtgaagggccgagga

SEQ ID NO: 123784 - DNA, 165 bp, Artificial Sequence
  derived and/or modified sequence
atgaagtgggtgtccttcatcagtctgctgttcctgtttagcagcgcatactcaggatccttggataagagacacgccgaagggacctttacctcagatgtctcatcgtacctcgaaggccaggcagcgaaagagtttattgcgtggcttgttaaaggtcgcgga

SEQ ID NO: 123785 - DNA, 165 bp, Artificial Sequence
  derived and/or modified sequence
atgaaatgggtgtcgttcatctcgctccttttcctgttcagcagcgcttactcagggtcgcttgataagagacacgccgaaggtacctttacttcagacgtgtcctcatacctggagggacaggcggctaaggaattcatcgcctggctggtgaaagggagaggc

SEQ ID NO: 123786 - DNA, 165 bp, Artificial Sequence
  derived and/or modified sequence
atgaaatgggtatcttttatttcacttttatttttattttcatcagcttattctggatcacttgataaaagacatgcagagggaacttttacttcagatgttagttcttatttagaaggtcaagctgcaaaggaatttatcgcttggttagttaaaggtagagga

SEQ ID NO: 123787 - DNA, 165 bp, Artificial Sequence
  derived and/or modified sequence
atgaaatgggtctcattcatctctctgttgtttctgttcagttctgcctattccggctcactagacaagcgccacgctgaaggtacattcacctcagatgtttcctcatacttggagggtcaggccgcaaaggagtttattgcctggctggtaaagggacgcgga

SEQ ID NO: 123788 - DNA, 165 bp, Artificial Sequence
  derived and/or modified sequence
atgaaatgggtttccttcatatctctgctgtttttgttctcgagcgcctacagtggtagcttggacaagcgtcacgctgagggtacgttcacctccgacgttagcagctacttggagggtcaggctgcaaaagagttcatcgcgtggctggtgaagggccgtggc

SEQ ID NO: 123789 - DNA, 165 bp, Artificial Sequence
  derived and/or modified sequence
atgaagtgggtttcgttcatctctctcctgttcctctttagctcagcttacagcggatccttggacaagcgccacgcggaaggaactttcacctcagatgtgtccagctacttggagggccaggcagccaaggagtttatcgcatggctcgtgaaaggtagaggg

SEQ ID NO: 123790 - DNA, 165 bp, Artificial Sequence
  derived and/or modified sequence
atgaaatgggtgagcttcatatcgctgctttttctgttttcaagcgcttattcgggtagcctggataagcggcatgcagagggaaccttcacttcagacgtgtcatcgtacctggaaggacaggccgcaaaggaattcattgcgtggcttgtgaaaggacgtggt

SEQ ID NO: 123791 - DNA, 165 bp, Artificial Sequence
  derived and/or modified sequence
atgaaatgggtttcatttatttctctgttattcctcttctcttctgcctattccggatctctggacaagcgccacgctgagggaacattcacctccgatgtgtctagttacctcgaggggcaagccgctaaggagttcatcgcgtggcttgtgaagggccgggga

SEQ ID NO: 123792 - DNA, 165 bp, Artificial Sequence
  derived and/or modified sequence
atgaagtgggtgtccttcatctcccttctgttcctcttttcctcggcgtactcgggatccctcgacaaacgccacgcggagggcactttcacctcggacgtgtcatcatacctcgagggtcaggcggcaaaggaattcatcgcgtggctggtgaagggacggggt

SEQ ID NO: 123793 - DNA, 165 bp, Artificial Sequence
  derived and/or modified sequence
atgaaatgggtttcctttatttcacttctttttttgttttcgagtgcttattcaggttcactagataaaaggcatgccgaaggtacctttacatcggacgtatcatcttatctcgagggacaagcagcaaaagagtttatcgcctggctcgttaaaggtcgagga

SEQ ID NO: 123794 - DNA, 165 bp, Artificial Sequence
  derived and/or modified sequence
atgaagtgggtctcgttcatcagcctgctgttcctcttttctagcgcatactctgggtcgttggataagcggcatgctgaagggacattcacatccgatgtgtcaagctacctggagggacaggcggctaaggaattcatcgcgtggctggtcaagggacggggc

SEQ ID NO: 123795 - DNA, 165 bp, Artificial Sequence
  derived and/or modified sequence
atgaagtgggtgtcattcatttcactgttgtttctgttctcgtcggcgtattcaggatcgctggacaaacgccacgcggaagggactttcaccagcgacgtcagctcgtacctggaaggtcaggcagctaaggagtttatcgcttggctggtcaaaggccgggga

SEQ ID NO: 123796 - DNA, 165 bp, Artificial Sequence
  derived and/or modified sequence
atgaagtgggtcagctttatctccctgcttttcctgttctcgtccgcctactccgggtccctcgacaagcgccacgccgaagggacgttcactagcgatgtgtcgtcgtaccttgagggacaagccgcgaaggaattcatcgcctggctggtcaagggacggggc

SEQ ID NO: 123797 - DNA, 165 bp, Artificial Sequence
  derived and/or modified sequence
atgaagtgggtgtctttcatttcgctcctgttcctgttttcgtcggcttacagcgggtcccttgataaaagacatgcagaaggtacctttacttcagatgtgtcatcctaccttgaggggcaggcagcaaaggaattcatcgcgtggctggtcaagggccgcgga

SEQ ID NO: 123798 - DNA, 165 bp, Artificial Sequence
  derived and/or modified sequence
atgaagtgggtgtcctttatctcgctcctgtttctgtttagctcggcgtacagcggtagcttggacaagagacatgctgaaggcacttttaccagcgatgtgtccagctacctggaaggtcaggcggcaaaggagtttattgcatggcttgtgaaaggtagagga

SEQ ID NO: 123799 - DNA, 165 bp, Artificial Sequence
  derived and/or modified sequence
atgaagtgggtgtcattcatttccctgctgttcttgttttcctctgcctattcagggtcactggataaaaggcatgcggaaggaacctttactagtgacgtatcctcctacctggaaggtcaggccgccaaggaattcattgcctggctggttaagggacggggc

SEQ ID NO: 123800 - DNA, 165 bp, Artificial Sequence
  derived and/or modified sequence
atgaaatgggtatcgtttatatcgttattatttttattttcgtcggcgtattcgggttcgttagataaacgtcatgcggaaggtacgtttacgtcggatgtatcgtcgtatttagaaggtcaagcggcgaaagaatttatagcgtggctagtaaaaggtcgtggt

SEQ ID NO: 123801 - DNA, 165 bp, Artificial Sequence
  derived and/or modified sequence
atgaagtgggtgtccttcatctccctgctgttcctctttagcagcgcgtactctggatcgctggacaaacgccatgcagagggaactttcacgtcggacgtatcgtcgtacctggaaggacaggccgccaaggagtttatcgcgtggttggtgaagggccgcgga

SEQ ID NO: 123802 - DNA, 165 bp, Artificial Sequence
  derived and/or modified sequence
atgaagtgggtaagctttatcagcctgctctttctgttcagcagcgcgtatagcggcagtttagataaaagacacgccgaaggaacgttcacgtccgacgtgagctcgtacctggaaggccaggccgccaaggagtttattgcttggctggtcaagggacggggg

SEQ ID NO: 123803 - DNA, 165 bp, Artificial Sequence
  derived and/or modified sequence
atgaaatgggtcagcttcatttccctgctgtttttgttttcatccgcctacagcggctccttggataaacgtcacgccgaagggacgtttacctcagacgttagtagctatctcgaagggcaagctgcgaaagagtttatagcttggctggtcaaggggagaggc

SEQ ID NO: 123804 - DNA, 165 bp, Artificial Sequence
  derived and/or modified sequence
atgaagtgggtctctttcatctcccttcttttccttttctcatcagcgtattctggcagcttggacaaaaggcatgcggaggggaccttcacgagcgacgtgtcctcatacctggagggccaggctgctaaagagttcattgcctggctggttaagggcagaggt

SEQ ID NO: 123805 - DNA, 165 bp, Artificial Sequence
  derived and/or modified sequence
atgaagtgggtctcgtttatatcccttctcttccttttcagctccgcctactccgggtcactcgataagcggcacgctgaaggcacattcacctccgacgtaagctcgtatctcgaaggtcaagccgccaaggagttcatagcttggttagtcaaggggcgaggg

SEQ ID NO: 123806 - DNA, 165 bp, Artificial Sequence
  derived and/or modified sequence
atgaagtgggtgtcttttatctccctgctgtttctcttctcgtcggcctatagcgggagcctcgacaaaaggcatgccgaaggaactttcacgtcggatgtgtcatcatacctggaaggacaagccgcgaaggagttcatcgcctggcttgtcaaggggcgcgga

SEQ ID NO: 123807 - DNA, 165 bp, Artificial Sequence
  derived and/or modified sequence
atgaaatgggtctcattcatttccctactgttcctcttcagttctgcctactcgggatcactagacaaaaggcatgcggaaggcacgtttacgtcagacgttagttcatatttagagggccaggccgccaaagaattcatagcatggttggtaaaaggtcgcggc

SEQ ID NO: 123808 - DNA, 165 bp, Artificial Sequence
  derived and/or modified sequence
atgaagtgggtttcctttattagcctgctgttcctcttctctagcgcctactccgggagcttagataaacggcatgccgagggaaccttcacttctgacgtctcatcgtatctggagggccaggccgccaaggagttcattgcctggttggtgaagggtcgcggg

SEQ ID NO: 123809 - DNA, 165 bp, Artificial Sequence
  derived and/or modified sequence
atgaaatgggtgtcgttcatcagcctccttttcctcttttcatcagcctactcgggatccctggacaagagacatgccgagggtacctttacctccgacgtgtcatcgtacctcgaaggtcaagcagctaaggagtttatagcgtggcttgtgaaaggacgggga

SEQ ID NO: 123810 - DNA, 165 bp, Artificial Sequence
  derived and/or modified sequence
atgaaatgggtgagtttcatctcccttctattcctgttttcaagcgcatattctggctccctagataagcgacatgccgaaggaacattcacaagtgatgtgagttcttacctggaagggcaggctgctaaagagttcatcgcttggctggtaaaagggaggggg

SEQ ID NO: 123811 - DNA, 165 bp, Artificial Sequence
  derived and/or modified sequence
atgaaatgggtgtcctttatttctctgcttttcctcttctcttcagcctacagcggctctctggacaagaggcacgctgagggcacattcacatccgatgtctcttcctacctcgaaggacaggctgctaaggaattcatcgcttggcttgtgaagggtcgcggt

SEQ ID NO: 123812 - DNA, 165 bp, Artificial Sequence
  derived and/or modified sequence
atgaagtgggttagcttcatcagcctgctctttctcttctcctccgcatactcaggcagtctcgataaacgccacgctgaagggacgttcacgagcgacgtgtcatcgtatcttgagggccaagcagccaaagaattcatcgcttggctggtcaagggacgggga

SEQ ID NO: 123813 - DNA, 165 bp, Artificial Sequence
  derived and/or modified sequence
atgaagtgggtgtccttcatttccctgttgttcctattttcttctgcttactctggaagtctcgacaaaagacacgcagagggaacgtttacctcagatgtatcaagttacttagagggccaagcagccaaggagtttatcgcttggctcgtgaaaggtcggggg

SEQ ID NO: 123814 - DNA, 165 bp, Artificial Sequence
  derived and/or modified sequence
atgaagtgggtgtccttcatctctctcttgttcctgttttctagcgcctactccggctcgctcgataagcgccacgcagagggcaccttcacctcggacgtctcgtcgtacctcgaaggacaggccgcgaaagagtttatcgcctggctggtgaagggaaggggt

SEQ ID NO: 123815 - DNA, 165 bp, Artificial Sequence
  derived and/or modified sequence
atgaaatgggtttcattcatttcactcctgttccttttctcatcagcttactccggaagcctggacaagcgccatgcggaaggcacgttcacctccgacgtgtcctcctacctcgaaggacaggccgccaaggagtttatcgcatggctggtcaaaggcagaggc

SEQ ID NO: 123816 - DNA, 165 bp, Artificial Sequence
  derived and/or modified sequence
atgaagtgggtgagcttcatttccctgctctttctgttctcgtccgcatactcaggaagcctggacaagcggcacgcggagggaaccttcaccagcgacgtgagctcctacctggaggggcaggctgcgaaagagttcatcgcatggcttgtgaagggccgcggc

SEQ ID NO: 123817 - DNA, 165 bp, Artificial Sequence
  derived and/or modified sequence
atgaagtgggtgagcttcatctcactgctgtttcttttttccagcgcatattctggaagtttagacaagcgccacgcagaggggacttttacctcagacgtttcaagctatctggagggacaggctgccaaagagtttatcgcttggcttgtcaagggcaggggc

SEQ ID NO: 123818 - DNA, 165 bp, Artificial Sequence
  derived and/or modified sequence
atgaagtgggtttctttcatttccttgctctttttattcagctccgcttattccggctctctggataaacggcatgctgagggcaccttcacatctgacgtgtcctcctacctcgagggacaggctgccaaagaattcattgcatggttagttaagggtaggggg

SEQ ID NO: 123819 - DNA, 165 bp, Artificial Sequence
  derived and/or modified sequence
atgaagtgggtgtcgtttatctcactgctctttctttttagctcggcgtactcgggttcccttgataagcggcacgctgaagggactttcaccagcgacgtgagctcataccttgaaggacaggcagctaaggagtttatcgcatggctcgtgaagggaaggggt

SEQ ID NO: 123820 - DNA, 165 bp, Artificial Sequence
  derived and/or modified sequence
atgaaatgggttagcttcatttcactcctctttctttttagtagcgcctacagcggttctcttgacaagcgccacgccgaaggcacgttcaccagtgacgtaagtagctatctcgaagggcaagccgccaaggagttcatcgcatggctggtcaaaggccgcggc

SEQ ID NO: 123821 - DNA, 165 bp, Artificial Sequence
  derived and/or modified sequence
atgaaatgggtttctttcatctcgcttctgtttctgtttagctccgcctactccggctccttagacaagagacatgctgagggaaccttcactagcgacgtgtcttcgtaccttgaaggccaggcagccaaagaatttatcgcctggctagtgaagggacgcggc

SEQ ID NO: 123822 - DNA, 165 bp, Artificial Sequence
  derived and/or modified sequence
atgaagtgggtaagctttataagtcttctgtttttgttttctagtgcctacagcggatctctggacaaacgccatgcggaaggcacgtttacgtcggatgtctcgagttatctcgagggacaggctgctaaagaattcatcgcttggttagttaaaggccgcggc

SEQ ID NO: 123823 - DNA, 165 bp, Artificial Sequence
  derived and/or modified sequence
atgaagtgggtcagttttatctctcttcttttccttttctctagtgcctactcaggcagtctggataagcgccacgctgagggcacttttacctcggatgtgtccagctacctcgaagggcaagctgctaaggaattcattgcatggctcgtgaagggaagaggc

SEQ ID NO: 123824 - DNA, 165 bp, Artificial Sequence
  derived and/or modified sequence
atgaaatgggtgtcctttatctcactgctgttccttttcagctcggcatactcgggatccttggacaagcgccacgcagagggtactttcacctcagacgtgagctcttatctggaagggcaggccgcaaaggagtttatcgcgtggctggtcaagggaagaggc

SEQ ID NO: 123825 - DNA, 165 bp, Artificial Sequence
  derived and/or modified sequence
atgaagtgggtctcatttatctcgctgctgttcttgtttagctctgcatacagcggatcgctggacaagaggcacgctgaaggaaccttcacaagcgatgtcagctcatatctcgagggtcaagccgctaaagagtttatcgcatggcttgtaaagggtcgggga

SEQ ID NO: 123826 - DNA, 165 bp, Artificial Sequence
  derived and/or modified sequence
atgaaatgggtgtcctttatcagtctgttattcctcttcagttccgcctacagtggaagtctcgataagcggcatgccgaaggcacgttcacttcagacgtcagttcgtacctggaaggccaggccgcgaaagagtttatcgcatggttggtgaaagggcgcgga

SEQ ID NO: 123827 - DNA, 165 bp, Artificial Sequence
  derived and/or modified sequence
atgaaatgggtgagctttatctcgttgctcttccttttcagctccgcctattcaggatcgctggacaaacggcacgccgagggtacctttacttccgacgtctcatcttaccttgagggacaggctgccaaggagttcattgcgtggctcgtgaagggcagggga

SEQ ID NO: 123828 - DNA, 165 bp, Artificial Sequence
  derived and/or modified sequence
atgaagtgggtgtcgttcatctcactgctgtttttgttcagcagcgcgtactcggggagccttgataagcggcatgctgaaggaacgtttacctccgacgtttcgagctacttggaaggccaagccgcaaaagagtttatcgcatggctcgtcaaaggtcgcgga

SEQ ID NO: 123829 - DNA, 165 bp, Artificial Sequence
  derived and/or modified sequence
atgaaatgggtatccttcatatctctcctattcttattttcatccgcgtattccggaagtctagataaaaggcacgcggagggaacatttacatccgatgtctcttcttatctagaggggcaggccgccaaagaatttattgcatggctggtgaaaggacgcggg

SEQ ID NO: 123830 - DNA, 165 bp, Artificial Sequence
  derived and/or modified sequence
atgaagtgggtgtcctttatcagcctcctcttcttgtttagctccgcctactcgggatcccttgataagagacatgctgagggcacttttaccagcgacgtctccagctaccttgaaggacaagcggcaaaagaattcatcgcatggctggtgaagggcagggga

SEQ ID NO: 123831 - DNA, 165 bp, Artificial Sequence
  derived and/or modified sequence
atgaagtgggtgagcttcataagcttgctgtttctattttcttccgcgtactctggttctctggacaagagacatgctgaagggacatttacttccgatgtcagtagttatcttgaaggacaggccgctaaggaattcatcgcatggctcgtaaaaggaagaggt

SEQ ID NO: 123832 - DNA, 165 bp, Artificial Sequence
  derived and/or modified sequence
atgaagtgggtgtcgttcatctcgctcctgttcctgttctcgtccgcgtacagcggatcgcttgacaagcggcacgccgaagggacttttacctcagacgtgtcatcttacctcgagggccaagcggcaaaggaattcatcgcttggctggtcaagggcagaggg

SEQ ID NO: 123833 - DNA, 165 bp, Artificial Sequence
  derived and/or modified sequence
atgaaatgggtgtccttcatctcactgctgttcctcttcagctcagcttactccggatccctggataaacgccacgccgaaggaactttcacctcagatgtgagctcctacttggaagggcaggccgccaaggagttcatcgcgtggctcgtcaagggacgggga

SEQ ID NO: 123834 - DNA, 165 bp, Artificial Sequence
  derived and/or modified sequence
atgaagtgggtctctttcatcagcctgttattcctgttttcatccgcgtattctggttccttggataagaggcacgctgaggggacctttacctctgatgtctcttcctatctggaaggccaagcagcaaaagagttcatcgcgtggctggtgaaaggtcgtggc

SEQ ID NO: 123835 - DNA, 165 bp, Artificial Sequence
  derived and/or modified sequence
atgaagtgggtaagtttcatctccctcctgttcttgttttcaagcgcctacagcggtagcctggataagagacacgcagagggcacatttacctccgacgtgagttcttacttggaaggtcaggcagccaaggaattcatcgcctggctcgtaaaaggacgtggc

SEQ ID NO: 123836 - DNA, 165 bp, Artificial Sequence
  derived and/or modified sequence
atgaagtgggtgtctttcatcagtctgctgtttctgttctcatcagcctactcaggaagcctagacaaacgtcacgccgagggaactttcacctctgacgtctcatcatatctagaaggacaggctgcaaaggaattcatcgcttggctcgtaaaaggccgcgga

SEQ ID NO: 123837 - DNA, 165 bp, Artificial Sequence
  derived and/or modified sequence
atgaaatgggtatcttttatatctctactattcctcttctcttccgcttattctggatcactcgataagagacatgccgagggaactttcacaagtgatgtatcaagttatttggaagggcaggccgctaaagagtttatcgcttggcttgtgaaagggcgcggg

SEQ ID NO: 123838 - DNA, 165 bp, Artificial Sequence
  derived and/or modified sequence
atgaagtgggtatcctttatctcgcttctctttcttttttcatccgcatacagtggttccctggacaaacgccatgctgaaggaactttcacctctgatgtgagctcatacctcgaaggacaagcagcaaaagagttcattgcctggctggtcaagggaagaggg

SEQ ID NO: 123839 - DNA, 165 bp, Artificial Sequence
  derived and/or modified sequence
atgaaatgggtgagcttcatttctttgctcttcctatttagctctgcgtattctggatccctggacaagcggcatgcggaaggcacctttacaagcgatgtgtcctcttacctcgagggccaagccgccaaagaatttatcgcctggttggtcaaaggacgcggc

SEQ ID NO: 123840 - DNA, 165 bp, Artificial Sequence
  derived and/or modified sequence
atgaaatgggttagctttatttcactcttatttctattttcctccgcatactctggaagcttagacaaacgacacgctgaaggtactttcacctcagatgtctctagctacttggagggccaggccgctaaagagttcatcgcgtggctggtgaaaggacgcgga

SEQ ID NO: 123841 - DNA, 165 bp, Artificial Sequence
  derived and/or modified sequence
atgaagtgggtgtcgttcatctcgctccttttcctctttagcagcgcatactctgggtccctggataagcgtcatgccgaaggcacttttacctcagatgtgagctcatacctggaaggacaagcggcgaaagagttcattgcatggttggttaagggccgcgga

SEQ ID NO: 123842 - DNA, 165 bp, Artificial Sequence
  derived and/or modified sequence
atgaagtgggtctcttttattagcctgttgttcttgttctcttctgcctactctggatccctggacaaacgacatgctgagggaactttcacttccgacgtgtcgagctatctcgaagggcaggctgctaaggaatttatcgcatggctggtgaagggaaggggt

SEQ ID NO: 123843 - DNA, 165 bp, Artificial Sequence
  derived and/or modified sequence
atgaagtgggtgagttttatatctctgctgtttttgttctccagcgcttactccggcagtctggacaagcgccacgctgaaggcacattcacctctgacgtttcctcttacttggaaggccaggccgccaaggaattcatcgcctggctggtaaagggcaggggt

SEQ ID NO: 123844 - DNA, 165 bp, Artificial Sequence
  derived and/or modified sequence
atgaagtgggtcagcttcatctctctcctctttctcttcagctccgcctattcgggttccctcgataagaggcatgctgaggggactttcaccagcgacgtctcctcctacctggaagggcaggccgcgaaggaattcatcgcatggctggtgaaaggacgggga

SEQ ID NO: 123845 - DNA, 165 bp, Artificial Sequence
  derived and/or modified sequence
atgaagtgggtgtccttcatcagccttctgttcctgttttcgtcggcctatagcggatccttggataagcggcacgcggaaggtacttttacctctgacgtctcgagctacttggaggggcaggccgcgaaagaattcatcgcatggctcgtcaagggacgcgga

SEQ ID NO: 123846 - DNA, 165 bp, Artificial Sequence
  derived and/or modified sequence
atgaagtgggtcagcttcatctctcttctgtttctttttagctcggcatactcgggttcacttgacaagcgacacgccgagggaacgtttacctcggatgtgtcctcatatcttgaaggacaagcagcaaaggaattcattgcttggttggtcaagggcaggggt

SEQ ID NO: 123847 - DNA, 165 bp, Artificial Sequence
  derived and/or modified sequence
atgaagtgggtgtcatttatttcactcctgttcttattctcctctgcatatagtgggagtcttgataagcgccacgcagaaggcacttttacttccgacgtaagtagctatctggaggggcaggcggcaaaggagtttattgcctggctggtgaagggtaggggc

SEQ ID NO: 123848 - DNA, 165 bp, Artificial Sequence
  derived and/or modified sequence
atgaaatgggtgagcttcatctccctcttgttcctcttcagctcagcttactccggttcattggacaaacgacatgccgaagggacatttacaagcgatgtttcttcatacttggagggccaggccgccaaggagttcatcgcctggttggttaaaggtaggggg

SEQ ID NO: 123849 - DNA, 165 bp, Artificial Sequence
  derived and/or modified sequence
atgaaatgggtgtcctttatttctttactctttctgttcagctcagcgtattccgggtcactggacaagcgccacgcagagggcacttttacctcggacgtgagctcctatctggagggccaggctgccaaggagttcatcgcttggttggtcaaaggccgaggc

SEQ ID NO: 123850 - DNA, 165 bp, Artificial Sequence
  derived and/or modified sequence
atgaaatgggtgtcatttatctccctcctgttccttttctcgtcggcgtactcaggctcgctggataagcgtcacgctgagggaacttttacctccgacgtgtccagctaccttgaagggcaagccgctaaagagtttattgcatggttggttaaggggcggggc

SEQ ID NO: 123851 - DNA, 165 bp, Artificial Sequence
  derived and/or modified sequence
atgaaatgggtttccttcatatctctcctttttctgttttcgtcggcatactcaggctcgttggataagagacatgcagaagggacttttaccagtgatgtgagcagctacctggaagggcaggcagcgaaagaattcattgcctggctggtgaagggacgcggt

SEQ ID NO: 123852 - DNA, 165 bp, Artificial Sequence
  derived and/or modified sequence
atgaagtgggtgtcatttatcagccttctgtttcttttctcgtccgcgtactcaggctcactggataagagacatgcagaagggactttcacgtcggacgtctcatcgtacttggaaggtcaagcagcaaaagaattcattgcgtggttggtgaaaggtcgggga

SEQ ID NO: 123853 - DNA, 165 bp, Artificial Sequence
  derived and/or modified sequence
atgaagtgggtgagcttcattagtctcctgttcctcttctcttctgcctatagcggttcattggacaagcgccacgccgagggtacgttcaccagcgatgtgagttcatatctcgaggggcaagccgctaaggagtttatcgcctggctcgtaaaggggcgggga

SEQ ID NO: 123854 - DNA, 165 bp, Artificial Sequence
  derived and/or modified sequence
atgaagtgggtgtccttcatctctctgttattcctgttttcatctgcatattcaggcagcctggacaagagacacgctgagggaactttcacctccgacgtgtcaagttatttggagggacaggccgcaaaggaattcattgcatggttggtgaaaggccggggc

SEQ ID NO: 123855 - DNA, 165 bp, Artificial Sequence
  derived and/or modified sequence
atgaagtgggtgtctttcatcagtctattgtttctgtttagcagtgcctacagtggcagtttagacaagaggcacgccgagggcacctttacaagcgatgtcagttcatatctggaggggcaggccgcaaaagagtttattgcctggctcgtcaaaggaagagga

SEQ ID NO: 123856 - DNA, 165 bp, Artificial Sequence
  derived and/or modified sequence
atgaagtgggtgtcattcatctctttactattcctgttctcatctgcctactcgggctcgctggataagcgacacgcggaaggcacctttaccagtgacgtcagttcatatctggagggccaggctgccaaggaatttattgcctggcttgtgaagggcagaggt

SEQ ID NO: 123857 - DNA, 165 bp, Artificial Sequence
  derived and/or modified sequence
atgaaatgggtgagtttcatatctctgctttttttattttccagcgcatattcgggttcgctggacaagaggcacgcggagggcacctttacaagtgacgtcagcagctatctagaagggcaagcagcgaaagaattcattgcctggctggtgaaagggagaggc

SEQ ID NO: 123858 - DNA, 165 bp, Artificial Sequence
  derived and/or modified sequence
atgaagtgggtatcattcatcagcctgctcttcttgttttcatcggcctactccggctctcttgacaagcgccacgctgaaggaacttttacttccgatgtgtcgagctacctggagggacaggccgcgaaggagttcatcgcgtggctggtgaagggacgaggg

SEQ ID NO: 123859 - DNA, 165 bp, Artificial Sequence
  derived and/or modified sequence
atgaagtgggtgtcttttatcagtctgctcttcctcttctcctccgcgtactcaggcagcctcgataagcgccacgccgaaggaacctttactagcgacgtctcttcatacctggaaggacaggccgctaaggagttcatcgcgtggctggttaaaggccggggt

SEQ ID NO: 123860 - DNA, 165 bp, Artificial Sequence
  derived and/or modified sequence
atgaagtgggtgagcttcatctcgctcctctttctgttttcatctgcatacagtggcagcctggacaagaggcatggcgaaggcactttcacatccgacgtgtctagttacctcgaagggcaggctgccaaggaatttatcgcctggctggtgaagggcaggggg

SEQ ID NO: 123861 - DNA, 165 bp, Artificial Sequence
  derived and/or modified sequence
atgaaatgggtctcctttatcagtctcctgtttttgttcagctctgcctattcagggagcttggacaagcgtcacggcgagggcaccttcacaagcgacgtatcaagctatctcgagggacaggcggctaaagagttcatcgcatggctcgtgaagggcagggga

SEQ ID NO: 123862 - DNA, 165 bp, Artificial Sequence
  derived and/or modified sequence
atgaagtgggttagcttcatttctttgctctttctgttctcgtccgcatacagcgggagccttgataagaggcatggagagggaacgtttacttcagacgtctcctcgtaccttgaaggtcaggcagcgaaagaattcattgcatggcttgtgaaagggcgggga

SEQ ID NO: 123863 - DNA, 165 bp, Artificial Sequence
  derived and/or modified sequence
atgaagtgggtatctttcatctccttgcttttcctgttttcttctgcatactcaggcagcctcgataagcgccacggagagggaaccttcaccagcgatgtgagcagctacctggaaggtcaggcagccaaagaatttatcgcttggctggtcaagggccgtgga

SEQ ID NO: 123864 - DNA, 165 bp, Artificial Sequence
  derived and/or modified sequence
atgaaatgggtatcttttattagtctcctgttcctcttcagtagcgcttattcaggcagcctcgataagagacatggcgagggaacctttactagcgacgtcagtagctatctggagggtcaggcagccaaagagtttatcgcgtggctggtcaaagggagaggc

SEQ ID NO: 123865 - DNA, 165 bp, Artificial Sequence
  derived and/or modified sequence
atgaagtgggtgtcctttatctcactgcttttcctttttagctcggcatattccgggtcgctcgataagagacatggtgaaggcacttttacctccgacgtgtctagctacctcgagggacaagccgcaaaagaattcatagcctggcttgtcaaagggcgggga

SEQ ID NO: 123866 - DNA, 165 bp, Artificial Sequence
  derived and/or modified sequence
atgaagtgggtgagcttcatctcccttctgtttcttttctcctcagcttattccggatcgctcgacaaacggcacggagaaggcacttttacctcagatgtgtcctcgtacctcgaaggtcaagcggccaaggagtttattgcctggctggtcaaggggagagga

SEQ ID NO: 123867 - DNA, 165 bp, Artificial Sequence
  derived and/or modified sequence
atgaaatgggtgtcattcataagcctactgtttctgttctctagcgcctattccgggtcactggataagcgacatggcgagggcactttcacctctgacgtgagttcctatctggaaggacaggccgctaaggaatttatcgcctggctggtcaaggggaggggg

SEQ ID NO: 123868 - DNA, 165 bp, Artificial Sequence
  derived and/or modified sequence
atgaaatgggtcagctttatcagcctgctgtttctgtttagctctgcttacagtggaagtctggataaacgccatggagaaggcacattcacttcagacgtgagcagttatttggagggtcaggccgccaaagaattcattgcctggcttgtgaagggacgcggc

SEQ ID NO: 123869 - DNA, 165 bp, Artificial Sequence
  derived and/or modified sequence
atgaagtgggtgtcgtttatctcgttgctgttccttttcagctcagcgtactcgggttccctggataagagacacggcgaaggtactttcacttcagacgtcagctcatacctggaaggacaagccgcgaaggagttcatcgcctggctcgtgaagggcagagga

SEQ ID NO: 123870 - DNA, 165 bp, Artificial Sequence
  derived and/or modified sequence
atgaagtgggtgtcctttatctcgctgctgttccttttttcgtcggcatacagcggatccttggacaagaggcatggtgaaggcactttcactagcgatgtcagctcataccttgaagggcaggctgcaaaagagttcattgcatggctcgtgaagggcagaggg

SEQ ID NO: 123871 - DNA, 165 bp, Artificial Sequence
  derived and/or modified sequence
atgaaatgggtgtcgtttatctcactccttttcttgttttcctcggcgtattcgggctcgctcgataaacggcatggagagggtaccttcacttccgatgtcagctcgtacctggaaggccaagcagccaaggagtttatcgcatggcttgtgaagggacgcgga

SEQ ID NO: 123872 - DNA, 165 bp, Artificial Sequence
  derived and/or modified sequence
atgaagtgggtcagctttatctcgctccttttcctgttttcctcggcttactcgggatcattggacaagagacatggagagggaacctttacctcggatgtgagttcctacctcgagggacaggcagccaaggagtttattgcgtggcttgtgaagggaaggggt

SEQ ID NO: 123873 - DNA, 165 bp, Artificial Sequence
  derived and/or modified sequence
atgaaatgggtttctttcatctccttgctgtttctgttctctagcgcttatagcggctctctggacaaacggcacggcgaggggacttttacaagcgatgtgagctcttatctggaaggccaggcggctaaagagttcatcgcttggttggtcaaagggcgtggc

SEQ ID NO: 123874 - DNA, 165 bp, Artificial Sequence
  derived and/or modified sequence
atgaaatgggtgtccttcatcagcctcctctttctgttttcatccgcttatagcggaagtcttgacaagaggcatggcgaagggacctttacttctgatgtgagcagctatctggaggggcaggccgcaaaagagtttatagcctggttagtgaaaggacggggc

SEQ ID NO: 123875 - DNA, 165 bp, Artificial Sequence
  derived and/or modified sequence
atgaagtgggtcagctttatatctctgctgtttctgtttagtagtgcctatagtggaagcttggacaagaggcacggggaagggaccttcaccagcgatgtgagctcttacctggagggccaagctgctaaagagtttatagcttggctggtgaaaggcaggggt

SEQ ID NO: 123876 - DNA, 165 bp, Artificial Sequence
  derived and/or modified sequence
atgaaatgggtctcattcatcagtctcctcttccttttttcgtccgcttattccggctctttggataaacgacatggcgaaggtactttcacatcagatgtttcttcgtatctggaaggtcaagctgcaaaagaattcatcgcttggctggttaaaggcagaggt

SEQ ID NO: 123877 - DNA, 165 bp, Artificial Sequence
  derived and/or modified sequence
atgaagtgggtcagcttcatatcgctgctttttctgtttagcagcgcatactcaggctctcttgataagagacacggagagggcacctttacgtccgacgtgagctcctaccttgagggacaggcagcaaaagaattcattgcatggctggtgaagggacgcgga

SEQ ID NO: 123878 - DNA, 165 bp, Artificial Sequence
  derived and/or modified sequence
atgaaatgggtttcctttatttcccttctatttctcttcagtagcgcttattctggaagcctggataaacgccatggcgagggaactttcacctcagacgtatcaagttaccttgaagggcaggccgcgaaggagtttatcgcctggctagttaagggcaggggc

SEQ ID NO: 123879 - DNA, 165 bp, Artificial Sequence
  derived and/or modified sequence
atgaagtgggtttcatttatcagtctgctgtttttgttttcatcggcctactccgggtctttggacaagaggcacggtgagggcacctttactagtgatgtttcgtcctacttggagggccaagccgctaaggagttcatagcttggttggtcaaaggccgtggg

SEQ ID NO: 123880 - DNA, 165 bp, Artificial Sequence
  derived and/or modified sequence
atgaagtgggtttcctttataagcctgctgttcctgtttagctccgcgtacagtggcagcctcgacaagcgacatggagagggcacattcacttccgacgtgtcaagctatctggaaggccaagcagccaaagagtttattgcttggctcgtcaaagggcgcggc

SEQ ID NO: 123881 - DNA, 165 bp, Artificial Sequence
  derived and/or modified sequence
atgaagtgggtgagcttcatttctcttctgtttttgttttcttctgcatactctggctcattggacaaaagacatggcgaaggcacattcacgagtgatgtttctagttatcttgaaggtcaggctgctaaggagttcatagcctggttggttaagggcagagga

SEQ ID NO: 123882 - DNA, 165 bp, Artificial Sequence
  derived and/or modified sequence
atgaagtgggtaagtttcatttcattattatttttgttttcaagtgcatattcaggtagtcttgataaaagacatggagaaggtactttcacatctgatgtttcatcttatcttgagggacaagccgcaaaggagtttattgcttggctagttaaaggacgtggt

SEQ ID NO: 123883 - DNA, 165 bp, Artificial Sequence
  derived and/or modified sequence
atgaagtgggtcagtttcatctccctcctgttcctgtttagctcggcttattcaggctccctggataagagacacggagaaggaaccttcacttcggacgtgtcctcctacctcgaaggacaggcggcgaaggagttcattgcctggctggtcaagggacgggga

SEQ ID NO: 123884 - DNA, 165 bp, Artificial Sequence
  derived and/or modified sequence
atgaagtgggtgtcattcatcagtctcctcttcctgttttctagcgcatacagcggatcgctggacaagagacacggagagggcacttttacctcagatgtctcctcctaccttgaagggcaggcggctaaagaattcatcgcgtggctggtaaagggtagggga

SEQ ID NO: 123885 - DNA, 165 bp, Artificial Sequence
  derived and/or modified sequence
atgaagtgggtgtcattcatcagcctgctattcttgtttagttccgcttactcaggatcgctcgataagaggcacggagaaggcacattcacctcagatgtttcaagctaccttgagggccaggctgccaaagaattcatcgcctggttggttaaaggcagaggg

SEQ ID NO: 123886 - DNA, 165 bp, Artificial Sequence
  derived and/or modified sequence
atgaagtgggtttctttcatctcactcctgtttctgttctcttccgcttactccggctcactagataagaggcatggcgagggcaccttcacatccgatgtaagcagctatctggagggccaggccgctaaagagtttatcgcatggttggtcaagggacggggc

SEQ ID NO: 123887 - DNA, 165 bp, Artificial Sequence
  derived and/or modified sequence
atgaagtgggtgagcttcatatccttattgtttctgttttctagcgcttactccggctccttggataagaggcatggagaaggcacttttacttctgatgtttcttcttacctagaggggcaagcagccaaggaattcatcgcctggctggtgaaaggccgaggc

SEQ ID NO: 123888 - DNA, 165 bp, Artificial Sequence
  derived and/or modified sequence
atgaaatgggtcagtttcatttcactgctgtttcttttctcgtcagcctactcaggatctctcgataagcgccatggagagggaacttttacctccgatgtctcgtcgtacctcgagggtcaagcagcaaaggagtttatcgcgtggcttgtgaagggacgggga

SEQ ID NO: 123889 - DNA, 165 bp, Artificial Sequence
  derived and/or modified sequence
atgaagtgggtcagcttcatctcgctgctgtttctgttctcatcagcgtactccggatcgctcgataagcggcacggagaaggcactttcacttcggacgtgtcgagctatctggagggccaggccgcgaaggagttcatcgcctggcttgtgaagggacgcgga

SEQ ID NO: 123890 - DNA, 165 bp, Artificial Sequence
  derived and/or modified sequence
atgaagtgggtcagctttatctcactgctgttcctgttctcctccgcgtacagcggatccttggacaagcgccacggggaaggaacgttcacctccgatgtctcttcgtatcttgaaggccaggccgccaaggagttcatcgcatggctggttaaaggaagaggc

SEQ ID NO: 123891 - DNA, 165 bp, Artificial Sequence
  derived and/or modified sequence
atgaaatgggtgtcttttatcagcctgttgtttctgttctcttccgcttactcaggttcactggataagcgccacggcgagggcactttcacctccgacgtcagttcctacctcgagggacaggcagcgaaggaattcatcgcctggcttgtgaaaggaagagga

SEQ ID NO: 123892 - DNA, 165 bp, Artificial Sequence
  derived and/or modified sequence
atgaagtgggtaagcttcatcagcctgctgtttttgttctcttccgcttacagcggttcattggacaagcgccacggagagggcacttttactagcgacgtgtccagctacttggagggccaggctgccaaagagttcattgcatggctggttaaggggcggggt

SEQ ID NO: 123893 - DNA, 165 bp, Artificial Sequence
  derived and/or modified sequence
atgaaatgggtttcattcatctctctattattcttgttttcatcagcttacagtggctctcttgataagcggcacggagaaggtacttttacaagtgacgtatcaagctatcttgagggccaagcagcaaaggagtttattgcttggttagttaaaggacgggga

SEQ ID NO: 123894 - DNA, 165 bp, Artificial Sequence
  derived and/or modified sequence
atgaaatgggtctcatttatctcgctactgttccttttcagttctgcatactctggatcactggacaagaggcacggggaaggcaccttcaccagcgacgtttccagctatttggaagggcaagccgccaaagagtttatagcctggcttgtaaaagggagaggc

SEQ ID NO: 123895 - DNA, 165 bp, Artificial Sequence
  derived and/or modified sequence
atgaagtgggtgtcattcattagcctgctgtttctcttttcctccgcttatagcggtagcttggacaagagacacggcgagggaacattcacatccgatgttagctcttatctagagggacaggccgctaaggaatttatcgcttggttagtcaaaggcagaggc

SEQ ID NO: 123896 - DNA, 165 bp, Artificial Sequence
  derived and/or modified sequence
atgaagtgggtgtcttttatctcccttttgttcctgttctcatcggcttactccggatctctcgataagcgccacggtgagggaactttcaccagtgacgtgagctcatatttggaggggcaggcggccaaagaattcatcgcgtggctggttaagggcaggggc

SEQ ID NO: 123897 - DNA, 165 bp, Artificial Sequence
  derived and/or modified sequence
atgaaatgggtttcgtttatctctttgctgttcctgttttcctccgcttactccggaagcctggacaaacggcacggggagggcacctttacgtctgatgtgagctcctacctggagggtcaggcggctaaggaatttatcgcctggctcgtcaaagggcgggga

SEQ ID NO: 123898 - DNA, 165 bp, Artificial Sequence
  derived and/or modified sequence
atgaagtgggtgagcttcatatccctccttttcctgttctcgtcggcctattccggtagtctcgataagcgtcatggcgaaggtaccttcacgtctgacgtgagctcttacctggagggtcaagcagccaaggaattcatcgcttggttggtgaaagggcgtggc

SEQ ID NO: 123899 - DNA, 165 bp, Artificial Sequence
  derived and/or modified sequence
atgaaatgggtgtcattcatatcactccttttccttttctcctcggcatactcgggatcgctcgataaaaggcatggagaaggtacctttaccagcgacgtgagctcgtacctggaaggtcaggcggctaaagagtttatcgcctggctggtcaaaggcagaggc

SEQ ID NO: 123900 - DNA, 165 bp, Artificial Sequence
  derived and/or modified sequence
atgaagtgggtcagtttcatttccctgctttttctgttcagctccgcctacagtggctccctagataagcgtcacggagagggcacattcacatctgacgtgtctagctacctcgaaggacaggcggcaaaggaatttattgcttggcttgtaaagggcagagga

SEQ ID NO: 123901 - DNA, 165 bp, Artificial Sequence
  derived and/or modified sequence
atgaagtgggtttcattcataagcctgctttttctcttctcgtccgcttactcggggtcgctggataagcgccacggagaagggacgttcacctcagacgtgtcatcgtaccttgaaggtcaagcagccaaggagtttatcgcgtggctggtcaaaggaaggggc

SEQ ID NO: 123902 - DNA, 165 bp, Artificial Sequence
  derived and/or modified sequence
atgaagtgggtcagtttcatctcccttctctttcttttttcttccgcatactccggatccctagataaacgccatggagaagggacgtttacatctgatgttagttcatacctcgaagggcaggctgctaaggaattcatagcttggctcgtcaaggggagggga

SEQ ID NO: 123903 - DNA, 165 bp, Artificial Sequence
  derived and/or modified sequence
atgaaatgggtgtcatttatctcacttctgttcctgttttcgtccgcctactccggttccctggataaacgccacggcgaaggaacttttactagcgatgtgagctcgtacctggagggacaagccgccaaggaattcatcgcatggctcgtgaaggggagggga

SEQ ID NO: 123904 - DNA, 165 bp, Artificial Sequence
  derived and/or modified sequence
atgaagtgggtgtcattcatctcgctcctgttcttgttctcgtcggcttactccggatccttggacaagcggcatggcgagggtactttcacctcggatgtgtcatcctacctcgaaggacaggccgcaaaggagtttatcgcctggctggtcaaaggacgaggc

SEQ ID NO: 123905 - DNA, 165 bp, Artificial Sequence
  derived and/or modified sequence
atgaagtgggtatcattcatttccctgctgtttttgttctcctcggcatactcaggctcgcttgacaagcgacacggtgaggggacctttacgtccgatgtgagctcgtacctcgaaggccaagcagccaaagagtttatcgcctggctcgtgaaggggagagga

SEQ ID NO: 123906 - DNA, 165 bp, Artificial Sequence
  derived and/or modified sequence
atgaagtgggtttcttttatctcgctcctgttccttttctccagtgcatacagcggttctttggataaaagacatggcgaaggcacctttacttccgacgtctccagctacctcgaaggacaagccgctaaggagtttattgcatggctggtgaaaggaaggggg

SEQ ID NO: 123907 - DNA, 165 bp, Artificial Sequence
  derived and/or modified sequence
atgaagtgggtgtcgttcatctccttgctctttctgttctcaagcgcatactcgggctcccttgacaagcggcacggagaaggcaccttcacttcggatgtgtcgagctatctcgaaggacaagccgctaaagagtttatcgcgtggttggtgaagggcagaggc

SEQ ID NO: 123908 - DNA, 165 bp, Artificial Sequence
  derived and/or modified sequence
atgaaatgggtatcttttatctcccttctttttttgttttcgtctgcgtactccggctcactcgacaaacgacatggtgaggggactttcacttctgacgtgagttcatatctggagggacaggccgccaaagagtttattgcatggctggttaaaggaagaggg

SEQ ID NO: 123909 - DNA, 165 bp, Artificial Sequence
  derived and/or modified sequence
atgaaatgggtaagcttcatctccctcctttttttgttcagcagcgcctacagtggttccctggacaagcgccatggagaagggacctttacctccgatgtgtctagttacctggaggggcaggccgctaaggagttcatcgcatggctcgtaaagggcaggggc

SEQ ID NO: 123910 - DNA, 165 bp, Artificial Sequence
  derived and/or modified sequence
atgaagtgggtgagcttcatctcgctgttgttcctgttttcaagcgcgtacagcggatcgcttgataagagacatggtgaaggcaccttcacttccgacgtctccagctatcttgagggccaggccgcgaaggaattcattgcctggctggtgaaagggcgggga

SEQ ID NO: 123911 - DNA, 165 bp, Artificial Sequence
  derived and/or modified sequence
atgaagtgggtgtcattcatctcgctgctgttcctcttttcgagcgcctactccggtagccttgataagcgtcatggagaagggacctttacttcggacgtttcgtcgtacctcgaggggcaggccgcaaaagagttcatcgcatggctggtgaagggccggggc

SEQ ID NO: 123912 - DNA, 165 bp, Artificial Sequence
  derived and/or modified sequence
atgaagtgggtcagcttcatcagcctcttgtttcttttttcctcggcctactctggatcactcgacaaacgccatggtgaaggtactttcacctcggatgtgtcctcgtaccttgaaggacaagccgcaaaagagtttattgcttggctggtgaagggcaggggc

SEQ ID NO: 123913 - DNA, 165 bp, Artificial Sequence
  derived and/or modified sequence
atgaagtgggtgtcctttatttcccttctgttcctgttctctagcgcatactctggtagcttggataagagacacggggaaggcacgtttacaagtgatgtgagttcatacttagaaggtcaagcagccaaagaatttatcgcctggctcgttaaaggtagaggt

SEQ ID NO: 123914 - DNA, 165 bp, Artificial Sequence
  derived and/or modified sequence
atgaaatgggtttcttttataagcctgctcttcctgttcagctctgcctacagcgggtccttggataaacgtcatggggaaggcaccttcacctccgacgtttcgtcataccttgaggggcaggcggccaaagagttcattgcctggttggtcaaagggaggggc

SEQ ID NO: 123915 - DNA, 165 bp, Artificial Sequence
  derived and/or modified sequence
atgaaatgggtgtcattcatcagccttctgtttttgttttcaagcgcatactcaggttcgttggacaagcgccatggtgaaggcacctttaccagcgatgtgtcgtcatatctcgaaggccaagctgcaaaggagtttattgcctggcttgtgaagggaagagga

SEQ ID NO: 123916 - DNA, 165 bp, Artificial Sequence
  derived and/or modified sequence
atgaagtgggtgtccttcatttccctgctgtttctgttcagctcagcgtactcaggatcgcttgataagagacacggagaaggcaccttcacttcggacgtcagcagctacctcgaaggtcaggcagcaaaggagtttatcgcttggttggtgaaagggcgaggc

SEQ ID NO: 123917 - DNA, 165 bp, Artificial Sequence
  derived and/or modified sequence
atgaagtgggtctctttcatctctctgcttttccttttcagctccgcatattcgggttcactggacaaacgccacggggagggaaccttcacatctgacgtgtccagctatctggagggtcaagcagctaaggagttcatcgcttggctagtaaagggtcgcgga

SEQ ID NO: 123918 - DNA, 165 bp, Artificial Sequence
  derived and/or modified sequence
atgaagtgggtttcctttatctcactcctgttccttttctcttctgcttacagtgggagtttagacaaacggcacggcgaaggtaccttcacaagtgacgtgagcagctatctcgaaggacaggcagccaaggagttcatcgcctggctggtcaagggccggggc

SEQ ID NO: 123919 - DNA, 165 bp, Artificial Sequence
  derived and/or modified sequence
atgaagtgggtcagttttatctccctcctgtttttgttctcctccgcttactcgggttctctggacaaacgacacggggagggtactttcacctcggatgtgtcgagctacctggaagggcaggccgccaaggaattcatcgcgtggctcgtgaagggccgcgga

SEQ ID NO: 123920 - DNA, 165 bp, Artificial Sequence
  derived and/or modified sequence
atgaagtgggtcagcttcatctcccttctgtttctcttctcgagcgcgtactcgggctctctggacaaacgccacggggagggtacctttacttccgacgtgtcctcgtacctcgaaggacaggccgccaaggaattcatcgcatggctggtgaagggaagaggg

SEQ ID NO: 123921 - DNA, 165 bp, Artificial Sequence
  derived and/or modified sequence
atgaagtgggtctctttcatctccctcctatttttgttctcctcagcctactccgggtccttggataaacgccatggcgaagggacatttacatcggacgtctcatcttacctggagggtcaggcagcgaaagaatttatagcttggcttgtcaaagggagaggt

SEQ ID NO: 123922 - DNA, 165 bp, Artificial Sequence
  derived and/or modified sequence
atgaaatgggtgtcttttatatcattattgttcttgttttcttctgcttacagcggatctctggacaaacgccacggtgagggcacttttacgtccgacgtgagtagttaccttgagggtcaggctgccaaagagttcattgcatggctcgtcaagggccgcggt

SEQ ID NO: 123923 - DNA, 165 bp, Artificial Sequence
  derived and/or modified sequence
atgaaatgggtgtctttcatatctctccttttccttttctccagcgcctacagcggttctctggataaacggcacggcgaggggacattcacaagcgatgtctcgagttatctcgaaggacaggcggctaaagaatttattgcctggcttgtgaagggccgcggt

SEQ ID NO: 123924 - DNA, 165 bp, Artificial Sequence
  derived and/or modified sequence
atgaagtgggtgtcgtttatctccctgctcttcctcttctcatccgcctactcgggatcactcgacaagcgccacggcgaaggaactttcacctcagatgtgtcgtcgtacctggagggacaggccgcaaaagaattcatagcgtggctggtcaagggacgggga

SEQ ID NO: 123925 - DNA, 165 bp, Artificial Sequence
  derived and/or modified sequence
atgaaatgggtgtcgttcatcagccttctcttcctgttctcgagcgcctactcgggatcgttggacaagcggcacggtgagggaacctttacgagcgatgtgtcgtcctacctcgaaggccaggccgcgaaggaattcatcgcctggctggtcaaaggaagagga

SEQ ID NO: 123926 - DNA, 165 bp, Artificial Sequence
  derived and/or modified sequence
atgaagtgggtcagttttatctcactcctgtttttgttctcgtcagcatactccggctcgctcgacaaacgccacggcgaaggaactttcacgagcgatgtgtcctcgtaccttgaggggcaagcggcaaaagaattcatcgcttggctggtgaagggtagggga

SEQ ID NO: 123927 - DNA, 165 bp, Artificial Sequence
  derived and/or modified sequence
atgaaatgggtgagctttatcagcttgctcttcctgttcagctccgcttacagcgggagtctcgacaagaggcatggagaaggtacctttacttcggatgtgtcctcttacctggaaggccaagcggccaaggagtttattgcatggctggtcaagggaagaggt

SEQ ID NO: 123928 - DNA, 165 bp, Artificial Sequence
  derived and/or modified sequence
atgaaatgggtctctttcatatcattgctgttcctcttctcctccgcctactctggcagcctggacaagcgccatggcgagggcacctttacaagtgacgtgtctagctacctagaggggcaggccgccaaggaattcatagcttggctggtaaaaggacggggg

SEQ ID NO: 123929 - DNA, 165 bp, Artificial Sequence
  derived and/or modified sequence
atgaagtgggtgtcgttcatcagcttgctgttcctcttctcctcggcatactcggggtcactggacaagcgccacggagagggcactttcaccagcgatgtgtcctcatacctcgaaggtcaggcggccaaggaatttatcgcttggctggtcaaaggacgggga

SEQ ID NO: 123930 - DNA, 165 bp, Artificial Sequence
  derived and/or modified sequence
atgaagtgggtgtcatttatctcccttctgtttctgttttccagcgcctactccggtagtttggataaacgccacggcgaggggacctttacgtccgatgtgtcatcttatctggagggtcaggccgcgaaagagtttatcgcatggctggtcaagggaagaggc

SEQ ID NO: 123931 - DNA, 165 bp, Artificial Sequence
  derived and/or modified sequence
atgaaatgggtgagctttatcagtctcctatttctcttttcctctgcttactcaggatccttagacaagaggcatggggagggcacgtttacatccgacgtgagctcctatcttgagggacaggccgccaaggagttcatagcttggctcgtaaagggacgagga

SEQ ID NO: 123932 - DNA, 165 bp, Artificial Sequence
  derived and/or modified sequence
atgaaatgggtatctttcatctcgctcctcttcctcttctcgtccgcatattctggcagcctcgacaaacggcacggtgagggcacgttcacctctgatgtctcctcttatttagagggccaggctgcgaaggagtttattgcatggctggtcaagggacgcggt

SEQ ID NO: 123933 - DNA, 165 bp, Artificial Sequence
  derived and/or modified sequence
atgaagtgggtgagcttcatatcgcttctgtttctctttagcagcgcttactccggttctctggataagcggcatggagaggggaccttcacttcagacgtctcatcctatctggaaggccaagcagccaaggaattcatcgcatggctggttaagggaagagga

SEQ ID NO: 123934 - DNA, 165 bp, Artificial Sequence
  derived and/or modified sequence
atgaaatgggtaagcttcatctccttgttgtttctgttttccagtgcctactctggaagtctcgacaaacggcatggtgaaggcacttttacatccgacgttagcagctacctcgagggacaggcggctaaagagttcatcgcatggctggtcaagggcagaggc

SEQ ID NO: 123935 - DNA, 165 bp, Artificial Sequence
  derived and/or modified sequence
atgaaatgggtatcttttatctctctgctgtttcttttttcctccgcctacagcggaagcctggacaaaaggcatggcgagggaactttcacctctgatgtgtctagttatttggagggccaggccgcaaaggagttcattgcctggctggtgaaaggacggggc

SEQ ID NO: 123936 - DNA, 165 bp, Artificial Sequence
  derived and/or modified sequence
atgaagtgggtgagtttcatttcccttctttttttattttcatccgcttatagtggctccctcgacaagagacatggtgaaggaacctttacctctgatgtgagttcatatctggagggtcaggctgccaaggagtttattgcgtggctggttaaagggaggggc

SEQ ID NO: 123937 - DNA, 165 bp, Artificial Sequence
  derived and/or modified sequence
atgaaatgggtgagcttcatttcgcttttattcctgttctcctcagcctacagtggctccttggataaaaggcatggggagggcactttcacaagcgacgtgtcttcatatttggagggccaggcagcaaaagaatttatagcctggctggtgaaggggcgtggg

SEQ ID NO: 123938 - DNA, 165 bp, Artificial Sequence
  derived and/or modified sequence
atgaagtgggtgtcattcatttcactgctgttcctgttttcatccgcctattcggggtctttggacaagaggcatggggaagggacattcacgagtgacgtcagttcgtatctggagggccaagctgctaaagaattcattgcctggctggttaaaggccgcggt

SEQ ID NO: 123939 - DNA, 165 bp, Artificial Sequence
  derived and/or modified sequence
atgaagtgggttagtttcataagcttattgtttcttttttcatccgcttatagtggctccctggacaaaaggcatggagaaggaacattcacatcagacgtgagcagttatttggaaggccaagccgccaaagagttcattgcttggctggtgaagggtcgagga

SEQ ID NO: 123940 - DNA, 165 bp, Artificial Sequence
  derived and/or modified sequence
atgaagtgggtgtcctttatctcgttgctttttctgttcagcagcgcctactccggatcactagacaagcgacacggcgaaggaactttcacttccgacgtttcttcatacctagagggacaggctgcgaaggagttcatagcctggttggtgaagggaagaggc

SEQ ID NO: 123941 - DNA, 165 bp, Artificial Sequence
  derived and/or modified sequence
atgaagtgggtttccttcatatcgctgctgtttctgttctcgtctgcatattccggcagcctcgataagcggcacggagaaggaacttttaccagcgacgtctcttcatacctggaaggacaagccgcaaaagagtttatagcttggctggtgaaggggagggga

SEQ ID NO: 123942 - DNA, 165 bp, Artificial Sequence
  derived and/or modified sequence
atgaagtgggtcagcttcatctcgctgctgtttctcttctcgtccgcatactccggatcactggacaagcggcacggtgaaggaacttttactagcgatgtctccagctacttggagggtcaggccgccaaggagttcatcgcgtggctggtcaagggaagggga

SEQ ID NO: 123943 - DNA, 165 bp, Artificial Sequence
  derived and/or modified sequence
atgaaatgggtttcctttatatcattgttatttcttttctctagtgcttattctgggtcactcgataagagacatggggaagggacatttacaagtgatgtgtcttcttatttagaaggacaggccgccaaagaattcatcgcctggctggtgaaagggcgcgga

SEQ ID NO: 123944 - DNA, 165 bp, Artificial Sequence
  derived and/or modified sequence
atgaaatgggtatcgtttatatcgctattatttttattttcgtcggcgtattcgggttcgctagataaacgtcatggtgaaggtacgtttacgtcggatgtttcgtcgtatctagaaggtcaagcggcgaaagaatttatagcgtggctagtaaaaggtcgaggt

SEQ ID NO: 123945 - DNA, 165 bp, Artificial Sequence
  derived and/or modified sequence
atgaaatgggtgtccttcatctccctcctgttcctgttctcttcagcctactctgggtccctggacaaaaggcacggcgaagggacctttacctctgacgtgtccagctacttagaaggacaagcagccaaagaatttatcgcctggttagtgaaggggagggga

SEQ ID NO: 123946 - DNA, 228 bp, Artificial Sequence
  derived and/or modified sequence
atgaagtgggtgagcttcatcagcctgctgttcctgttcagcagcgcctacagcggcagcctggacaagcgccacggcgagggcaccttcaccagcgacgtgagcagctacctggagggccaggccgccaaggagttcatcgcctggctggtgaagggccgcggcagcccccagatgagccccgccaccctgaaggtgcgccagctgcgcagcctgagccccggcctg

SEQ ID NO: 123947 - DNA, 1740 bp, Artificial Sequence
  derived and/or modified sequence
atgaagtgggtgagcttcatcagcctgctgttcctgttcagcagcgcctacagcggcagcctggacaagcgccacggcgagggcaccttcaccagcgacgtgagcagctacctggaggagcaggccgccaaggagttcatcgcctggctggtgaagggccgcggccacggcgagggcaccttcaccagcgacgtgagcagctacctggaggagcaggccgccaaggagttcatcgcctggctggtgaagggccgcggccacggcgagggcaccttcaccagcgacgtgagcagctacctggaggagcaggccgccaaggagttcatcgcctggctggtgaagggccgcggccacggcgagggcaccttcaccagcgacgtgagcagctacctggaggagcaggccgccaaggagttcatcgcctggctggtgaagggccgcggccacggcgagggcaccttcaccagcgacgtgagcagctacctggaggagcaggccgccaaggagttcatcgcctggctggtgaagggccgcggccacggcgagggcaccttcaccagcgacgtgagcagctacctggaggagcaggccgccaaggagttcatcgcctggctggtgaagggccgcggccacggcgagggcaccttcaccagcgacgtgagcagctacctggaggagcaggccgccaaggagttcatcgcctggctggtgaagggccgcggccacggcgagggcaccttcaccagcgacgtgagcagctacctggaggagcaggccgccaaggagttcatcgcctggctggtgaagggccgcggccacggcgagggcaccttcaccagcgacgtgagcagctacctggaggagcaggccgccaaggagttcatcgcctggctggtgaagggccgcggccacggcgagggcaccttcaccagcgacgtgagcagctacctggaggagcaggccgccaaggagttcatcgcctggctggtgaagggccgcggcggcggcggcggcggcggcagcggcggcggcggcagcggcggcggcggcagcgccgagagcaagtacggccccccctgccccccctgccccgcccccgaggccgccggcggccccagcgtgttcctgttcccccccaagcccaaggacaccctgatgatcagccgcacccccgaggtgacctgcgtggtggtggacgtgagccaggaggaccccgaggtgcagttcaactggtacgtggacggcgtggaggtgcacaacgccaagaccaagccccgcgaggagcagttcaacagcacctaccgcgtggtgagcgtgctgaccgtgctgcaccaggactggctgaacggcaaggagtacaagtgcaaggtgagcaacaagggcctgcccagcagcatcgagaagaccatcagcaaggccaagggccagccccgcgagccccaggtgtacaccctgccccccagccaggaggagatgaccaagaaccaggtgagcctgacctgcctggtgaagggcttctaccccagcgacatcgccgtggagtgggagagcaacggccagcccgagaacaactacaagaccaccccccccgtgctggacagcgacggcagcttcttcctgtacagccgcctgaccgtggacaagagccgctggcaggagggcaacgtgttcagctgcagcgtgatgcacgaggccctgcacaaccactacacccagaagagcctgagcctgagcctgggc

SEQ ID NO: 123948 - DNA, 165 bp, Artificial Sequence
  derived and/or modified sequence
atgcccagcagcgtgagctggggcatcctgctgctggccggcctgtgctgcctggtgcccgtgagcctggcccacgccgagggcaccttcaccagcgacgtgagcagctacctggagggccaggccgccaaggagttcatcgcctggctggtgcgcggccgcggc

SEQ ID NO: 123949 - DNA, 311 bp, Artificial Sequence
  derived and/or modified sequence
gggaaataagagagaaaagaagagtaagaagaaatataagagccaccatgccgtcatcagtgtcgtgggggattcttctgttggctggactttgttgcctcgtccccgtaagcctggcgcacgccgagggtacgtttacatccgacgtgtcgtcgtacctcgaaggccaggcggcaaaggagttcatcgcctggttggtcaggggacgggggtgataagctgccttctgcggggcttgccttctggccatgcccttcttctctcccttgcacctgtacctcttggtctttgaataaagcctgagtaggaag

SEQ ID NO: 123950 - DNA, 543 bp, Artificial Sequence
  derived and/or modified sequence
atgaagagcatctacttcgtggccggcctgttcgtgatgctggtgcagggcagctggcagagaagcctgcaggacaccgaggagaagagcagaagcttcagcgccagccaggccgaccccctgagcgaccccgaccagatgaacgaggacaagagacacagccagggcaccttcaccagcgactacagcaagtacctggacagcagaagagcccaggacttcgtgcagtggctgatgaacaccaagagaaacagaaacaacatcgccaagagacacgacgagttcgagagacacgccgagggcaccttcaccagcgacgtgagcagctacctggagggccaggccgccaaggagttcatcgcctggctggtgaagggcagaggcagaagagacttccccgaggaggtggccatcgtggaggagctgggcagaagacacgccgacggcagcttcagcgacgagatgaacaccatcctggacaacctggccgccagagacttcatcaactggctgatccagaccaagatcaccgacagaaagtag

SEQ ID NO: 123951 - DNA, 543 bp, Artificial Sequence
  derived and/or modified sequence
atgaagagtatctatttcgtggccggcttgttcgtaatgctggttcagggatcatggcagcggtctctgcaagacacagaggaaaaaagtaggagtttctcagcttcccaggcagatccattgtctgacccggatcaaatgaacgaggataagcgccattcacaggggacatttacttccgactattcaaagtacctggatagccgccgggcacaggacttcgtccaatggctgatgaacaccaagcgcaacagaaataatatcgcaaaaagacacgatgaattcgagcgccacgctgaaggtacatttacaagcgatgtcagcagctatctggaaggccaggctgctaaagagtttatagcctggttagtgaagggccgtggaaggcgcgatttccccgaggaggtggcaatcgttgaagaacttggcagacggcatgcggatggaagtttttctgatgagatgaacacaatcctggataacctagccgcacgggacttcattaattggttgatccagacgaagatcactgataggaaatag

SEQ ID NO: 123952 - DNA, 543 bp, Artificial Sequence
  derived and/or modified sequence
atgaagtcaatttatttcgttgctggcctgttcgtgatgctggtccagggctcctggcaaaggagcttgcaggatacggaggagaagtctcgctctttttcagcttcccaggccgaccccctctctgaccctgatcaaatgaacgaagacaagcgtcatagccagggcacattcacgtcagattattctaagtacctggacagtcgtagagcccaggactttgtgcaatggctgatgaatacaaagcgaaacagaaataacatagctaagcgccacgatgagtttgaacgacacgctgaaggaacatttacgtctgacgtttccagttatttggagggacaggccgcaaaagagtttattgcctggcttgtgaaagggcgtgggcgacgcgatttcccagaggaagtcgctatcgtggaggagctggggaggcgccacgcagatggctctttttctgacgagatgaacacaatcctcgataatctggccgctagagacttcattaattggctcattcagacaaagataaccgataggaaatag

SEQ ID NO: 123953 - DNA, 543 bp, Artificial Sequence
  derived and/or modified sequence
atgaagagcatctactttgtggccggcctgtttgtgatgctggtgcagggctcctggcagaggagcctgcaggacacagaggagaagagccgctccttcagcgccagccaggccgaccccctgagtgaccctgaccagatgaatgaagacaagaggcacagccagggcaccttcaccagtgactacagcaagtacctggacagcagaagagcccaggactttgtgcagtggctgatgaacaccaagaggaacagaaacaacatcgccaagagacatgatgaatttgaaagacatgctgagggcaccttcaccagtgatgtgtcctcctacctggagggccaggccgccaaggagttcatcgcctggctggtgaagggccggggcagaagagacttccctgaggaggtggccatcgtggaggagctgggcagaagacatgctgatggcagcttcagtgatgagatgaacaccatcctggacaacctggccgcccgggacttcatcaactggctgatccagaccaagatcacagacaggaagtag

SEQ ID NO: 123954 - DNA, 543 bp, Artificial Sequence
  derived and/or modified sequence
atgaagagcatctacttcgtggccggcctgttcgtgatgctggtgcagggtagctggcagcgcagtctgcaagacactgaagaaaagagtcggagtttctcagcctctcaggccgaccccctatctgatccagaccagatgaacgaggataagcgccacagccagggcacattcacttctgattactccaagtacctagactctcgaagggcccaagattttgtccaatggctcatgaacacaaagagaaatcggaataatatagcaaaacgacacgacgaatttgagcgacacgcagaggggacgtttactagcgacgtgagctcctacctggagggccaggccgcaaaagagttcatcgcctggctggtgaagggaagaggtcgcagggatttccccgaggaggtcgcaatagtcgaggaacttggccgacgtcatgccgatgggtcgttctctgatgagatgaacacaatcctggataatcttgcggctcgggattttataaactggctgatccaaacaaaaatcaccgatcgaaagtag

SEQ ID NO: 123955 - DNA, 543 bp, Artificial Sequence
  derived and/or modified sequence
atgaagagcatctacttcgtggccggcctgttcgtgatgctggtgcaagggtcatggcaaaggtccctgcaggataccgaggagaagtccagaagcttcagcgctagtcaggcggatcccctcagcgatccagatcagatgaacgaagacaagcgacattctcagggaacctttacatcagactactccaagtatttggactcaaggagggctcaagactttgttcagtggctgatgaacaccaagcgcaaccgaaataatatcgccaaacggcacgatgagttcgagagacacgctgaaggcacgttcacctcagatgtgagttcatatctcgaaggtcaggccgcaaaggagtttattgcttggctcgtgaagggacgcggccgccgggactttccagaggaggtagcaatcgtggaggaactcggccgtcgccatgccgacggctccttttctgatgaaatgaacacaatactggacaacttagccgcccgggacttcattaattggctcattcagacgaagattactgatcggaagtag

SEQ ID NO: 123956 - DNA, 799 bp, Artificial Sequence
  derived and/or modified sequence
gcatagaatgcagatgagcaaagtgagtgggagagggaagtcatttgtaacaaaaactcattatttacagatgagaaatttatattgtcagcgtaatatctgtgaggctaaacagagctggagagtatataaaagcagtgcgccttggtgcagaagtacagagcttaggacacagagcacatcaaaagttcccaaagagggcttgctctctcttcacctgctctgttctacagcacactaccagaagacagcagaaatgaaaagcatttactttgtggctggattatttgtaatgctggtacaaggcagctggcaacgttcccttcaagacacagaggagaaatccagatcattctcagcttcccaggcagacccactcagtgatcctgatcagatgaacgaggacaagcgccattcacagggcacattcaccagtgactacagcaagtatctggactccaggcgtgcccaagattttgtgcagtggttgatgaataccaagaggaacaggaataacattgccaaacgtcacgatgaatttgagagacatgctgaagggacctttaccagtgatgtaagttcttatttggaaggccaagctgccaaggaattcattgcttggctggtgaaaggccgaggaaggcgagatttcccagaagaggtcgccattgttgaagaacttggccgcagacatgctgatggttctttctctgatgagatgaacaccattcttgataatcttgccgccagggactttataaactggttgattcagaccaaaatcactgacaggaaataa

SEQ ID NO: 123957 - DNA, 1280 bp, Artificial Sequence
  derived and/or modified sequence
catagaatgcagatgagcaaagtgagtgggagagggaagtcatttgtaacaaaaactcattatttacagatgagaaatttatattgtcagcgtaatatctgtgaggctaaacagagctggagagtatataaaagcagtgcgccttggtgcagaagtacagagcttaggacacagagcacatcaaaagttcccaaagagggcttgctctctcttcacctgctctgttctacagcacactaccagaagacagcagaaatgaaaagcatttactttgtggctggattatttgtaatgctggtacaaggcagctggcaacgttcccttcaagacacagaggagaaatccagatcattctcagcttcccaggcagacccactcagtgatcctgatcagatgaacgaggacaagcgccattcacagggcacattcaccagtgactacagcaagtatctggactccaggcgtgcccaagattttgtgcagtggttgatgaataccaagaggaacaggaataacattgccaaacgtcacgatgaatttgagagacatgctgaagggacctttaccagtgatgtaagttcttatttggaaggccaagctgccaaggaattcattgcttggctggtgaaaggccgaggaaggcgagatttcccagaagaggtcgccattgttgaagaacttggccgcagacatgctgatggttctttctctgatgagatgaacaccattcttgataatcttgccgccagggactttataaactggttgattcagaccaaaatcactgacaggaaataactatatcactattcaagatcatcttcacaacatcacctgctagccacgtgggatgtttgaaatgttaagtcctgtaaatttaagaggtgtattctgaggccacattgctttgcatgccaataaataaattttcttttagtgttgtgtagccaaaaattacaaatggaataaagttttatcaaaatattgctaaaatatcagctttaaaatatgaaagtgctagattctgttattttcttcttattttggatgaagtaccccaacctgtttacatttagcgataaaattatttttctatgatataatttgtaaatgtaaattattccgatctgacatatctgcattataataataggagaatagaagaactggtagccacagtggtgaaattggaaagagaactttcttcctgaaacctttgtcttaaaaatactcagctttcaatgtatcaaagatacaattaaataaaattttcaagcttc

SEQ ID NO: 123958 - DNA, 543 bp, Artificial Sequence
  derived and/or modified sequence
atgaaatcaatttacttcgtggccggtctttttgtgatgttggttcagggaagttggcagagaagcctccaagacaccgaggagaagagcaggtcctttagtgcatctcaggctgatccactgtccgaccctgaccaaatgaacgaagacaagaggcactctcagggtaccttcactagtgattactctaagtacttagactctcgccgagcgcaggatttcgtgcagtggttaatgaacactaagagaaatcgaaacaatatcgctaaacggcatgacgagttcgagcgccacgccgaagggacgtttacttcagacgtttccagctacttggagggacaggccgctaaggagttcatcgcgtggctggtcaaagggcgaggtagaagggacttccccgaagaggtggcgattgttgaagagcttggcaggcgtcatgcagatggctccttcagcgatgaaatgaacaccatcctggataatttggctgcacgagactttatcaactggctgatccagacaaaaatcaccgatcgaaagtag

SEQ ID NO: 123959 - DNA, 543 bp, Artificial Sequence
  derived and/or modified sequence
atgaagtcgatttacttcgtggccggtctcttcgtgatgcttgtccagggttcctggcagagatcgctgcaggacaccgaagagaaatctcggtctttttctgcttctcaagccgaccccctgtccgaccctgatcaaatgaacgaagataagaggcactctcagggcacttttactagtgattactctaaatacctggatagcaggagggcccaggattttgtccaatggctgatgaacaccaaaaggaacagaaacaatatcgcaaaaagacatgatgaattcgaaaggcacgcagagggcacattcacctccgacgtaagctcttacctggagggccaagccgcaaaggaattcatcgcctggcttgtgaagggcaggggaagacgcgactttccagaggaggtggcaattgtagaggaactgggtaggaggcacgctgatggatctttctccgacgaaatgaacacaatccttgacaatctagcagcgagggattttattaactggctgattcaaacaaaaattactgatcggaagtag

SEQ ID NO: 123960 - DNA, 543 bp, Artificial Sequence
  derived and/or modified sequence
atgaaaagcatctacttcgttgccggtctgtttgtgatgctggtgcagggatcatggcagcgttcactacaggacaccgaggaaaagagccggagcttttcggcctcccaagcagaccctctgtccgaccccgaccaaatgaatgaagataagagacatagtcagggcacctttacatctgattatagcaagtacttagattctaggagagctcaagactttgtgcaatggctgatgaacacaaagaggaataggaataatattgccaaaagacatgatgagttcgaacgccatgcggagggcacctttacctctgatgtgagtagttatcttgaagggcaagcagcgaaagaattcatagcttggctagttaagggacgcggaagaagagacttccccgaagaggttgcaatcgttgaagaattaggcagacgccacgcggatgggtcttttagtgatgagatgaatacaatcctggacaatttggcagcgagagattttatcaactggcttatacagacaaagatcactgacaggaagtag

SEQ ID NO: 123961 - DNA, 543 bp, Artificial Sequence
  derived and/or modified sequence
atgaaatccatatattttgttgccggtctctttgtaatgctcgtacaaggttcatggcaacgctcacttcaggacacagaagagaaatctaggtcatttagcgcttcccaggccgaccctttatcggacccggatcaaatgaacgaagataaaagacactcgcaagggaccttcacatcagactactccaagtatctcgattccaggcgggctcaagatttcgtgcaatggttgatgaacacgaagcgcaaccgcaataacatcgcaaagaggcatgatgagtttgaaagacatgctgaagggaccttcacaagcgacgtcagctcctacctagaggggcaagccgcgaaagaattcattgcctggctggtgaaaggaagggggcggagagattttcccgaagaggtcgccatcgttgaagaattaggtcggagacacgcggacggatccttctcggacgagatgaacacaatccttgataatttggccgcccgcgattttattaattggctgatacaaacgaaaatcaccgatcgcaagtag

SEQ ID NO: 123962 - DNA, 543 bp, Artificial Sequence
  derived and/or modified sequence
atgaagagtatctacttcgttgctggactcttcgttatgcttgttcaaggatcttggcagaggtcattgcaggacacagaagaaaagagtcgatctttctccgcgtctcaggctgaccctctctccgatcctgaccagatgaatgaagataaaagacatagccagggaacattcacctcagactactctaaatatctggactcaagacgcgcccaggatttcgtgcaatggctgatgaatactaagaggaatcgaaataacattgcaaagcgacatgacgagttcgaacgccacgcagagggcacctttacctctgatgtgagtagttatcttgaagggcaagcagcgaaagaattcatagcttggctagttaagggacgcggaagaagagacttccccgaagaggttgcaatcgttgaagaattaggcagacgccacgcggatgggtcttttagtgatgagatgaatacaatcctggacaatttggcagcgagagattttatcaactggcttatacagacaaagatcactgacaggaagtag

SEQ ID NO: 123963 - DNA, 543 bp, Artificial Sequence
  derived and/or modified sequence
atgaaatccatatattttgttgccggtctctttgtaatgctcgtacaaggttcatggcaacgctcacttcaggacacagaagagaaatctaggtcatttagcgcttcccaggccgaccctttatcggacccggatcaaatgaacgaagataaaagacactcgcaagggaccttcacatcagactactccaagtatctcgattccaggcgggctcaagatttcgtgcaatggttgatgaacacgaagcgcaaccgcaataacatcgcaaagaggcatgatgagtttgaaagacatgctgaaggaactttcacaagcgatgtaagtagctacttggagggtcaagctgctaaggagtttatagcatggttagtgaagggccgcggacggagagactttcccgaagaggttgctatcgtggaagagctgggtaggaggcatgctgacggatctttttcagatgaaatgaacacaatccttgataaccttgccgccagagattttattaattggcttattcagaccaagattaccgaccggaagtag

SEQ ID NO: 123964 - DNA, 1740 bp, Artificial Sequence
  derived and/or modified sequence
atgaaatgggtgagcttcatctcccttctgtttctcttcagcagcgcttattctggctctctggacaaaaggcacggcgagggaacctttacatctgacgttagctcctatctggaggaacaggctgctaaagagttcatcgcctggcttgttaaaggcagaggtcatggggaagggacatttacaagcgacgtatccagctacctggaagagcaagccgcaaaagagttcatcgcttggctggtgaaagggcggggccacggcgaaggcacattcacgagcgacgtgagcagctacctcgaagagcaggctgctaaggaattcatcgcctggctcgtgaaaggtagggggcatggagaaggaacattcacctccgatgttagttcgtatctcgaggaacaagcagccaaagaattcatcgcttggctggtcaagggccggggccatggggagggcacattcacctctgatgtatcttcatacctcgaagaacaggccgcaaaggagtttatcgcttggctcgtgaagggaaggggccacggagaaggaacgtttaccagcgacgtgtcatcttatctcgaagagcaggctgcgaaagagttcattgcttggctggtcaagggaaggggacatggagaaggcactttcacctccgatgtgtcctcttatctcgaggaacaggcagcaaaggagttcatcgcttggctggtcaagggaagaggccacggggaaggtacatttaccagcgacgtgtcctcttatctggaagaacaggctgcgaaagaatttattgcatggttagttaagggaaggggccatggagaaggcacttttacctctgacgtctcttcatacctcgaggagcaagcagccaaagagttcattgcttggctcgtgaagggtaggggacatggtgaagggactttcacatccgatgtcagcagctatctggaggaacaggccgcaaaggaatttattgcttggctggttaagggccgtgggggtggcggtggaggtggctctggcgggggtggcagcggaggcggaggaagtgcagagtccaaatatggccccccatgccccccatgtccagctcctgaggcggcaggtggtccatccgtctttttgtttccacccaaacccaaggataccctgatgatctccaggacacctgaggtcacttgcgtggtggtcgacgttagccaggaggatccagaagttcagttcaactggtacgtggatggagtggaggtccataacgctaagaccaaaccccgcgaggaacagttcaactcaacatatagagtggtgagcgtcttgacagttctgcatcaggactggctcaacggcaaggaatacaaatgcaaagtaagcaacaaagggcttcccagctctatagaaaagactatctctaaagcaaaagggcaacctagggagccacaagtctatacgttaccaccttcacaggaggaaatgacaaaaaaccaggtgtcactaacatgccttgtcaaggggttttaccccagtgacattgcggtggagtgggagtctaacgggcaacctgaaaataactacaaaacaacccctccggtgctggacagcgatggcagcttcttcctttactctcggctcactgtggacaaaagtaggtggcaagaaggcaatgtctttagctgctcagtgatgcacgaggctctccataatcactacacccagaaaagcttgtccctgtcgctcgga

SEQ ID NO: 123965 - DNA, 1740 bp, Artificial Sequence
  derived and/or modified sequence
atgaagtgggtgtcattcattagcctgctttttttgttctcaagtgcctacagtgggtctctcgacaaacgtcacggcgaaggaaccttcacctctgacgtgtcttcatatctcgaagaacaagcagccaaagagttcattgcttggttggtcaaggggcgtgggcacggagaaggcacatttacatccgatgtttcatcctacctggaggagcaagcggcaaaagagttcattgcctggttggtcaaaggcaggggccacggggagggaacattcacatccgacgtgtcaagttatttggaggaacaggcagctaaggaattcatcgcttggctagtgaaaggcagaggccatggcgagggcacatttacatccgacgtgagtagctacctggaagaacaagccgcgaaggaattcatcgcctggctggtcaagggcagaggacacggggaaggaacattcacgtccgatgttagttcctacctcgaagagcaggctgccaaagaattcattgcttggttggttaaaggacggggccacggagagggtacattcaccagcgatgtatctagttacctggaagagcaggccgccaaggagtttatagcttggctcgttaaaggcagggggcacggcgagggcactttcacaagcgacgtctcatcttatctagaggaacaagctgctaaggagttcattgcctggctcgtaaaaggacggggacatggcgaaggaacattcactagcgatgtgtcctcttaccttgaagaacaggcagctaaagagtttattgcttggttagttaagggtcggggccacggggaggggacgttcacatcggatgtgtcttcttatttggaagaacaggctgctaaggagttcatcgcgtggctcgttaagggccggggccacggcgagggtaccttcacctccgacgtctcgtcatacctcgaggagcaggcggctaaggaattcattgcctggcttgtcaagggcaggggaggaggaggcggagggggatcgggtggcgggggaagcgggggcggaggcagtgcggaatccaaatatgggccgccctgcccaccatgccctgcgcccgaagcggccggcggcccttctgtcttcctcttcccccccaagccaaaagatacactgatgatcagtaggacgcccgaggtgacgtgtgtggtggtcgacgtgagccaggaggacccagaagtgcagtttaattggtacgtcgatggtgttgaggtccacaacgccaagaccaagccaagggaggagcagtttaacagcacttacagggtcgtgagtgttttaactgtgttgcatcaggactggctcaacggcaaggaatacaagtgcaaagtttccaataaaggcctcccatcaagcatcgaaaagacaatcagcaaggctaaggggcaacctagggagccacaggtatatacactgcctcccagccaggaggagatgacaaagaatcaggtgtccctcacctgcctggtcaagggattttaccccagcgatatcgcggtagagtgggagtctaacggacagccagagaacaactataaaacaacaccccctgtgctggatagcgatggctctttttttctgtattccaggctgacagttgataagtcccgctggcaggaaggaaatgtgttctcctgttccgttatgcacgaagcactccacaatcactatacgcagaaatcactgtcgctgtccctgggt

SEQ ID NO: 123966 - DNA, 1740 bp, Artificial Sequence
  derived and/or modified sequence
atgaagtgggtgagcttcatctcactgctgttcctgttctcctctgcctactccggttcactggataagcgacatggtgagggaactttcacttccgacgtcagtagttacctcgaagaacaggccgcaaaggagttcattgcctggctggtgaagggacggggacatggcgaggggaccttcacctctgatgtctcctcctatctggaggagcaggcggcaaaagaattcatagcatggctcgtgaagggtcgcgggcacggggaaggtactttcaccagcgatgtgtcgtcgtaccttgaggaacaggcagcgaaggagttcatcgcatggcttgtcaagggcagaggtcacggagagggaacgttcaccagcgacgtgagctcgtacctggaggaacaggcggccaaggagtttatagcttggctggtaaagggacgcggccacggggaaggcacttttacctctgacgtctcaagctatcttgaggagcaggccgccaaagaattcattgcgtggctcgtaaaggggagaggtcacggggaaggaaccttcacctccgatgtgtcgagctatctcgaagaacaagccgcgaaggaattcatcgcgtggttggtgaaaggaaggggacacggagaaggaacgtttacctccgacgtctcctcctacctggaagaacaggcagctaaagagttcattgcatggctcgtcaagggccgtggccatggagaaggaactttcacgtcggatgtgagctcctaccttgaagagcaggctgctaaggagtttatcgcttggttggtcaaggggcgcggtcacggcgaaggaacttttacgtccgatgtgagctcatacctggaggagcaagcggctaaagagtttatcgcctggctcgtaaaaggaaggggtcatggagaggggactttcacttcggacgtcagttcgtacctggaagagcaagccgcaaaagagttcatcgcctggttggttaagggccggggaggaggtggtggaggcggatcgggcggtggcggcagcggaggtggagggtcagccgagtcgaagtacgggccgccttgcccgccatgccctgctccggaagcggcgggcggtccgtcagtgttcctttttccgcccaagccgaaagatactctcatgatctcgcggacccctgaagtgacctgcgtcgttgtggatgtttcacaggaggacccggaggtgcaattcaattggtacgtggacggcgtggaagttcataacgccaagaccaagccaagagaagaacagtttaacagcacctaccgcgtggttagcgtgctgactgtcctgcaccaagactggctgaacggcaaggaatacaagtgcaaagtgtccaacaagggattgccatcctcaatcgagaaaaccatctccaaggccaaggggcagccgcgcgaaccccaggtgtacactctgcccccaagccaggaggaaatgaccaaaaatcaagtgtcgcttacttgtctggtcaagggattctacccttcagacatcgcggtcgagtgggaatcgaatggacagccggagaacaactacaaaactactccaccggtgctcgactctgatggatctttctttctgtactcaagactgaccgtggacaaatcgcggtggcaagaagggaatgtgttctcctgttcggtgatgcacgaggctctccacaaccattacacccaaaagtcactgagcctgtcgctcgga

SEQ ID NO: 123967 - DNA, 1740 bp, Artificial Sequence
  derived and/or modified sequence
atgaagtgggtgtccttcatctctctgctgttcctcttctcgtcagcttactcaggttcgctcgataaacggcacggcgaaggcaccttcactagcgacgtttcaagttacctggaggaacaggcggccaaggaattcatcgcttggctggttaagggtcgggggcacggtgaaggaactttcacttcagatgtgagtagctacttggaagagcaagccgccaaggagtttattgcttggcttgttaagggacggggccatggggagggaacgtttacgtcggacgtgagcagctacctcgaggagcaagcggcaaaggagtttatcgcctggttggtcaagggtcgagggcacggagaaggaacgttcacttccgatgtcagttcgtacctcgaagaacaagccgcgaaggagttcatcgcatggctcgtgaaggggcggggtcacggcgagggaaccttcaccagtgatgtgagctcctatttggaggagcaggccgctaaagagtttatcgcatggttggtaaaaggccgcggccatggagagggcacgtttacgtccgacgtcagttcctacctcgaagagcaggcagcgaaagagttcatagcgtggttggtgaaaggacgcggccatggcgaaggaaccttcacttccgacgtgtcatcgtaccttgaagagcaggcggccaaagagttcatcgcgtggctggttaaaggcaggggacacggagaaggtacctttacgtcggatgtctcgtcgtacctggaagaacaggctgccaaagaattcattgcgtggctcgtgaaagggcgcggacatggagaggggaccttcacctccgatgtgtcatcatatctcgaggaacaagctgcaaaagagtttattgcctggctggtcaagggcagaggacacggtgagggaacctttacctccgacgtctcgagctaccttgaggaacaagcggcaaaagaattcatagcctggcttgtgaaaggaaggggtggcggcggagggggagggtcgggaggaggcggttcgggagggggcggaagcgcggaatcgaagtacgggccaccatgccccccgtgcccggccccggaagctgccggcggaccttcggttttcctgttcccaccgaagcctaaggacactctgatgatctcccgcacccctgaagtcacctgcgtggtggtggacgtctctcaagaggacccagaagtgcagttcaactggtatgtggacggagtcgaagtccacaacgcaaagactaagcccagagaagaacagttcaattcgacctaccgggtggtgagcgtcctgaccgtgctgcaccaggattggctgaacggcaaggaatacaagtgcaaggtgtcgaataaaggactgccgtctagcatcgaaaagaccatctcgaaggcaaaggggcaacccagagagcctcaggtctacaccctgccaccgtcacaggaagaaatgactaagaatcaggtgagcctgacttgtcttgtgaagggcttctacccgtctgacatcgccgtcgaatgggaatcgaacggtcagccggagaacaattacaagaccactccgccagtgcttgattccgacggatcctttttcctgtactccagactcactgtggacaagtcgcgctggcaagaaggaaacgtgttctcatgtagcgtgatgcatgaagcactgcacaaccattacactcagaagtcactgagcctgtccctggga

SEQ ID NO: 123968 - DNA, 1740 bp, Artificial Sequence
  derived and/or modified sequence
atgaagtgggtgtcatttatcagccttctctttttgttttcgtccgcatactccggctccttggacaagcgacacggcgaaggcaccttcacctccgacgtgtcgtcgtacctcgaagagcaggcagccaaggaattcatagcgtggctcgtgaagggtcgaggacatggagagggaaccttcacctcggacgtttcatcctacctcgaagaacaagctgcaaaagaattcatcgcctggctcgttaaaggtagaggtcacggtgagggaactttcacttcagatgtgagttcttacctcgaggagcaggccgcaaaggaattcattgcatggcttgttaagggaagaggccatggtgaaggtacctttacgtcggacgtttcgtcataccttgaagagcaagctgctaaagagtttattgcttggcttgtaaagggtcgggggcatggggaaggtacttttacttcagacgtgtcgagctaccttgaggagcaagcagcaaaggagttcatagcatggcttgtgaagggcaggggtcatggtgaggggacctttacctccgatgtgagttcctatctggaagagcaagcagcgaaagagtttatagcatggttggtgaagggccgcggacacggtgaagggacttttacttcggacgtttccagctacctggaggagcaggcagcgaaggagtttattgcctggctcgtcaaaggaagaggacatggggaaggaacctttactagcgatgtgtcctcgtacttggaagaacaggcagcgaaagaattcattgcgtggctggttaaggggcgcggacatggagaaggaacgttcacctcagatgtaagctcttacctggaggaacaagccgccaaggagtttatcgcttggttggtcaagggacggggacacggggaaggcacgtttacgagcgacgtctcgtcttacctggaagagcaggccgccaaagagttcattgcctggttggtcaaaggacgtggagggggcgggggtggaggatcaggagggggcggaagcggtggaggaggctccgccgaatcgaagtacggcccgccttgcccaccttgtccagcacctgaagctgcaggaggaccctccgtctttctgtttccccctaaaccaaaggatactcttatgatttcgcgtactcctgaggtcacctgcgttgttgtggatgtgagtcaagaggatcctgaagtccaattcaactggtacgtcgatggtgtggaagtccataacgcaaaaactaagcctagagaagaacagtttaacagcacctaccgcgtggtgtcagtgctgactgtgcttcatcaggattggctcaacgggaaagaatacaagtgtaaggtcagcaataagggtctgccaagctccattgaaaaaaccatctccaaggcaaagggtcagccaagagaacctcaagtgtatacgctgcctccatcccaagaagagatgaccaagaatcaggtgtcactcacttgtctcgtcaaaggtttttacccatccgacatcgcagtggaatgggaatcaaatgggcaacccgaaaacaactacaagactaccccgcccgtgcttgattcggatggtagtttctttctttactcaaggctgactgtcgataagtctcggtggcaagaaggaaatgtgtttagctgttcagtgatgcacgaggcgctgcacaaccattacacccagaagtcgctttcgctgtcgctgggg

SEQ ID NO: 123969 - DNA, 1740 bp, Artificial Sequence
  derived and/or modified sequence
atgaagtgggtcagctttatctctttgctgttcctcttctcatcagcctactcggggagcctggacaagcggcacggagaggggacgttcactagcgacgtgtcgtcgtacctcgaagaacaggcggcgaaggaatttatcgcatggctggtgaaggggcgcggacacggcgaaggcaccttcaccagcgatgtgagctcgtatttggaggaacaggccgctaaggagttcatcgcctggcttgtaaagggacgcggccatggtgaggggacctttacctcagacgtctcctcctacctggaagaacaggccgcaaaagaattcattgcgtggctggtcaaagggcgcggccacggcgagggaacttttacctccgacgtctcgtcttacctggaagagcaagcagcaaaggaattcatcgcttggctcgtgaagggacggggacatggggaaggtactttcacttctgatgtgtcgtcatacctcgaggaacaagcagccaaagaatttatcgcctggctcgttaagggccggggacacggagaaggcactttcacctcggacgtgtccagctaccttgaagagcaagccgcgaaagaattcatcgcgtggctggtaaagggtcgaggccatggtgaaggaaccttcacttcagacgtgtcgtcctacctggaggaacaagccgctaaagaattcatagcctggctggtcaagggtaggggtcatggagagggaaccttcacctccgatgtgagtagctacttggaggagcaagctgccaaggagttcattgcttggttggtcaaggggcgaggccacggggagggaactttcacgagtgacgtgagctcatatctcgaagagcaggcggccaaggagtttatcgcttggcttgtgaagggaagaggtcacggcgaagggacttttacctcggatgtgtctagctacctcgaggagcaggccgcaaaggagtttattgcgtggttggtaaagggcagaggtgggggagggggaggaggctccggcggcggaggcagcggtggaggaggcagtgcagaatccaaatacggaccgccgtgcccaccctgtcctgcaccagaggccgcgggagggccttcggtctttctgttccctccaaagcccaaagacacgctgatgatctcgcgcaccccggaggtgacctgcgtggtcgtggacgtgtcccaggaggatccggaagtgcagtttaactggtacgtggacggagtggaagtgcacaatgcgaaaactaagcctcgcgaggaacagttcaattcaacctaccgggtcgtgtccgtcctgactgtgctgcatcaagattggctcaacggtaaggagtacaagtgcaaagtgtccaataaaggtctgccgtcgtcgatcgagaagactatctccaaagctaagggacagccgagggagccacaggtttacactctgcccccatcgcaggaggagatgaccaaaaaccaggtcagtcttacttgtctggtgaagggattctacccgtccgacatcgcagtggaatgggaatccaacggacagccagaaaacaattacaagactacgccgccggtgctggattctgatggcagcttcttcctctactcgagactgaccgtcgacaaatcccgctggcaagaaggaaacgtgttctcctgctcagtcatgcatgaagccctgcacaaccactacacccaaaagtccctctccctgagcctcggc

SEQ ID NO: 123970 - DNA, 1740 bp, Artificial Sequence
  derived and/or modified sequence
atgaagtgggtcagtttcatcagcctgctctttctgttcagcagcgcatactcaggatctcttgataaaaggcacggtgaaggaactttcacttctgacgtgtcctcctacctggaggaacaggcagccaaggaatttattgcttggctagtaaaggggcgagggcacggcgagggtacctttacatctgatgtgagctcctacttagaggagcaagctgcaaaagaattcattgcatggttagtcaaaggacgcggccatggtgagggcacctttactagtgatgtcagtagctatctagaagaacaggcagcaaaggagtttatcgcctggctggttaagggacggggccacggagaaggtacctttacatcagatgtgtcttcatatctggaagagcaggccgccaaggagttcatcgcttggctcgtaaaaggtcgcggccacggcgaagggacctttactagtgatgtgagcagctatctcgaggagcaggccgccaaggaatttattgcttggctggtgaaagggcgcgggcacggcgagggcacattcacatctgacgtgagtagctacctcgaagagcaggccgcgaaggagttcatcgcatggctggttaagggtcgaggacacggcgagggcacatttacatcagatgtttcttcttacctggaggagcaggccgccaaggagtttatcgcgtggctggttaaagggaggggacacggcgaggggacgttcacatcagatgtcagctcttacctcgaggagcaagccgcaaaggagttcattgcctggctagtcaaaggacgggggcatggagaagggacattcacttctgacgtgagctcgtacctggaagagcaggccgctaaagagtttattgcttggctggttaaaggccgcgggcacggggagggaactttcactagtgatgtgtcatcttatttggaagaacaggcggccaaagagttcatcgcgtggctggtgaagggacgtggtggtggaggcggtggaggtagcggcggaggcgggtccgggggcggaggttcagcggagagcaaatatggtcccccttgccctccatgtcccgcacccgaagccgccggcggcccatctgtattcttgtttccccctaagcccaaggacacgcttatgatatcgagaacacctgaagtgacttgcgttgtggttgacgtgtcccaggaggatcccgaggtacagtttaattggtatgttgatggtgtagaagtgcacaacgccaaaaccaaacccagggaagaacagtttaatagcacatatcgcgtggtgtcagtgctcacagtcttacatcaggactggctcaatggaaaggaatacaagtgtaaagtaagcaacaagggacttccaagttctattgagaagacaatttccaaagccaagggccagccaagagagccgcaggtatatactctgcctccgagtcaggaggaaatgaccaaaaaccaggtgtccttgacttgtcttgtgaaaggattctaccccagcgacattgcagtagaatgggaatcaaatgggcagcccgagaataattacaaaacgactccccctgtgcttgattcggacggtagctttttcctctattcgcggctgaccgtggacaagagtagatggcaagagggtaatgtattctcatgttccgtgatgcatgaagccctgcacaatcattacacgcaaaaaagcctctcactttcccttgga

SEQ ID NO: 123971 - DNA, 1740 bp, Artificial Sequence
  derived and/or modified sequence
atgaagtgggtgtcattcatcagtctgctgttcctgtttagttccgcctactcggggtccctggataaacggcacggcgaaggaacctttactagcgatgtgtcatcgtacctcgaagaacaagccgcgaaagagtttatagcttggctggtcaagggtaggggccacggggaggggacgttcacctccgacgtgagctcgtacctggaagaacaggcggcaaaggagtttatcgcttggctcgtgaaggggcgcggacatggcgaaggcactttcacgtcagacgtgtcgtcctatcttgaagaacaagcagcgaaagagttcatcgcgtggctcgtgaaaggaagaggacatggagaaggaactttcacttcagatgtctcgtcgtaccttgaagagcaggcagcaaaagagttcattgcttggctcgtcaaagggcggggtcacggtgagggtactttcaccagcgacgtttccagctacctcgaggagcaggcggccaaggaattcattgcctggctggttaagggcagggggcacggagaaggtacgttcacttcggacgtgtcctcttacttggaagagcaggccgcgaaggagttcattgcatggttggtaaagggccgcggacacggtgaaggaaccttcacgtcggacgtctcttcttatctcgaagagcaagccgcgaaggaattcatcgcatggctggtaaaaggcagaggccacggcgaagggactttcactagcgacgtatcttcatacctggaggagcaagcagctaaggagttcatagcttggttggtgaagggccggggacatggagaggggactttcacctcggatgtttcctcgtacctcgaggaacaggcggcgaaggagtttattgcgtggctggtgaagggacggggccatggagagggcacttttacctcggacgtctcctcgtatctggaggaacaagccgccaaggagttcatcgcctggctggtgaaaggtcgcgggggaggaggcggaggggggagcggaggcgggggaagcggaggaggtggaagcgccgagtcaaaatacggacctccgtgtccaccctgccccgctcctgaagcggccggtggcccttcggtgttcttgtttccgccaaagccaaaagataccctgatgatctcaagaaccccagaggtgacctgtgtggttgtggacgtgtcgcaggaagatccggaagtccagtttaactggtacgtcgacggggtggaagtgcataatgccaaaactaagccgcgcgaagaacagttcaattcaacctaccgcgtggtgtccgtcctgactgtcctgcatcaggactggcttaatggtaaggaatacaagtgcaaagtcagcaacaagggtctgccgtcctcaatcgaaaagaccatctctaaagccaagggacaaccgcgagagccacaggtctacactctgcctccgagccaggaagaaatgaccaaaaaccaggtgagcttgacctgcctggtgaagggcttctacccgagcgacatcgccgtggaatgggaatccaacggacagccggaaaacaactacaagaccacgcccccagtgcttgatagcgatggttcgttcttcctctacagccggttgaccgtcgacaagtcaaggtggcaagagggaaatgtcttttcttgcagcgtcatgcacgaggccctccacaaccactacacccaaaagagtctgtccctctcgctcgga

SEQ ID NO: 123972 - DNA, 1740 bp, Artificial Sequence
  derived and/or modified sequence
atgaaatgggtatctttcatctctctgcttttccttttcagttccgcttactcaggatccctggataagaggcacggtgaaggcaccttcacatcagatgtgtcctcttacctcgaggagcaggccgctaaagaattcatagcttggctagttaagggaaggggacacggtgaaggtaccttcacttccgacgtatcctcctacctggaggaacaggcagccaaggagttcatcgcctggctggtaaaagggcgcggccacggcgaaggcacatttaccagcgacgtttcctcttacctcgaagagcaggcagccaaagagttcattgcttggctggtcaagggacggggtcatggcgagggcacctttacgtccgatgtgtcctcgtatctggaggaacaggcagcaaaggagttcatcgcttggctggtcaagggacgtggccatggagaaggcaccttcaccagcgacgtctcatcatatttagaggaacaggccgccaaagaatttatcgcttggcttgttaagggaaggggccacggggagggtacattcacctccgatgtctcctcttacttggaggagcaggctgccaaggaatttattgcttggttagtaaagggccgggggcatggagaaggcacattcacctccgatgttagctcatatctggaagagcaggcggccaaggaattcattgcctggttggtaaagggccgcgggcacggcgagggcacatttaccagcgacgtgagtagctacctggaggagcaagcagcaaaagagttcatcgcgtggttggtcaagggacgaggacatggagaggggacatttactagcgacgtgagtagctatttggaggaacaggccgcgaaggaatttattgcgtggctggtaaaaggtagagggcatggcgagggcacattcacctctgatgtgagctcatatctcgaggagcaggctgctaaagagtttattgcttggctcgtgaaaggcagaggcggaggggggggtgggggatctgggggcggaggctcaggtgggggaggttctgctgagtcaaagtacggacctccatgcccaccatgccctgctcctgaagcagccggagggccgtccgtttttctatttcctccaaaacccaaggacaccttgatgatttcgagaacacctgaggtaacatgcgtggtagttgacgtgtcccaagaagaccctgaagtgcagttcaattggtatgttgacggcgtggaagtgcacaatgccaaaacgaaaccaagggaggagcaattcaattcgacttacagagtagtctccgtcttgactgtgctgcaccaggattggttaaatggaaaggaatataagtgtaaagtaagtaataaaggcctgccctcgagcatagagaagaccatctcgaaagcaaaggggcagcccagggaaccccaagtatatactctgcctccctcgcaagaggagatgacaaaaaatcaggtaagcctgacatgcctcgtgaaagggttttacccctccgatatcgcagttgaatgggagtccaacggccagccagagaacaactacaagaccactcctccagtgcttgacagtgacggatcattcttcctttattcaagacttacagtggacaagtcccgttggcaggagggtaatgtgttcagttgctctgtgatgcacgaggcattgcacaaccattatacacaaaagagtttaagcctgtcgctgggt

SEQ ID NO: 123973 - DNA, 1740 bp, Artificial Sequence
  derived and/or modified sequence
atgaagtgggttagttttatcagccttctgtttctgtttagctccgcctactcgggctctcttgataagcgccatggcgaaggaacctttaccagcgatgtgtcctcctacttggaggaacaagcagcaaaggaattcatcgcatggctggttaaaggtcggggtcatggcgagggaacgtttacctccgatgtctcctcatacctcgaagaacaagcagccaaggaattcattgcctggctcgtgaagggtcggggccatggtgaaggcacctttacgtcggacgtgtcgtcgtacctggaggagcaggccgcaaaagagttcatagcgtggctggttaagggtcgcggtcatggagaggggacgtttacctcagacgtgtcgagttaccttgaggaacaagcggcgaaggagtttatcgcttggctcgtcaagggacgagggcatggggagggcaccttcacctctgatgtgtcatcgtaccttgaagagcaagcggctaaggagtttatagcatggctcgtgaaaggtcgtgggcatggagaaggtacttttacttcagacgtatcatcctatctcgaagagcaggcagcaaaggagtttattgcctggctggtaaaaggccgaggacatggggaagggactttcacgtcagacgtctccagctaccttgaggagcaagcagcgaaggagttcatcgcctggctggtgaagggcagggggcacggtgagggcacgttcactagcgatgtctcgagttatcttgaagaacaggctgcgaaagaattcatagcctggctcgtaaagggacgcggacacggcgagggaacctttacttccgacgtgagctcatacctggaggaacaggcagctaaagagtttattgcatggcttgtgaagggaaggggccacggagaagggaccttcacttcagatgtgtcgagctacttggaagaacaggccgccaaagaattcattgcttggcttgttaagggaagaggaggaggaggtggcggaggttcgggaggaggaggaagcggcggaggaggaagtgcagaatctaagtacggtcctccttgtccaccttgtccagcgcccgaagcagcaggcgggccgagtgtgtttctgtttccacccaagcccaaggatactctgatgatctcccgtacccctgaagtgacttgcgtggtggtcgatgtctcacaagaagatccagaagtgcagttcaattggtacgtggacggcgtggaagtgcacaatgcaaagactaaaccgagagaagaacaattcaatagcacctaccgggtggtgtcggtccttactgtcttgcatcaggactggctgaacggaaaggaatacaagtgtaaggtcagcaacaagggactgccttcttccattgaaaaaaccatttcgaaagcaaagggtcaaccaagagaaccacaggtgtacacccttcccccttcgcaagaggagatgactaagaaccaggtgtcgctcacctgtctggtcaaagggttttatccttcagatattgcagtggaatgggaatccaacggtcagccggaaaacaattacaaaaccactccacctgtcctggattccgatggatcgtttttcctttactccagactgaccgtggacaagtccagatggcaagaaggtaacgtcttttcatgcagcgtgatgcacgaagcattgcataaccactacactcaaaagtccctgtcacttagccttggt

SEQ ID NO: 123974 - DNA, 1740 bp, Artificial Sequence
  derived and/or modified sequence
atgaagtgggtcagttttatctccttgctcttcctcttcagctcagcctattcgggaagccttgacaaacgacacggcgagggaacgtttacatccgatgtgtcgtcctatctcgaagagcaggccgcaaaggaatttattgcgtggcttgtgaaaggccgtgggcatggggagggcacatttacttccgacgttagctcttacctcgaggagcaagccgcaaaggaattcatcgcatggttggtcaaaggccgtgggcacggggaaggcacatttacatccgacgtatcaagttatctcgaggagcaggccgccaaggagtttatcgcctggctcgtgaagggcagaggacacggtgaaggcacattcacttcggatgtgtcaagctacctcgaggagcaagcagcaaaagagtttatcgcatggctcgtcaaggggaggggtcacggagaagggacttttacctctgatgtctctagctaccttgaagagcaggcggcaaaggagttcattgcttggctggtgaaaggcagaggacacggtgaaggaacttttacgagcgatgtctcttcttacctggaggaacaggcagcaaaggagttcatcgcctggctggtcaaggggaggggccacggggagggcactttcacaagtgatgtgagcagctacctcgaagagcaggccgcgaaggaatttatcgcctggctggtcaagggcaggggccacggcgaagggacatttaccagcgatgtttcctcatatttggaggagcaagcagcaaaagagttcattgcatggttggtcaagggaaggggccatggggagggaacgttcacatctgatgtatcatcctacctcgaggagcaagcagccaaggagttcatcgcatggctggtgaagggaagaggccacggcgaggggacctttacttccgatgtttccagttacctcgaggaacaagccgccaaggaatttatcgcatggttagtgaaaggccggggaggtggaggggggggagggagcggtgggggaggaagcggtggcggcggatccgcagagagcaagtacgggcctccttgccctccgtgtcccgcacctgaggcggcaggcggaccaagcgtcttcctgtttccacctaaaccaaaggacactctaatgattagcagaactcctgaagtgacgtgcgtcgtcgtggatgttagtcaggaggatccagaagtgcagtttaattggtacgtggacggcgtggaagtacacaatgccaaaacaaaaccgagggaagagcagtttaattctacctaccgtgttgtctctgttctcaccgtgctccaccaagattggctgaacggcaaggaatacaaatgtaaggtaagcaataaagggttaccttccagcattgaaaaaacaatcagcaaggcaaaaggccagccaagagaaccccaggtgtacaccttgccgccttcccaggaggagatgacgaaaaaccaggtcagcctgacctgtctggttaagggtttctacccctccgatatagccgtcgaatgggaatcaaacggtcaacctgagaacaactacaagacaaccccaccagtcctggattcagatggctccttctttctgtacagtaggcttactgtggataagtcacggtggcaggaaggtaatgtgttttcatgttcagtcatgcatgaggctttacataaccactacacccagaagtctctatctcttagtctggga

SEQ ID NO: 123975 - DNA, 1740 bp, Artificial Sequence
  derived and/or modified sequence
atgaagtgggttagcttcatcagcttgctgttcctctttagttccgcctactccggcagtctggacaagagacatggtgagggaacgttcacctcggatgtttcgtcgtaccttgaggagcaagcagctaaggagttcattgcatggctcgtcaagggcaggggtcatggtgaaggaacattcactagcgacgtctcatcctacttggaggaacaggctgcaaaggaatttatcgcatggctggtgaaaggtcgcggtcacggcgagggcacttttacctccgatgtttcgtcctatctagaggagcaggcggcgaaagagttcattgcttggctggttaagggccgcggccacggcgaaggaaccttcacgtccgatgtttcttcctacttagaagaacaggcagccaaggaatttatcgcgtggctggtgaagggccgcggccacggtgaaggaacgttcacctccgatgtgtctagctacctggaggagcaggcagctaaagagttcatagcctggctcgtcaaaggcaggggacacggtgaaggcacgttcacctcggatgtgtccagctacctggaagagcaggccgcgaaggaatttatcgcgtggctggttaagggccgtggccacggtgaaggaaccttcaccagtgacgtttccagctatctggaggagcaagcggccaaggagttcatagcatggctggtgaagggtcggggtcatggcgagggcacttttacgagcgatgtctcctcctatctcgaagaacaggccgctaaggaattcattgcttggctcgtgaagggccgtggccatggagagggcactttcacatccgatgtatccagctatttggaggagcaagcagctaaagagttcatcgcctggctggtgaaaggcaggggccatggggaaggcacattcacgtcagacgtgtcctcgtacttggaggagcaggctgccaaagaatttatcgcctggctggtaaagggtcgaggcggtggaggcggaggtggctctggcggcggaggaagcggaggcggcggtagcgccgagtccaagtacggcccaccctgtcctccatgcccggccccagaggccgcaggaggtccaagtgtgttcctgtttccgcccaagcccaaagacacactgatgatcagccgtacaccggaggtgacgtgtgttgtggtcgatgtgtcccaggaggacccggaggtccagttcaattggtacgtggacggcgtggaggtccataacgcgaaaacaaaaccgcgtgaggagcagttcaatagcacctaccgagtagtgtccgtgttgacggtgttgcatcaggactggctgaatggaaaggagtacaaatgtaaggtgtcaaataagggcttgccgtcgagcattgagaaaaccatctccaaagcgaagggtcagccccgcgagccgcaagtgtacaccctgcccccaagccaggaagagatgaccaaaaaccaagttagtctaacttgccttgtgaagggattctatccgtcagatatcgctgtcgagtgggagagtaatggccagcccgaaaacaactacaagaccacgccgcctgtgctagactctgacggttctttcttcctctattccagactgacagttgataaaagccggtggcaggagggaaatgttttctcatgttcagtgatgcacgaggctctgcacaaccactacacacagaagtcgcttagtcttagtctgggc

SEQ ID NO: 123976 - DNA, 1740 bp, Artificial Sequence
  derived and/or modified sequence
atgaagtgggtctctttcatcagcctgcttttcctgttcagcagcgcgtattctggctctctggacaaacgccatggtgaaggtacctttacgtccgatgtcagcagctatctggaggaacaagcagctaaagaatttatagcgtggctggtcaagggccgcgggcacggtgagggcacgtttactagcgacgtatcatcttatctggaagagcaggccgcgaaggagttcatcgcttggcttgtgaaaggtcgcggacacggtgagggtacatttaccagcgacgtcagctcctatctggaagagcaagcggctaaggaatttattgcttggctggtcaagggccgcggtcatggtgaaggcacttttacgtctgatgtgagcagctatttggaggaacaagctgcgaaggaatttattgcgtggctggtaaagggccgcggccacggtgaagggaccttcacgagcgacgtgagctcatatctggaggagcaagcagcgaaggagttcatcgcatggctggtgaaaggtcgtggtcacggtgaggggacttttacgtctgacgtgtctagctatctggaggagcaagccgccaaggagtttatcgcgtggttggtgaagggtaggggtcatggtgagggaactttcaccagcgacgtcagtagctacctggaagagcaggctgctaaagagtttatcgcttggttggtaaagggccgaggccacggtgaggggactttcacttcggacgtgagctcctacctggaggaacaggcagcaaaggagttcatagcatggctagtgaagggtcggggccatggggaggggacattcaccagcgacgttagcagctacctcgaggagcaagctgccaaagagtttattgcttggctcgtcaaaggtcgcggccatggggaaggtaccttcacctccgatgtatccagctacctggaggaacaggctgctaaggaatttatcgcctggctggtgaaagggcgcggcggcggtggtggcggtggttctggcggtgggggtagcgggggtgggggtagcgcagaaagcaaatacgggccaccctgcccgccatgcccagcaccggaagctgcgggcggaccaagcgtgttcctgtttccaccaaagccgaaagataccctcatgattagccggaccccagaagtgacctgcgtcgtcgtggacgttagccaggaagatcctgaggtccagtttaactggtatgtagacggtgtggaggtgcataacgcaaagacaaagccacgcgaggaacagtttaacagcacctatcgtgtggtgtcggtcctgaccgttctccaccaggattggttgaacggaaaggagtacaagtgtaaagtgagcaataagggactcccgtcaagcattgagaagactatctccaaagcaaagggtcagccgcgcgagccgcaagtctatacgctgcctccgtcacaagaagagatgaccaagaatcaggtcagcctcacttgtctggtcaaaggcttctatccaagcgacattgccgtggaatgggagtcgaatggccagccggaaaacaactacaagaccactccaccagttctggacagcgacggttcttttttcctgtactcacggttgaccgttgacaagagccgttggcaggaaggcaatgtgttcagctgcagcgtgatgcacgaagcactgcacaatcattacacccaaaagagcctcagcctgagcctgggt

SEQ ID NO: 123977 - DNA, 1740 bp, Artificial Sequence
  derived and/or modified sequence
atgaaatgggtgtcgttcatttccttactgtttctgttcagttcagcttattcaggcagccttgacaagcggcatggggagggaacattcacctcagatgtgagctcttacctcgaagaacaggccgcgaaggaattcatcgcatggctggttaagggacgcggccacggagagggaacctttaccagcgacgtgagctcctatctcgaagagcaggccgccaaggaatttatcgcttggctcgtgaagggcaggggccacggggaaggcacgttcacgtctgatgtttcctcttatctggaggagcaggcagcaaaggagttcatcgcttggttagtgaaagggcgcggccatggcgagggaaccttcactagtgacgtaagttcatatctcgaagagcaagctgccaaggaatttatagcatggttagtcaagggacggggacacggagagggcaccttcacatcggatgtatcctcttatctggaggagcaagcggccaaagagtttattgcctggcttgtcaagggcagaggacacggagaggggacatttacctccgacgtgagcagctatttagaagaacaagctgccaaagaatttatagcctggcttgtaaaaggaaggggacatggggaagggacctttacaagcgatgtgagctcatacttagaggaacaagcggctaaagaatttattgcttggttggttaagggccggggccatggggaaggaacgtttacctcggatgtgtcgtcctaccttgaggagcaggccgcgaaagagttcatcgcgtggctagtcaaaggccgtggccatggagagggaacattcacttcagatgtgtcctcttacttagaagagcaggccgcaaaagagtttatcgcatggcttgtcaaaggacgcgggcacggtgagggaacattcacatcagacgtgagttcctacctggaagaacaagccgcgaaagaatttattgcctggttggtcaaggggcgtggaggaggtggagggggagggagcggaggaggtggcagcggaggaggcggttccgcagagtccaagtacggacctccttgccctccgtgccctgccccagaagcagccggaggtccctctgtgtttctgttccctccaaaacccaaggatactctgatgataagtcgaacaccggaggtaacctgtgtggtagtagatgtttcgcaggaggatcctgaagtccaatttaactggtatgtcgatggggttgaagtgcacaatgccaaaaccaagcccagggaggagcagtttaactcaacatacagagttgtgagcgtactgacggttttgcaccaggactggctcaatgggaaggaatataaatgtaaggtaagcaataagggtctgccatctagcatcgagaagaccatcagcaaggccaaggggcagccacgagagccccaggtgtatacactgccaccttctcaggaagagatgactaagaaccaggtttcgctcacatgtctcgtgaagggtttctatccatccgatattgccgtggaatgggagagtaatggtcagccagagaataattataagacaacacccccggtgctggacagtgatggtagcttttttctgtacagtcggctgaccgtggacaaaagtagatggcaggaaggaaacgtcttttcctgttcagtcatgcacgaagccctgcataatcactatacacagaagagtctgtctctctctctggga

SEQ ID NO: 123978 - DNA, 1740 bp, Artificial Sequence
  derived and/or modified sequence
atgaaatgggttagcttcattagcctgctgtttctattcagctcagcttactcaggctctcttgataagagacacggcgaggggactttcacttcagatgtctcttcatacctggaggagcaggctgcaaaagagtttattgcttggctggtaaaaggaagaggccatggagaagggacgttcacaagcgatgtgagcagttacctcgaggagcaggccgccaaggagtttatcgcttggctggttaaagggcggggacacggcgagggaacctttacaagcgatgtgagcagctatttggaggagcaggcagctaaggaatttatcgcatggctggtcaaagggcgggggcatggggaggggacatttacttccgatgtgagctcctacttggaggaacaggccgccaaggaatttattgcctggttagtgaagggtcgaggacatggagaaggaactttcacatccgacgttagttcatatctggaagagcaggctgcgaaggaattcattgcctggctcgtcaaaggccggggccatggtgaaggcaccttcaccagtgacgtgagctcctacttggaagagcaggccgccaaagaattcatcgcctggctcgtgaagggacgtgggcacggcgaaggcactttcactagcgacgttagcagttatctcgaagagcaggctgccaaagagttcattgcctggctagtgaagggcagaggacatggggagggcactttcacaagtgacgtatcctcctacctggaagagcaagccgccaaagaattcatcgcctggttggtgaaaggaagaggccacggcgaagggacattcacctctgatgtgagctcctaccttgaggaacaagctgcaaaagaattcatagcctggttggtcaagggccggggtcatggagaggggacctttacctccgacgtctcatcataccttgaagaacaggctgccaaggaatttatagcttggctggtgaagggcagaggtgggggtggaggtggcggttctgggggcggagggtctggtgggggagggagtgctgaatccaagtatggacccccttgtcccccttgtcccgcccccgaagccgccggcggaccttccgttttcttgttcccaccaaagcctaaagatacactgatgatttctcgaaccccagaggtgacctgcgtggtcgtcgatgtgagccaagaagatccagaggtgcagtttaactggtatgtagatggagtggaggtgcacaacgcgaaaactaaaccaagagaggagcagttcaatagtacttatagagtggtgagcgtacttacagtgctgcaccaggactggctgaatggaaaagaatataagtgtaaggtgtccaacaaaggactgcctagcagcattgaaaagacaatcagcaaggcaaaaggacagccccgggagccccaggtgtacactttgcctcctagccaggaagagatgaccaagaatcaggtaagtcttacgtgtttagtgaagggcttctacccgtcggacatcgccgttgagtgggagagcaatgggcagccggaaaacaattacaagactacccccccagtactcgattctgatggcagcttctttctgtactccaggttgaccgtcgacaagtctagatggcaggagggcaacgtgttttcttgcagcgtcatgcacgaagcattacataatcattatacacagaagtcacttagtttgagcctgggc

SEQ ID NO: 123979 - DNA, 1740 bp, Artificial Sequence
  derived and/or modified sequence
atgaagtgggtttccttcatcagcttgctgttcctctttagctccgcctatagcgggagcctcgataagaggcatggggagggaacatttacctcagacgtgtcgtcctaccttgaagagcaggccgcgaaagagtttatcgcctggctggtgaaaggccgcggccatggcgaaggcacctttacctctgatgtgagttcctatctggaggagcaagcagccaaagagtttatcgcctggcttgtgaagggccgcggccatggagagggaaccttcacaagcgacgtttcctcctacctcgaagaacaggctgccaaagaatttattgcctggctggttaaggggcgggggcacggagagggcacctttacctccgatgtctcatcttatctggaagagcaggcggctaaggagtttatcgcatggctggtgaaggggaggggccacggagaggggacgttcacatccgatgtctccagctacctggaggagcaggcggccaaagaatttatcgcctggctggtgaagggccgcggacacggcgaggggacctttacatccgacgtgtcaagttatctcgaagaacaggccgctaaggagttcatagcatggctagtgaaagggagggggcacggtgaagggacattcacatccgacgtaagctcctacctggaagaacaggccgcaaaggagttcattgcttggctggtaaagggaagaggacacggcgaagggaccttcacaagtgatgtatcttcgtaccttgaggagcaagcggcaaaggagttcatcgcctggcttgtgaagggccgggggcacggtgaggggacatttacctctgatgtttctagctacttagaggaacaggccgccaaggaattcatcgcttggttggtaaaaggccgtggtcatggagaagggacgtttacgtccgacgtgagtagttatctggaggagcaggctgccaaggagttcatcgcttggttagtgaaaggccgtggcggaggaggcgggggcggatctggagggggaggttccggcggaggcgggagcgctgagtccaaatacggtcctccctgccctccttgtcctgccccagaagccgctggaggcccctccgtgtttctctttccaccaaagccaaaggacaccttaatgatctcaaggacgcccgaggttacatgcgtggtcgtggatgtcagtcaagaggatccagaggtgcagtttaattggtatgtggatggcgttgaggtccacaacgctaagactaaacctagggaggaacaatttaacagtacctacagggtagtgtccgtgttgacagtgctccaccaagactggctaaacggcaaagaatacaagtgcaaagtatccaataaagggcttcccagttcaatcgagaaaaccatcagtaaggctaagggtcagccacgagaaccccaggtctacaccctgcccccttcccaggaggagatgaccaagaatcaagtctctctgacctgtcttgttaaaggattctatccttccgatatcgcagtggagtgggagtccaatggccaaccggaaaacaactacaagaccaccccccccgtgctggatagtgacggctcctttttcttatactctcggttgacagtggacaaaagcaggtggcaggagggtaacgtgttctcttgcagtgttatgcacgaagcgctgcacaatcattatacacagaaaagtttgagcctatctttgggg

SEQ ID NO: 123980 - DNA, 1740 bp, Artificial Sequence
  derived and/or modified sequence
atgaagtgggtttcctttatttcactgctctttttgttcagcagtgcatacagtggcagcttggataagcggcatggggaggggacatttacctccgatgtgtcatcttacctggaagaacaggcggccaaagaattcatcgcttggctggtcaagggcagagggcatggcgaaggcactttcacctccgatgtgtcctcctacctggaggaacaggccgccaaagagtttatagcgtggctggtgaagggccgaggccacggcgagggcactttcacatcagatgttagcagctatctggaggaacaggctgcaaaggaattcatagcttggctcgtgaaaggcagaggccacggcgaggggactttcacctccgacgtgagttcctacctagaagaacaggccgcaaaagaattcatcgcgtggctggtcaaaggcagagggcacggagaaggcactttcacctccgacgtgagctcgtacctcgaagagcaagctgccaaagaattcatcgcatggctcgttaagggaagagggcacggggaggggaccttcacatccgacgtgtcttcctatctggaagagcaggcggccaaggaatttatagcctggctggtcaaaggtcgagggcacggagagggcaccttcacatccgacgtgtcctcttacttggaagagcaagcagccaaggagttcatagcttggctcgtgaagggcagaggccacggggagggcacttttacttccgacgtatcctcttatctggaagagcaagccgccaaggagtttatcgcatggctcgtaaaggggaggggacacggggaggggacctttacatccgacgtgtctagctacctggaggaacaggccgcaaaagaattcatcgcatggctggttaaaggacgcggccacggtgaggggacctttacctcagatgtatccagttatctggaagagcaggcagccaaggaattcattgcttggttggtgaagggtagaggcgggggcggcggtggtggatctggcggtggcggatccggtggtggaggatccgctgagagtaaatatggtcccccatgcccaccttgccctgctcctgaggcagctggagggccgtccgtgtttctcttcccgccaaagcctaaagacaccctaatgattagtcgcacacctgaggtaacttgcgtcgtggtggacgtgagccaggaggaccccgaagtacaattcaactggtatgtggacggcgtggaagtgcacaacgccaaaaccaagcccagggaagagcaattcaatagtacttaccgggtggtcagcgtactgacagtgctccaccaggattggctgaatggaaaggagtataagtgtaaggtctctaacaaggggctgcctagctctatcgaaaaaacaattagcaaggccaagggtcagcctcgggagccccaggtgtacacactgcctccatcacaggaggaaatgacgaagaaccaggtgtcccttacatgtcttgtgaagggcttttacccatctgacatcgcagttgagtgggagtcgaacggacagcctgaaaacaattacaagactacgcctcccgtgctcgattcagacggttcctttttcctgtatagcagactgaccgtcgataagagccggtggcaggagggtaacgtgttttcttgcagtgtgatgcacgaggccctgcataaccactatacgcaaaaaagcctgtcattgagtttagga

SEQ ID NO: 123981 - DNA, 1740 bp, Artificial Sequence
  derived and/or modified sequence
atgaaatgggtgtctttcattagcctactcttcttgtttagttcggcgtattcaggtagcttggacaaacgccacggggaagggaccttcacctctgacgtatcctcttaccttgaggaacaggcagccaaggagtttatcgcgtggttggttaaagggcggggccacggggagggcaccttcacttccgacgtgtctagttatcttgaagagcaagctgccaaggagttcatcgcatggttagtaaaggggagagggcacggtgaaggcacgtttacatccgacgtgtcaagctaccttgaggagcaggccgctaaggagtttattgcttggctggttaagggcagggggcatggagagggcacctttaccagcgatgtgagtagttacctggaagagcaggctgcgaaagagttcattgcatggctggtaaagggaagggggcacggggagggaaccttcacctccgacgtgagcagctatctagaggagcaggccgcgaaagagttcattgcctggctagtgaaaggcaggggccatggcgaaggaacgttcacttctgacgtttcatcctatttagaggaacaggctgctaaagagtttattgcctggcttgtcaaaggccggggacacggagagggcacttttacttctgacgtctcttcatacctagaggaacaggctgccaaggaatttatcgcttggctggtgaaagggaggggccacggagaaggtacctttacatccgatgtatctagctatctcgaggagcaggccgccaaggaattcatcgcatggcttgtgaaaggcagaggtcatggcgagggcacattcacttctgacgtctcatcatacctcgaagaacaggccgcaaaggaatttatcgcctggctcgtgaaggggaggggacacggggaaggaacattcacgtctgatgttagttcttacctggaggagcaggccgccaaggagtttattgcctggctcgtaaagggcaggggcggcggtggaggaggcgggagtggcggcgggggaagcggcggggggggttctgccgaatccaaatacgggccaccctgccctccttgtccagcccccgaggccgcgggcggcccgtccgtgttcctcttccctcctaaaccaaaagatacactcatgatttcccgcactcctgaggtcacctgcgttgttgttgacgtttcccaagaggacccagaagtccagttcaattggtacgtcgatggcgtagaggtccacaacgctaaaaccaaaccaagggaggaacagtttaactccacttaccgtgtggtatccgtgctaacagtgctacatcaagactggttgaacggtaaggagtataagtgcaaggtctctaataaggggctcccttcctcgattgagaagaccatctccaaagcaaagggccagccaagggagccgcaagtgtacactctgcctccctcccaggaggaaatgactaaaaaccaagtgagccttacttgcctcgtgaagggcttctacccatctgatatagctgttgaatgggagtcaaacggccaacctgagaacaactacaaaactacacccccggtgctggattctgatggctccttctttctctattctcggctcaccgtggacaaatcaaggtggcaggaagggaacgtgttttcgtgctcagtgatgcatgaggcactgcacaaccactacacacaaaagtcgttgtctctgtccctaggc

SEQ ID NO: 123982 - DNA, 1740 bp, Artificial Sequence
  derived and/or modified sequence
atgaaatgggtgtcttttatcagtcttctgtttctgtttagctccgcctacagcggcagtctggataagaggcatggcgaggggacatttacaagcgatgtgagcagctatttggaagaacaggccgctaaggaattcattgcttggctggtgaagggaagggggcacggtgagggtaccttcactagtgacgtgtcatcttaccttgaggaacaggcggctaaggagtttattgcatggctcgtgaagggccgaggacatggtgaaggcacattcacttctgatgtcagtagctatctggaagaacaggccgcaaaggaattcatcgcctggctggtcaagggtcgcggacacggcgagggtaccttcacaagtgatgtgagttcatacttggaagaacaggctgccaaggaattcattgcttggctggttaaaggcagggggcacggagaggggacctttacatctgacgtaagctcttaccttgaggagcaagccgcgaaagaatttatcgcctggcttgtgaagggcagaggacacggtgaaggaaccttcactagcgacgtgagcagctacttggaggagcaggcagccaaagagttcatcgcctggctcgtgaagggtagaggtcacggcgaaggtaccttcacatccgacgtttcttcatacttggaggagcaggctgccaaagaatttattgcgtggctggtcaaggggcgcggtcacggtgaaggcacattcacctctgatgtttcatcttatctcgaagaacaagcagccaaggagttcatcgcctggttggtcaagggaagagggcacggtgaaggaacattcactagtgatgtgagtagttaccttgaggagcaggcggcaaaagaatttatcgcctggctcgtgaaaggccggggccatggggagggaacatttacttccgacgtgtccagctaccttgaagaacaggccgccaaggaatttattgcttggctggtcaagggccgcgggggagggggcggaggcggttctggcggggggggttccggtggtggcggctccgccgagtccaagtatggacctccttgccctccttgccctgcaccagaggccgctggggggccttccgttttcctttttccaccaaagcctaaggacacccttatgatcagcagaacacccgaggtaacttgtgtggtcgtcgatgtgtctcaagaggaccccgaagtccagttcaattggtacgtggatggagtggaggtgcataacgctaaaacgaagcccagggaagagcagttcaacagcacttatagggttgtgtctgtgctgaccgtcctccaccaggattggctcaacgggaaagagtacaagtgcaaggtcagcaataaggggctcccctccagcatcgaaaaaacaatttctaaggcaaaggggcagcctagggagccgcaggtgtacactctgcccccatcccaggaagaaatgacgaaaaatcaggtcagtctcacttgccttgtcaaggggttttacccgtcagatatagcagttgaatgggaaagcaatgggcagccggagaacaattataaaacaactccacctgtgctggatagcgacggtagcttctttctgtattccaggctgacagtggacaagtccagatggcaggaggggaatgtgttcagctgtagcgtgatgcatgaagccttgcacaatcactacactcagaagtccctgagcctctcactgggg

SEQ ID NO: 123983 - DNA, 1740 bp, Artificial Sequence
  derived and/or modified sequence
atgaaatgggtgtcatttatctcgctgctctttctcttttcgtcggcctactccgggagccttgataagcgccatggagagggtacctttacctcagacgtctcgtcatacctcgaagaacaagcagctaaagagtttatcgcttggctggtcaagggtcgcggtcatggagaaggaacctttacttcggatgtgagttcctatttggaagagcaggcggcgaaagagtttatagcctggcttgtcaagggcagagggcatggggaaggcacgtttacttctgatgtgtcatcatacttggaagaacaggccgcgaaggaattcatagcatggcttgttaagggacggggtcacggagaagggacgtttacgagtgacgtgagttcatacctcgaggaacaagcagcgaaggagttcatcgcctggctggtaaaaggaagaggtcacggggaagggacctttacttccgatgtctcctcctaccttgaggagcaggcagctaaagaattcattgcctggcttgtgaagggtcgaggccacggggaggggacttttacgtcggacgtctcctcgtatctcgaggaacaggccgctaaggagtttattgcctggctcgttaagggtaggggtcatggtgagggaacctttaccagcgatgtgtcctcctatctggaagaacaagccgcaaaagaattcatcgcatggcttgtaaaagggagaggtcatggcgagggaactttcaccagtgatgtcagctcctacttggaagagcaagcggccaaagagttcattgcttggcttgtaaagggtcgtggtcatggtgaaggcaccttcacctcggacgtgagcagctacctcgaagagcaggcagcaaaggaattcattgcatggctggtgaagggcagaggacacggcgaagggactttcactagcgatgtgtcgtcatacctggaggagcaagcagcaaaggagtttatcgcctggttggtgaagggccgaggaggtggaggaggagggggctcgggcggaggaggttccggaggtggcggatccgcagagtccaagtacggacccccttgccctccctgtccagcaccagaagcagccggaggtccgtcggtctttctctttcccccaaagcctaaggacactctgatgattagcagaactcctgaggtgacgtgtgttgtggtcgatgtgagccaggaagatcccgaagtccaattcaactggtacgtggacggtgtcgaagtgcacaacgcaaaaaccaaaccacgcgaagaacaattcaactcgacctaccgggtcgtgtccgtgctgacggtcctgcatcaggattggcttaatgggaaagaatacaagtgtaaggtgtcgaacaaggggctgcctagttctattgaaaagaccatatccaaggcaaagggtcagcctcgggagccgcaagtgtacacccttccgccttctcaagaggagatgactaagaatcaggtgtccctgacctgtttggtgaaaggattttacccatcagatattgcagtggaatgggaatcgaatggacaaccagaaaacaactacaaaactactcctccagtgctggacagcgacggttcgttctttctgtactccaggctcaccgtggataaaagcaggtggcaagaaggcaacgtgttctcctgctctgtcatgcacgaagcacttcataatcattacacccaaaagagcctttcactgtcgcttgga

SEQ ID NO: 123984 - DNA, 1740 bp, Artificial Sequence
  derived and/or modified sequence
atgaagtgggtgtccttcatctccctgctgtttttgtttagtagcgcctattcaggctccctggataaaaggcacggcgaggggacattcactagcgatgtctcttcctatttggaggaacaggctgcgaaagagttcattgcgtggctggtgaaggggcgaggccacggcgagggaaccttcactagtgacgtctcgtcttatctcgaggagcaggccgctaaggaattcattgcctggcttgttaaaggccggggacatggagaggggaccttcacttcagacgtgtcctcatatttagaggagcaggccgccaaagagttcatagcttggttagtcaaaggacggggtcacggcgagggcacctttacaagcgacgttagctcttacctcgaagaacaggctgcgaaagagttcatcgcctggttggtcaagggccggggccacggtgaagggacgttcacaagtgacgtcagctcttacctagaggagcaggccgccaaggaattcattgcctggttagtgaaaggtagggggcatggagaaggcacttttaccagcgacgtgtcttcgtacctggaggaacaagcagctaaagaatttatcgcatggctcgtcaagggtcgcgggcatggcgaaggaacattcaccagcgatgtctcaagctatctggaagaacaagccgcgaaggagtttattgcttggctggtgaagggtagggggcacggcgaagggacatttacaagcgatgtttcctcgtatcttgaggaacaggcagcgaaagaattcatcgcctggctcgtgaaggggcgcggccacggagagggaaccttcacatctgatgtctcctcttacttggaagaacaggccgctaaggagttcattgcctggttagtcaaaggccgagggcatggggagggaacatttacctcagacgtgtccagctatctggaagagcaggcagctaaggaattcatcgcgtggttagtaaaaggtaggggcggaggagggggcggcggatctggcggaggcggaagcggtgggggcgggagtgctgaatccaagtatgggccaccttgtccgccatgtccagcacctgaggcagccggtgggccttctgtgttcttgttcccccccaaaccaaaagacactctgatgatatctagaacccctgaagtcacatgcgtggtggttgacgttagccaggaggaccccgaggtgcagtttaactggtacgtggatggcgttgaggttcataatgctaagacaaaaccgagggaagagcagttcaattctacatacagggtcgtttcagttctgaccgtgctacaccaggattggttaaatgggaaggagtacaaatgcaaggtgagcaacaaaggtttacccagctccatcgaaaagaccatttccaaggccaaggggcaacccagggagccacaagtatacactttgccccctagtcaagaagagatgactaagaatcaggtcagtctcacttgcctggtgaaggggttttacccctccgacattgccgtcgaatgggagagcaacggacagcccgagaacaactacaagactactccccccgtgctcgactctgatgggagcttcttcctttactcacggctgactgtggataagagccgctggcaggaagggaatgtcttctcctgcagcgtgatgcatgaggctctgcacaaccattatacccagaaaagtctgtccttgtcgctgggt

SEQ ID NO: 123985 - DNA, 1740 bp, Artificial Sequence
  derived and/or modified sequence
atgaaatgggtaagttttatctcccttttgttcctcttcagctcagcttattccggttctttggacaaacgtcacggagagggaaccttcactagtgacgtgagctcctacctggaggagcaggccgccaaggaatttatcgcctggctggtcaagggaagaggccatggcgaaggaaccttcacatccgatgtgtcttcatacctggaggaacaggcagccaaggagttcattgcctggcttgtcaagggaaggggtcatggtgagggcactttcaccagtgacgtttcatcttacctggaggagcaagccgcaaaggagttcatagcctggctggtaaaaggcaggggacacggtgaaggcacattcacatccgatgtaagtagttaccttgaagagcaagccgccaaggagtttatcgcttggctggtcaagggccgtggccacggtgaaggaactttcacctcagacgtctcatcatacctggaggaacaggccgctaaagagttcatcgcctggctggtcaagggacgcggccacggtgaaggcacattcacatctgacgtgtcctcatacctggaggaacaggctgctaaggagtttattgcctggttggtcaagggtcgcggccacggtgagggtaccttcacttcagatgtcagcagttatttggaggaacaggctgcaaaagagtttattgcttggctcgtaaagggtaggggacacggcgaaggaactttcacatccgacgtcagctcctacctggaggagcaggctgcaaaggagttcattgcatggctcgttaaaggtaggggtcacggcgagggaacattcacttctgatgtaagcagttacctggaagagcaggccgccaaagagttcatcgcttggcttgttaaaggccgcggccacggagaaggtactttcacttcagacgtttcatcctacttggaggagcaggctgctaaggagttcatcgcatggcttgtgaagggaagaggtggaggaggtggaggcggcagcggcggaggcggctctggtggaggcggctctgccgagagcaagtacggaccaccctgccctccctgtcctgctccagaggctgccggaggaccatctgtttttctcttcccacctaaacctaaggacacacttatgatatcccgcacccccgaggtaacctgcgttgtcgtcgacgtctcacaggaggatccagaggtgcaattcaactggtacgtggatggagtggaggtacataacgccaagaccaagcccagagaagaacagtttaatagcacctaccgcgtagtcagcgtgctgactgtactgcaccaagactggctgaatggaaaggagtacaagtgtaaggtgtccaacaagggcctgccatcctccatcgaaaagaccatctctaaagccaaaggacaacccagggagccacaggtgtatactctgccccccagccaagaagagatgactaaaaaccaagtgtccctcacttgccttgtgaagggattttacccttctgacattgccgtagagtgggaatctaacggccagccagagaacaactacaaaaccacaccaccagttttggacagtgatggaagtttttttctgtattcacgcctgacagtggataaatcccgctggcaggaaggaaacgtcttctcttgctcagtaatgcatgaggctcttcataaccactatacccagaaatctttgtcactctcccttgga

SEQ ID NO: 123986 - DNA, 1740 bp, Artificial Sequence
  derived and/or modified sequence
atgaagtgggtgtcgttcatttctctcttgtttctgttttcaagtgcctacagcggttccctggacaagcgtcatggagaagggacctttacaagcgacgtgagttcgtaccttgaggagcaggccgcgaaagaatttattgcttggctcgtgaaagggaggggacacggagagggaacattcaccagtgacgtaagtagttacctggaggaacaggcggcaaaggagttcattgcctggttggtcaaaggacgtggacacggtgagggcacctttacaagcgacgtctcttcatacttggaggagcaggccgctaaagagtttatcgcctggttggtgaaagggcgcggtcatggggaaggtacattcacatcagatgtttcttcgtacctagaagagcaagccgccaaggagtttattgcctggcttgtcaaagggcggggccacggagagggaacatttacatcagacgtgtcgtcctaccttgaagaacaagcggccaaggagtttattgcctggctagtgaagggtcgtggccacggagaggggacatttacttctgatgtaagcagttatctggaggaacaggccgccaaagaatttatcgcgtggctggtcaagggaagaggccacggggaaggaacatttacaagcgatgtctcatcctacctggaggagcaggccgcaaaagaatttattgcttggctcgttaagggccgtggacatggtgagggaaccttcacaagtgatgtgagctcctacttagaggaacaagcagccaaagagtttatcgcctggcttgtcaaaggacgggggcacggagagggcacatttaccagcgatgtgagctcttacctcgaggagcaggcagctaaagagttcatcgcctggctggtgaaagggaggggccacggggaggggaccttcacaagtgatgtctcgagttatctggaggagcaggccgctaaggaattcatcgcctggctagtaaaagggcgcggaggcggaggcgggggaggctccggcggtggagggtcggggggcggagggtctgctgagtccaagtatgggccgccttgtcccccatgtccagcacctgaggccgccggcggtccttccgtcttcctgttccctcccaaacccaaagatactctgatgattagcaggaccccagaggtgacttgtgttgtggtagatgtatcacaagaagaccctgaagttcaattcaactggtatgttgatggggtcgaggtgcacaacgcaaaaaccaaacctcgagaggaacagtttaactcaacctacagagtcgtcagcgtgctgactgtcctgcaccaagactggctgaacggaaaggagtacaagtgtaaagttagcaataagggacttccgagttccatagaaaagactatttctaaggcgaagggccagcctagggaaccacaggtgtatacattgccaccaagccaggaggagatgaccaaaaaccaagttagtctgacttgcctggtaaagggtttctacccaagtgatattgctgttgagtgggagtccaacggtcagccagagaataattacaaaaccactccccctgtactggactctgatgggtcattcttcttgtactctaggctgactgttgataagtctcggtggcaggaaggaaacgtgtttagttgcagtgtcatgcacgaggccctgcacaatcactatacccagaagtcactttcactgagcctcggg

SEQ ID NO: 123987 - DNA, 1740 bp, Artificial Sequence
  derived and/or modified sequence
atgaaatgggtgagcttcatttctcttctgttcctcttcagctctgcttattctggctcactggataaaagacacggagagggtacatttaccagcgacgtgtcatcatatctggaggagcaagctgccaaggagtttattgcctggctggtcaagggccgaggccatggagaaggaactttcaccagtgacgtgtcgtcgtacctggaggagcaggcagcgaaagagttcatcgcttggttagtgaagggacgcgggcacggggaaggcacattcacctcagacgtgtcgagctacttggaagagcaggccgccaaagaattcatagcttggctggtgaaagggcgcggtcatggcgaaggcacctttactagcgatgtgtcttcctacctggaggagcaggccgccaaggagtttatcgcttggctggtaaaaggcaggggccacggcgaaggcacgttcaccagtgacgtgtcatcttatttggaggagcaggcagcgaaagagttcatcgcctggctagtgaaaggtcgcggtcatggtgagggaacattcactagcgacgtctcatcttatctcgaagagcaggccgcgaaagaattcatcgcctggctagttaagggcagaggccatggcgagggcacattcacctccgacgtatcatcatatttggaagagcaagcagcgaaagagttcattgcttggctggtcaaagggcgcggtcacggcgaggggactttcacaagcgatgtctcgtcatacttggaggagcaggccgccaaagagttcatcgcctggcttgtgaaaggccgggggcatggggagggcacatttactagcgacgtgagttcctacctcgaggaacaggcagcaaaggaattcatagcttggcttgtcaagggaaggggtcatggcgaggggactttcacttcggatgttagttcgtacctggaagaacaggctgctaaggaattcattgcttggcttgtgaagggacggggcgggggtggcggcggtggaagcggaggtggcggatccggtggggggggcagcgcggaaagcaaatatggtcctccctgccctccctgccctgcaccggaagctgccggaggcccaagcgtatttcttttcccacccaaaccgaaggacactctgatgattagcagaactcctgaagtgacatgcgtggtggtggacgtctctcaggaggatccagaggttcagttcaactggtatgtagatggcgtggaggtacacaacgcaaagacgaagccgcgcgaggagcagttcaacagcacctaccgggtggtctccgtcctcactgttctgcatcaggactggttgaacggtaaggaatataagtgcaaagtctccaacaagggtttgcccagttccatcgagaaaaccatcagcaaggcaaaggggcagcctagggaaccccaggtgtacaccctccctccaagccaagaggaaatgaccaagaaccaagtgagccttacttgcctggtcaaagggttttacccctcggacatcgctgtggagtgggaatctaatggtcagcccgaaaataattacaagaccactccacccgtcctggattcagacggatccttcttcctctactctcgactgaccgtggacaagtctcggtggcaagaggggaacgtgttctcttgctctgtaatgcacgaagcattgcataatcattacacacagaagtctctgagtctgagtttggga

SEQ ID NO: 123988 - DNA, 1740 bp, Artificial Sequence
  derived and/or modified sequence
atgaagtgggtgtccttcatctcgttgctgtttttgttttcctccgcatacagcggttccttggataaacgccacggggagggtacttttacgtcggacgtgtcgtcataccttgaagaacaagctgcgaaggaattcatcgcctggctggtgaaaggaagaggtcatggtgaaggtacctttacctcggacgtgtcatcttaccttgaggaacaagcggcgaaggagtttatagcatggttggtcaaggggcgtggacatggcgaaggaacttttacttcggacgtcagctcctatctcgaagaacaagctgcaaaggagttcatcgcgtggctcgttaagggtaggggtcatggagagggaacttttacctcggatgtctcgtcatacctcgaggaacaggcagcaaaggaattcatagcatggctggttaagggacgcggacacggggagggaacctttaccagcgacgtgtcctcatatctggaagagcaggccgcaaaagagtttatcgcatggttggtgaaagggcgcggtcatggggagggaacgttcacctcagacgtgagctcctatctggaagagcaggctgccaaggagtttatcgcgtggctggttaagggccggggacacggcgaaggaacctttacgtcggacgtttccagctacttggaagaacaggctgcaaaagagtttatcgcatggctcgtcaagggtcgggggcatggagagggcaccttcacgtctgatgtgtcctcataccttgaggagcaggcagctaaggagttcatagcctggctggttaaaggtaggggtcatggcgaagggacttttacctcagacgtctcttcgtacctcgaagagcaggcggcaaaggagttcatagcgtggctggtcaaaggtcgaggacacggcgaaggtactttcacttctgatgtctcgtcgtacctcgaagagcaggcagcaaaagaattcatcgcatggcttgtgaagggtcgtgggggaggtggcggcggaggctcagggggaggaggatcgggaggaggaggatccgcagaatcaaagtacgggccaccatgtcctccttgccctgcccccgaggccgcgggcgggccttccgtgttcctgtttccgcccaaacctaaagatacccttatgatttcgagaaccccagaagtgacttgtgtggtggtggatgtgtcccaggaagatcccgaagtccagtttaactggtatgtcgatggtgtggaagtccataatgccaagaccaagcctcgggaagaacaattcaactctacctaccgggtggtgtccgttcttaccgtgctgcaccaagattggcttaatggaaaggaatacaagtgtaaggtgtcaaacaagggtctgccatcctcaattgaaaagaccatttcgaaggccaaaggacagccaagagaaccgcaagtgtacaccctgccgccctcgcaagaagaaatgactaagaatcaagtgtcactgacttgcttggtcaaaggcttttaccctagcgacattgcagtggaatgggaatcgaacggccaacccgagaataactacaagactactcctccagtgcttgattccgatggttcgttttttctttactcaagactcactgtggataagtccagatggcaagaaggtaacgtcttttcgtgttctgtgatgcacgaagcccttcataatcattacactcaaaagagcctgagcctgtcccttgga

SEQ ID NO: 123989 - DNA, 1740 bp, Artificial Sequence
  derived and/or modified sequence
atgaagtgggtgtccttcattagccttctgtttcttttttcctcggcatactcaggcagcttggacaaacggcatggagaaggcacctttacctcggatgtgtcctcataccttgaggaacaagcggccaaagagttcatcgcttggctggtcaaaggacgagggcatggtgaaggcacttttacttccgacgtctcatcgtaccttgaagaacaggcagcaaaagagtttatagcctggttggttaaaggtagaggacacggtgagggtacgtttacgagcgatgtctcctcctacctggaggagcaagctgctaaggaattcattgcatggctcgtgaaggggcgcggccatggagaaggtacctttacctcagatgtctcatcatacttggaagagcaagcggctaaggagtttatcgcctggctcgtgaaaggtcgaggacatggtgaaggaacttttacctcggacgtgtcctcgtatctggaggagcaggcagccaaagaattcatagcatggctcgttaagggaagagggcacggtgaaggaacctttacgtcagacgtgtccagttaccttgaagagcaggccgcaaaagaattcattgcctggctggttaaggggagaggacatggagaggggactttcacctcggatgttagctcgtatctcgaagagcaggcagctaaagagtttattgcgtggttggtcaagggtcgcggacacggggagggcaccttcaccagtgatgtgagcagctacctcgaagaacaagccgcaaaggagttcatcgcgtggcttgtcaaaggtaggggtcatggcgaggggacgttcaccagcgacgtatcgagttacttggaggaacaggctgccaaggagttcattgcttggctggtgaaaggaagaggccacggtgagggaacttttactagcgacgtgtcgtcctatcttgaagaacaagcagcgaaggaattcatcgcatggctggttaaaggaaggggtggaggaggtggaggaggaagcggcggcggcggctccggaggaggtgggtcggccgaatcgaagtacggtccaccttgtcctccctgccccgcacctgaagccgcaggtgggccatccgtgtttctttttccaccgaagcctaaggacactctgatgatcagcagaaccccggaagtcacgtgtgtggtggtggatgtgagccaagaagatcctgaggtgcaattcaactggtacgtggacggcgtggaggtacacaacgcaaagactaagccacgggaagaacaattcaattcgacttaccgtgtcgtctcagtgcttaccgtgctccatcaagattggcttaacgggaaggaatacaagtgtaaggtttcaaacaagggactcccctcgtccattgaaaagaccatctcaaaggcaaagggacaaccacgtgagcctcaggtctacacccttccacccagccaggaagaaatgactaagaaccaggtgtcgctcacctgtctcgtcaagggcttttatccttcggacattgccgtggaatgggagagcaatgggcaacccgagaacaattacaagactacccctccagtgctcgattcagatggaagtttctttctctactcccgcctgactgtcgataaaagccggtggcaggaaggaaacgtcttttcatgctctgtgatgcatgaggcactgcataatcactacacgcaaaagagcctgtccctgtcccttggc

SEQ ID NO: 123990 - DNA, 1740 bp, Artificial Sequence
  derived and/or modified sequence
atgaaatgggtttctttcatttcacttctatttctgtttagtagcgcctattcaggttcgcttgataaaagacatggagaggggacgtttacgtccgatgttagttcatacctcgaagaacaagctgcaaaggaattcattgcctggcttgtcaaaggacgaggacatggagagggaacgttcacgtcagacgtttcatcatatctcgaagaacaagctgctaaagaattcatagcatggctggttaaaggcagaggccatggcgagggaacgtttacgtcagatgtttcatcgtacctggaagaacaagcagccaaagaattcattgcctggttggtgaaagggaggggacatggagagggaactttcactagtgatgttagtagctacctagaagagcaggcagcgaaagaattcattgcgtggcttgtaaaaggtcgagggcatggagaaggtactttcacttctgatgtttcgtcttacttggaagagcaagcggccaaggagttcatcgcctggttggttaagggacgaggacatggagaaggaacgtttactagcgatgtttcatcttaccttgaagaacaagcagcaaaagagtttattgcttggcttgttaagggcagaggacatggggaaggaacattcacgagtgatgtgtcaagctacctcgaggagcaggccgccaaggagtttatcgcttggttggttaaaggtcgcggacatggtgaaggaacattcacctcagatgtttcgtcgtatttggaagaacaagccgctaaagagttcattgcctggctggtcaaagggagaggacacggcgagggtacatttaccagtgatgtatcgtcgtaccttgaagaacaagctgcaaaggagtttattgcgtggttggttaaaggtcgaggtcatggagaaggaacctttacgtctgatgtttcatcttatcttgaagaacaagctgcgaaagaatttatagcgtggttggtcaaagggcggggaggtggaggaggaggaggctcaggaggtggtggaagcggaggaggaggatccgctgagtccaaatatggtcctccatgccccccgtgcccagcaccagaagcagcggggggcccatcagtgttcctgtttccacctaaaccaaaagatactcttatgatatcaagaactccggaggtcacttgcgtagtggtagatgtatcacaagaagatcctgaggttcagtttaattggtatgttgacggtgtcgaagttcacaacgcaaaaaccaagccacgtgaggaacaatttaatagtacttatcgcgtcgtttctgttcttacagtcctacatcaggattggctaaacggcaaagagtataaatgtaaagtttccaacaaaggattgccatcatcgatagagaagacaatcagtaaggccaagggccaacctcgggaacctcaggtgtacacgcttcctccatcgcaagaggaaatgaccaaaaatcaagtctcgttgacgtgtcttgtgaagggattctacccgtcggacattgctgtagagtgggagtcaaatggccaaccggaaaataactacaagactaccccgcctgtactcgattcagatggttcgttcttcctgtattcaagactcaccgtggacaaatcccggtggcaagagggcaatgtcttcagttgttccgtgatgcatgaagcactccataatcattacactcaaaaatccttatcgcttagtttggga

SEQ ID NO: 123991 - DNA, 1740 bp, Artificial Sequence
  derived and/or modified sequence
atgaagtgggtttcctttatctcactcttgttcctgttttcctcagcctacagcggatctctggacaagagacacggtgaaggcacatttacgagtgatgtcagcagctatctggaggaacaggccgctaaagaattcatcgcgtggttggtgaaaggtcgcgggcatggggagggtacctttacaagcgacgtgtcttcttatttggaggagcaggcagcgaaagagttcatcgcctggctggtaaagggtcggggacatggcgaggggacctttaccagcgatgtcagttcttacttggaggagcaggcggctaaggagttcatcgcctggctggttaaagggaggggccacggcgagggcacatttactagcgatgtgagctcttacttggaagagcaggctgcgaaggagtttatcgcatggctggtcaaaggcagaggccatggcgagggcaccttcacctcagatgtgtcttcatacctggaagaacaggccgctaaagaatttatcgcttggctcgtgaagggcaggggacatggtgaagggacatttacttccgacgtgtccagctatcttgaggaacaggcagccaaagaatttatcgcctggctggtgaaagggcgaggccatggggaagggacattcacgagcgatgtttcttcttacctggaagagcaagctgcgaaggagtttatcgcatggctcgtcaagggtcggggtcatggagaaggcaccttcactagcgacgtgagtagttatttggaagagcaggcagctaaagagttcatcgcttggctggtaaagggccgggggcacggcgagggcactttcacttctgacgtgtcatcatacctggaggagcaggcagccaaggaattcattgcttggctggttaagggaagagggcatggagaagggaccttcacctctgatgtgagttcttacctggaagagcaggcagcaaaggaattcatagcgtggctggtgaagggtagaggaggaggtggggggggtgggagcggagggggcggttcagggggcgggggctcagcagagtccaaatacgggccaccctgcccaccctgtcccgctcctgaggcagctggcgggccctccgtgtttctcttccccccgaagcccaaagatacactgatgatcagccggacaccagaagtgacttgcgttgtggtcgatgtatctcaggaggatccagaagttcagtttaactggtacgtggacggagtcgaggtccacaacgcaaagacaaagcctagagaagagcaatttaattccacctatcgcgtcgtgtctgtgctcaccgttctgcatcaagattggctcaatggcaaagagtataaatgcaaggtgagcaataaagggcttcctagctctatcgagaagactatatccaaagcaaaggggcagccaagggagccccaggtgtatactctccccccgtcacaggaggagatgacaaaaaaccaggtaagtctgacttgtctggtgaagggtttttacccgagcgacatagccgtggagtgggaaagcaatggccagccagaaaacaattataagactacaccacctgtattggatagcgacggatcattcttcctgtacagtcgactgactgtcgataaatccagatggcaggaaggcaatgtgtttagttgtagcgtaatgcacgaggctcttcataaccactacacacagaagtctctgagcctgagtctcgga

SEQ ID NO: 123992 - DNA, 1740 bp, Artificial Sequence
  derived and/or modified sequence
atgaagtgggtgagcttcatctcgctgctgtttctgttctcgagcgcctactccggatccctggataagcgccatggtgaagggaccttcacgagcgatgtatcatcatacctcgaggaacaggccgcaaaagaattcatagcatggcttgtgaaaggccgcggtcacggcgaaggcacttttacctcggacgtatcatcctacttggaggaacaagcagctaaggagttcatcgcttggctcgttaagggtagaggacatggcgaggggactttcacttcggacgtgagcagctacctggaggaacaggctgccaaggagtttattgcttggcttgtcaaagggcgggggcatggcgaaggcacctttacctctgatgtctcgagctatttggaggagcaggcggcgaaagagtttattgcctggctcgtgaaggggcgcggacacggcgaaggaacctttacctcagacgtgtcgtcgtatctggaagaacaggccgctaaagagttcatcgcgtggctggtcaagggacgtggccacggggaagggactttcacctcagatgtgagtagttacctggaagagcaggccgcgaaggaattcatcgcatggctggtaaagggccgaggacatggagaaggtacgtttaccagcgacgtttcctcgtatcttgaggagcaagccgctaaggaattcattgcatggttggttaagggacggggtcacggtgagggaactttcacttccgacgtgtcatcataccttgaggaacaggcagccaaggagttcattgcgtggctggtgaaaggtcgcggtcacggagaaggaaccttcaccagcgatgtgagtagctacttggaagaacaagcggccaaagagtttatcgcgtggttggtcaagggccggggacacggggagggaaccttcacttcagatgtcagcagctacctcgaggagcaggccgccaaagaattcatcgcctggctggtcaaaggaagagggggaggcggaggaggagggtccggaggaggcggctcaggtggagggggatcggccgaaagcaagtacggtccgccgtgtcctccgtgcccggcgcccgaggctgcaggaggcccgtctgtgtttctgttccctcctaagccaaaggacaccctgatgatctcgaggactcctgaagtgacgtgtgtcgttgtggacgtgagccaggaagatccagaagttcagttcaattggtacgtggacggtgtggaagtgcataacgcaaagaccaagccacgcgaagaacagttcaacagcacctaccgggtggtgtccgtgctcactgtccttcaccaggactggctcaatggaaaagagtacaagtgcaaggtgtcgaataaaggactcccctcctccatcgagaaaaccatctcgaaggccaagggccaaccgcgggagcctcaggtctacacgctcccaccgtcacaggaagaaatgactaaaaaccaagtgtccctgacctgcctggtcaaaggcttttacccgtcggacatcgcggtggagtgggaatcaaacggacaaccagagaacaactacaagactactcccccagtgctggactccgacggatccttcttcctgtactccagactcacggtggataagtcccgctggcaggaggggaatgtgttctcgtgctctgtgatgcacgaggcgcttcacaaccattacactcaaaagtcgttgtccctgtccctcggg

SEQ ID NO: 123993 - DNA, 1740 bp, Artificial Sequence
  derived and/or modified sequence
atgaagtgggtcagcttcatctcgctcttgtttctgttctcaagcgcatactcaggatccctggacaaaagacatggggaagggacctttacgtcagacgtttcatcataccttgaggaacaggcggcaaaggagtttatcgcctggttggtcaagggcaggggacatggcgagggcaccttcacttccgatgtgagctcgtacctcgaggaacaggcagccaaggagttcatcgcatggctcgtcaagggtcgcggacacggcgaaggaaccttcacgtccgacgtgagctcatatttggaagaacaagccgcaaaggaattcatcgcatggctcgtgaaggggcggggacacggagaaggaaccttcacctcagacgtttcctcatacttggaagagcaggccgcgaaagagtttatcgcatggctggtgaaaggacggggacacggagaaggaacctttactagcgatgtctcatcttatctggaagaacaggccgccaaggagttcatcgcgtggcttgtcaagggtcgaggacatggagaaggtacctttacctccgatgtctcctcctacctcgaagaacaggcagcaaaagaattcatcgcctggctcgtgaagggaaggggacatggagaaggaacctttacctcggatgtgtctagctacctcgaggagcaggccgccaaggagtttatagcctggctggttaaaggccgcggacacggggaaggaaccttcacgtccgatgtctcaagctatctggaggagcaagcggcaaaggagtttatcgcttggcttgtcaagggccggggtcacggtgagggaactttcacttccgatgtgagctcctacttggaggagcaagccgctaaggagttcatcgcatggctggtgaagggccggggacatggcgaaggcactttcacctccgacgtcagctcctaccttgaggagcaagcggccaaggagttcatcgcctggctggtgaaaggacgcggaggaggcggagggggcggatccggtggcgggggctcaggtggtggaggaagcgcagagtcgaagtacggacccccatgtccaccgtgcccggctccggaagcggcgggaggaccatcggtgttcttgttcccgccgaaaccgaaagacactctcatgatttcgagaaccccagaggtgacttgcgtggtggtcgacgtttcacaagaggacccggaagtgcagttcaattggtatgtggacggggtggaagtgcacaacgcgaaaactaagccacgcgaagagcaattcaactccacgtatcgcgttgtgtccgtcctgactgtcctccaccaagactggctcaatgggaaagaatacaagtgcaaggtgtccaataagggactgccgtccagcatcgaaaagactatctcgaaggccaagggccagcctcgggaaccgcaggtgtacacgctgcctccatcgcaggaggaaatgacgaagaaccaagtgagcctgacttgcctggtcaaaggattctacccttcggacatcgcggtggagtgggaatccaacggccaaccggagaataactacaagactacccctccggtcctggactccgacggatcgttttttctctacagccgcctcaccgtcgataagagcagatggcaagagggtaacgtgttctcctgcagcgtgatgcatgaggccctgcacaaccactacacccaaaagtcgctgtcgctttccctggga

SEQ ID NO: 123994 - DNA, 1740 bp, Artificial Sequence
  derived and/or modified sequence
atgaaatgggtgagcttcatcagcctgttgttcctcttctccagcgcgtattcgggatcactcgataaacggcatggagaaggaacgttcacctcggacgtctcttcataccttgaggagcaggccgcgaaagaattcatcgcgtggctcgtcaagggacgcgggcacggcgaaggaacctttacttccgacgtatcctcgtacctggaagaacaggccgccaaagagtttattgcctggctggtgaagggacgcggacatggtgagggcacgtttacctcggacgtaagctcctacctcgaagaacaagcggctaaagagttcatcgcatggctggttaaaggaagaggccacggcgaagggacttttacttccgatgtctcgtcttacttggaggaacaagcagctaaggagtttatagcatggttggtaaaggggcgcggacatggcgaaggcactttcactagcgacgtttcatcctacctggaggagcaggctgccaaggagtttatcgcgtggctggtcaagggtagaggccatggcgagggtaccttcacctcggatgtgtcgtcatatcttgaagaacaggctgcaaaagagtttatcgcctggcttgtgaagggacggggacacggagaagggactttcaccagtgatgtgtcgagttaccttgaggaacaggcggccaaagaattcattgcatggctcgtgaagggtcgggggcatggggagggcacctttaccagcgacgtctctagctaccttgaagaacaagctgctaaggagttcatcgcttggttggtgaagggtcgcggacacggagagggaactttcacgtctgacgttagctcctatttggaagagcaggcagcaaaggaattcattgcctggcttgtcaagggccgtggtcacggtgagggaaccttcacttcagatgtgtcaagctacctggaagagcaagccgcgaaggaattcatcgcctggttggtcaaaggtcgcggaggaggcggaggtggaggtagcggcggaggagggagcgggggcggcggatcagccgaatccaagtacggtccaccgtgcccaccttgcccggctcctgaggcggccggcggaccctcggtctttctcttccctccgaagccaaaggacactctgatgatctcccgcactccggaagtcacctgtgtggtcgtcgatgtgagccaagaggacccggaggtgcagttcaactggtacgtcgacggggtggaggtgcacaatgcaaagaccaaaccaagagaagaacagttcaacagcacttaccgggtggtgtcggtgctcactgtgctgcatcaggactggttgaatggaaaagagtacaagtgcaaggtgtccaacaaggggctgccgtcctccatcgaaaagaccatctcgaaggcgaagggacaaccgcgggagccacaggtgtacacgttgcctccctcccaggaagagatgaccaaaaatcaagtgtccctgacgtgtctggtgaagggcttttacccgtccgacatcgccgtggaatgggagtcgaacggtcaaccagagaacaactacaagaccacgcccccggtgctggacagcgatgggtcgttcttcctttactcaaggctgaccgtggataagtctaggtggcaggaaggcaacgttttctcgtgcagtgtcatgcacgaagccctgcacaatcactacactcagaagtcgctgtccctctcactggga

SEQ ID NO: 123995 - DNA, 1740 bp, Artificial Sequence
  derived and/or modified sequence
atgaagtgggtgtctttcatttcactactgttcctgtttagctccgcctactctggatcacttgacaagcgacacggcgagggtactttcacgagtgacgtgtccagctacctcgaggaacaggctgccaaagaatttattgcgtggctcgtgaaaggccgtgggcacggggaaggaacctttaccagtgatgtttcgagttatctggaggagcaggctgcaaaagaatttatcgcttggttggtcaaagggcgaggacatggagaaggcaccttcacatccgacgtgtcctcatatttggaggaacaggctgcaaaggaattcatcgcctggttagtcaaaggtagagggcatggggagggcacgtttacgtcggatgtgtcttcctatctcgaagagcaggctgcaaaagagttcatcgcttggctagtcaaaggcagggggcatggggaggggacatttacaagtgacgtgtcttcatatcttgaggaacaggcagccaaagagttcatagcttggttggtcaaagggcgaggccatggtgaaggcacatttacttccgacgtgtctagttacctagaggaacaggccgccaaagaattcatcgcctggctcgtgaaagggcgtggccatggggaagggacctttacctctgatgtctccagctacctcgaggagcaggcagctaaagagtttatagcttggctggtgaaagggcgcggccatggcgaaggaaccttcacttccgatgtctcctcttatcttgaggaacaggctgcaaaagaattcattgcgtggttggtcaaggggcgcggccatggagaggggacattcacctcagacgtgtcgtcttatctcgaggaacaagcggctaaagaatttatagcctggctcgtgaagggcagggggcacggagagggaacctttacatcggacgtgtctagctatctggaggagcaagcagccaaggaattcatcgcctggctagtgaaggggaggggaggcggaggaggaggagggtccggaggcggaggaagtggcggcggcggctccgctgaaagcaaatatgggcccccctgcccaccctgccccgcacctgaagccgcgggcggtccttctgtgtttctgtttcccccgaagcccaaagataccctaatgatttccaggacccccgaggtgacttgtgtagtcgtggacgtaagccaggaggaccctgaagtgcagttcaactggtacgtggatggcgtagaagttcataatgccaagacaaaacctcgagaagagcaattcaacagcacgtaccgggtcgtctcagttttaacagttctgcaccaggattggctcaatggtaaagaatacaaatgtaaggttagtaacaaaggcctgccatcgtctatcgagaaaactatcagtaaggctaaggggcagcctcgagagccccaagtttatactcttcctcctagccaggaggaaatgactaagaaccaagtctccctgacgtgtctcgttaaggggttttacccatcagatatagccgtggagtgggagagtaacggtcagccggagaataactataaaactactccccctgtgctcgactctgatggttctttcttcctctattctaggctgacagtagacaaaagtcgatggcaggaaggtaatgtgttttcttgcagcgtgatgcacgaagccctccacaaccattatacacagaaatctctatctttgagcctggga

SEQ ID NO: 123996 - DNA, 1740 bp, Artificial Sequence
  derived and/or modified sequence
atgaaatgggtgtctttcataagcctgttgtttctgttctcttctgcgtattctggatctctcgacaaacgacatggtgagggaacatttaccagtgacgtctcgagttatctcgaagagcaggccgcaaaagagtttatagcttggcttgtaaaggggcgcggccacggcgaggggaccttcaccagcgatgtctccagttacctggaggagcaggcagcgaaggagttcattgcttggttggtgaaaggccggggccatggtgaagggactttcacctccgacgttagctcttatttggaagagcaggccgccaaggagttcatcgcttggcttgtcaaaggccgggggcatggcgaggggaccttcacctccgatgtctccagctacctagaagagcaggcagctaaagagttcatagcctggctggtcaaggggcggggccacggcgagggcacatttacgagtgatgtcagtagttatctggaggagcaggctgctaaagagttcatcgcatggctggtgaaaggcagaggacacggtgagggaaccttcacctctgatgtaagctcgtatctggaagagcaggccgcaaaagaatttatagcatggctcgtcaaaggccgcggtcatggcgaagggaccttcacatcggatgtatcctcctatttagaggaacaagccgccaaggagtttattgcatggttggtcaagggacgcgggcacggcgaaggcacctttaccagcgatgtgtccagctaccttgaagaacaggctgcgaaagagttcatcgcatggctcgtgaagggtcgggggcacggagagggtacatttacttcagatgttagctcctacctagaggagcaagcagctaaggaatttatcgcttggctcgtgaagggccgagggcacggggaaggtacctttaccagtgacgtgtcatcctacctcgaagaacaggcggctaaggagtttatcgcatggctagtgaaaggacgaggaggagggggcggcggtggatcgggtggcggtgggagtggcggcggtggcagcgccgagagtaaatatggacctccctgtccaccctgtccagcccccgaagcagctggcggcccaagcgtgttcctgtttccccctaaaccgaaagatactctgatgatttcccgcacccccgaggtgacatgcgtcgtggtggatgtcagtcaggaagaccctgaggtgcagttcaattggtatgtagatggggtggaagtgcataacgctaagacgaagcctagagaggaacagttcaattccacctaccgtgtggtgtccgtgttaaccgtgcttcaccaggattggctcaatggtaaggagtacaagtgcaaggtctccaataagggattgccaagcagcatcgagaaaacaatcagtaaggccaaaggacagccaagagagccacaggtctatacgttgcccccctctcaggaggagatgacaaagaaccaggtttccttgacgtgtctggtgaagggcttttacccatcggacattgctgtggagtgggagagcaatggacagcctgaaaacaattacaaaacaaccccgcccgtcctcgactccgacggctcttttttcctgtactcacgcctcaccgtcgataagagccgatggcaggagggtaatgtattttcctgctctgtaatgcatgaggctttgcataaccactatacccagaaatccctctctctgagtctgggg

SEQ ID NO: 123997 - DNA, 1740 bp, Artificial Sequence
  derived and/or modified sequence
atgaagtgggttagcttcatatcactcctgtttctcttttcttctgcgtacagtggcagcctagataaacgccatggggaggggacctttaccagcgatgtgagctcctatctggaggagcaggctgcaaaggagtttatcgcgtggttggttaaagggcgtggtcacggagagggaacctttacgtccgacgtatcttcctatctagaggaacaggctgcgaaggaattcattgcctggctggtcaaggggcgagggcatggcgaagggaccttcacctccgatgtatcctcatacctggaagagcaggcggccaaagagtttatcgcctggctcgtgaagggtaggggtcatggagagggtacattcactagtgatgtgtccagctacttagaggagcaagcagcaaaggaattcattgcttggttagtaaaagggcgcgggcatggagagggaaccttcacaagtgatgtttcttcttatctcgaggagcaagcggccaaggagttcatcgcatggttggttaaagggagaggccacggggagggaacttttaccagtgacgtaagctcctacctcgaagaacaggctgcaaaagaattcatcgcgtggctagtgaaaggtagagggcacggggaaggcacattcacttccgatgtgtcaagctacctggaagagcaggctgctaaggaattcatcgcatggctcgtgaaaggccgaggccacggtgagggaacgttcacctcagatgtgagttcctacctggaagagcaggccgccaaggagttcattgcctggctcgtcaaaggacgcgggcacggggaaggcacatttacgtccgacgtatccagctatctcgaggagcaggcggcgaaagagttcatcgcatggctcgtgaaaggccgggggcacggagagggaaccttcacctccgatgtgtcatcgtatctggaggagcaagccgctaaggagtttatagcatggctagttaaaggccgtggaggtggcggcggagggggttccggtggcggagggtcaggtggcggagggagtgcggaaagcaagtatggaccgccctgtccaccttgtcctgcccctgaggcagcaggaggcccttcggtgtttctgtttccccctaaacccaaagacacactgatgatatctaggactcctgaagtgacatgcgttgtggttgacgtatcgcaggaagatcccgaggtccagttcaattggtatgttgacggcgtcgaggtgcataacgcaaagactaaacctcgagaggagcaattcaactctacataccgcgtcgtatcagttctgaccgtgcttcatcaggattggcttaatggcaaggagtacaagtgcaaggtctctaacaaagggttgccttcatctattgagaagacgattagcaaagccaagggccaacctcgggaaccacaggtgtacacactcccgcctagccaagaagagatgacaaaaaaccaagtctccttaacttgcttggtgaagggattttacccttctgatatagcagttgagtgggaatcaaatggacagccagagaataattacaagaccacaccgcccgtattggacagcgacggttcgttctttctttactcccgcctcaccgtagataaatccaggtggcaggagggtaatgttttcagctgtagtgttatgcacgaagctctgcacaaccactatacccaaaagtccttgtccttgtccctgggg

SEQ ID NO: 123998 - DNA, 1740 bp, Artificial Sequence
  derived and/or modified sequence
atgaagtgggtgtccttcattagcctgctgtttctgtttagctccgcttacagcgggagccttgacaagcgtcatggggaagggacctttacttccgacgtgagttcatacctggaggaacaagccgccaaggaattcattgcctggttggtcaaagggcggggccacggggagggcacctttacgagcgatgtttctagctatttggaagaacaggcggccaaggaattcatcgcctggttagtgaagggcaggggtcacggagaaggcaccttcacttcggatgtgtcctcttatttggaagaacaggcagcgaaggaatttatcgcctggctcgtgaaaggaaggggacacggtgaaggtacctttactagtgacgtatcatcctacctggaggaacaggctgctaaggagtttattgcctggctagttaaagggcgaggacatggtgagggaacttttacttcagacgtctctagctaccttgaagagcaagctgcaaaggagttcattgcctggctggtaaaaggacgaggtcatggtgaaggtaccttcaccagcgacgtaagttcatacctcgaagaacaggccgccaaggaatttatcgcttggctggtgaagggcagaggacacggcgaaggcacttttacgtctgatgtgagctcatacctggaggaacaggccgctaaggagttcatcgcctggctcgttaagggcagaggccatggggagggcacatttacgtccgatgtgtcatcttatctggaggaacaggctgccaaggaatttatagcgtggcttgtgaaagggagaggtcatggggaagggactttcacaagtgatgtgagtagttacctggaggagcaggcggcaaaagaattcatcgcgtggctggtgaagggacgaggccatggcgagggcacatttacatcagatgtgagtagttacctggaagagcaggccgccaaagaattcatagcttggctggtgaaaggtaggggcggcggcggtggggggggtagtggtggaggggggtctgggggaggaggaagcgctgaaagtaaatacgggccaccttgccccccatgcccggctccggaggccgccggaggtccaagtgtgtttctatttccaccaaagcccaaagataccctgatgatatcccgaaccccagaagttacgtgtgtggtggtcgacgttagccaggaagatcctgaggttcagttcaactggtacgtggatggagttgaggtgcacaatgcgaagactaaaccacgagaagagcagtttaattcgacatacagggtcgtgtctgttcttacagtgcttcaccaggattggctgaacgggaaggaatataaatgtaaagtcagtaacaaaggactgccatctagcatagaaaaaaccattagcaaggctaagggacagcctagagagccccaggtgtatacgttgcccccctcccaggaggaaatgacaaagaaccaggtaagtttgacctgcctagtgaaggggttctatccttccgacattgcggtggaatgggaatcaaacggccagcctgaaaacaattataagactactcctccagtactggatagtgacggatctttttttctgtattcccgacttactgtagacaaatccagatggcaagagggaaatgtattttcatgcagtgtcatgcacgaagccctccataatcactatacccaaaagagtctctccctaagtctcgga

SEQ ID NO: 123999 - DNA, 1740 bp, Artificial Sequence
  derived and/or modified sequence
atgaagtgggtgagctttatctctcttctttttctcttctcctcagcttactcgggatcgctggacaaaagacatggggaaggtacctttactagcgatgtgtccagctacctggaagaacaggcggccaaggaattcattgcgtggttggtaaagggtcggggtcacggcgaagggacgtttaccagcgacgtcagctcttacttggaggaacaagcagctaaggagtttatcgcctggctcgtaaagggaagaggccatggcgagggtacctttaccagcgatgtttcatcctaccttgaagagcaggcggctaaggaattcatcgcttggttggttaaaggccggggtcatggagaaggtacgtttacctccgacgtgtcgtcgtatctggaagagcaagcagcgaaagagttcattgcctggctggtgaaagggcgtgggcacggtgaaggcaccttcacttccgacgtaagcagctacctcgaagagcaggccgcaaaagagtttattgcatggcttgtcaagggacggggtcacggagaaggcactttcacctccgacgtctcgtcatacctcgaagaacaagcagcaaaggagtttatagcgtggctggtcaagggccgcgggcatggagaaggaacgttcacctcggatgtttcctcatacctcgaggagcaggccgcgaaggagttcatcgcctggcttgtgaaaggacgagggcatggcgaagggacctttacgagtgacgtctcctcctatctcgaagagcaagctgccaaggagtttattgcgtggcttgttaaaggacgcggtcacggtgaaggaactttcacgtctgatgtgtcctcataccttgaggaacaggcagcaaaagaattcatagcgtggttggttaagggccgggggcatggtgaggggacctttacctctgacgtttcctcatatctcgaggagcaagccgccaaagagtttatagcatggctcgtgaagggaagaggtggtggcggcggaggtgggagcggaggtggtggtagcggtggaggaggttcagcagaaagcaaatacggacctccctgtcctccatgcccagcacctgaagccgcaggcggaccgagcgtgtttctgtttccgcctaagcctaaagatactcttatgatctcgagaacccccgaagtgacgtgcgtggtggtggatgtctctcaagaagatcccgaagtccagtttaactggtacgtggacggggtcgaagtgcacaatgcaaagactaagccaagagaagagcagtttaactcgacctaccgtgtggtgtcggtgcttaccgtgctccatcaagattggttgaacggaaaggaatacaagtgtaaggtgtcaaataagggcttgccaagctccattgagaaaaccatttccaaggctaagggacaacctagagaaccccaggtgtacaccctgccaccgtcgcaggaagaaatgactaaaaaccaagtgtcgcttacttgtctggtgaaggggttctacccttcggatattgcagtcgagtgggagtccaacggacaacctgagaacaattacaaaactactccacccgtccttgattcggacggatcgttttttctgtactcacgacttactgtggataagtcaaggtggcaggaaggaaatgtgttcagctgttcggtcatgcatgaggcactgcacaaccattacactcagaaatcactgagcctgtccttggga

SEQ ID NO: 124000 - DNA, 1740 bp, Artificial Sequence
  derived and/or modified sequence
atgaagtgggtttcatttatcagtctgctttttttgttttctagtgcctactccgggagcctggacaaaagacacggagaggggaccttcacgtctgatgtgtcatcttacttggaggaacaagcagctaaagagttcatcgcctggcttgtgaaaggcaggggacatggggagggaaccttcacttctgatgtaagctcctatctggaggagcaggccgcaaaggagttcatagcctggctcgttaagggacgcgggcatggcgaaggcaccttcaccagcgacgtgtcaagttatctggaagagcaagctgcaaaagaattcatcgcttggttggtcaaaggccgggggcacggggaaggcactttcacttctgatgtatcctcctatctcgaagagcaagctgctaaagaattcatcgcctggctggtcaagggcaggggtcacggcgagggaacctttacctccgacgttagctcctacctggaggagcaggcagccaaggagttcattgcttggctagtcaaaggcaggggacatggcgagggcacatttacctccgacgtgagcagctacctggaagagcaagcagccaaggaatttattgcttggctggttaagggccggggccatggtgagggcaccttcacaagtgacgtgagctcctacttggaggagcaagccgcaaaggagtttatcgcatggctggtgaaagggcggggacatggagaggggacgtttacgtcagatgtgagttcctacctggaggagcaggccgccaaggagttcatcgcgtggctcgtgaagggacggggacacggcgaaggcacttttacttccgatgttagcagttacttggaagagcaggccgccaaagaatttattgcttggctggtgaaggggagaggccacggggagggcacgtttacttctgacgtctcctcttacctggaagagcaggcggctaaggagttcattgcctggttagtgaagggacgcggaggcggggggggcggcggcagcggtgggggcgggtccggcggcggcggtagcgccgagagcaaatatggtcccccttgcccaccctgtcctgcacctgaggcggccggcggcccaagcgttttcctgttcccaccgaaacccaaggacactctgatgatatccagaacccctgaagtcacatgtgttgtggtggacgtgtctcaggaagacccagaagtgcagttcaattggtatgtcgacggcgtggaggtccacaatgctaaaacgaagcccagagaggagcagttcaatagcacctatcgcgtggtgtccgtccttaccgtgctccatcaggattggctgaacgggaaggagtataagtgtaaagtttcaaacaaggggctgccatcttcaattgagaagacaatttccaaagccaaaggtcagccccgcgagcctcaggtatatacgctgccacccagtcaagaagagatgacaaagaaccaggtgagtctgacctgcctggtgaaagggttttaccctagcgatattgcggtcgagtgggagtctaacggccagccagaaaataattataaaactacaccccctgttttagatagtgatggttccttctttctgtattcccgtttgactgtggataagtcacgctggcaggaaggaaatgtcttctcttgttccgtgatgcacgaagctctccataaccactacacccagaaatccttaagcctgagtctcggc

SEQ ID NO: 124001 - DNA, 1740 bp, Artificial Sequence
  derived and/or modified sequence
atgaagtgggtctcattcatttccctcttgtttctgttcagctccgcctactccggtagcctggacaagaggcacggcgagggtactttcacctccgacgtttcctcttacctcgaggaacaggcggcaaaggaattcatcgcttggctggtgaagggaagggggcatggcgaaggcacgtttacatctgacgtatctagctatcttgaggaacaggcggccaaggaatttattgcttggctggtgaaaggaagaggccacggagagggaaccttcacatcagatgtgtcctcttacctcgaggagcaggccgccaaggagttcattgcgtggttggtaaaaggaagagggcatggggaagggaccttcaccagtgacgtttcatcctatctggaagagcaggctgcaaaggaattcattgcttggctggtcaaagggcggggacatggagagggaacatttacaagcgacgtgtctagctatcttgaagaacaggcagccaaagaattcatagcatggctggttaaaggaagagggcacggcgagggaacctttacctccgatgtttccagctacctggaggagcaggcagccaaagagttcattgcttggctcgtgaagggccggggccacggagaggggacatttacctcagacgtttcctcttaccttgaagaacaagcagctaaagaatttatcgcctggctggtcaagggtagggggcatggtgaaggtaccttcacaagtgacgtgagctcttacctggaggagcaggctgccaaggagtttattgcttggcttgttaagggtcgcggacacggagaggggactttcacctctgacgtttcatcctatcttgaggagcaggccgccaaggaattcatcgcttggttggttaagggccggggtcacggcgaagggacatttacctccgacgtgtcatcttaccttgaggaacaggcagctaaggagttcattgcctggctcgttaaaggacggggaggtggaggagggggcggctctggtggtggagggagtggaggaggaggcagcgctgaatctaagtacggccctccgtgccccccttgtcctgcccccgaagccgctggcggacctagtgtattcctctttccgccgaaacctaaggacacactcatgatatctcggacacctgaagtgacctgtgtcgtggtggacgtgagccaggaagatcccgaggtgcagttcaattggtatgtggatggcgtagaggtgcataatgccaaaactaagccgcgggaggagcagtttaactccacctatcgggtggtatccgtgctgacggtgctccatcaggactggctcaatggtaaggagtataagtgtaaggtttccaataaaggtcttccttcctctatcgaaaaaactatcagtaaggcgaaaggccagccacgcgaaccgcaggtgtatactctgcctccatcacaggaggaaatgacgaagaatcaggtgtctctgacttgcttggtgaagggcttctatccctctgacatcgcggttgagtgggagagcaatggacagcctgaaaacaactacaagaccacgcctcctgtcctggactccgatggttcctttttcctctacagtcgattgaccgttgataagtctagatggcaggagggaaacgtgttctcatgtagcgttatgcacgaagcccttcataaccattatacacagaagagtctttcactttccctcggc

SEQ ID NO: 124002 - DNA, 1740 bp, Artificial Sequence
  derived and/or modified sequence
atgaagtgggtgagcttcatcagcttgctgttcctcttcagctctgcatattccggtagtcttgataaacggcatggcgaaggtacctttacctccgatgtaagcagctacctggaagagcaagctgccaaagaatttatcgcctggcttgttaaaggaaggggacacggggagggcacctttacctccgatgtttccagctacctggaggaacaagcagcaaaggaattcatagcatggctagtgaagggacgtggccacggggaaggcactttcacctctgatgttagttcctacctcgaagaacaggctgctaaggagttcatcgcatggttggtgaagggcaggggccatggcgagggaacttttacttctgacgtgtcatcctacctggaagaacaggcggctaaggagtttattgcatggctggtcaagggaagaggccacggtgaaggcaccttcacaagcgatgtgtcatcatatctcgaagagcaggctgctaaagaattcattgcttggctggtgaaaggcagaggccacggcgaaggaacattcacttccgacgtcagcagctacctggaagaacaagctgctaaggaatttattgcttggctggtgaagggacgcggccacggagagggcacctttaccagcgatgtttctagctatctggaagagcaggcagctaaagaattcatcgcttggctggtgaaggggagaggccacggagaagggacctttacatcagatgtgtcaagctacctggaagagcaggcagcaaaagaatttatcgcttggttagtgaagggacgtgggcacggagagggcacatttacttccgacgtcagctcatacctcgaagagcaagcggccaaagaatttatcgcctggctcgttaagggacgcggacacggcgaaggcacctttacaagcgatgtttcttcttatcttgaggagcaggccgctaaggaattcatcgcctggttagtcaaaggccgagggggaggcggaggtggaggatctggagggggcggcagtggcggaggagggtctgctgagagtaaatacggcccaccatgtccaccatgccccgcacccgaggcagcaggaggacccagcgtctttctttttccgccgaagcccaaggacaccctcatgattagccgcacccctgaggtgacctgtgttgtggttgacgtcagccaggaagatcctgaggtgcaattcaactggtacgtggacggtgttgaggtccacaacgcgaagactaagccccgggaggagcagttcaactctacctatcgagttgtgagtgtgcttacggtgctgcaccaagactggctgaacggcaaggagtacaagtgtaaagtatcaaataaagggctgccaagttcaatcgaaaaaaccatctcaaaagccaaagggcagcctcgggagcctcaagtttacacccttccaccatcccaggaggagatgactaagaaccaagtctctctgacatgcctcgtaaagggattctatccttcagacatcgctgtggagtgggaaagcaacggacaacctgagaacaactacaaaaccacacccccagtgcttgacagcgatgggagtttctttctgtacagcaggcttaccgtggataagtcccgctggcaggagggcaacgtgttttcgtgctccgtgatgcatgaggccctccataaccattatacacagaagtccttgtcactgtccttgggc

SEQ ID NO: 124003 - DNA, 1740 bp, Artificial Sequence
  derived and/or modified sequence
atgaagtgggtttcgttcatctcactcctgttcctgttttcgtccgcctacagcggctcgctcgataagcgccacggtgaagggacgttcacgtccgacgtctcgagctacttggaggaacaggcagcgaaagaattcatagcctggctggtgaaaggacgtgggcatggagagggcaccttcacttctgacgtgtcgtcatatctggaggaacaggcggccaaggagttcatcgcatggctggtgaagggaagaggccacggagaaggaactttcacctcggacgtgagctcctacttggaagagcaagcagccaaagagttcatcgcgtggctcgtgaagggaaggggacacggagaggggacgttcacttccgatgtgagctcgtatctggaggaacaagccgcgaaggaattcatcgcctggttggtcaaaggacggggacacggagaaggaactttcacttccgacgtcagctcgtacctcgaagagcaggcggccaaagagtttatagcttggctcgtcaagggccggggtcacggtgaaggcacgtttacttcagatgtgtcatcatatctggaggaacaagcggcaaaggagttcatcgcctggctcgtgaagggaagagggcatggcgaaggtaccttcactagcgatgtgtcctcatatctggaagagcaggccgcaaaggagttcatcgcttggctcgtcaagggcaggggtcatggcgaaggcaccttcacctcagacgtgagctcgtaccttgaagagcaggctgccaaagaattcatcgcgtggctggtcaaaggtcgggggcacggtgaaggcaccttcacttcagacgtgtcgtcgtatctcgaagagcaagcggctaaggagtttatcgcctggctggtcaagggacgcggacatggagaaggaacttttaccagcgacgtctcctcctacctcgaggaacaggctgcgaaggaattcatcgcatggcttgtgaagggaagaggagggggcggagggggaggctccggtggtgggggatcggggggcggcggtagcgcagaatctaagtacggccctccgtgcccgccatgtccagctccggaagccgccggaggaccgagcgtctttctgtttcccccgaaaccgaaggacaccctgatgattagccgcacccctgaggtgacctgcgtggtcgtggacgtgtcgcaggaggatcctgaagtgcaattcaactggtatgttgacggagttgaggtgcataacgcgaaaaccaagccacgagaggagcagtttaacagcacttatcgcgttgtgtccgtgcttaccgtcttgcatcaggattggctcaatggaaaggagtacaaatgtaaagtctctaataagggactgccgtcctcaatcgaaaagactattagcaaagctaagggacagccccgggaaccgcaagtgtacaccctgccgccgtctcaagaagaaatgaccaagaaccaggtgtccctgacttgcctggtcaagggtttctacccctccgatatcgctgtcgagtgggaatcgaacggccaaccagaaaacaattacaaaaccactccacctgtgttggactccgatggatcattctttctgtactcgaggctcacggtcgacaagtccagatggcaggagggaaacgtgttctcgtgctcggtgatgcacgaagccctgcacaatcactacacccagaagtcactgtccctttccctgggc

SEQ ID NO: 124004 - DNA, 1740 bp, Artificial Sequence
  derived and/or modified sequence
atgaagtgggtgagttttatctccctgctctttctatttagttcagcatacagtgggtcactggataagcggcacggggaaggcacttttacatctgacgtgtcttcctacctggaggagcaggccgcgaaggagttcatcgcctggttggtgaaagggcgcgggcacggtgaaggtactttcaccagcgacgtctctagctacctcgaggagcaagctgctaaggagtttatcgcctggctagtgaaaggacggggacacggcgaaggaacctttacttcagatgtatctagctatctcgaggagcaggctgctaaagaattcatagcatggctggttaaaggtaggggccacggcgaggggacctttacgtcagatgttagctcctacctggaggaacaagcggccaaagagtttattgcctggctcgtgaagggaaggggccacggggaaggcacatttacctcagatgtgagcagttacctagaagagcaggctgcgaaggagtttatcgcctggctggttaaaggcaggggacatggcgagggcacctttacatcagacgtcagctcttatctggaggaacaggctgcgaaagaattcatcgcgtggttggtgaaagggcgcggccatggggaaggcaccttcaccagcgacgtttccagctatttggaagagcaggccgcaaaggagtttattgcctggttagtgaagggtcgcggtcacggcgagggcacgtttacctccgatgtaagctcctacctggaggagcaggcagcaaaagagttcatcgcctggctggtcaagggccgtggacacggtgagggcacttttacgagcgatgtgagctcctatcttgaagagcaggcagctaaggagttcatcgcatggctggtgaaagggagaggccatggtgagggcactttcacctcagacgtcagctcatacctcgaggagcaggctgcaaaagagttcattgcctggttggtcaaggggcgggggggcggaggaggaggaggcagtggaggtgggggctccggaggtggagggtctgccgaatctaaatacgggccgccgtgtcctccatgtcccgcgcccgaggcggcaggggggccaagtgttttcctattccctcctaaacctaaggatacccttatgatatccagaacccccgaggtcacatgcgttgtcgtagatgtgtctcaagaagacccggaggtacagttcaactggtacgtagatggcgtcgaggttcacaacgccaagacaaaaccgcgggaggagcaattcaactctacataccgagtcgttagtgtgctgaccgtgctgcatcaagactggttgaacggtaaggaatataagtgtaaggtttccaacaaaggcttacctagttctatagagaaaaccatctcaaaggccaaggggcaaccgcgtgagcctcaggtttataccctccctccaagtcaggaggaaatgaccaagaatcaagtttctctaacttgcttggtgaagggtttttacccttccgatatcgcagtggagtgggaaagtaacggtcagcctgagaacaactacaaaaccacaccccctgttcttgactcagatgggtcatttttcctgtattccaggttgaccgttgacaagtcccggtggcaggaagggaatgtgtttagctgttcggtgatgcacgaggctctgcataatcattacacacagaaatctcttagcctgtctctgggc

SEQ ID NO: 124005 - DNA, 1740 bp, Artificial Sequence
  derived and/or modified sequence
atgaaatgggtttcgtttatatcgttattatttctattttcgtcggcgtattcgggttcgttagataaacgacatggtgaaggtacgtttacgtcggatgtttcgtcgtatctagaagaacaagcggcgaaagaatttatagcgtggttagtaaaaggtcgaggtcatggtgaaggtacgtttacgtcggatgtttcgtcgtatttagaagaacaagcggcgaaagaatttatagcgtggttagtaaaaggtcgtggtcatggtgaaggtacgtttacgtcggatgtttcgtcgtatttagaagaacaagcggcgaaagaatttatagcgtggttagttaaaggtcgtggtcatggtgaaggtacgtttacgtcggatgtttcgtcgtatttagaagaacaagcggcgaaagaatttatagcgtggttagttaaaggtcgaggtcatggtgaaggtacgtttacgtcggatgtatcgtcgtatttagaagaacaagcggcgaaagaatttatagcgtggctagtaaaaggtcgtggtcatggtgaaggtacgtttacgtcggatgtttcgtcgtatttagaagaacaagcggcgaaagaatttatagcgtggctagtaaaaggtcgaggtcatggtgaaggtacgtttacgtcggatgtatcgtcgtatttagaagaacaagcggcgaaagaatttatagcgtggctagttaaaggtcgaggtcatggtgaaggtacgtttacgtcggatgtatcgtcgtatttagaagaacaagcggcgaaagaatttatagcgtggctagtaaaaggtcgtggtcatggtgaaggtacgtttacgtcggatgtatcgtcgtatttagaagaacaagcggcgaaagaatttatagcgtggttagtaaaaggtcgaggtcatggtgaaggtacgtttacgtcggatgtttcgtcgtatttagaagaacaagcggcgaaagaatttatagcgtggttagtaaaaggtcgaggtggtggtggtggtggtggttcgggtggtggtggttcgggtggtggtggttcggcggaatcgaaatatggtccgccgtgtccgccgtgtccggcgccggaagcggcgggtggtccgtcggtttttctatttccgccgaaaccgaaagatacgttaatgatatcgcgtacgccggaagtaacgtgtgtagttgtagatgtatcgcaagaagatccggaagtacaatttaattggtatgttgatggtgtagaagttcataatgcgaaaacgaaaccgcgagaagaacaatttaattcgacgtatcgtgtagtatcggtactaacggttttacatcaagattggctaaatggtaaagaatataaatgtaaagtatcgaataaaggtttaccgtcgtcgatagaaaaaacgatatcgaaagcgaaaggtcaaccgcgtgaaccgcaagtatatacgttaccgccgtcgcaagaagaaatgacgaaaaatcaagtttcgttaacgtgtttagttaaaggtttttatccgtcggatatagcggtagaatgggaatcgaatggtcaaccggaaaataattataaaacgacgccgccggtactagattcggatggttcgttttttttatattcgcgattaacggtagataaatcgcgttggcaagaaggtaatgtattttcgtgttcggtaatgcatgaagcgttacataatcattatacgcaaaaatcgttatcgttatcgttaggt

SEQ ID NO: 124006 - DNA, 1740 bp, Artificial Sequence
  derived and/or modified sequence
atgaagtgggtgagctttatcagcctgctgtttcttttttcgtccgcatactcaggctcgctggacaagaggcatggtgaggggacttttactagcgatgtgtccagctaccttgaagagcaagcagcgaaggagttcatagcctggttggtgaaaggtagaggtcatggagaaggcacttttacctccgacgtgtcgtcctacttggaagaacaagcggcaaaagaattcatcgcttggctggtgaaggggaggggacatggggaaggaaccttcacgagcgacgtttcgtcatacttggaggaacaagctgcaaaagagtttatagcatggctcgtgaaaggccgcggtcatggtgagggaacttttacttcggatgtcagctcttacctcgaggaacaagccgcgaaagagttcatcgcatggctggtcaagggccgaggacacggagaaggtacctttacttccgacgtctcatcgtacttggaagagcaggcagcaaaggaattcatcgcgtggctcgtcaagggtaggggacatggagaagggaccttcacctcggacgtttcctcgtatcttgaagagcaggctgctaaagaattcatagcatggcttgtcaaaggccggggacacggcgagggaacctttacctcagatgtgagctcctatcttgaagaacaggccgccaaagagtttatcgcgtggctggtgaaagggagaggtcacggtgaaggcacgtttacctccgatgtttcgagctacctcgaagaacaggcggcaaaggagtttatcgcttggttggtcaagggacgagggcacggcgaaggcaccttcacttccgacgtttcatcatatctggaggaacaggccgcaaaagagttcatagcttggcttgtcaagggaagaggccacggcgagggcacttttacttccgatgtgtcgtcttacctcgaagagcaggcggccaaggaattcatagcgtggttggtgaagggccggggtgggggtggtggcggaggttccggagggggaggatccggaggaggaggatcagccgaatctaagtacggtcccccttgtccaccatgtcctgcccccgaggcagccggaggtccatcggtctttttgtttccgcctaaacctaaggatacgctcatgattagcagaacccctgaagtgacttgtgtggtcgtggatgtgagccaagaagatcctgaggtgcagttcaattggtatgtggacggagtggaggtgcataatgcaaagactaaaccgcgtgaggaacaattcaattccacctaccgcgtggtgtcggtccttaccgtcctccatcaagattggcttaacgggaaggaatacaagtgcaaggtgtcaaacaagggactgccttcatccattgaaaagaccatttcgaaggcaaagggacaaccacgcgaaccacaagtgtacactctgcctccttcccaagaagagatgaccaagaaccaggtttctcttacgtgtctggtgaagggtttttacccttcagatattgccgtggagtgggaatcaaacggccagccggagaacaactacaaaacgacgccaccagtgcttgattccgatggttcctttttcctgtactcccggcttaccgtcgacaaatcgagatggcaagaaggtaatgttttctcatgcagcgtgatgcatgaagcacttcacaaccattacactcaaaagtctctctccctcagcctggga

SEQ ID NO: 124007 - DNA, 1740 bp, Artificial Sequence
  derived and/or modified sequence
atgaagtgggtgagcttcatttcgctcctgtttctgttttcgagcgcatattccggatcacttgacaagagacatggggagggaacgtttacgtcggatgtgagctcgtatctggaagaacaggctgctaaggagttcatcgcgtggctcgtgaaagggcgcggtcacggcgaaggtacttttacctcagacgtaagcagctaccttgaggaacaagcagccaaagagtttattgcgtggctggtcaaggggcgcggacacggagaaggcacttttacttctgacgtatcttcgtaccttgaagaacaagccgctaaggagttcatagcttggctggttaaaggtaggggacacggggaaggtacctttacttctgatgtgtcctcatacctggaggaacaggccgctaaagaattcattgcctggctggtgaaaggtcggggacatggtgaagggacctttacttctgacgtgtcaagttacttggaagaacaggcagcaaaggagtttatcgcttggttggtcaaaggccggggccacggcgaaggaactttcacctccgatgtatcatcctatctggaagagcaagccgcaaaagaattcattgcttggctcgtgaaggggcgtggacatggcgaaggaacttttacgtcggatgtctcaagctacttggaagagcaggccgcaaaggaattcatagcctggctggtgaagggccgggggcacggggagggcacttttacgtccgatgtgagttcgtatcttgaagagcaagcagcgaaagagtttattgcatggctggtcaagggaagaggacatggagagggcaccttcactagcgatgtgagttcctaccttgaagaacaggcagccaaggaattcatcgcctggttggtgaaaggacgtggtcatggggaggggaccttcacctccgatgtgtccagctacctcgaagaacaagccgcgaaggagtttatagcttggctggtgaagggtagaggcggtggaggaggtggtggatcgggtggcgggggtagcggaggcggaggatcggcggagtccaagtacggtcccccttgtccaccctgccccgcacctgaggcggcaggcggtccaagcgtgtttttgtttcccccgaaacctaaggacactcttatgattagccgaaccccagaagtgacttgtgtcgtggtggatgtgtcacaagaagatcctgaagtgcagtttaactggtacgttgacggcgtcgaagtgcataatgcaaaaacgaagccaagagaagagcagttcaactcaacctacagggtggtcagcgtcctcaccgtgcttcatcaggactggcttaacggaaaggaatacaaatgcaaggtgagcaacaagggactcccatcgtcgatcgagaaaaccatcagcaaggcaaaaggtcaacctagagagccacaagtttacaccctcccgccttcgcaagaagaaatgaccaagaatcaagtctcccttacctgtcttgtcaaggggttctaccccagcgacattgcggtggaatgggagtccaacggtcagcccgaaaacaattacaagactacgcctcctgtgctggattcggatggttcctttttcctctactcgagactgactgtcgataagtctcgctggcaagaagggaatgtttttagctgttcagtcatgcacgaagccctgcataaccattacacccaaaaatcactttcgctttccctgggt

SEQ ID NO: 124008 - DNA, 1740 bp, Artificial Sequence
  derived and/or modified sequence
atgaagtgggtctcctttatctccctgctattccttttttctagtgcctattctggctcactcgataagcggcatggtgagggaacctttacctcggatgtgagttcatatctagaggagcaggccgcaaaagaattcatcgcgtggttggtgaagggccgcggccatggcgagggcacgtttactagcgacgtgagctcctatctcgaggaacaggctgcaaaggaatttatcgcgtggttggtgaagggcagaggccacggagagggaacttttacttcggatgtctcaagctacctggaggagcaggctgccaaagaattcatcgcatggcttgttaaaggtaggggccatggcgagggcactttcacctccgacgtttcttcctacctggaagaacaggccgccaaagagttcatcgcctggctcgtgaaagggcgcggtcatggagaaggcacctttacatctgacgtgtccagctatctggaggaacaagcggcgaaagaatttatcgcttggctggtgaaaggacgaggtcatggggagggcacattcacctctgatgtatcctcatacctggaggaacaagcggccaaggagttcatagcttggctggtgaagggccgaggccatggcgaaggaacctttacctctgatgttagctcttacctcgaagagcaggccgctaaggagtttatcgcttggctggttaagggtcgaggccacggcgaaggcacctttaccagtgacgtttcttcttatctggaagaacaggccgctaaggagttcatcgcctggctcgtgaagggcaggggacacggcgaagggactttcacatctgatgtctccagctatctggaagagcaggctgcgaaagaattcatcgcatggctagttaaaggacggggtcatggcgagggtacttttactagcgatgtgtcaagttacctggaagaacaggccgccaaggagtttatcgcctggctagtgaaagggcggggcgggggggggggcggaggttcgggcggtggaggttcaggcgggggtggcagtgccgagagtaaatatggaccgccgtgtccaccttgtcctgctccagaagcagccggtggtccctccgtcttccttttccctcccaaacccaaggacactctgatgattagtcgcacccccgaggtaacctgtgtcgtggtggatgtgagccaggaggaccccgaggtccagttcaactggtatgttgatggcgtggaggtgcataacgctaaaaccaaaccccgggaagagcagtttaattccacatatcgtgtggtgagtgtgctaaccgtgctgcaccaggactggttgaacgggaaagaatataagtgtaaggtatctaacaagggcttgccctccagcattgagaaaactatctccaaagcgaaagggcagcctcgagaacctcaagtgtacaccctacccccttcccaggaagaaatgactaaaaaccaggtctccctgacttgtttagtcaaaggtttttaccctagtgacatcgccgttgagtgggagtctaatggccagccggaaaacaattataaaacaacccctccagtacttgactccgatgggtcatttttcttgtatagcaggttaactgtagacaaatctcggtggcaagagggcaacgttttctcctgttctgtcatgcatgaggccttgcataatcactacacccaaaagagccttagcctgtcgctgggg

SEQ ID NO: 124009 - DNA, 1740 bp, Artificial Sequence
  derived and/or modified sequence
atgaagtgggttagttttatcagtctgttattcctgttctctagtgcctactccggctctctggacaagcggcacggggagggtaccttcacaagtgacgtgtcaagttacctcgaagagcaggctgcaaaggagttcattgcatggctggtcaaaggcaggggacatggagaggggactttcacatcggatgtatcctcgtatctggaggaacaagccgccaaggagttcatagcatggttggtgaaaggacgaggtcatggggaaggaaccttcacaagcgacgtttccagctatcttgaagaacaggctgcgaaagagttcatcgcatggcttgtgaaggggagaggccacggggagggtactttcacgtccgacgtgtctagttacctcgaagaacaggctgcgaaagaatttatagcttggcttgtgaaaggccgggggcatggtgaaggtacattcacttccgatgtgagctcctatttagaagagcaggccgcaaaggaatttatagcgtggctcgttaagggccggggacatggcgagggaactttcacatctgacgtgtcttcctacttggaggagcaagcggccaaagagtttatagcatggttggtcaaagggcgcgggcatggagaggggactttcacaagcgatgtgtcttcttatcttgaggagcaggccgccaaagagttcattgcgtggctcgtgaagggacgcggccacggcgaaggaacatttacctccgatgtgagctcctacttggaagagcaggccgctaaggaatttatcgcctggcttgtgaaaggtaggggacacggggaaggaaccttcaccagtgatgtctcctcttacctcgaggaacaagctgctaaggagtttatcgcttggctggtcaaggggcgaggccacggcgaggggacattcacttcggatgtgtcctcgtatcttgaagaacaggcagcaaaggaattcatcgcctggttggtcaagggccggggaggcggaggcggagggggcagcggaggcggaggcagcggcggagggggtagtgcggagagtaaatatggtccaccatgccccccgtgtcctgccccggaagcagcgggcggaccctctgtcttcctctttccacctaagccaaaggacacactcatgattagtcgaactcctgaggttacatgtgtggtcgtagatgtgtctcaggaggatcctgaagtgcaatttaactggtacgttgatggagtcgaagtgcacaacgcaaagacaaaaccccgagaggaacaattcaacagtacctatcgcgttgtttctgtgctgaccgtgttgcatcaagattggctgaatggcaaagagtacaagtgtaaggtgtcaaataaggggctgccaagttccattgagaagactatatccaaggcaaaagggcagccaagggagccccaggtttatacactgcctcccagccaggaggaaatgaccaaaaatcaggtctccctcacttgcctggtaaaagggttttatccatccgacatcgctgtggagtgggaatccaatggacagcccgagaataattacaagaccacgccacccgttctggattccgatgggtccttctttctgtactcccgtctgacggtggataaaagtagatggcaagagggcaacgtgttttcgtgctcagtgatgcacgaggccctgcataaccattacactcagaagtctctgtctttatctttaggt

SEQ ID NO: 124010 - DNA, 1740 bp, Artificial Sequence
  derived and/or modified sequence
atgaagtgggtgagcttcatatctctgctgttcctgttctcgtccgcctactccggtagccttgacaagagacatggagagggtactttcacctcggatgtatcgtcatacttggaagaacaagcagctaaagagttcattgcgtggctcgttaaaggccgcggacatggcgaaggaaccttcacctctgacgtcagctcctacctcgaagaacaggccgccaaggagtttatcgcttggcttgttaagggtagaggacacggagagggaacgtttacctccgatgtgtcgtcgtaccttgaagaacaagccgcaaaggagtttattgcgtggctggtcaagggtaggggtcatggagagggaactttcacctcagacgtgtcatcctacctcgaggaacaagcagcaaaggaattcatagcctggttggtaaaaggccggggacacggtgaagggactttcacttccgatgtgagcagctaccttgaagagcaggcagccaaagagtttatcgcatggcttgtgaagggacgcgggcacggcgaaggaacgttcacttctgacgtgtcaagttacctggaggagcaggcggccaaggaattcatcgcctggctggtcaaagggcgggggcacggcgaggggacctttaccagcgatgtgtctagctatcttgaagagcaagcggccaaagaattcatagcttggttggtcaagggtcgtggccatggggaaggaacttttacctcggatgtctcgtcctacctggaggaacaggccgcgaaggaattcattgcctggctcgtgaagggtcgcggccatggagagggcacgtttactagtgacgtctcctcctacttggaggaacaagctgcaaaagaattcatcgcatggctggttaagggaagaggccacggagagggcactttcacgtcggacgtgtcgtcctatctcgaagagcaggctgctaaagagtttattgcctggctggtgaaaggacggggcggaggaggaggcgggggatcggggggaggagggtcaggcggtggagggtcggcggagtcgaagtacggacctccatgtcctccgtgcccagccccggaagcggccggcggaccgtcggtctttctgttccctccaaagccaaaggacaccctgatgatcagcaggacccctgaagtgacttgtgtggtggtcgacgtcagccaggaggaccccgaggtgcaattcaactggtatgtcgacggtgtggaggtgcacaacgccaaaaccaagcccagggaagaacagttcaattctacttaccgggtcgtctccgtgctgaccgtgttgcatcaggattggctcaacggaaaggagtacaagtgcaaggtgtcaaataaggggctcccctcaagcatcgaaaaaactatctcaaaggccaagggacagccgcgcgaaccgcaagtctacaccctgccgccaagccaagaggaaatgaccaaaaatcaggtgtcactgacttgcctggtgaagggattctacccgtcagacatcgcggtggagtgggaaagcaacggacagcctgagaataactacaagaccaccccgccagtgctcgatagcgatggatccttcttcctgtactcgcgcctgactgtcgacaagtcccggtggcaggaaggtaacgtgttctcgtgctcggtgatgcacgaagctctccacaaccactacactcagaagagtctgagcctctccctggga

SEQ ID NO: 124011 - DNA, 1740 bp, Artificial Sequence
  derived and/or modified sequence
atgaagtgggtgtcgttcatctccctgcttttcctgttctcaagtgcctattcgggatcgctcgacaaacgacacggggaaggaaccttcactagtgacgtgtcatcataccttgaagagcaggccgcgaaagagttcattgcgtggcttgttaaaggacgaggtcacggtgaggggactttcacttcggacgtgtcgtcgtacctcgaggaacaggcggccaaggaattcatagcatggcttgttaagggccgcggacacggcgagggcacctttaccagcgacgtcagctcttatctggaagagcaagcggcaaaggagttcattgcttggctcgtgaaggggaggggtcacggcgaaggcacgttcacttcggatgtgtcctcgtacctggaagaacaagctgcaaaagagttcatcgcctggctcgtcaagggtagaggccacggcgaagggacctttacctcggatgtcagcagctacttggaggaacaagctgccaaggagttcatcgcatggctggttaaaggccggggccatggagaggggaccttcacctcagatgtgtcgtcctaccttgaagaacaggcagcaaaagagtttatcgcttggttggtaaagggacgtggccatggagaaggtacgtttacgagtgatgtctcctcatacctcgaagagcaagccgctaaggagtttatcgcctggctggtgaagggtcggggccacggagaaggaacctttacctccgacgtgtccagctacctggaggagcaagccgccaaggagtttattgcctggcttgtaaagggccgcgggcatggcgaggggacctttacgtctgacgtgagctcgtatctcgaagagcaggctgctaaagaattcatcgcgtggctggtgaaaggtcggggacacggagagggtactttcacttctgatgtgagctcataccttgaggaacaggcagcgaaggaattcattgcctggttggtgaagggaagaggaggaggaggtgggggaggcagcggagggggaggatcgggaggaggaggctccgccgagtcgaagtacggaccaccttgcccgccatgcccagcgccagaggccgcgggaggcccgtccgtattcctgttccctccgaagccgaaagatactctcatgatctccagaactccggaagtgacttgtgtggtggtcgatgtctcgcaggaggacccggaggtgcagttcaattggtacgtcgacggtgtagaggtgcacaatgcgaaaacgaagccccgggaagagcagttcaactccacctaccgcgtggtgtcggtgctgactgtgctgcatcaggattggctgaacggaaaggaatacaagtgtaaggtgagcaacaaaggcttgccctcgtcaatcgaaaagactatctccaaggcgaagggacagccgcgcgagccacaggtctacaccctccctccctcacaggaggaaatgaccaagaatcaagtctccctcacctgcctggtgaaaggattctacccgagcgacatcgccgttgagtgggaaagcaatggacaaccagaaaacaactacaagaccactcctccggtgcttgacagcgacgggtcattcttcctgtactctcgcttgactgtcgataagtcaaggtggcaagaaggaaacgtgttctcctgctcggtgatgcatgaagcactgcacaaccattacactcagaagtcgctgtccctgagcctcggc

SEQ ID NO: 124012 - DNA, 1740 bp, Artificial Sequence
  derived and/or modified sequence
atgaagtgggtgtcattcatttcgctgctttttctttttagctcggcctactccgggagccttgataagcggcacggcgaaggcacctttacttcagatgtttcttcgtatcttgaggaacaggcagcaaaagagttcattgcctggctcgtgaaaggacggggacatggcgaggggacgtttactagtgatgtgtcgtcatacctcgaagagcaagccgccaaggaattcatcgcatggttggttaaggggaggggtcacggagagggcaccttcacttcagacgtgtcctcctatctggaagaacaggcggctaaggaattcatagcgtggttggtcaagggaaggggtcatggagagggtacctttacgtcggatgtgagctcctaccttgaggaacaagcagccaaagagtttatcgcatggctggtcaaaggccggggccatggagaagggacctttacctccgatgtgagctcgtaccttgaagagcaggcagcaaaggaattcattgcatggcttgtcaagggtcgcggtcacggcgaaggtacttttacctctgatgttagctcttacctggaggaacaggccgcgaaggagttcatcgcctggctcgtcaagggacgcgggcatggcgaaggcacgttcacttcggatgtgtctagctacctggaagaacaagcggccaaagaattcatcgcttggctggtgaagggtcgggggcatggagaaggaacctttactagcgacgtgtcatcatacctcgaggagcaagctgcaaaggagtttatagcatggcttgttaaagggagaggacacggagaagggacgtttacctctgacgtgtcaagttaccttgaggagcaggcagccaaggagttcattgcttggctggtaaaaggtcgcggacacggtgaagggacttttacttccgacgtcagctcatacctggaagagcaagcggcgaaagagtttattgcttggcttgtgaaaggacgtggtggaggaggaggcggaggttcgggtggaggtggatcagggggtggagggtcggcggaatccaagtacggacctccttgccccccgtgcccagcacctgaagccgcaggagggccgagcgtgtttttgtttcctcccaagccaaaggacaccctgatgatttccagaacccctgaggtcacctgtgtggtagtggatgtgtcgcaggaagatccggaggtccagttcaattggtacgtcgatggagtggaggtgcataatgcaaagaccaagccccgtgaagaacaattcaactcaacctaccgagtggtatccgttctgacggtcctccaccaggattggctgaacggaaaggaatacaagtgtaaagtctcgaacaagggcctgccatcgtcaatcgaaaagacgatctcgaaagcaaagggtcagcctcgagaaccacaagtctatactctcccaccttcacaggaggaaatgaccaagaatcaagtgagcctcacttgtcttgtgaagggcttttacccttcggacattgctgtggaatgggaaagcaacggtcaaccagaaaacaactacaaaactactcccccagtcctcgactccgacgggtcttttttcctgtactccagacttaccgtggataagtccagatggcaagaaggtaacgtgtttagctgttcggtaatgcatgaagcactccataatcattacactcaaaagtccttgtcactttcgctcgga

SEQ ID NO: 124013 - DNA, 1740 bp, Artificial Sequence
  derived and/or modified sequence
atgaaatgggtgagcttcatctcgctcctgttcctgttctcctctgcttactctggctccctggacaagcggcacggagaaggaacgtttaccagcgatgtctcctcctacctcgaagaacaggccgccaaggaattcatcgcctggcttgtgaagggacgcggtcatggtgaaggaacttttacctccgacgtttcttcttacctggaggaacaagcagccaaggaattcattgcctggctggtgaaaggcagaggacacggcgaaggcaccttcacgtcggacgtcagttcatatctggaagagcaggcagcgaaggaattcatcgcttggttggtaaagggaagagggcacggcgagggaacgtttacctcagacgtttcctcgtatttggaggaacaagcggcgaaggagtttatagcctggctggttaagggtcgcggccacggtgagggtaccttcactagcgacgtgtcgtcgtacctcgaagagcaagcagccaaagagttcatcgcttggctggtgaaggggcggggccatggcgagggtactttcacctcagacgtgtcatcgtacctggaagaacaggcggcaaaggagttcattgcttggctcgtcaagggtaggggacacggagagggaacttttacttcagacgtgtcatcatacttggaggagcaggcggccaaagaattcatcgcttggttggtcaagggacgcggacatggagaaggcactttcactagcgacgtgtcaagctacctcgaggaacaggcagccaaggagtttattgcatggcttgtaaaggggcgaggacatggggagggcaccttcacctcggatgtgtccagctacctggaagaacaagccgccaaagagttcatcgcgtggttggtgaagggaagaggtcacggagaggggaccttcacttcggacgtgagctcctatctcgaggaacaggcagcgaaagagtttatcgcatggctggtcaagggacgcgggggaggaggaggtggagggtcgggtggaggaggatctggcggaggaggcagcgctgaatccaagtacgggcccccgtgccccccatgcccggcccctgaagcggccggaggcccatcagtgttcctgtttccccctaagccgaaagatactcttatgatctctcggactccggaggtgacctgcgtcgtggttgatgtgtcgcaggaggaccccgaagtccagtttaactggtacgtggacggagtcgaggttcacaacgctaagaccaaaccgcgggaagagcaattcaactccacctaccgggtggtcagcgtcctgactgtgctccaccaggattggctgaatggcaaggaatacaagtgcaaggtgtcgaacaaaggcctcccgtcgtcgatcgaaaagaccatctccaaagctaagggacaacctagggagcctcaagtctacaccctgccaccatctcaggaagagatgacgaagaatcaggtgtcacttacttgtctggtgaaaggattctacccgtcggacatagcagtcgaatgggagagtaatggacaacctgaaaacaactacaaaaccactccgccagttctggattcggatggatcctttttcctgtacagccgcctgactgtggataaatcaagatggcaggaggggaacgtgttcagctgttccgttatgcatgaggctctgcacaatcattacacgcagaagagcttgagcctgagccttggc

SEQ ID NO: 124014 - DNA, 1740 bp, Artificial Sequence
  derived and/or modified sequence
atgaagtgggtcagtttcattagtctgttgtttctgttttcttcagcttactccggttccctggataagaggcacggggagggcactttcacctctgacgtgtcctcatacttggaggagcaggccgctaaagagttcatcgcttggctggtgaaggggaggggtcatggcgaggggacgttcacctctgacgtgtcaagctacctcgaggaacaggcggcaaaagagttcattgcctggcttgttaagggaagaggccatggtgaaggaaccttcacctccgatgtatcctcctatctggaggagcaggcggccaaggaattcatcgcatggctggtgaagggccgcggccatggcgaaggcacttttacttccgacgtgtcttcctacctggaggaacaagccgcaaaagagtttattgcctggctggtgaaagggcggggtcacggcgaggggacattcacgtctgacgtctcttcctacctggaggaacaggcggcgaaggagttcattgcttggttggtgaagggtcggggccatggagaaggcacattcacaagcgatgtctcctcctatctggaggaacaggcggcaaaagagtttatagcatggctggtcaaaggacgagggcacggggagggcacattcacaagcgatgtctcatcctatctggaagaacaggccgcaaaggagttcatcgcttggctggtgaaaggcagaggccatggcgaaggcaccttcacctccgacgttagctcatatctggaggagcaggccgctaaagagtttatcgcatggctggtcaaaggacgcggacacggagaaggcacctttacaagcgacgtgagctcatacctagaagaacaggctgctaaggaatttattgcatggcttgtcaaaggccgggggcacggtgaagggactttcacctctgacgtatccagctacctagaggaacaagccgccaaagagttcatcgcctggctggttaagggccgaggcggtgggggcggaggaggttccggagggggaggaagcggggggggaggatctgcggagtccaagtacgggcccccctgtcccccatgtcctgctcctgaggccgccggcgggccttctgtgtttctctttcctcccaagcctaaggataccctgatgatcagtcgcaccccggaggtcacctgcgtggtcgtcgatgtctctcaggaagatcctgaagtccagttcaattggtacgtggatggagtggaagttcacaacgcaaagacgaagccaagggaggaacagtttaactccacgtaccgggtggtatcagtgctgactgtactccaccaggactggctgaacgggaaagaatacaaatgtaaggtatccaataagggccttccgagtagtatcgaaaagacaatttctaaagcgaagggccagcctcgggagcctcaggtatacaccctccccccgtcgcaggaggagatgaccaaaaaccaggtatcactcacttgtctagtgaaagggttttaccccagtgatattgccgtcgaatgggagtccaacggacagccagagaataattacaagaccacccctccagttcttgatagcgacggttcttttttcttatattcgcgcctaacagtcgataaatcgaggtggcaggaagggaacgtgttctcatgctctgtgatgcatgaagctctgcataatcactatacccagaaaagcctaagcctttctctgggc

SEQ ID NO: 124015 - DNA, 1740 bp, Artificial Sequence
  derived and/or modified sequence
atgaaatgggtctcattcatatccctgttattcctattttcctccgcttattccggtagcttagacaaaagacacggagaaggtaccttcacttctgacgtatcttcataccttgaagagcaggctgcaaaggaatttattgcttggttagtcaaggggagaggtcatggtgaaggtaccttcacctctgatgttagttcctacttagaggaacaggcagccaaggagttcatcgcttggttggtcaaaggtcgtggacatggggaaggcactttcacgtccgatgtttcgagctatctcgaagaacaagctgcaaaggaatttatcgcatggttggttaagggacgtgggcatggggagggtacgttcacttcagatgtgtcaagctatctagaagagcaagcggctaaagaattcattgcttggctggttaagggaaggggtcatggggaaggtacttttacatccgatgtttcatcttatttggaggagcaggccgctaaggagtttattgcttggcttgttaaggggagaggacacggggagggaaccttcacttccgatgtgagctcttatttagaggagcaggcagccaaggaatttatagcttggttagtgaagggtaggggacatggtgaaggcacatttacatccgacgtatcatcttatctagaggaacaagccgctaaggagtttatcgcatggcttgttaagggacgtggacacggcgaggggacttttacctcagacgtgtcgagctatttggaggagcaggctgctaaggaattcattgcttggttagttaaaggaagaggacatggcgaagggacattcacgtccgatgtttcttcctacctcgaggagcaagctgcaaaggagtttatagcttggctcgtcaagggaagaggtcatggcgaggggacattcacatctgatgtttctagttatttggaggaacaggccgcaaaggagtttatcgcatggcttgttaagggtaggggcggtgggggaggcggcggttccggtggcggcggcagcgggggaggtggaagcgccgagagcaagtacggacccccttgtccaccatgtccggctcctgaagctgctggcggaccatccgttttcctcttccctccgaagcctaaggatactcttatgatttctcggaccccagaggtgacttgtgtagtcgtagatgttagtcaagaggacccggaagtgcagttcaattggtacgttgatggtgttgaagttcataacgcaaagaccaagcctagagaagagcaatttaactccacttacagggtggtgtcagttcttactgtattgcatcaggattggctgaacggaaaggaatataagtgtaaagtgtccaataagggactcccttcaagcattgaaaaaactatctctaaggcgaagggacagcccagggagcctcaggtctacacgcttcctcctagtcaggaagagatgactaagaatcaagtgtctttgacctgcctggttaaaggcttttatccatcagatattgctgtggagtgggaaagcaacggtcaacctgagaataattataaaacaactccgccagttctcgattcagacggttcgttcttcctttatagccgattgaccgttgataaatcacggtggcaggaaggaaacgtttttagctgcagcgttatgcatgaggcccttcataaccactacacccaaaagtcgctttcactatccctagga

SEQ ID NO: 124016 - DNA, 1740 bp, Artificial Sequence
  derived and/or modified sequence
atgaagtgggtatccttcatcagcttgctgtttctgttttcaagcgcttattccgggagtttggataagcgccatggagaaggaacgttcacctcagatgtcagctcttacctggaagaacaggccgctaaggagttcatagcctggctcgtgaaagggagaggccacggagagggcaccttcacctctgatgtgtccagctatttagaagaacaggcagccaaggagttcatagcctggctcgtcaaagggagaggtcacggcgaagggacctttactagtgatgtatctagctatctggaggagcaagcggctaaagagttcatcgcttggttggtcaaaggacgggggcacggagaagggaccttcacttcggatgtctcgtcctacctggaagaacaggccgccaaggagtttattgcatggctggtcaaaggtcggggacatggggagggaacctttaccagcgacgtgtcttcatacttggaagagcaggcagccaaggaattcatcgcttggcttgttaaagggaggggccatggcgagggcacattcactagtgacgtgtcctcctaccttgaagaacaggcagctaaggaattcatcgcatggttggtgaaaggacgcggtcacggcgagggcactttcacatcggacgttagctcttacctggaggagcaagctgccaaagagttcatcgcctggcttgtgaagggaagaggtcatggcgaggggacgttcacttcagatgtttcaagctatctggaggagcaggcggccaaagagttcattgcgtggttagtgaaggggcgcggacatggggaaggcaccttcacctcagatgtcagctcttatcttgaggagcaggcagcaaaagagtttattgcctggttggtcaaggggcgcggacacggcgagggcaccttcaccagtgacgtgagtagctatctggaggagcaggccgctaaggagttcatagcgtggctcgtgaaggggaggggaggcggggggggggggggatcaggcggaggcggctctggtggggggggtagcgctgaatcgaagtatggtccgccatgtccaccttgccctgctcccgaggccgctggtgggccatccgtctttctctttccccctaaacccaaggatacccttatgatctcacgtaccccagaagtgacctgcgttgtcgtggatgtctcacaggaagatcccgaggttcagtttaattggtatgttgacggtgtcgaagtgcataatgcgaagacaaagcctagagaggagcagttcaactctacatatcgggtggtgagtgtgctcactgtgttgcaccaggactggctcaatggaaaagagtacaagtgcaaggtgtccaacaaaggcctgccatcctccattgaaaaaacaatctcaaaagccaagggtcagccccgcgagccgcaggtgtatactctgcccccatctcaggaagagatgaccaaaaaccaagtctcgctgacttgtctggtgaagggattctacccctctgacatcgctgtagaatgggagtcgaatggacaacccgagaacaactataaaacgacccctccggttctggattctgacgggtcgtttttcttgtattctcggctgaccgttgacaagagcagatggcaggaaggaaatgtttttagttgcagcgtcatgcatgaagcactccataaccattacacacagaaatccctctctttgagcttagga

SEQ ID NO: 124017 - DNA, 1740 bp, Artificial Sequence
  derived and/or modified sequence
atgaagtgggtctcatttatcagccttttattccttttttctagcgcgtattcaggatcattagacaagcgacatggtgaaggtacgtttacatcagatgtaagcagctatctggaagagcaagccgctaaagaattcattgcctggttagtcaaaggccgtggacacggggaaggcaccttcacaagtgatgtcagttcatacttggaggaacaggccgcaaaagagtttatcgcgtggctggtcaagggacgtggccatggcgaggggactttcacgtctgatgtctcctcatacctcgaagaacaagctgctaaggagtttattgcgtggctggtaaaagggaggggtcatggagagggaacgttcacgagcgatgtctcttcgtacctagaggagcaagctgctaaggaatttattgcatggttagtgaagggacgcggtcatggagaaggaacttttacatcagacgttagtagctatctggaagagcaagcggctaaggaatttatcgcctggttggtaaaagggaggggacacggagaaggcacctttacctcagacgtctcaagctatctggaagaacaggcagctaaagaatttatcgcatggctggtcaaaggtaggggtcatggtgagggaacatttacatcggacgtttcaagctacttagaggaacaggcagcaaaggaatttatcgcatggcttgtgaaaggtcggggccatggagaaggtacatttacatcagacgtatctagctacttagaggagcaagcagctaaagaatttattgcctggcttgtaaaagggcgcggccacggagaaggaacgtttacaagtgatgtttcgtcatatctggaagaacaagcagctaaagaattcatcgcatggctcgtgaaaggacgcggccatggcgaagggacattcacatctgatgtgagcagctacctcgaagaacaagctgcaaaagaattcattgcatggttggtgaagggccgagggggagggggcggaggtggctcgggtggaggaggttcaggtggaggcggctctgccgagagtaaatatggtcctccttgccctccttgcccggctccggaagcggcgggaggtccttctgtgtttttgttccctcctaaaccgaaagatacattgatgattagccggaccccagaagttacatgtgtcgtggtggatgtgtcccaagaggatccggaagttcaatttaattggtatgtggatggagtggaagtccataatgcgaaaaccaagccacgtgaagaacaatttaattctacttatagggtcgtctccgtccttacagtcttacatcaggattggttaaatggaaaagagtataaatgtaaagtctctaataagggccttccgagtagtattgaaaaaacaattagcaaagcgaaaggacaacccagggaaccgcaggtgtatacgcttccaccatcccaggaggaaatgactaaaaaccaagtgtctttgacatgcctcgtgaagggtttctacccgagcgatatcgctgtcgaatgggagagtaatggacagccagagaataactataaaacgaccccaccagttctggactcggatggctcattttttctttattctcgcctgacagtggataaatcaagatggcaagagggtaatgtgttctcatgcagtgtaatgcatgaagcactgcataaccattatacacagaagtctttgagcctgtccctggga

SEQ ID NO: 124018 - DNA, 1740 bp, Artificial Sequence
  derived and/or modified sequence
atgaagtgggtgtcgttcatctcgctgctgttcctgttctcatcggcctactcgggaagcctggacaaacggcatggtgaggggactttcacgtccgacgtgtcgtcgtaccttgaagaacaagcagcgaaggagtttatcgcctggttggtgaaaggtcggggacatggcgaaggaaccttcaccagtgacgtatcctcctacctggaggagcaagccgccaaggagttcatcgcgtggctggtcaagggacgggggcacggagaaggaacctttactagcgatgtttcctcatacctcgaagaacaggctgccaaggagtttattgcgtggcttgtcaagggacgaggtcacggagagggcacgtttactagcgacgtgtccagttacctcgaggaacaagccgctaaagagttcatcgcttggttggtaaagggtcgcggacacggtgaagggaccttcacctccgatgtgtcgagctacctcgaagagcaggcggctaaggagttcatagcttggctcgttaagggaaggggacacggagaaggtactttcacctcagacgtttcttcgtatctggaagaacaggcggcaaaagagttcatagcatggctcgtgaagggccggggccatggtgaaggaactttcaccagtgatgtcagctcgtatcttgaggaacaagcggcgaaggaattcatcgcctggcttgtgaaagggcgcggtcatggagagggtacctttacctccgatgtttcgtcatacctggaggaacaggcagcaaaagagtttattgcttggctggttaagggtagagggcacggggaaggcacctttacttccgacgtctcttcttatctcgaggagcaggccgccaaggaattcattgcctggttggtcaaggggaggggtcatggagaaggcactttcacttccgacgtgtcatcgtacctggaagagcaggcagctaaagagtttatcgcatggctggtgaagggacgcggcgggggcggcggcggaggctcgggaggtggcggatccggcggagggggaagcgccgaatccaagtacgggcctccttgtcccccgtgccccgccccggaggccgcaggggggccgagcgtgttcttgttcccaccgaaaccaaaagacaccctcatgatcagccgcactccagaagtcacgtgtgtggtggtggacgtcagccaggaagatccggaggtgcagttcaactggtacgtggatggcgttgaagtccacaacgcgaaaaccaagccgagagaagaacagttcaactctacctaccgggtggtgtcggtgctgacggtgctccaccaagactggcttaatgggaaggaatacaagtgcaaggtgtcaaacaagggactgccctcctcgatcgaaaaaactatctctaaggctaagggacagccacgcgagccgcaggtgtacacgctgccgccgagccaggaggagatgactaagaatcaagtctcattgacctgcctcgtgaagggattttacccgtcagatatcgccgtcgagtgggaaagcaatggacaaccagagaataactacaaaaccacccctcctgtcctggactcggatggttcgtttttcctgtacagccgcctgactgtggacaagtcaagatggcaggaaggaaacgtgttctcctgctccgtgatgcacgaagcgctccacaaccattacacgcaaaagtccctgtccctgagcctcgga

SEQ ID NO: 124019 - DNA, 1740 bp, Artificial Sequence
  derived and/or modified sequence
atgaagtgggtttcttttatctccctgctcttcctgttttcgtccgcatactccggcagcctggataagcgccatggagagggtacctttaccagcgatgtatcctcatatctggaggagcaagcagcgaaggagtttattgcctggcttgtgaaagggcggggacatggagaaggcacttttacttcggacgtctcgtcgtacctggaggagcaggcagctaaagagtttattgcatggcttgtgaagggccgtggtcacggagaggggactttcacctcggacgtctcctcataccttgaggagcaggccgccaaagagtttatcgcatggctggtaaaggggcgggggcatggcgagggcacgtttaccagtgatgtttcgtcgtacctcgaggaacaagccgcgaaagagttcattgcatggttggtgaagggtcgcggacatggggaggggaccttcaccagtgacgtgagcagttacctggaagaacaggctgccaaggaattcatcgcgtggctcgtcaaagggagaggccacggtgaaggaacgtttacgtccgacgtgtcatcataccttgaagaacaagcagcgaaagaattcatagcctggctcgtaaaaggaaggggacacggcgagggaacttttacctcggatgtctcctcatatcttgaagaacaggcagcaaaagaattcatcgcctggctcgtgaaggggcgagggcatggagaagggacctttacctcagacgtgtcatcctacctggaggaacaagcagcaaaggagtttatagcttggctcgttaagggaagagggcacggagaaggaacctttacttccgatgtcagctcgtatctcgaagaacaggccgcgaaggagttcatcgcttggttggtcaaaggcagaggtcacggtgaaggcacgtttacttctgacgtcagctcgtacctcgaagagcaagctgcaaaggaattcattgcctggttggtgaaaggacgaggcggtggagggggtgggggctccggtggcggcggttcaggaggaggaggatcagccgaatcgaagtacgggccaccttgtcctccctgccctgcacccgaagcagctggtggtccatccgtgtttctttttccgccaaagccaaaggatactctcatgataagcagaacccctgaggtgacttgtgtcgtggtcgacgtctcacaagaagatcctgaagttcaattcaattggtacgtggatggagtggaagtccataatgcaaaaaccaagccgcgtgaagagcagtttaactcaacctaccgggtcgtgagcgtgctgaccgttcttcatcaagattggcttaacggcaaggaatacaagtgtaaagtgtcaaacaagggacttccctcgtctattgaaaaaactatttccaaggcaaaaggacaaccacgcgagccccaagtgtacaccctgccaccatcacaggaagaaatgactaagaaccaggtgagcctgacctgccttgttaagggcttttaccccagcgatattgcagtggaatgggaatctaacggtcaacctgagaataactacaagactaccccacctgtgctcgactctgatggctcgtttttcctgtacagcagactgactgtcgataagtcccggtggcaggaaggtaatgtgttctcgtgctccgtcatgcatgaagcgctgcataaccattacacccagaagtccctgtcgttgtcccttgga

SEQ ID NO: 124020 - DNA, 1740 bp, Artificial Sequence
  derived and/or modified sequence
atgaaatgggtcagtttcataagtctcctgttcttattcagctctgcgtacagtggctctctggacaagcggcacggtgaagggacattcactagcgatgtgtcatcctatctggaagagcaggccgccaaagagtttattgcctggctcgtaaaggggcgcgggcacggggagggaacattcacatccgatgtgagctcttatctggaggagcaagccgccaaagagtttatcgcctggctggtcaagggtagaggacatggggaaggtacttttacctctgacgtgagttcttatttagaggagcaggctgccaaggagtttatcgcctggcttgttaagggccgggggcatggagaaggaaccttcactagcgatgtgtccagctacctggaggagcaggcagccaaagagtttattgcatggctagtgaaagggaggggtcacggggagggtacatttacgagtgatgtctcctcctacctagaggagcaggcagcaaaggagttcatcgcatggctcgtgaaaggcagaggacacggagagggtacattcacgagtgatgttagctcatacctggaagagcaggcggccaaggagtttattgcttggttggttaagggtcgaggtcatggagaaggtacttttacctccgacgtaagcagttacctggaagaacaggccgcaaaggagttcattgcctggctggttaaggggaggggccacggagagggcacgttcaccagcgatgtaagcagctacctggaggaacaggccgccaaagagtttattgcttggcttgtcaaagggaggggacacggagagggtacatttacgtctgacgtctcgtcttacctggaagagcaagctgcgaaagagttcatcgcgtggctggttaaagggcggggacacggtgaaggcaccttcacctcagatgtgagttcctacctcgaagaacaagcggctaaggagtttatcgcatggctggttaaagggcgtggtggtggtgggggcgggggcagcggtggggggggctctggtggcggcggatccgcggagagcaagtatgggcctccctgccctccgtgccctgcccctgaggcagccggggggccgtcagtctttctcttcccacccaagccaaaagataccctgatgatatccagaactcctgaggtgacctgcgtggtagtggatgtgtcacaggaagacccggaagttcagtttaattggtatgtggacggggtggaggtacataacgccaagacaaagccgagggaggagcagttcaacagtacctaccgagttgtgagcgtgttaactgtgctccatcaggattggctgaacggtaaagagtataaatgtaaagtgagtaataaggggcttcctagcagtatcgagaagacgatttctaaggctaaggggcaaccgagagaacctcaggtctataccttaccaccatcccaggaggaaatgacaaagaatcaggtctcccttacttgcttggttaagggattttacccatctgatattgctgttgaatgggagagtaatggtcagccagagaataactataagactaccccacccgtgttggattctgatggttctttttttctatattcccgcttgaccgttgataagtcgagatggcaggagggaaatgtattctcctgttcagtcatgcatgaagccctgcacaaccattacactcagaaaagtctctcactcagcctgggt

SEQ ID NO: 124021 - DNA, 1740 bp, Artificial Sequence
  derived and/or modified sequence
atgaaatgggtgagcttcatctcactcctcttcctcttctcgagcgcctactcgggatcactggataagcgacatggggaaggaacttttacctccgatgtctcctcttacctggaagagcaggcagctaaagagttcattgcctggcttgtgaagggacggggccacggcgaagggacttttacctcagatgtatcctcctacttggaggagcaggccgctaaagaattcatcgcatggcttgtcaaaggacgcgggcacggtgagggaacttttacgagcgacgtgagctcgtacctggaggaacaggccgcaaaggagtttatcgcctggctcgtgaaggggcgcggccacggagagggaaccttcacctccgatgtatcaagctatctggaggaacaagcagcgaaggaattcatcgcctggctggtcaaggggaggggacatggtgaggggaccttcaccagcgacgtgtcaagctacctggaagaacaggccgccaaagaattcatagcgtggctcgtcaagggacgcggacacggcgaaggcaccttcacctcagacgttagtagctaccttgaagaacaggcggccaaggaattcattgcgtggttggtaaagggacgggggcacggtgaaggcactttcacttccgacgtgtcctcttacctcgaagaacaggcagcgaaggagttcatagcctggctggtgaaaggcagaggccatggcgagggtaccttcacttcggatgtgtcgtcctaccttgaggaacaagctgctaaggagtttatagcgtggttggtcaaaggacggggtcatggtgaagggacgtttactagcgatgtctcgtcgtatctcgaggagcaggcagcaaaggagttcattgcttggctggtgaagggaagaggacatggagagggcactttcacctccgacgtctcatcataccttgaagagcaagccgctaaggagttcatcgcttggctggttaaaggacgcggaggaggaggtggaggaggatccggaggagggggatcggggggtggcggcagtgcggagtcgaagtacggcccaccatgcccgccctgccccgcgccggaggccgccggaggcccttccgtgttccttttcccaccaaaacctaaagacacgttgatgatcagccgtactccggaagtgacctgcgtggtggtcgacgtgtcgcaagaagatccagaagtgcaattcaattggtacgtggacggggtcgaggtgcataacgcaaagaccaagcccagggaagaacagttcaattcgacttaccgcgtggtttcggttctcactgtcctgcaccaagactggctgaatggaaaggaatacaagtgtaaggtgtccaacaagggactcccgtcctcgatcgaaaagacgatctccaaggccaaaggacagccgcgggaacctcaggtgtacacgctgcctccgtcgcaggaagaaatgactaagaaccaggtgagcctgacttgtctggtgaaggggttctacccgtctgatatcgccgtggagtgggagtctaacggccagccggaaaacaactataagactaccccaccggtgctggactccgacggatcgtttttcctctactcgagactgaccgtggacaagtctaggtggcaagaaggtaacgtcttttcatgcagcgtgatgcacgaggcgctgcacaatcactacactcaaaaatcgctcagcttgtcccttggc

SEQ ID NO: 124022 - DNA, 1740 bp, Artificial Sequence
  derived and/or modified sequence
atgaaatgggtctcttttatctccttgcttttcttgtttagctctgcttactccggctctctggacaagaggcatggtgaaggcacattcacgagcgatgtgtctagttatctcgaagagcaggccgcgaaggagttcatagcttggctcgttaagggccgcggacatggagaaggaaccttcacctccgacgtatctagttaccttgaggagcaggctgccaaggagttcatagcgtggctggtgaagggacgcggccatggcgagggcacattcacctcagacgtgtcaagctacctcgaggaacaagccgccaaggaattcatcgcttggcttgtcaaaggtagaggccacggtgaaggtactttcacttctgatgtgtcttcatacctcgaagaacaggctgctaaggagtttattgcttggttggtcaagggtaggggccatggcgagggtacattcacctccgatgtaagcagctacctggaggagcaggctgcgaaggagtttatcgcctggcttgtgaagggcaggggacacggtgagggaactttcactagtgacgtgtcttcctaccttgaggagcaagcagcgaaagagttcatagcttggctcgtgaaaggaaggggacacggtgagggcacattcacgagcgacgtgtcttcctatctcgaggaacaggccgccaaggagttcatcgcatggcttgtcaagggaaggggtcacggagaaggaacttttacaagcgacgtgtcatcttaccttgaggagcaagctgccaaagaatttatcgcttggctcgttaagggaaggggccacggcgagggcaccttcacctccgatgtaagctcatacctggaagaacaggcagcaaaagaattcatcgcttggctcgtgaagggtaggggccatggtgaaggaacatttacttcagatgtcagtagttatctggaggagcaggcggccaaggaattcatcgcttggttggtcaaaggcagaggaggcggtggcggtggaggatccggtggcggtggttctggcggtggcggaagcgctgaatccaaatacggtccaccctgccctccatgcccggcaccagaggcggctggaggtccatccgtgtttttgttcccgccaaagcctaaggataccctgatgatttctagaactccagaagtcacttgcgtcgtggtagacgtctcccaggaggacccagaggtgcagttcaactggtatgtcgacggtgtcgaggtccataatgctaagactaaaccaagggaggaacagtttaactccacatatagagtcgtgtccgtactcaccgtgttgcatcaagattggctgaatggcaaggaatacaagtgcaaagtctctaacaaaggactgccgtctagcattgaaaagacgatcagtaaggctaagggacagccgagagagcctcaggtgtatacactcccacctagccaggaggaaatgactaaaaaccaagtatccctgacctgcctcgtgaaaggattctatccgtccgatattgcagttgagtgggagagtaatggccagccagagaacaactacaaaaccacgccgcccgtgctcgactctgatggtagcttctttctgtattcacgccttactgtggataagtctagatggcaggagggtaatgtgttctcctgctctgtcatgcatgaggcactgcacaatcactatactcaaaagtccctgagcctctctttgggt

SEQ ID NO: 124023 - DNA, 1740 bp, Artificial Sequence
  derived and/or modified sequence
atgaaatgggtatcgtttatatccctcctgtttctgttctcaagtgcatacagtggaagtcttgataaaaggcacggggagggaacttttacgtctgacgtttcgtcctatttggaagaacaggcagcaaaagagttcattgcctggctcgtaaaagggcggggacatggggaagggactttcacttccgatgtgtcgtcatatctagaagaacaggccgccaaagaattcattgcttggttagtcaaagggcggggacacggggaaggaacatttacttcagatgtgtcttcctatctcgaagagcaggctgcaaaagaattcatcgcttggcttgtcaaaggacgaggacacggagaggggacattcacatctgatgtttcatcttatttggaagaacaggcagccaaggaattcatagcctggctagtgaaagggaggggacatggagaaggaacattcacaagtgatgtttcttcttacctcgaggaacaggctgctaaagaattcatagcctggctggtaaaagggcgagggcatggggaagggacatttacatccgatgtgtcatcatatctagaggaacaagctgcaaaagaatttattgcttggctcgtcaaaggacggggacatggagaagggacattcacatctgatgtctcttcatatctggaagaacaggctgccaaagaattcatcgcctggctggtgaaggggagggggcatggggaagggactttcacttccgatgtatccagttacctggaagaacaggccgctaaagaatttattgcatggttggtaaaggggaggggacatggagaaggaacattcacgagtgatgtgtcatcgtacctggaagaacaggctgctaaagagttcatcgcctggttggtgaaaggacgggggcacggggagggaacattcacatctgatgttagttcttatctggaagaacaggccgcgaaagagttcatcgcttggcttgtgaaagggcgggggggagggggggggggggggtctgggggaggaggatctgggggaggaggaagtgctgaatcaaaatacgggcccccctgtcccccatgcccagcccctgaagccgccgggggaccttctgtatttctctttcctcccaagcccaaagatacactgatgatctctaggacacctgaagtgacatgtgtagtcgtggatgtgtcacaggaagatccagaagtgcagtttaattggtatgttgatggagtggaagtgcataacgctaaaactaaaccccgagaagaacagtttaactccacatacagagtggtatctgtgcttacagtgctccaccaagactggctcaatggaaaagagtataaatgtaaagtctcgaataaaggactcccctcctccattgaaaaaacaatctcaaaagcgaaaggacaacccagggaaccccaggtatatacactccctccctctcaggaagaaatgacaaaaaaccaggtttctcttacttgccttgtcaaagggttttacccctcagatatagctgttgaatgggaatctaatggacagcccgaaaataactataaaactacaccccccgtactagattcagatggatcattttttctttattctagactcactgtggacaaatcccggtggcaggaagggaacgttttttcctgcagtgtgatgcatgaagctctacataatcattacacgcagaaatctctttctctgagtctcgga

SEQ ID NO: 124024 - DNA, 1740 bp, Artificial Sequence
  derived and/or modified sequence
atgaaatgggtcagttttatcagtctgctttttctcttttcctcagcatatagtggatctctagataagcggcatggagaaggaacatttacatccgatgtatcatcatatttggaagagcaggctgctaaggagtttatcgcctggttagttaagggaagggggcatggagaaggaacattcacttccgatgtgtcaagttatctagaagagcaggccgccaaagagtttatcgcctggctggtgaaggggcgaggacatggggagggaactttcacatcggatgtttctagttatcttgaggagcaggctgccaaggaatttattgcgtggctcgtgaaagggagggggcacggagaggggacttttacatctgacgtaagtagttacctcgaagaacaggcagcgaaggaattcatcgcatggctcgtcaaaggaagaggacatggggagggaacatttacgtctgatgtgtctagttatctggaagaacaggcggcaaaagaattcatcgcatggctggttaaaggacgcggacatggggaaggaacttttacttctgatgtgagttcttacctcgaagaacaggccgccaaagagttcatagcctggttagtgaaaggaagagggcatggagaggggactttcacatccgacgtaagttcctatctggaagaacaggcggcaaaagaattcatcgcttggctggtcaaaggacggggacacggggagggaactttcacatctgatgtatcctcataccttgaagaacaggcagccaaagaattcatagcctggctggtcaaagggcggggacacggggagggaactttcacatccgatgtgtcaagttatctggaagaacaggccgccaaggagtttatagcttggctggttaaaggaagaggacacggggaggggacttttacttccgatgtcagttcctatctggaagagcaggccgccaaagaattcatagcctggctcgttaaagggcgcgggggaggaggggggggaggatccgggggaggagggtctggaggaggaggaagtgctgagtctaaatacggacctccatgcccaccatgtcctgcccctgaagcagcgggagggccttccgtttttctgttccccccaaaacctaaggatacactgatgatctcaagaacaccagaagtaacttgtgtggtggtggacgtttcacaagaggatcccgaagtgcagtttaattggtatgtggatggggtcgaggtacacaatgccaaaactaaaccccgcgaagaacagtttaacagtacttatcgggtcgtatccgtactcacagtgctacatcaggattggctcaacggaaaagaatataaatgcaaagtgtcaaataagggactgccaagttccatagaaaagactatctccaaggccaaggggcagccacgggagccacaggtctatacactccctcccagtcaggaagaaatgacaaagaatcaggtgtctttaacatgccttgtaaaaggattctacccctcagacatagcagtcgaatgggaaagtaacgggcagcccgagaacaattataaaactacacccccagtgttggattctgatgggagtttctttttatattccaggcttactgtagacaaaagtagatggcaggaggggaacgtgttcagttgctctgttatgcatgaagccttacacaaccactatacacagaaatcactttccctcagtctgggg

SEQ ID NO: 124025 - DNA, 1740 bp, Artificial Sequence
  derived and/or modified sequence
atgaaatgggtatctttcatttcattattatttttattttcatcagcatattctggatctttagataaaagacatggtgaaggaacatttactagtgatgtttcatcatatttagaagaacaagctgctaaagaattcattgcatggcttgtaaaaggaagaggacatggagaaggaactttcacttctgatgtttcttcttatttggaagaacaagcagcaaaagaattcattgcttggttggttaaaggacgtggtcatggagaaggaactttcacatcagatgtttcatcatatttagaagaacaagcagcaaaggaatttattgcatggttggttaaaggtagaggacacggagaaggaacttttacatctgatgtatcatcatatttagaagaacaagcagcaaaagaatttattgcatggttagttaagggtagaggacatggagaaggaacatttacttcagatgtttcatcatatcttgaagaacaagcagccaaggaatttatagcttggcttgtgaaaggaagaggacatggagaaggaacatttacaagcgatgtttcatcgtatttagaagaacaggctgcaaaagagtttattgcatggttagttaaaggaagaggacacggagaaggaacttttacttcagatgtttcatcatatttagaagagcaagcagctaaagaatttatagcatggttagttaaaggaagaggacatggtgaaggaacatttacttctgatgtatcttcatatcttgaagaacaagctgcaaaagaatttatagcatggttagtaaaaggacgaggacatggagaaggtacatttacgtctgatgtaagctcttatttagaagaacaagcagctaaagaatttattgcttggcttgttaagggaagaggacatggagaaggaacttttacatctgatgtatcatcatatcttgaggaacaagcagctaaagaatttatcgcatggttagtaaaaggaagaggaggaggtggaggggggggaagcggaggtggaggatctggggggggaggtagtgcagaatctaaatacggaccaccatgtccaccatgtccagcacctgaagctgcaggaggaccatctgtatttttgtttcctccaaaacctaaagatacattaatgatttcaaggaccccagaagttacatgtgttgttgttgatgtttcacaagaagatcctgaagtacaatttaattggtatgtagatggagttgaagttcataatgcaaaaacaaaaccaagagaagaacaattcaattcaacatatagagttgtatctgtacttacagtccttcatcaggattggttaaatggtaaggaatataaatgtaaagtaagtaataaaggtttaccaagtagtattgaaaaaactataagtaaagctaagggtcagcctagagaaccacaagtttatactctcccaccatctcaagaagaaatgacaaagaatcaagtatctttaacttgtttagttaaaggattctacccatccgatatagcagttgaatgggaatctaatgggcaaccagaaaataattataaaactactccaccagttttagatagtgatgggagtttttttttatatagtcgtttaactgtagataaatctagatggcaagaaggaaatgttttctcttgttcagtaatgcatgaagcattacataatcattatactcaaaaatctctttctttatctcttgga

SEQ ID NO: 124026 - DNA, 1740 bp, Artificial Sequence
  derived and/or modified sequence
atgaagtgggtgtcttttatctccttgctgtttctgttctcttcggcatactccggttcgctggataaaaggcacggtgagggtaccttcacctcggatgtgagtagttacctggaagaacaagctgcaaaagagtttatcgcatggctcgtgaaaggccgtggtcatggcgagggaacttttacctccgatgtgtcaagctaccttgaagaacaggcggcaaaggagtttatcgcatggctggtcaaaggtagaggccacggggaaggtacttttaccagcgatgttagcagctaccttgaagaacaagcagcgaaagagtttatcgcctggctggtgaagggccgtggccatggtgagggtactttcacttccgacgtgtcctcttacctcgaagagcaggcagcgaaagaattcattgcgtggctggtgaaaggaagaggtcatggggaaggaacctttacgtccgatgtgtcaagttaccttgaagaacaggccgcaaaagaattcatagcgtggctggtgaagggacgcggtcatggcgaaggcaccttcaccagcgacgtgtccagttacctcgaagagcaagccgccaaagaattcatagcttggctcgtaaaggggcgagggcacggcgagggtacctttacctcagatgtgtcgagttacctggaagaacaggcagcaaaggagtttattgcatggttggtcaagggacgcgggcatggggaagggacctttacttccgatgtgtcctcgtatctcgaggaacaggcagcaaaggagttcattgcatggctggttaagggacggggtcatggagaaggcaccttcactagcgatgtttcatcttacctggaggaacaagcggccaaagagttcattgcttggcttgtcaagggacggggacatggcgagggcacgtttacgtcagacgtgtcctcataccttgaggagcaagctgcgaaggaattcattgcctggcttgtcaagggccggggagggggcggaggaggtgggtcaggcggaggaggttccggaggaggtggaagcgcagagagcaagtacggccctccttgccccccatgtcctgcccccgaagccgcaggtgggccatcggtttttctttttcctccaaagcccaaggacaccctcatgatttcgagaaccccggaagtgacttgtgtggtggtcgatgtgagccaggaggaccctgaagtgcagtttaactggtacgtcgatggagtcgaagtccacaatgccaagactaagcctcgagaagaacaattcaacagtacctacagagtcgtgtccgtgcttaccgtgctccatcaagactggcttaacgggaaggaatacaagtgcaaggtaagcaacaagggactgccctcctccattgaaaagactatcagcaaggcaaagggtcagcctagggaacctcaggtctacactctgccaccgagccaggaggaaatgactaaaaaccaagtgtcattgacgtgtctggtgaaaggattttacccatccgatatcgcagtggaatgggaatcgaatgggcaacccgaaaacaattacaagaccaccccaccagtgcttgattcggacggatcctttttcctgtattcgcgactcactgtcgacaaatcgagatggcaagagggaaacgtgtttagctgtagcgtcatgcacgaagcactccataatcactacactcaaaagtcgctttcgctttccctgggt

SEQ ID NO: 124027 - DNA, 1740 bp, Artificial Sequence
  derived and/or modified sequence
atgaaatgggtgagcttcatttctcttctgttcctgttttcttccgcgtattccggcagtctcgataaacggcatggggagggaaccttcacatccgatgtctcttcatacctggaagaacaagcagctaaagaattcatcgcctggctggtgaaaggcagaggccatggggagggaacatttacaagcgacgtctccagctacttggaggagcaggcagccaaagagtttatagcctggcttgtgaaaggtaggggacacggggaaggcacctttacctctgacgtgagctcttacctcgaggaacaagctgctaaagagttcatcgcatggttggtgaaggggcgagggcacggtgagggcacattcacttcagacgtgagcagttacctggaagagcaggcggccaaggaatttattgcatggctcgtgaaaggcagaggccacggcgaaggcacattcactagcgatgtcagcagttacctggaggagcaggctgcgaaagaattcatcgcctggctggtgaagggccgcgggcacggcgaaggtactttcacatccgacgtctcaagttacctcgaggaacaagctgccaaggagttcatcgcctggctagtgaagggacgtggacatggggaaggtacatttacaagcgatgtgtctagttatctggaggagcaagccgccaaggaattcattgcctggttagtcaaggggcgggggcatggtgagggcacatttacaagtgacgtgtcctcttatttggaggagcaagcggccaaggaattcatagcatggttggtcaaaggtcgaggacacggagaaggcacctttaccagcgatgtcagttcttacctcgaggaacaggcagcaaaggaattcatcgcgtggttggtaaagggacggggccacggcgagggcacgtttacttctgatgtctcgtcttatctagaggagcaggcagctaaggagttcattgcctggcttgtaaagggacggggaggaggtggcgggggaggctccgggggtggcggaagcggtggtggggggagtgccgagagtaaatatggaccaccttgtcctccctgtcccgcgccggaagcagccggcggaccgagcgtattcttattcccgcccaagccgaaggataccctaatgatcagccggaccccagaggtcacgtgcgtggtcgttgacgtgtcccaagaagacccagaagtacagttcaattggtatgttgatggggtggaagtgcataacgccaagactaaacctagggaagagcagttcaattcgacttaccgtgttgtgtccgttttgaccgtcttacatcaggattggctcaacggcaaggagtacaagtgtaaggtatccaacaaaggcctgccatcctcaatcgaaaaaacaatctctaaagctaaaggacagcccagggaaccacaagtatacaccctgccaccctcacaggaagagatgaccaagaaccaggtttctttgacctgtctggtgaaaggcttctatccttcagatatcgctgtggagtgggaatcaaatgggcagcccgaaaacaactataagactacaccacccgtgctggatagcgatggttctttctttttgtatagcaggctgaccgtggacaagtcccgctggcaagagggaaacgttttttcctgcagcgtaatgcatgaggcactccacaaccactatacccaaaagagcctgagcctctcgttggga

SEQ ID NO: 124028 - DNA, 1740 bp, Artificial Sequence
  derived and/or modified sequence
atgaagtgggtgagttttatctcgttgctgttcctgttttccagcgcctattccgggtcgctcgacaagcgacacggcgaaggcactttcacatcagatgtgagttcttatctggaggaacaggccgcaaaggagtttatcgcttggctagtgaaagggaggggccatggtgaaggcacgttcaccagtgacgtgtctagctatctggaagagcaggccgcgaaggaatttatagcgtggctggtgaaaggaaggggacacggggaaggaactttcacgtccgatgtgtcctcgtatctagaggaacaggccgccaaggagttcatcgcctggctggtcaagggccgtggccacggggagggaacgtttaccagtgatgtgtccagctacctggaggagcaggcagccaaggaatttatcgcttggcttgtgaaaggacgaggacacggagaggggacctttacaagcgacgttagtagctatctggaggaacaggccgctaaagaatttattgcttggctggtgaaaggacggggccacggcgagggaacatttacatcggatgtcagctcgtatctcgaggagcaggccgccaaagagtttatagcctggctggtgaagggccgcggccatggcgagggaaccttcactagcgatgtcagttcttatctggaggagcaggctgctaaagagttcatcgcgtggttggtaaagggtcgcggtcacggcgagggaacgttcacgtctgatgtttcctcttacctagaggagcaggccgccaaggagtttattgcctggcttgtaaaaggacgaggacacggcgaggggactttcacaagcgacgtatcaagctatctagaggaacaggccgcaaaggagttcattgcctggcttgtgaagggcagaggccacggcgaggggacctttactagcgacgtgagcagttacctggaagagcaggccgctaaggaattcatcgcctggctggtgaaaggcagaggaggcggtggggggggcgggtcaggcggtggcgggtccggggggggcgggtccgctgagtccaagtacgggccgccatgtccgccctgccctgccccggaagccgccggaggcccctccgttttcctgttccctccaaagccgaaggatacactgatgatttcacgtacccctgaagtcacgtgcgtcgttgtcgatgttagccaggaggatccagaggtccagtttaactggtacgtggacggtgtggaggtgcacaatgcgaagactaagccccgcgaagagcagtttaactcaacctatagagtggtttccgtgctgactgtactgcaccaggattggttaaacggaaaggaatacaaatgtaaagtgtcaaataaaggtttgccatcttcgatcgagaaaaccatcagcaaggccaaggggcaaccccgtgagccacaggtttacacactgccaccatctcaggaagaaatgactaagaaccaggtctctctgacatgcctggttaaaggattctatccatctgatatcgcagttgaatgggaatccaacggacagcctgagaacaactacaagactaccccaccagtcctggacagtgatggttccttcttcctttactccagactgactgtcgataagtcacgatggcaggaaggcaacgttttttcgtgttccgtaatgcacgaagctcttcataaccattatactcagaagagcctctctctgagcctaggt

SEQ ID NO: 124029 - DNA, 1740 bp, Artificial Sequence
  derived and/or modified sequence
atgaagtgggtgtcatttatctctcttctttttcttttctcgagcgcatactcgggctcccttgataagcggcatggtgaaggcacctttacctccgatgtttcgtcgtaccttgaggaacaagcagcaaaagagttcatagcatggcttgtcaagggtcgcgggcacggggaaggcacttttacctctgatgtgtcatcctacctcgaagaacaagcagccaaagagttcattgcatggctggtaaagggaagagggcatggagagggcacgtttactagtgacgtctcgagctaccttgaagagcaggctgcgaaagagtttatagcctggctggttaagggacggggtcatggcgagggtactttcacttccgatgtctcctcgtatctggaagaacaagccgcgaaggagtttatcgcctggctggtcaaaggtcgcggacacggagaggggacttttaccagtgatgtgagctcataccttgaagaacaggccgcaaaggaattcatagcttggctcgtcaagggcagaggccacggggagggtacgtttacttccgacgtctcgtcatatctcgaggagcaagcagctaaggaattcatcgcatggctcgtgaagggtagaggtcatggcgaaggtacctttacgagtgacgtgtcctcatacctcgaagagcaggcagcaaaagaattcattgcttggttggttaaggggcgtgggcatggagaaggaacttttacttccgatgtaagctcttacctggaggaacaagcggcgaaagaattcatcgcgtggcttgtgaagggtcggggtcacggggagggaactttcacttcggatgtctcgtcatacttggaagagcaagctgccaaggagtttattgcctggttggtcaagggaagaggacacggtgagggtacttttacctcagacgtaagctcatacctggaagaacaggctgcaaaggagttcatcgcctggctcgtgaaaggacgcggaggaggtggagggggagggtcgggtggaggtgggtccggaggaggcggatcggcagaatcgaagtacggccctccatgtccaccttgcccagcacctgaagctgccggaggaccatcagtgtttctctttccgcctaaacccaaagacaccctgatgatctcgaggaccccagaagtgacctgtgtggtggtggatgtgagccaggaagatccggaagtccagttcaattggtacgtggatggagttgaagtgcataacgcaaagaccaagccaagggaagaacagttcaattctacctaccgcgtcgtgtcggttcttaccgtgctgcatcaggactggcttaatgggaaggaatacaagtgcaaggtgtccaataagggcctgccctcgtcaattgagaaaacgatctcaaaggcgaagggccaaccacgagagccccaggtgtacaccctgcctccgtcgcaagaagagatgacgaaaaaccaggtcagcctcacctgtctggtgaaaggtttttaccctagcgatatagcagtggagtgggaatccaacggacaacccgaaaacaactacaaaactactcctcctgtgcttgattccgacggtagttttttcctgtactcacgattgacggtggacaagtcccgttggcaagaggggaacgtgttttcctgtagcgtcatgcatgaggcactgcacaaccattacacccaaaagtcgctttcgcttagcctgggc

SEQ ID NO: 124030 - DNA, 1740 bp, Artificial Sequence
  derived and/or modified sequence
atgaagtgggtgagcttcatctccctgctctttttgttctcgtccgcgtacagcggatccctggacaagcgccacggcgagggtacttttacgagcgacgtctcgtcatacctcgaagagcaagccgctaaagagttcatcgcctggcttgtgaagggacggggccatggggaggggaccttcacgtcggatgtgagttcctatctggaagaacaggccgcgaaggaattcatagcgtggctcgtaaagggaaggggtcacggggaagggacttttacctcagacgtctcctcttatcttgaagagcaagcagccaaggagtttatcgcgtggcttgtcaagggaagaggccatggagaaggtacctttacctcggatgtcagttcgtaccttgaagaacaggctgcgaaagagttcattgcttggctggtgaagggacgcgggcacggggaaggaactttcacctccgatgtaagctcgtacctggaagagcaggcggctaaggagttcatcgcttggttggtaaaaggacgagggcacggagaaggcactttcacctcggacgttagctcataccttgaggagcaagctgccaaagaattcatagcctggctggtcaagggtaggggtcacggagagggcacctttacttctgacgtgtcaagctacttggaggagcaggctgcaaaagaattcatcgcatggctcgtcaagggtcgcggacatggagaaggaaccttcaccagcgacgtcagctcttacctcgaggagcaggcagcgaaagagtttatcgcttggctcgtgaaaggtagaggacatggcgaagggaccttcacttctgatgtctccagctacctggaggaacaggcagcaaaagagtttattgcatggctggttaagggacgggggcacggcgaaggaacctttacttcggatgtttcttcatacctggaagaacaagccgccaaggaattcattgcctggctcgtgaaggggagaggcggaggagggggaggaggttcaggcggaggcggctccggaggcggaggctccgcggaaagcaagtacggcccgccttgtcccccttgccccgccccggaggccgctgggggcccgtccgtgttcttgttcccgccgaaacctaaggacaccctgatgatcagccgaactccagaggtgacttgcgtggttgtggatgtcagccaggaggacccggaagtgcagtttaactggtacgttgacggcgtcgaagtccacaacgccaagaccaaaccacgcgaggaacaattcaattctacctaccgcgtggtgagcgtcctcacggtcctgcatcaggactggctgaatggaaaggagtacaagtgtaaggtgagcaataaaggactcccctcgtcgatcgaaaagactatctcgaaggccaagggacaacctcgggaaccacaggtgtacactctcccaccttcacaagaagagatgacgaagaatcaggtgtcgctgacttgcctggtgaaaggattctacccatcagatatcgccgtggaatgggagtcaaacgggcaaccagaaaacaactacaagactaccccgccggtgctcgactcggacggctcgttcttcctttactcaagactgaccgtggataagtctcgctggcaggaaggaaacgtgttctcatgctcagtgatgcatgaggcgttgcacaaccactacacccagaagtcgctgtccctgtccctgggt

SEQ ID NO: 124031 - DNA, 1740 bp, Artificial Sequence
  derived and/or modified sequence
atgaagtgggtttccttcatctcactgctatttttgttctccagtgcatattccggtagcttggataaaaggcatggggaagggactttcacatctgatgtgtctagctatcttgaagagcaggcagcaaaggagttcattgcttggcttgtgaaaggcagaggtcatggtgagggaacgttcactagcgacgtgagctcatatctggaagagcaggccgcaaaggagtttattgcctggttagttaagggcagggggcatggggaaggcacatttacctccgacgtttcctcctacctagaagagcaggcggcgaaggagtttatagcttggttagtgaagggcagagggcacggagagggtacatttactagtgatgtttccagctacctggaagagcaagccgccaaggaattcattgcatggctggtcaaggggcggggacacggggaaggcacgtttaccagcgacgtgagttcatatctggaggaacaagccgccaaagaatttatagcttggttggtaaaaggtcggggccacggtgagggcacattcacatcagatgtgtcatcatacctggaggagcaggcagccaaagagttcatagcgtggctcgtcaaggggaggggacatggggaagggacattcacttctgacgtaagcagttatttagaagagcaggccgcgaaagaatttatcgcttggctcgttaaagggagggggcacggcgaaggcacatttacaagtgatgttagttcgtaccttgaggagcaggcagctaaagaatttatcgcttggctggttaaaggtagagggcatggtgagggcacattcacttcagacgtgagcagctacttggaggaacaggctgccaaagaatttatagcctggttagtgaaggggaggggacacggcgaaggtacgttcacatcggatgttagtagctacctcgaggagcaggctgcaaaagagtttatcgcctggcttgtgaaaggtaggggtgggggcgggggtgggggatctgggggaggcggtagcggggggggagggagtgctgaatctaaatatggacccccatgtcccccgtgtccggcacccgaggcagccggtggcccatcagtcttcttgttccctcctaaaccaaaggataccctgatgatttccaggaccccggaggttacatgcgtggtggtggatgtaagccaggaggaccctgaagtacagtttaattggtacgtagacggagtagaagtgcataacgctaagactaagccacgagaggagcagttcaactcaacttaccgagtcgtctcagttctgaccgtattgcatcaggattggctaaacgggaaggaatataagtgtaaggtgtccaataagggccttccaagcagcatcgaaaaaaccatctccaaggccaaggggcagccccgggaaccccaggtatataccctgcctccttcacaggaagagatgactaaaaatcaggtgagcctgacatgcctggttaagggattttacccttctgatatcgctgtcgagtgggagtctaatgggcagcccgagaataattataagacaacccctccggtgctggactcggacggatctttcttcctgtactctcggctgaccgtcgacaagagccgatggcaggagggaaacgttttcagctgcagcgttatgcatgaggctctgcataatcattatacccagaagtcactctctctttctttgggg

SEQ ID NO: 124032 - DNA, 1740 bp, Artificial Sequence
  derived and/or modified sequence
atgaagtgggtgtcttttatctcactcctgtttcttttttcctccgcatactcggggtcgcttgacaagagacatggggaaggtactttcacgtcagatgtcagctcttaccttgaagaacaagctgcaaaggagttcattgcgtggcttgtcaagggtagaggccatggcgagggaactttcacttcggacgtgtcgtcatacctcgaagaacaagccgctaaggagtttattgcatggctggtgaagggaagaggtcatggggaaggcacctttacgtccgatgtgtcctcataccttgaggagcaagcagcgaaggagtttatagcatggttggttaagggccggggccatggtgaggggacttttaccagtgatgtgtcgtcctatcttgaagaacaggccgccaaagaattcattgcatggctcgtcaagggtcgcggacacggcgaaggaacctttaccagcgatgtatcttcgtacctggaggagcaagcggcaaaggaattcattgcctggcttgtgaaaggcagaggccatggagaaggaactttcacctcggatgtgagctcatacctggaagagcaggcagccaaggagtttatcgcatggctcgtaaagggtcgcggtcacggagaaggaacgtttacgagtgacgtgagctcgtatcttgaggagcaggccgcgaaagagtttatcgcgtggctcgtgaaggggcggggacatggggagggaacttttacctcagacgtgtcgagctacctggaggaacaagcggctaaagaattcatcgcatggcttgttaaaggtcggggtcacggtgagggcacctttacctcggacgtgtccagttacttggaggaacaggccgcaaaagagtttatagcgtggctggtcaagggtcgaggtcatggagaaggtacttttacctcggatgttagcagttacctggaagaacaggcagcaaaagagttcattgcttggttggtcaaagggaggggcggaggaggaggagggggtagcggtggaggaggctccggtgggggaggcagcgcggaaagcaagtacggtccaccttgtcccccttgcccagcacctgaagccgccgggggaccatcagtgtttctgttcccacccaagccaaaggatacccttatgatcagccgtactcctgaagtgacctgtgtcgtggtggatgtttcccaggaagatccagaagtgcagttcaactggtacgtggacggtgtggaagtgcataatgcaaagactaagcctcgggaagaacagtttaactcgacttaccgagtcgtgtccgtcctgaccgtcctccaccaagactggctgaatggaaaggaatacaagtgtaaagtgagcaacaagggactcccctcgtccattgaaaagaccatctccaaggcaaaaggacaacctagagaaccgcaagtgtatactctccctccaagccaggaagaaatgactaagaaccaagtgtccctgacctgccttgtcaaaggattctaccctagcgatattgcagtcgaatgggaatccaacggacagcccgagaacaattacaaaactacccctccggtcctcgattcagacggcagtttctttctgtactcgcgccttaccgtggataagtccaggtggcaagaaggaaacgtattttcctgttcggttatgcacgaggcactgcataatcactacactcaaaagtctctgtctctgtcacttggg

SEQ ID NO: 124033 - DNA, 1740 bp, Artificial Sequence
  derived and/or modified sequence
atgaagtgggtaagttttatctccttgctgttccttttcagctccgcctactctggttcgctagacaagagacacggggaaggcacgttcacaagcgatgtgtcatcttatctcgaagagcaagcggccaaagagttcatcgcatggctggtcaaggggaggggccacggggaaggaacattcacctcggacgtctcaagctatctggaggagcaggcggcaaaagagttcattgcgtggctggtgaagggtagaggtcacggcgagggaaccttcacatcagatgtgtcctcttacttggaggagcaagcagcgaaagagttcatcgcctggttagttaagggaaggggccatggcgagggcacattcacctctgatgtctcctcgtacctggaggagcaggccgcgaaagagttcatcgcttggttagtcaagggccgcgggcatggggaagggactttcacttccgatgtcagctcttatctggaggagcaggctgccaaagagtttatagcttggctggttaaggggcgcggtcatggagagggtacctttacatccgacgtctcaagctacctggaggaacaggccgccaaagaatttattgcatggctcgttaaaggccgaggccacggggaggggacattcacgtcggacgtttcatcttatctggaagagcaagccgccaaagagtttatagcctggctggtcaagggtcgcggacacggggagggcacttttacatcagatgtttcctcctatctggaggaacaggccgcaaaagaattcatcgcatggctcgttaaagggagaggccacggtgaagggaccttcacaagtgacgtctcctcgtatctcgaagaacaagcggccaaagagtttatagcatggcttgtgaagggtcgcgggcacggagaaggaacgttcacctctgacgtcagcagctatttagaagagcaggccgccaaggaattcattgcatggctggtgaaagggcgagggggaggtgggggaggaggctctggtgggggcggtagcggaggaggcggcagtgcagaatccaagtacggcccaccttgccccccatgtcctgctccagaggcagcaggaggaccgtccgttttcctgtttccacccaagcctaaggataccctgatgatatccagaacgcccgaggtgacttgcgtggttgtggacgtgagccaggaggatccagaggtgcaatttaactggtatgtggacggggtggaagtgcacaatgccaaaaccaagcctagagaagagcagttcaacagcacatatcgcgtggtgtctgtgctcactgtgctgcaccaggactggctgaacggaaaagagtacaagtgtaaagtttcaaacaaaggacttccttcatccattgagaaaactatctcaaaggccaaaggccagccgcgagaaccccaggtctatacactcccaccatcgcaggaagagatgaccaagaatcaggttagcttaacctgcctcgtgaaaggcttctatccttcagatatagcggttgaatgggagtcgaacggacagcccgaaaacaattataagacaactcccccggttctagattctgacggatccttttttctctactcccggctaacagttgacaagagtcgatggcaggaaggtaatgtctttagctgttctgtgatgcacgaggcactacacaatcattatactcaaaagtcgttatcattaagtttaggg

SEQ ID NO: 124034 - DNA, 1740 bp, Artificial Sequence
  derived and/or modified sequence
atgaagtgggtgtctttcatatcactcttattcctgttttcatctgcctactcaggcagcttggataagcgacacggggagggaactttcacctccgacgttagcagctacctcgaggagcaggcggctaaagaattcatcgcctggcttgtgaaagggcggggacacggcgaaggcacttttacctcggatgtgtcctcgtatctggaggagcaagcagccaaggagttcatcgcctggcttgtgaagggaaggggccacggggaaggcacatttacatcagatgtgtcatcctatttggaggagcaggccgctaaagaatttattgcatggctcgtgaaggggcgagggcacggcgaaggaactttcactagtgacgtctcatcctatctagaagagcaggccgctaaagagtttattgcgtggctggtaaagggacgcggtcatggagaaggcacctttacaagtgatgtctcgagttatcttgaggaacaggctgccaaggagttcattgcctggctggtgaagggccgcggtcatggggaggggacgtttaccagcgacgtgagttcttacctcgaagaacaggccgccaaggagttcatcgcctggcttgtgaaaggtagaggacatggggaaggaaccttcacttcagacgtctcttcctacctggaggagcaagctgccaaagagttcattgcatggttagtgaaaggcagaggacatggcgaggggaccttcacttccgacgtcagctcctacttggaggaacaggctgccaaggagttcatcgcatggctggtgaaagggagaggacacggcgaagggaccttcacttcagacgtctcatcctacctcgaagagcaggctgccaaggagttcattgcgtggctggtcaagggccggggccatggggaggggacattcacttccgacgtcagttcgtatcttgaggagcaagcagccaaggagttcatagcatggctggtgaaggggcgagggggggggggcggtggcggatctggcggtgggggaagtggtggcgggggttctgccgaatccaaatatggaccaccatgtcctccgtgcccggcgccggaagccgccggcgggccgtctgtgtttctcttccctccaaagcctaaggacaccttgatgataagtcgcaccccagaggttacgtgtgtagtggttgacgtctcacaggaagaccctgaggtacagttcaactggtatgtggatggcgtggaagttcacaatgcgaagacaaaaccccgcgaagagcagtttaattccacttatagggtcgtttccgtattaactgtcttgcatcaagattggcttaatggaaaggagtacaagtgtaaggtgagcaacaagggccttccttcgtctatagagaaaacgatatctaaagcaaagggccaacctcgggaacctcaggtgtacacgctgcccccaagtcaagaagaaatgactaagaatcaggtatcactgacgtgcttggtgaagggtttttacccttctgacatcgccgttgagtgggaaagtaacggacagcctgaaaacaactacaaaaccacccctcccgtgctggacagcgatgggagtttttttctgtactcccgactgacggttgacaaaagcaggtggcaagaagggaacgttttctcctgtagcgtgatgcatgaagcgcttcataaccactatactcagaagagcctgtcactatccctgggc

SEQ ID NO: 124035 - DNA, 1740 bp, Artificial Sequence
  derived and/or modified sequence
atgaagtgggtgtctttcatttctctcctcttcctgttcagcagcgcctactccggatcgctggataaaaggcacggagagggtaccttcacctcggacgtttcctcatacctggaagaacaagcggcaaaagagtttatcgcgtggttggtcaagggacggggtcatggagaaggtactttcacgtcggacgtctcctcatacctcgaggaacaagccgctaaggaattcatcgcgtggctcgtaaagggacggggccacggagaagggactttcacctcggacgtttcatcatacctcgaggagcaggcggccaaagaattcattgcctggctcgtgaagggtcgcggacatggagaaggaaccttcacttcagacgtctcgtcgtacctggaagagcaggcagctaaggagtttattgcatggctggtaaaaggccgcggacatggcgaggggacttttacttccgacgtgtcgtcgtaccttgaggaacaggctgccaaagaattcatcgcatggttggttaagggccgtggacacggtgagggcaccttcacttctgacgtgagctcttacttggaagaacaagctgctaaggaattcattgcctggttggtgaagggtaggggacacggcgaaggcactttcacctctgatgtctcctcgtatctcgaagagcaagcagcgaaggaattcatcgcctggctggtaaagggtcgcggtcatggtgaaggcacctttacgagcgacgtcagctcctatttggaggaacaagctgctaaggagttcatagcctggctcgtgaaaggacggggacatggagaggggaccttcaccagtgacgtcagcagctaccttgaagagcaagctgcgaaggagtttatcgcctggcttgtgaagggacgagggcacggcgaaggaacgttcacttcagacgtgtcaagctatctggaggagcaggcagccaaagagttcatcgcctggttggtgaaaggacgaggagggggaggtggaggaggctcaggagggggcggttccggaggtggcggtagtgcagagagcaaatacggacccccgtgccccccatgtccggcaccagaagcggccgggggaccaagcgtgttcctctttcctcctaagccgaaggacacgctcatgatcagccgcacccccgaggtgacttgcgtggtggttgatgtgtcccaggaagatccggaagtccagttcaactggtacgtcgatggcgttgaggtgcacaacgccaaaactaaaccgcgggaggagcagttcaactcaacctaccgggttgtgtccgtgcttactgtgctgcatcaggattggctgaatggaaaggaatacaagtgcaaagtctcaaacaagggactgccgtcatcgatcgaaaagaccatctccaaggccaagggacagccgagggagcctcaagtgtacaccctgcctccgtcgcaggaagagatgaccaagaaccaagtgtcgctgacctgtctggtcaaggggttttacccaagcgacatcgcagtggagtgggagtccaacggccagccagagaacaattacaagactacgccgcctgtgctggattccgatggcagtttctttctctactctcgcctcactgtggacaagagcagatggcaggaaggaaatgtgttctcatgctccgtgatgcacgaagcgctgcacaatcactacacccagaaatccctgtcccttagcctgggg

SEQ ID NO: 124036 - DNA, 1740 bp, Artificial Sequence
  derived and/or modified sequence
atgaaatgggtctcgtttatttctcttctgttcttgttcagcagtgcatatagcggtagtctcgacaaacgccatggtgagggaacattcacgtcggacgtgtcctcgtatcttgaagagcaagccgcaaaagagttcatagcttggctcgtcaagggacgaggccatggagaggggaccttcacaagtgacgtctcctcctaccttgaagagcaagctgctaaagaattcatcgcctggctcgtaaaagggagggggcatggagaaggaacctttacaagtgatgtgtcatcatacttggaggaacaggcagctaaggaatttattgcatggctcgtaaagggcagggggcatggggagggcacattcacgtctgatgtgtcgtcttaccttgaggagcaggctgccaaagaattcattgcctggctcgtcaaaggacggggtcacggcgaaggtacattcacgtcggatgtgagctcctatctagaggaacaggctgctaaggaattcatcgcgtggctagttaaaggacgcggccatggagagggcacatttactagcgatgtgagtagctatctggaggagcaagcggctaaggaattcattgcttggttggttaagggacgggggcacggagaaggcacctttacctccgatgtgagctcgtatcttgaggagcaagcggcaaaagagtttatcgcgtggctagtgaaggggcgaggtcatggtgaaggaactttcacctcggatgtgtcctcttacctcgaggaacaggcggccaaggagttcattgcctggctcgttaagggtcgaggccacggcgaaggtacatttacttctgatgtttcctcatatcttgaagagcaagctgccaaagaattcattgcttggctagttaagggtcgtggccatggagaggggacgtttacgtctgatgtgagcagctacttagaggagcaagccgccaaggaatttattgcctggctggtcaaaggacgagggggcggaggtggtgggggatcgggcggcggaggcagtggtggtggtggtagtgcagagtcgaagtatggtccgccatgtccgccgtgccctgcccctgaagctgctggaggaccctcagttttcctcttcccccccaaaccaaaagacacactgatgatctcccggaccccagaagtcacctgtgtcgtcgtggacgtttcacaggaggatccagaggtgcagttcaactggtatgtggacggcgttgaggttcacaatgctaaaaccaaaccccgcgaggagcagtttaactccacctaccgcgtcgtcagtgtgctaacagtgttgcatcaggattggctcaatgggaaggagtacaaatgtaaggtttctaacaaaggattaccttcgtccatcgaaaaaaccatctcaaaggccaaaggtcagccgcgggagcctcaggtctatacgttaccaccatcacaggaggaaatgactaagaaccaagttagcttaacgtgtctagttaagggattttacccatcggacatcgcagtagaatgggagtcaaacggacaaccagaaaataactacaagacgacgccgcccgtcctagattcggatggtagttttttcctgtatagtcgtttgactgttgataaaagccggtggcaagagggcaacgtcttttcatgttcagtgatgcacgaggcacttcacaaccattatacgcaaaagagcttgtcgctttctttggga

SEQ ID NO: 124037 - DNA, 1740 bp, Artificial Sequence
  derived and/or modified sequence
atgaagtgggtgtccttcatctccctgctcttcctcttctcgtcagcttactccggctcgctggacaagcgccatggtgagggaacgttcacctcagatgtttcctcgtacttggaagagcaagccgccaaagagtttatagcgtggctggtcaaggggcgtggacatggcgagggtacctttacctccgatgtctcatcatacttggaggaacaggcagccaaagagttcattgcatggcttgtcaaaggacggggacacggggaaggaacctttacttctgacgtgtcatcttacctggaggaacaagcggctaaggagttcattgcttggttggtgaaagggcgaggacatggggaaggaactttcactagcgacgtctcaagctatcttgaggagcaggcggcaaaggaattcatcgcttggctggtgaaggggagagggcacggagaaggtacttttactagcgacgtctcgtcataccttgaagagcaagccgcaaaggagtttatcgcgtggctcgtcaagggtcggggacatggggagggtaccttcacgagcgatgtgtcgagctatcttgaggaacaagcagcgaaggagttcatcgcttggctcgttaagggacgcggccacggcgagggcacgttcacttcagacgtcagctcctacctggaagaacaggctgcaaaggagttcatagcctggctcgtgaaaggcagaggacacggagaagggacctttacctccgatgtgtcctcatacctggaagagcaggccgcgaaagaattcattgcctggctggtgaagggcagggggcacggggaaggtaccttcacttcggacgtcagctcatatctcgaagaacaagctgcgaaagagttcatcgcctggcttgtgaagggccgcggacacggcgaaggcaccttcacgtccgacgtttcgtcctatctggaggaacaggccgctaaggagttcatcgcatggcttgtcaaaggccggggtggaggaggcgggggcggatcgggtggaggaggctcgggcgggggcggtagcgcagaaagcaagtacggaccaccctgccctccgtgcccggctcccgaagcggcaggcgggccatcggtgttcctcttcccgccgaagccgaaggataccctgatgatctcccggacccctgaggtgacttgcgtcgtggtggacgtgagccaggaggaccctgaggtgcagtttaactggtacgtggacggcgtggaagtacataatgcgaaaactaagccgcgcgaggagcagtttaactccacctaccgcgtcgtatctgtcctcactgtgctgcaccaagactggctgaatggaaaagagtacaagtgtaaggtgagcaacaagggactgccttcctcgatcgaaaaaactatctcgaaggccaagggacaaccacgcgaaccccaggtgtacaccctccctccaagtcaagaagaaatgaccaagaatcaggtgtccctcacttgtctggtcaaggggttttacccttctgacatcgcagtcgagtgggagtcgaacggacaaccggaaaacaattacaaaaccacgccaccggtgcttgattcagatggttcctttttcttgtactcgagactcactgtggacaaatcaaggtggcaggaaggtaacgtgttcagctgctcggtgatgcatgaagcacttcacaaccactacacccagaagtccctctccctgagcctgggc

SEQ ID NO: 124038 - DNA, 1740 bp, Artificial Sequence
  derived and/or modified sequence
atgaagtgggtatcattcatttcgctgctgtttctgttttcatcagcatactcaggatcgttggacaagcggcatggagaaggtacctttacctcggatgtatcctcgtatctcgaagaacaggctgcgaaggagtttatagcttggcttgtgaaagggcgcggtcatggagaaggcacctttacttcggatgttagttcctacctcgaggaacaggctgcaaaagagtttattgcgtggctggtaaagggacgcggacacggtgaaggcactttcacctcagatgtgtcatcatatctggaagaacaggcagcgaaggaattcattgcctggcttgtgaaggggcgtggccacggagaagggaccttcacctctgatgtgagttcatacctcgaggagcaagctgccaaggagttcatcgcgtggctggtcaaagggcggggacacggcgaaggtactttcacgagcgatgtctcctcctaccttgaagagcaggcagcgaaagaattcatagcatggctcgtcaagggtagagggcatggcgaggggacgtttaccagtgacgtgtccagctacttggaagaacaagcagccaaagagtttatcgcatggctggttaagggccgtggtcacggagaaggaacttttacttcagacgtgagctcgtacttggaagagcaggccgcaaaggagtttattgcttggctcgtgaagggcagaggacatggcgaagggacctttactagcgacgtctcgtcgtacctggaggaacaagccgctaaggagtttatcgcttggctggttaaaggcaggggtcatggagagggaactttcacttccgacgtgagctcctatcttgaagaacaggccgctaaggaattcatcgcatggttggtgaagggacgaggacatggtgaaggaacctttacctccgacgtttcttcgtaccttgaggaacaggcagcaaaagagttcattgcatggcttgtcaagggacggggaggtggcggaggtggtggatccggaggaggtggaagcgggggtggcggaagcgcagaatccaaatacggtcctccctgtccgccctgtccagcccctgaagccgcaggagggccttccgtgtttctctttcctcctaagccgaaggataccctgatgatatcgcgcaccccagaggttacttgtgtggtggtcgatgtgtcgcaagaggatcctgaggtgcagttcaattggtacgtggacggcgtggaagtgcataatgcgaaaacgaagccaagggaagagcagtttaactccacttacagagtcgtaagcgtgctgaccgtccttcatcaagattggctcaacgggaaagaatacaagtgtaaagtgtctaacaagggtctgccgtcaagcatcgaaaagaccatttcaaaagcaaagggacaacctcgggaaccacaggtctacacgctgccaccctcgcaagaagaaatgaccaagaaccaagtgtcactcacgtgcttggtgaagggtttttacccatctgacattgcagtggaatgggaaagcaatgggcaacctgaaaacaattacaaaaccactcccccagtccttgatagcgatggctctttctttctttactccagacttactgtggataagtcgagatggcaagagggtaacgtgttttcgtgctcggtgatgcacgaagcacttcataaccactacactcaaaagtcgctgtctcttagcctgggg

SEQ ID NO: 124039 - DNA, 1740 bp, Artificial Sequence
  derived and/or modified sequence
atgaagtgggtgagcttcatctccctccttttcctcttcagctccgcctactcgggatcgctcgataagcgacacggcgagggaacgttcacttcagacgtatcttcatacctggaggagcaagccgcaaaggagtttatcgcctggctggtgaagggaagaggtcacggggagggcacctttactagcgatgtgtcatcctacctggaagagcaggctgccaaagagttcattgcgtggctcgtgaagggacgcggccacggcgaaggaactttcacttcggatgtctcgagctaccttgaagaacaagccgcgaaagaattcatcgcgtggttggtcaagggtcgcggacacggtgaaggtacgttcaccagtgacgtcagcagctacctggaggagcaagccgccaaggaatttattgcttggctggttaagggcagggggcacggagaaggcaccttcacctctgacgtctcgtcatatcttgaggagcaggcggccaaggagttcatcgcctggctggtgaaaggacgcggacatggtgagggcactttcacgtcggatgtgtcctcctatctcgaggagcaggccgcgaaagaattcattgcatggcttgttaagggacgggggcatggagagggtactttcacctcagatgtctcatcctaccttgaggaacaagcggccaaagaatttatcgcttggttggtgaagggccggggacatggcgaagggacctttaccagcgatgtctccagctacctcgaggaacaggctgcaaaagaatttatcgcgtggctcgtgaaaggcagaggacatggggaaggaactttcacttcggacgtctcctcatacctcgaagagcaagcagccaaggagttcatcgcttggctggttaagggccggggacatggagaaggcacttttaccagcgacgtgtcctcttaccttgaagaacaagcagctaaggaattcatagcctggctcgtaaagggacgtggcggtgggggcggaggaggaagcggaggtggggggtccggaggaggtggatccgcggaaagcaaatacgggccaccttgccccccgtgccctgcaccagaagcggccggaggaccatcagtgtttctgttcccgcctaagccgaaagacaccctgatgatctcgcgcactccggaagtgacctgcgtggtcgtggacgtcagccaggaggacccagaggtgcagttcaactggtacgtcgacggtgtcgaagtgcacaacgcaaagaccaagccgagagaagaacagttcaattccacgtaccgggtggtgtccgtgctcaccgtgctgcaccaggactggttgaatggaaaggaatacaagtgtaaagtgtcaaacaagggactgccgagttccatcgaaaagaccatcagcaaggctaagggacaacccagggagccacaggtgtacactctgccgccaagccaggaagaaatgactaagaatcaggtgtccctgacctgtctggtcaaagggttctacccgtcagatatcgcagtggaatgggagtcaaacggacagcccgagaacaactacaaaaccactccgcctgtgctggactcggacggcagctttttcctgtactcgcgcctgactgtggataagtcgcggtggcaggagggcaatgtgttctcgtgctcggtgatgcacgaagccctgcataaccactacacccaaaagtcgttgtcgctgtcgctggga

SEQ ID NO: 124040 - DNA, 1740 bp, Artificial Sequence
  derived and/or modified sequence
atgaaatgggtttcatttatctctctcctgtttctgttctcaagtgcctatagcggtagcctggataaacgacatggcgagggaacattcacatctgatgtatccagctatttggaggagcaggccgccaaggaattcatcgcttggttggtaaagggtcgcggacatggtgagggaaccttcaccagcgacgttagcagctatctggaggagcaggccgccaaagagtttattgcctggctcgtaaagggtagagggcatggggaaggtacattcacaagcgatgtgagctcatacctcgaagagcaagctgcaaaggaatttatcgcatggctggtcaaaggtcgtggccacggagagggaacatttaccagcgacgtgtcctcatatctcgaagagcaggccgccaaagaattcattgcctggctggtgaaaggacgcggccacggagagggcacttttacttctgatgtgagctcctatttggaagaacaggctgccaaggaatttatcgcctggctcgtgaagggcaggggccatggcgagggtacattcacctccgatgtctctagttacctggaggagcaagccgcaaaagagtttattgcttggcttgtaaaagggcggggccacggcgaaggcacattcactagtgatgtcagttcctaccttgaggagcaggccgcaaaagagttcattgcttggttggtcaaaggacgaggtcacggagaggggacttttacctctgatgtttcatcttacctggaggagcaggccgcgaaagaattcattgcctggctcgttaaggggagagggcacggcgaagggacattcacttccgacgtgagcagttacctggaagagcaggcagcaaaggagttcattgcatggctcgttaaggggcgtggccacggcgaaggcactttcacatccgacgtgtctagctatctggaggaacaggcagccaaggagttcatcgcatggctggtgaaaggaagaggggggggaggtggagggggaagcgggggtggagggtcagggggggggggttccgccgagagcaagtacggacccccttgcccaccatgcccggcccctgaggcggccggcgggccttcagtgtttttgtttccacctaagcctaaggatacactgatgatttcacgtacccctgaggtgacatgtgtggtcgtcgatgtaagtcaggaggatcccgaagtacagttcaattggtatgttgacggcgtcgaggtgcacaacgctaaaacaaaacctcgcgaagaacagttcaattcgacctatcgggtggtgtccgtgttgacagtcctgcatcaagattggttgaacggaaaggaatataaatgcaaagtgtccaacaaagggctgcctagctccattgaaaaaactatctccaaggccaagggccagccaagagaacctcaggtgtacactctgcctccgtcccaggaggagatgactaagaaccaggtgagcttgacttgcctcgtaaagggtttttatccctctgatatcgccgtggaatgggaaagtaacggccagcctgaaaataattataaaactaccccccctgtgctggattctgacggtagctttttcttgtactccaggctcactgtcgataaaagcagatggcaggagggtaacgtgttcagttgcagtgttatgcatgaagccctccacaatcattatacccagaagagcctttctctgtcacttggt

SEQ ID NO: 124041 - DNA, 1740 bp, Artificial Sequence
  derived and/or modified sequence
atgaagtgggtgagcttcatctccttgctatttctcttcagttccgcgtatagcgggagcttggataagaggcatggggagggcaccttcacatcagacgtgtcttcctaccttgaggagcaggcagcaaaagaatttattgcatggttggtgaaaggcagaggccatggggaggggaccttcacaagcgatgtgtcctcgtatcttgaagaacaagccgcgaaagaattcattgcatggctcgttaagggtagaggccacggagagggcacatttactagtgacgttagctcgtaccttgaggaacaggccgctaaagagttcattgcatggctggtaaaagggagaggacatggggaaggtacattcacttcagacgtgtcgtcctatcttgaggaacaagctgctaaagaattcatcgcctggctggttaaaggccgggggcacggggagggaacttttacttcagacgtgtccagctacttggaggagcaggcagccaaggagttcatcgcctggttagtgaagggtagaggacacggcgagggcactttcacctccgatgtctctagttatctggaagagcaggccgccaaggaattcattgcctggctggtgaaagggcgggggcacggagaaggcacttttaccagtgatgtatccagctatttggaagaacaggccgccaaggagttcatcgcctggctggtgaagggtcgcggccacggggaggggacctttacgagtgatgtgagctcctacctggaagagcaggctgccaaagagttcatcgcatggctggtgaaggggagagggcatggggaagggactttcacatcagacgtgagcagctatctcgaggaacaagccgccaaggaattcattgcatggctggttaagggaaggggtcacggggaaggtacctttactagcgacgtgagcagctatctggaggagcaggccgctaaggagttcatagcctggctggtgaagggtcgggggggcggtggaggcggcggaagtggtggcgggggctccggaggggggggttctgctgagagtaagtatggtccaccatgccctccatgtcctgcccccgaggccgctggcgggccttctgtgttcctttttccaccaaagcccaaagatacactgatgatttctaggactcccgaggtgacctgtgtcgttgtggacgtaagccaggaggatcctgaggtgcagttcaattggtacgtggacggggtcgaagtacacaacgcgaagaccaaaccaagggaagagcaatttaatagcacatatagggttgtcagcgtcttgaccgttctgcaccaggactggttgaacggcaaagagtataagtgtaaagtctccaataaaggactcccctcttcaatagaaaagaccatttctaaggccaagggacagcccagagagccccaggtctacaccctccccccctctcaggaggagatgactaaaaatcaggtgagtttgacatgtctggttaagggattttacccctctgacattgccgtggagtgggaatccaacgggcagcccgaaaacaattacaagaccacaccgcccgtgctcgattccgatggctctttctttctgtatagcaggcttaccgttgataagagccggtggcaggaggggaacgtgttcagttgcagcgtgatgcatgaggccctgcacaaccattacacgcagaagtccttgtctctcagcctcgga

SEQ ID NO: 124042 - DNA, 1740 bp, Artificial Sequence
  derived and/or modified sequence
atgaagtgggtttccttcatctctttgctgttcctctttagtagtgcttatagcggtagtctggacaagcgtcacggcgagggtactttcacttcggatgtctcgtcctatcttgaagagcaggctgctaaggagttcatcgcctggctagtgaagggccgtggccacggcgagggtaccttcacatctgacgttagttcttacttggaggagcaggcggccaaagagtttatcgcgtggctcgtcaagggacgggggcatggtgagggaacttttacctccgatgtctcgtcctacctggaggagcaggccgctaaagagtttatcgcatggcttgtcaagggccgcggacacggggagggtacgttcacttccgacgtctcttcgtaccttgaggaacaggctgccaaggagttcattgcctggttggtcaaaggccgtggtcatggtgagggcactttcacctcggacgtaagcagctacttggaggagcaagctgcaaaggagttcatcgcgtggcttgtgaagggtcgcggtcacggagagggcaccttcaccagcgatgtctccagctatttggaggagcaggccgccaaggaatttattgcttggctcgtcaaaggtcggggtcacggtgagggcacgtttacatctgacgtctcctcttatttggaagagcaagcggccaaggaattcatcgcctggctggtcaagggccgtggccatggagagggaacttttacttccgacgtgagtagctacttggaagagcaagccgccaaggagttcatcgcctggctcgtcaagggtcgtggccatggtgaaggcactttcacctccgatgtatcttcctacttagaggaacaagcggctaaagagttcatcgcatggctagtcaaaggccgcggtcacggagagggtaccttcacgtccgatgttagttcctacctcgaagagcaagctgccaaggagttcattgcatggttggtaaaggggcgaggcggaggcggcggaggcggttccggtggaggaggtagcggtggtggaggctctgccgaatcgaaatacggtcccccttgtcccccttgcccggccccggaagcggctggaggaccctctgtcttcctattccccccgaagcccaaggatacgcttatgataagtcgcacgccagaagtcacatgcgtggtcgtagacgttagccaagaggaccctgaggtgcagttcaattggtacgtggatggtgtcgaagtacacaatgccaagacaaagcctcgagaagagcagttcaactcgacgtaccgtgttgtctccgtgctcactgtcctgcaccaagattggctgaacgggaaggagtacaagtgcaaggtctctaataagggtctgccatcctcaatcgagaagaccatctccaaggccaagggccagccgcgcgaaccacaggtatatactctccctcccagccaggaggagatgaccaagaaccaagtgagcctcacctgccttgttaagggtttctacccttctgatatcgccgtggagtgggagagtaacggacagccggagaataattacaagactacccctcccgtcctggattcagacggaagcttcttcctgtactctcgcctcaccgtcgataagagtcgttggcaagagggcaacgtcttctcctgttccgtaatgcacgaagcgctgcacaaccactatacgcagaagagcttatcactgagcctcggg

SEQ ID NO: 124043 - DNA, 1740 bp, Artificial Sequence
  derived and/or modified sequence
atgaagtgggtgtcctttatctcgcttctgttcctgtttagctctgcatactcgggctcgctcgacaagcgtcatggagaaggcacctttacctccgacgtttcttcctacctcgaggaacaggctgcaaaggagtttatagcgtggttggtgaagggtcgaggtcacggggaaggaaccttcacctccgatgtgtcgtcttaccttgaagaacaggccgcgaaggagtttatcgcgtggctcgttaagggtcgtggtcatggtgaaggaacctttactagtgatgtgagttcctaccttgaggagcaggcggcgaaggagttcatagcttggctggttaagggtaggggtcatggcgaaggaacgttcacttccgacgtgtcaagttatctcgaagaacaggcagccaaagagtttattgcctggttggtaaaaggacgcggccatggtgagggtaccttcacgagcgatgtatcaagctacctggaagaacaagcggcgaaagaattcatcgcttggttggtcaaaggacgagggcacggggaggggacgtttacttctgatgtgagctcttacctcgaagaacaagcagctaaggaattcatcgcctggctggtcaagggccggggacatggggaaggaactttcacttcggacgtctcgagctatcttgaagaacaagccgcaaaagagtttatcgcatggctggtgaaaggcagaggacatggagagggcacttttactagcgatgtctcctcttacttggaagagcaagcagcaaaggagttcattgcatggctcgtgaagggcagaggccacggagagggaacttttacttctgacgtgtcctcctaccttgaagagcaggccgctaaagagtttatagcctggctcgtcaaaggaagaggacacggagaagggaccttcacgtcggatgtctcgtcgtatctggaagagcaggcagcaaaggaattcattgcctggcttgtgaagggtcgcggaggaggcgggggaggagggtccggaggagggggcagcggtggcgggggatccgcagaatcaaagtacggacctccctgtcctccgtgtcctgcacctgaagcagcaggtggtccttcagtgtttctgtttccgccaaaaccaaaagacactcttatgatttcacggaccccagaggtcacctgtgtggtggtggatgtctcacaagaagatcccgaagtccagtttaactggtacgtggatggggttgaggtgcataacgcaaagaccaagcccagggaagaacagttcaatagcacctacagagtggtgtcggtgctgaccgtgctgcatcaagactggctgaatggaaaggaatacaaatgtaaagtgtcgaacaagggactcccgagtagcattgaaaagacgattagcaaggcaaagggtcaaccccgagaacctcaagtctacaccctgcctccatcgcaggaggaaatgacgaagaaccaagtgtccctgacttgccttgtgaagggcttttacccatcggacattgccgtggaatgggaaagcaacggacaaccagaaaacaattacaagaccactccacctgtccttgattcagatggatccttttttctttactcgcggttgaccgtggataagtcgcgctggcaagagggtaatgtgttttcgtgctcagtgatgcacgaagcacttcacaaccattacacccagaagagccttagcctgagcctcggt

SEQ ID NO: 124044 - DNA, 1740 bp, Artificial Sequence
  derived and/or modified sequence
atgaagtgggtgtcattcatcagcctgctgttcttgttttcgtctgcctactcaggttcactggataagcggcatggtgaaggaacttttacctctgatgtatcgagctacctggaggaacaagctgccaaagaattcatcgcctggttggtcaaggggcgcggacatggtgaggggacgtttacctcagacgtgtcctcgtatctcgaggagcaggctgcgaaagagtttatcgcatggctcgtcaaaggcaggggacacggggagggcaccttcacgtcggacgtttcatcataccttgaggaacaggccgcgaaagaattcattgcatggctggtaaaaggcaggggtcacggagaagggacttttacttctgacgtcagctcctaccttgaggagcaggcggcgaaagagttcatcgcgtggctcgtaaagggacgggggcacggggaaggcacgtttacctcggacgtgagctcatacttggaggagcaggcagcgaaggagtttattgcctggcttgtgaagggtcggggccacggcgaaggaacgttcacctccgacgtgtcgtcgtatcttgaggagcaagctgctaaggagtttatcgcttggcttgtcaagggtcgtggacacggagaaggtacctttaccagcgatgtgtcgtcctacttggaggaacaggcagccaaggagttcatagcatggctggtcaaaggaagaggacacggcgagggtaccttcacctctgacgtctcatcttacttggaagaacaagccgccaaagagttcattgcttggttggtgaagggtcgcggacatggggagggaactttcacttcagatgtgagctcgtacctcgaagagcaggccgccaaggaattcattgcgtggctcgtgaaaggtaggggacatggcgaggggactttcacctcagacgtttctagttatctggaagagcaagccgcaaaggaattcatcgcatggcttgttaagggacgcgggggtggcggtggtggagggtccggaggcggaggaagtggcggcggcggaagcgcagagtcaaagtacggaccgccgtgcccgccgtgccctgcaccggaagctgccggtggacccagcgtgttcctgttcccaccaaagccgaaggacactctcatgatctcccggaccccggaagtcacttgtgtggtggttgacgtgagccaagaggatcctgaagtgcagttcaactggtacgtggacggagtcgaagtgcacaatgcaaagactaagcctagagaagagcagttcaactcgacctaccgcgtcgtgtccgtgctgactgtgctgcatcaggactggctcaatggaaaggaatacaagtgtaaggtcagtaacaaaggactcccgagctccatcgaaaagacgatctcgaaagccaaaggacaacccagagaaccccaagtgtacacccttcctccaagccaggaagaaatgactaagaaccaagtgtccctcacctgcctggtgaaaggcttctacccatcagatatcgcggtggaatgggaatcgaatggacagccagaaaacaactacaagactactccgccggttctggattccgacgggtcgttcttcctctactcgcgcctgacggtggataagtcccggtggcaggagggaaatgtgttttcatgcagcgtgatgcacgaagccctgcataaccactacacccagaagagcctgtccctgtcgctgggg

SEQ ID NO: 124045 - DNA, 1740 bp, Artificial Sequence
  derived and/or modified sequence
atgaagtgggtgtcatttatttctctgctgtttctgttctcatccgcgtactccggcagcttggataagaggcacggggagggtacttttaccagcgatgtgagtagctatttggaggaacaagctgctaaggaattcatcgcatggttagtgaaaggccgcggacatggggagggcacttttacatcggacgtctcgtcatatcttgaggagcaggccgctaaagagtttattgcatggctcgtaaagggccggggccatggagaaggaacgttcacaagcgacgttagttcctatctcgaggagcaagctgccaaggagtttatcgcctggctagtcaaaggaaggggccacggcgagggcacattcactagcgacgtaagctcatatttagaggagcaggcggccaaggaatttattgcctggcttgttaagggaaggggccacggcgaaggcacgtttacgagcgatgtcagcagctacctagaggaacaagctgcgaaggaattcatagcctggttagtcaagggacggggtcacggcgaaggcacgttcacgagcgacgtatcaagttatctggaggaacaggccgccaaggaatttatcgcctggctagtgaaagggcgtggccacggcgaagggacattcacctcggacgtgtcttcttacctcgaggagcaggctgccaaggagttcattgcctggcttgtgaaaggtagaggccacggggagggtacattcactagcgacgtgtcctcttacctcgaggagcaagccgctaaagagttcatcgcctggctagtgaaggggcggggacacggagagggtacattcacgagcgacgtctctagctacttggaggaacaggccgcaaaagagttcatagcttggctcgtgaagggcaggggtcacggggaggggacctttacctccgacgtgtcttcttaccttgaggaacaggcagcgaaggagttcatagcctggctggtgaaaggacggggcggtggtgggggaggtggcagcggaggtggcgggagtggtggggggggcagtgctgagagcaagtatggccccccttgcccaccttgtcctgcacctgaggctgcgggcggtccgagcgtgtttctattccctcctaagcccaaggacaccttgatgataagtcgcacccccgaggttacatgtgttgtggtagacgtgagccaggaggaccctgaggtgcagttcaactggtatgtcgacggagtggaagtgcataatgccaaaacaaagccgagagaggagcagttcaattcaacataccgcgtggttagtgtgctgactgtcctgcaccaggattggttaaacggaaaggaatacaagtgtaaggtgtcgaataagggcctacccagttctatagagaagactatctcaaaggcaaaagggcaaccacgggaacctcaggtctacactctgccgccatcccaggaggaaatgacgaagaatcaagtgagtctcacatgtctggtaaaaggcttctaccccagcgacattgccgtggagtgggagagtaacggccagcccgaaaacaactacaagactaccccacctgtgctcgactcagatggaagctttttcttgtattctaggctgaccgttgataaatcacggtggcaggagggtaacgtgttttcttgcagcgtgatgcatgaggctctccacaaccactacacacagaaatcactgtccctgtctctcggc

SEQ ID NO: 124046 - DNA, 1740 bp, Artificial Sequence
  derived and/or modified sequence
atgaagtgggtgtcattcatctctttgctgtttctgttcagctccgcatacagcggatcactcgacaaacgccacggcgaaggtacttttacctccgatgtctcgagctatctggaggaacaagccgcgaaagagtttatcgcgtggttggtaaagggtagggggcacggcgagggaaccttcacgtccgacgtgtcctcctaccttgaagagcaggcagccaaggaattcatcgcctggctggtcaaggggcgcggacacggagagggaacttttactagtgacgtgagcagttacttggaagagcaggccgcgaaagagttcatagcatggctcgtcaagggtcggggacacggagagggtacttttacctccgacgtttcctcatacctcgaagaacaagctgcgaaggaattcattgcgtggctcgtgaagggccgtggacacggagagggaaccttcaccagcgacgtttccagttacctcgaggaacaggccgcaaaagaattcattgcatggctggtgaaaggtagagggcacggggagggaacgtttacttcagatgtctcatcttacttggaagagcaagctgctaaggaattcatcgcttggctcgtgaagggaagaggacatggagagggcacgttcacctcggatgtgagctcctaccttgaagaacaggcggccaaggagttcattgcctggctggtgaaaggaagaggccacggggaaggcacctttacttcggatgtgtcgtcgtaccttgaggaacaggctgccaaagagtttatcgcatggcttgtcaagggaaggggacatggagagggcactttcacctccgacgtctcatcctacctggaagaacaagccgcaaaggagttcatcgcatggttggtcaaaggccgcggtcatggggaaggcaccttcacctcggacgtatcttcatacctggaggagcaagccgccaaggaattcatcgcttggcttgttaaggggcgaggaggcggcggagggggcgggagtggcgggggcgggtcgggaggcggtggaagcgctgaatcgaagtacggacctccgtgcccgccatgtccggcacccgaggccgcagggggtccgtccgtgttcctgttcccacccaaaccaaaggacactctgatgatctcgcggactccagaggtgacctgcgtggtggttgacgtgtcccaagaagatcctgaggtccagttcaattggtacgtggatggagtagaagtgcataacgccaaaaccaagccgcgggaagagcagttcaactccacttaccgggtggtgtcagtgctcaccgtgctgcaccaggactggctgaatggtaaggaatacaagtgcaaggtgagcaataaaggacttcctagcagcatcgagaaaacgatctcgaaggcgaaaggacagccgcgcgaacctcaagtgtacaccctgccgccgtcgcaagaagaaatgacgaagaaccaggtgtcgctgacttgtctcgtgaagggtttctacccctccgacatcgcggttgagtgggagtcgaacggtcaacccgaaaacaactacaagactactccaccggtgctggattcagatggatccttcttcctctatagccgcctgaccgtcgacaagagcagatggcaggaaggtaacgtctttagctgctcggtgatgcatgaagccctccacaatcattacacccagaagagcctgtcgctgtcgctggga

SEQ ID NO: 124047 - DNA, 1740 bp, Artificial Sequence
  derived and/or modified sequence
atgaagtgggtgtcatttatctcactgctgttcttgtttagctccgcctactcaggatcgttggacaagcgccatggggagggcactttcacgtcagatgtgtcatcgtacttggaagagcaggctgcaaaggaattcattgcctggcttgttaaagggcgcggtcacggtgaagggacttttacgtccgatgtgtcatcgtaccttgaggagcaggcagcgaaggagtttattgcttggttggtcaagggtagaggccacggggaagggacgttcacctcagacgtgtcgtcatacctcgaagagcaagccgccaaggagtttatcgcctggttggtaaaggggaggggtcacggagagggtacctttacctccgatgtctccagctaccttgaggaacaagcagcaaaagaattcatcgcatggctcgtgaagggacgcgggcatggagaaggtacttttactagtgacgttagttcgtacctcgaagaacaagcggcaaaagaattcattgcatggcttgtgaaaggaaggggacatggagagggcacctttacctcggatgtttcctcgtacctggaggaacaagcagcaaaggagttcatagcatggttggtgaaagggcgtggccatggtgagggtacttttacctccgacgtaagttcctaccttgaagagcaggctgcgaaagagtttatagcgtggctcgtaaagggcagaggtcatggagaaggcaccttcaccagcgatgttagcagctacctcgaggaacaggcagccaaggagttcatcgcttggctcgttaaggggcggggacatggtgaaggaactttcaccagtgacgtctcctcgtatctggaagaacaggcagcaaaggagtttattgcttggctggtgaaaggaagaggtcacggagaaggtactttcacgagtgacgtcagcagctatctggaagaacaggccgcgaaggaattcattgcatggctggtcaagggccggggcggaggtggaggcggcggatccggaggaggaggaagcgggggaggaggaagcgcagagagcaaatacggtcctccctgccccccttgtcccgcgcctgaagcagcagggggaccaagcgtctttctctttccacctaagccgaaggacacccttatgatttccagaactccagaagtgacctgtgtggtggtggatgtcagccaagaagatcctgaagtgcagtttaactggtacgtcgatggagtggaagtgcacaacgccaagactaagccacgggaagagcagtttaactcaacctaccgtgtggtgtctgtgctgaccgtccttcaccaggattggctgaatggtaaggagtacaagtgtaaggtgtctaataaggggctgccatcgtcaatcgaaaaaaccatctcgaaagctaagggccaacctcgagagccccaagtgtacactcttccgccgtcccaagaagagatgactaaaaaccaagtctcactgacctgtctggtcaaaggtttttacccttccgacattgcagtggaatgggagagcaacggacaaccagaaaacaattacaagactacccctcctgtgcttgattcagatggatccttttttctgtactccaggcttactgtggataagtcgagatggcaggaaggcaacgtgttttcgtgctccgtcatgcatgaagccctgcataatcattacacgcaaaagagcctctccctttctctgggc

SEQ ID NO: 124048 - DNA, 1740 bp, Artificial Sequence
  derived and/or modified sequence
atgaaatgggtgtcttttatctctttattgttcttattctcctccgcatactcagggtctctggacaaacgtcacggtgagggaacttttacttctgatgtgtctagttacctcgaggaacaggcagcaaaggagttcatcgcctggctggtcaagggacgaggccacggcgaaggtacttttacctctgacgtgtcctcctacctggaggaacaagctgccaaggagtttatagcctggctggttaaagggagagggcacggcgaaggcacttttacatccgacgtgtcttcttacctggaggagcaggctgccaaagagtttattgcttggctcgtaaaaggccgcggccacggagaaggaacatttactagtgacgtctcttcctacctcgaagagcaggccgccaaggagtttatcgcctggctggtgaaaggcagaggccatggggagggtacattcacttctgacgtgagctcttatctagaagagcaggctgccaaagagtttattgcatggctggtcaaaggccgaggccatggtgaggggacctttaccagcgacgtgtcatcttacctggaggagcaggctgcaaaagaatttattgcatggctggtgaagggcagaggacatggtgaggggacattcacctccgacgtgagcagttacttagaagaacaggccgccaaggaatttattgcttggctggtgaaaggaagaggccatggggaggggacattcacatccgacgtgagtagttatctagaggaacaggcagcaaaggagtttatagcctggctggtcaagggccgcggccacggagaggggacttttaccagcgacgtctcaagctacttagaggaacaggcagctaaagagtttatcgcatggctagttaagggccgtggccatggcgagggaacctttacaagcgatgtcagttcttacctcgaagagcaggctgccaaggagtttatagcctggttagtaaagggccggggtggaggcgggggcggaggttctgggggagggggatctggcggcgggggctccgctgaatctaaatacggtcctccctgtccaccctgccctgctccagaggccgccggcggaccaagcgttttcttattcccacctaagcccaaggatactctgatgataagcagaacccctgaggtgacctgcgtggtggtcgacgtgagtcaggaagatcccgaggtccaattcaattggtacgtcgatggagtggaagtgcacaatgccaagaccaaaccccgggaggaacagttcaatagtacttatcgggtcgtgagtgtgctgacagtgctgcaccaggattggctcaatggaaaggagtataagtgcaaggtttccaacaaggggctgccaagttccatagagaaaactatttctaaagccaagggccaaccaagggaacctcaggtgtataccctccctccatctcaagaagagatgactaagaatcaggtgagcctgacatgtctggtgaagggcttttatcctagcgacattgctgttgagtgggagagcaacggccaacctgaaaacaactacaagacaaccccccccgtcctagacagtgacggttccttttttctctactctcgtctcaccgtggacaagtctcggtggcaagaaggaaatgttttttcttgttcagtcatgcatgaagcactgcacaaccactatacacagaaatcactatccctatctttgggg

SEQ ID NO: 124049 - DNA, 1740 bp, Artificial Sequence
  derived and/or modified sequence
atgaaatgggtgtctttcattagcctcctctttctgttttcgtcggcctactctggctctcttgataaacggcatggcgagggtacttttacgagcgacgtgtcgagttaccttgaggaacaggctgcaaaagaattcattgcatggctggtgaaaggacgtggtcacggtgagggtacctttactagtgacgtgtcatcataccttgaagagcaagccgccaaggaattcatcgcctggcttgttaagggacgtggacatggagaaggcactttcacctcggatgtgtctagctaccttgaagaacaagccgcaaaagagtttatcgcatggcttgtgaagggtcgcggacacggggagggtactttcacgtcagatgtctcatcttacctcgaggaacaagccgctaaggagtttatcgcctggctggtgaagggacgaggccatggcgaaggtacgtttaccagcgacgtgtcctcgtatttggaagaacaggccgcaaaggagttcatcgcttggctggtcaaaggtaggggacacggagagggcaccttcacgtccgatgtctcatcctacctcgaagaacaggcagcaaaggagtttattgcctggctggtaaagggtagaggtcacggggaagggacgttcacctccgatgtatcaagctacctggaagagcaggctgctaaggagttcatagcatggctcgtgaagggaagaggtcatggagaggggacttttacttcagatgtgtcgtcctatctcgaagaacaagcagcaaaggaattcattgcctggttggtaaagggccggggacatggtgagggaaccttcacttccgatgtgtcaagttacttggaagagcaagcagcaaaagagttcatagcgtggcttgtcaagggccgcggtcatggtgaaggcacctttacctccgatgtttcctcgtacctggaggagcaggcggccaaggagttcattgcgtggcttgtgaaaggacggggtgggggcggaggaggtgggtccgggggcggtggctcggggggtgggggatccgcagaaagcaagtatggaccgccttgtccaccttgtcctgcaccagaagcggcaggcggaccaagcgtctttctgtttccccccaagcctaaggataccctgatgatttcgagaaccccggaagtgacttgcgtggtggtggatgtgtcgcaggaggacccagaagtccagtttaactggtacgtggatggtgtcgaggtgcacaatgctaagaccaaacctagagaagaacagtttaactcgacctacagagtggtgtcggtgctcaccgtgcttcatcaagactggctgaacggaaaggagtacaagtgtaaagtgtcgaacaagggtctgccctcgagcattgaaaagaccatctccaaggcaaaaggacaacctcgggaaccccaggtgtacactcttccaccttcccaagaagaaatgacgaagaaccaagttagtcttacttgtctggtcaagggtttttacccgtcagacattgcagttgaatgggaatcaaacggccaacctgagaacaattacaagaccactccacccgtcttggactccgacgggagcttttttctgtactcgaggctgactgtcgataagtcacgatggcaagaaggaaatgtgttttcgtgcagcgtcatgcacgaagcgcttcataatcattacacccagaaatccttgtcgctgagcctgggg

SEQ ID NO: 124050 - DNA, 664 bp, Artificial Sequence
  derived and/or modified sequence
gggaaataagagagaaaagaagagtaagaagaaatataagagccaccatgaagtgggtgtcgttcatctcactgttgttccttttcagctcggcgtactcggggtcactcgacaaacgccacggagagggcacctttacttccgatgtcagctcctacctcgaaggccaggcggcaaaggaattcatcgcctggctggtgaagggaagaagctcatcgagcaaggcccctccaccgtccctcccttcgccgtcccggctgccgggaccaagcgacactccgatcctgccacaatcgtcatcctccaaagctcctccaccctcgctgccatccccgtcaaggctgcccggtccgagcgataccccgattctcccgcagtcatcctcgagcaaggcccctccgccctcactgccatcgccaagccgcctgccgggaccttccgacaccccgatcctcccgcagtcatcctcgagcaaggcccctccgccctcactgccatcgccaagccgcctgccgggaccttccgacaccccgatcctcccgcagtgataataggctggagcctcggtggccatgcttcttgccccttgggcctccccccagcccctcctccccttcctgcacccgtacccccgtggtctttgaataaagtctgagtgggcggc

SEQ ID NO: 124051 - DNA, 333 bp, Artificial Sequence
  derived and/or modified sequence
gggaaataagagagaaaagaagagtaagaagaaatataagagccaccatgaagtgggtgtctttcatttcactgctcttcctgttctcatctgcctactccggtagcctcgataagcgccatgcagaaggaactttcaccagcgacgtgtcctcatatcttgagggccaggctgccaaagagtttatcgcttggctggtcaagggacgggggtgataataggctgccttctgcggggcttgccttctggccatgcccttcttctctcccttgcacctgtacctcttggtctttgaataaagcctgagtaggaaggcggccgctcgagcatgca

SEQ ID NO: 124052 - DNA, 496 bp, Artificial Sequence
  derived and/or modified sequence
gggaaataagagagaaaagaagagtaagaagaaatataagagccaccatgaagtgggtgtcgttcatctcactgttgttccttttcagctcggcgtactcggggtcactcgacaaacgccacggagagggcacctttacttccgatgtcagctcctacctcgaaggccaggcggcaaaggaattcatcgcctggctggtgaagggaagaagctcatcgagcaaggcccctccaccgtccctcccttcgccgtcccggctgccgggaccaagcgacactccgatcctgccacaatcgtcatcctccaaagctcctccaccctcgctgccatccccgtcaaggctgcccggtccgagcgataccccgattctcccgcagtgataataggctggagcctcggtggccatgcttcttgccccttgggcctccccccagcccctcctccccttcctgcacccgtacccccgtggtctttgaataaagtctgagtgggcggc

SEQ ID NO: 124053 - RNA, 311 nt, Artificial Sequence
  derived and/or modified sequence
gggaaauaagagagaaaagaagaguaagaagaaauauaagagccaccaugccgucaucagugucgugggggauucuucuguuggcuggacuuuguugccucguccccguaagccuggcgcacgccgaggguacguuuacauccgacgugucgucguaccucgaaggccaggcggcaaaggaguucaucgccugguuggucaggggacgggggugauaagcugccuucugcggggcuugccuucuggccaugcccuucuucucucccuugcaccuguaccucuuggucuuugaauaaagccugaguaggaag

SEQ ID NO: 124054 - RNA, 543 nt, Artificial Sequence
  derived and/or modified sequence
augaaaagcaucuacuucguugccggucuguuugugaugcuggugcagggaucauggcagcguucacuacaggacaccgaggaaaagagccggagcuuuucggccucccaagcagacccucuguccgaccccgaccaaaugaaugaagauaagagacauagucagggcaccuuuacaucugauuauagcaaguacuuagauucuaggagagcucaagacuuugugcaauggcugaugaacacaaagaggaauaggaauaauauugccaaaagacaugaugaguucgaacgccaugcggagggcaccuuuaccucugaugugaguaguuaucuugaagggcaagcagcgaaagaauucauagcuuggcuaguuaagggacgcggaagaagagacuuccccgaagagguugcaaucguugaagaauuaggcagacgccacgcggaugggucuuuuagugaugagaugaauacaauccuggacaauuuggcagcgagagauuuuaucaacuggcuuauacagacaaagaucacugacaggaaguag

SEQ ID NO: 124055 - RNA, 543 nt, Artificial Sequence
  derived and/or modified sequence
augaaauccauauauuuuguugccggucucuuuguaaugcucguacaagguucauggcaacgcucacuucaggacacagaagagaaaucuaggucauuuagcgcuucccaggccgacccuuuaucggacccggaucaaaugaacgaagauaaaagacacucgcaagggaccuucacaucagacuacuccaaguaucucgauuccaggcgggcucaagauuucgugcaaugguugaugaacacgaagcgcaaccgcaauaacaucgcaaagaggcaugaugaguuugaaagacaugcugaagggaccuucacaagcgacgucagcuccuaccuagaggggcaagccgcgaaagaauucauugccuggcuggugaaaggaagggggcggagagauuuucccgaagaggucgccaucguugaagaauuaggucggagacacgcggacggauccuucucggacgagaugaacacaauccuugauaauuuggccgcccgcgauuuuauuaauuggcugauacaaacgaaaaucaccgaucgcaaguag

SEQ ID NO: 124056 - RNA, 543 nt, Artificial Sequence
  derived and/or modified sequence
augaagaguaucuacuucguugcuggacucuucguuaugcuuguucaaggaucuuggcagaggucauugcaggacacagaagaaaagagucgaucuuucuccgcgucucaggcugacccucucuccgauccugaccagaugaaugaagauaaaagacauagccagggaacauucaccucagacuacucuaaauaucuggacucaagacgcgcccaggauuucgugcaauggcugaugaauacuaagaggaaucgaaauaacauugcaaagcgacaugacgaguucgaacgccacgcagagggcaccuuuaccucugaugugaguaguuaucuugaagggcaagcagcgaaagaauucauagcuuggcuaguuaagggacgcggaagaagagacuuccccgaagagguugcaaucguugaagaauuaggcagacgccacgcggaugggucuuuuagugaugagaugaauacaauccuggacaauuuggcagcgagagauuuuaucaacuggcuuauacagacaaagaucacugacaggaaguag

SEQ ID NO: 124057 - RNA, 543 nt, Artificial Sequence
  derived and/or modified sequence
augaaauccauauauuuuguugccggucucuuuguaaugcucguacaagguucauggcaacgcucacuucaggacacagaagagaaaucuaggucauuuagcgcuucccaggccgacccuuuaucggacccggaucaaaugaacgaagauaaaagacacucgcaagggaccuucacaucagacuacuccaaguaucucgauuccaggcgggcucaagauuucgugcaaugguugaugaacacgaagcgcaaccgcaauaacaucgcaaagaggcaugaugaguuugaaagacaugcugaaggaacuuucacaagcgauguaaguagcuacuuggagggucaagcugcuaaggaguuuauagcaugguuagugaagggccgcggacggagagacuuucccgaagagguugcuaucguggaagagcuggguaggaggcaugcugacggaucuuuuucagaugaaaugaacacaauccuugauaaccuugccgccagagauuuuauuaauuggcuuauucagaccaagauuaccgaccggaaguag

SEQ ID NO: 124058 - protein, 432 aa, Artificial Sequence
  derived and/or modified sequence
MERRRITSAARRSYVSSGEMMVGGLAPGRRLGPGTRLSLARMPPPLPTRVDFSLAGALNAGFKETRASERAEMMELNDRFASYIEKVRFLEQQNKALAAELNQLRAKEPTKLADVYQAELRELRLRLDQLTANSARLEVERDNLAQDLATVRQKLQDETNLRLEAENNLAAYRQEADEATLARLDLERKIESLEEEIRFLRKIHEEEVRELQEQLARQQVHVELDVAKPDLTAALKEIRTQYEAMASSNMHEAEEWYRSKFADLTDAAARNAELLRQAKHEANDYRRQLQSLTCDLESLRGTNESLERQMREQEERHVREAASYQEALARLEEEGQSLKDEMARHLQEYQDLLNVKLALDIEIATYRKLLEGEENRITIPVQTFSNLQIRETSLDTKSVSEGHLKRNIVVKTVEMRDGEVIKESKQEHKDVM

SEQ ID NO: 124059 - protein, 179 aa, Artificial Sequence
  derived and/or modified sequence
MERRRITSAARRSYVSSGEMMVGGLAPGRRLGPGTRLSLARMPPPLPTRVDFSLAGALNAGFKETRASERAEMMELNDRFASYIEKVRFLEQQNKALAAELNQLRAKEPTKLADVYQAELRELRLRLDQLTANSARLEVERDNLAQDLATVRQKKQMKPPWPVWIWRGRLSRWRRRSGS

SEQ ID NO: 124060 - protein, 407 aa, Artificial Sequence [sequence omitted]

SEQ ID NO: 124061 - DNA, 1299 bp, Artificial Sequence
  derived and/or modified sequence
atggaaaggcgcagaatcacgtccgccgcccgcagatcctacgtctcgagtggcgaaatgatggtgggtggcctagcaccaggaagacgactcggcccagggaccaggctcagcctggctcgaatgccacccccattgccaacccgggtggacttcagcctagccggcgctctgaatgctggattcaaagagacgagagcaagcgaaagggctgaaatgatggaacttaacgatcgcttcgcctcctacatagaaaaagtgcgctttctggaacagcagaacaaggcccttgcagccgagctgaaccagctgcgtgccaaagaacccacgaaactcgccgatgtgtaccaagcagagttgcgggaattgcgtctgaggctcgatcagcttaccgccaacagtgccaggctggaggtggaacgggataacctcgcacaagacctcgcaactgtgagacagaaactacaggatgaaactaacttgcgactggaagccgaaaacaacctggcagcctataggcaggaagccgacgaggcaactctggctaggttggacctcgaacgcaaaatcgagtcacttgaagaggaaattcgcttcttacgaaagattcacgaggaagaagtgagagagcttcaggaacagcttgcacggcagcaagtgcatgtagagctggacgttgctaaacccgacctgactgctgctttgaaagagattcgtacacaatatgaggccatggcctcttctaacatgcatgaagccgaagagtggtacaggtctaagttcgccgacttgacagatgctgctgcaagaaatgccgaactcctgcggcaggccaagcatgaggcaaacgattacagacgtcagctacagagtctgacgtgtgaccttgaatcccttcgtggtaccaatgaaagcctcgaacgccaaatgcgtgagcaggaggagaggcacgtcagggaagcagcctcttaccaagaggcgctagcacggctggaagaagaagggcagagtctaaaggacgaaatggcccgccaccttcaggaataccaagatctgctgaatgtgaagctcgccctggacatcgaaattgccacatatcgtaaattgcttgaaggagaggagaaccgaatcactattcccgtccagactttttccaatctccagatccgggagactagtttggacactaaatccgtgagcgagggccaccttaaacggaatatcgtagtaaagaccgtggagatgagggacggtgaggtgatcaaggagtccaagcaggagcataaagacgtcatgtag

SEQ ID NO: 124062 - DNA, 1224 bp, Artificial Sequence
  derived and/or modified sequence
atggaaaggcgccggattacttcggccacccgcctgagcctcgcccgcatgcccccaccgctgcccacacgcgtagatttttcactcgccggcgcccttaacgccggattcaaagaaacacgggcgagtgagcgagccgaaatgatggagctgaatgaccggttcgcgtcttacatcgaaaaagttaggttcctcgagcagcagaacaaggcactggccgcagaactcaaccagttgcgggcaaaagagcctacaaagcttgcggacgtgtaccaagcagagctgagagagctcaggctccggctagatcagctcacagcgaacagtgcaaggctggaggttgaacgcgacaacttagcccaagatttagctacagtgagacagaagctgcaggatgaaactaacctcagactggaagcggaaaataacctcgccgcttaccgacaggaagcagacgaagccactctagcccgtctcgatctggagaggaaaatcgaaagtttggaggaggaaattcgttttctgcgcaagattcacgaggaagaggtccgcgagttgcaggagcagctcgctcgccagcaggtgcatgtagagttggacgtggcaaagccagatctcaccgccgctctgaaagagatccgtacacagtacgaggcaatggcgagttccaatatgcacgaggctgaggaatggtaccggtccaaattcgccgacctcaccgatgctgccgcaaggaatgccgagctgctaagacaggcgaaacatgaagccaacgattatagacggcagctccagtctctcacctgtgacctggagtctttgagaggaacaaacgaaagcctggagcggcaaatgagggaacaggaggaaaggcacgtgcgggaagcggccagttaccaggaggcgcttgctcggctcgaggaggaagggcaaagtctgaaggatgagatggcccggcatctccaggagtatcaagacctgctgaatgttaagctggcactggacatcgagatagctacataccggaaacttctggagggtgaagaaaatagaatcactataccagttcaaactttctctaatttacagattcgcgaaaccagtctggatacgaagtccgttagtgaaggtcatttaaaacgcaatattgtggtaaagacagtagagatgagagatggcgaggtaattaaagagtcaaagcaggagcacaaggacgtcatgtag

SEQ ID NO: 124063 - DNA, 3081 bp, Artificial Sequence
  derived and/or modified sequence
agtctagcccactccttcataaagccctcgcatcccaggagcgagcagagccagagcaggatggagaggagacgcatcacctccgctgctcgccgctcctacgtctcctcaggggagatgatggtggggggcctggctcctggccgccgtctgggtcctggcacccgcctctccctggctcgaatgccccctccactcccgacccgggtggatttctccctggctggggcactcaatgctggcttcaaggagacccgggccagtgagcgggcagagatgatggagctcaatgaccgctttgccagctacatcgagaaggttcgcttcctggaacagcaaaacaaggcgctggctgctgagctgaaccagctgcgggccaaggagcccaccaagctggcagacgtctaccaggctgagctgcgagagctgcggctgcggctcgatcaactcaccgccaacagcgcccggctggaggttgagagggacaatctggcacaggacctggccactgtgaggcagaagctccaggatgaaaccaacctgaggctggaagccgagaacaacctggctgcctatagacaggaagcagatgaagccaccctggcccgtctggatctggagaggaagattgagtcgctggaggaggagatccggttcttgaggaagatccacgaggaggaggttcgggaactccaggagcagctggcccgacagcaggtccatgtggagcttgacgtggccaagccagacctcaccgcagccctgaaagagatccgcacgcagtatgaggcaatggcgtccagcaacatgcatgaagccgaagagtggtaccgctccaagtttgcagacctgacagacgctgctgcccgcaacgcggagctgctccgccaggccaagcacgaagccaacgactaccggcgccagttgcagtccttgacctgcgacctggagtctctgcgcggcacgaacgagtccctggagaggcagatgcgcgagcaggaggagcggcacgtgcgggaggcggccagttatcaggaggcgctggcgcggctggaggaagaggggcagagcctcaaggacgagatggcccgccacttgcaggagtaccaggacctgctcaatgtcaagctggccctggacatcgagatcgccacctacaggaagctgctagagggcgaggagaaccggatcaccattcccgtgcagaccttctccaacctgcagattcgagaaaccagcctggacaccaagtctgtgtcagaaggccacctcaagaggaacatcgtggtgaagaccgtggagatgcgggatggagaggtcattaaggagtccaagcaggagcacaaggatgtgatgtgaggcaggacccacctggtggcctctgccccgtctcatgaggggcccgagcagaagcaggatagttgctccgcctctgctggcacatttccccagacctgagctccccaccaccccagctgctcccctccctcctctgtccctaggtcagcttgctgccctaggctccgtcagtatcaggcctgccagacggcacccacccagcacccagcaactccaactaacaagaaactcacccccaaggggcagtctggaggggcatggccagcagcttgcgttagaatgaggaggaaggagagaaggggaggagggcggggggcacctactacatcgccctccacatccctgattcctgttgttatggaaactgttgccagagatggaggttctctcggagtatctgggaactgtgcctttgagtttcctcaggctgctggaggaaaactgagactcagacaggaaagggaaggccccacagacaaggtagccctggccagaggcttgttttgtcttttggtttttatgaggtgggatatccctatgctgcctaggctgaccttgaactcctgggctcaagcagtctacccacctcagcctcctgtgtagctgggattatagattggagccaccatgcccagctcagagggttgttctcctagactgaccctgatcagtctaagatgggtggggacgtcctgccacctggggcagtcacctgcccagatcccagaaggacctcctgagcgatgactcaagtgtctcagtccacctgagctgccatccagggatgccatctgtgggcacgctgtgggcaggtgggagcttgattctcagcacttgggggatctgttgtgtacgtggagagggatgaggtgctgggagggatagaggggggctgcctggcccccagctgtgggtacagagaggtcaagcccaggaggactgccccgtgcagactggaggggacgctggtagagatggaggaggaggcaattgggatggcgctaggcatacaagtaggggttgtgggtgaccagttgcacttggcctctggattgtgggaattaaggaagtgactcatcctcttgaagatgctgaaacaggagagaaaggggatgtatccatgggggcagggcatgactttgtcccatttctaaaggcctcttccttgctgtgtcataccaggccgccccagcctctgagcccctgggactgctgcttcttaaccccagtaagccactgccacacgtctgaccctctccaccccatagtgaccggctgcttttccctaagccaagggcctcttgcggtcccttcttactcacacacaaaatgtacccagtattctaggtagtgccctattttacaattgtaaaactgaggcacgagcaaagtgaagacactggctcatattcctgcagcctggaggccgggtgctcagggctgacacgtccaccccagtgcacccactctgctttgactgagcagactggtgagcagactggtgggatctgtgcccagagatgggactgggagggcccacttcagggttctcctctcccctctaaggccgaagaagggtccttccctctccccaagacttggtgtcctttccctccactccttcctgccacctgctgctgctgctgctgctaatcttcagggcactgctgctgcctttagtcgctgaggaaaaataaagacaaatgctgcgcccttccccag

SEQ ID NO: 124064 - DNA, 2946 bp, Artificial Sequence
  derived and/or modified sequence
atggagaggagacgcatcacctccgctacccgcctctccctggctcgaatgccccctccactcccgacccgggtggatttctccctggctggggcactcaatgctggcttcaaggagacccgggccagtgagcgggcagagatgatggagctcaatgaccgctttgccagctacatcgagaaggttcgcttcctggaacagcaaaacaaggcgctggctgctgagctgaaccagctgcgggccaaggagcccaccaagctggcagacgtctaccaggctgagctgcgagagctgcggctgcggctcgatcaactcaccgccaacagcgcccggctggaggttgagagggacaatctggcacaggacctggccactgtgaggcagaagctccaggatgaaaccaacctgaggctggaagccgagaacaacctggctgcctatagacaggaagcagatgaagccaccctggcccgtctggatctggagaggaagattgagtcgctggaggaggagatccggttcttgaggaagatccacgaggaggaggttcgggaactccaggagcagctggcccgacagcaggtccatgtggagcttgacgtggccaagccagacctcaccgcagccctgaaagagatccgcacgcagtatgaggcaatggcgtccagcaacatgcatgaagccgaagagtggtaccgctccaagtttgcagacctgacagacgctgctgcccgcaacgcggagctgctccgccaggccaagcacgaagccaacgactaccggcgccagttgcagtccttgacctgcgacctggagtctctgcgcggcacgaacgagtccctggagaggcagatgcgcgagcaggaggagcggcacgtgcgggaggcggccagttatcaggaggcgctggcgcggctggaggaagaggggcagagcctcaaggacgagatggcccgccacttgcaggagtaccaggacctgctcaatgtcaagctggccctggacatcgagatcgccacctacaggaagctgctagagggcgaggagaaccggatcaccattcccgtgcagaccttctccaacctgcagattcgagaaaccagcctggacaccaagtctgtgtcagaaggccacctcaagaggaacatcgtggtgaagaccgtggagatgcgggatggagaggtcattaaggagtccaagcaggagcacaaggatgtgatgtgaggcaggacccacctggtggcctctgccccgtctcatgaggggcccgagcagaagcaggatagttgctccgcctctgctggcacatttccccagacctgagctccccaccaccccagctgctcccctccctcctctgtccctaggtcagcttgctgccctaggctccgtcagtatcaggcctgccagacggcacccacccagcacccagcaactccaactaacaagaaactcacccccaaggggcagtctggaggggcatggccagcagcttgcgttagaatgaggaggaaggagagaaggggaggagggcggggggcacctactacatcgccctccacatccctgattcctgttgttatggaaactgttgccagagatggaggttctctcggagtatctgggaactgtgcctttgagtttcctcaggctgctggaggaaaactgagactcagacaggaaagggaaggccccacagacaaggtagccctggccagaggcttgttttgtcttttggtttttatgaggtgggatatccctatgctgcctaggctgaccttgaactcctgggctcaagcagtctacccacctcagcctcctgtgtagctgggattatagattggagccaccatgcccagctcagagggttgttctcctagactgaccctgatcagtctaagatgggtggggacgtcctgccacctggggcagtcacctgcccagatcccagaaggacctcctgagcgatgactcaagtgtctcagtccacctgagctgccatccagggatgccatctgtgggcacgctgtgggcaggtgggagcttgattctcagcacttgggggatctgttgtgtacgtggagagggatgaggtgctgggagggatagaggggggctgcctggcccccagctgtgggtacagagaggtcaagcccaggaggactgccccgtgcagactggaggggacgctggtagagatggaggaggaggcaattgggatggcgctaggcatacaagtaggggttgtgggtgaccagttgcacttggcctctggattgtgggaattaaggaagtgactcatcctcttgaagatgctgaaacaggagagaaaggggatgtatccatgggggcagggcatgactttgtcccatttctaaaggcctcttccttgctgtgtcataccaggccgccccagcctctgagcccctgggactgctgcttcttaaccccagtaagccactgccacacgtctgaccctctccaccccatagtgaccggctgcttttccctaagccaagggcctcttgcggtcccttcttactcacacacaaaatgtacccagtattctaggtagtgccctattttacaattgtaaaactgaggcacgagcaaagtgaagacactggctcatattcctgcagcctggaggccgggtgctcagggctgacacgtccaccccagtgcacccactctgctttgactgagcagactggtgagcagactggtgggatctgtgcccagagatgggactgggagggcccacttcagggttctcctctcccctctaaggccgaagaagggtccttccctctccccaagacttggtgtcctttccctccactccttcctgccacctgctgctgctgctgctgctaatcttcagggcactgctgctgcctttagtcgctgaggaaaaataaagacaaatgctgcgcccttccccag

SEQ ID NO: 124065 - DNA, 1299 bp, Artificial Sequence
  derived and/or modified sequence
atggagcggcggcgcatcaccagcgctgcccggcgctcctatgtgtcctctggagagatgatggtgggcggcctggcccctggaagaaggctgggccctggcacccggctgagcctggccaggatgcccccacccctgcccaccagggtggacttcagcctggccggggccctgaatgccggcttcaaggagacccgggccagcgagagagctgagatgatggagctgaatgacagatttgccagctacatcgagaaggtgcgcttcctggagcagcagaacaaggccctggccgctgagctgaaccagctgcgggccaaggagcccaccaagctggctgatgtgtaccaggccgagctgcgggagctgcggctgcggctggaccagctgacagccaacagcgcccggctggaggtggagcgggacaacctggcccaggacctggccaccgtgcggcagaagctgcaggatgagaccaacctgcggctggaggccgagaacaacctggccgcctaccggcaggaggctgatgaggccaccctggcccggctggacctggagaggaagattgagagcctggaggaggagatccgcttcctgaggaagatccacgaggaggaggtgcgggagctgcaggagcagctggcccggcagcaggtgcacgtggagctggatgtggccaagccagacctgacagctgccctgaaggagatccgcacccagtatgaggccatggccagcagcaacatgcatgaagctgaggagtggtaccgcagcaagtttgctgacctgacagatgctgctgccagaaatgctgagctgctgcggcaggccaagcatgaggccaatgactaccgccggcagctgcagagcctgacctgtgacctggagagcctgcggggcaccaatgaaagcctggagcggcagatgagggagcaggaggagagacatgtgcgggaggccgccagctaccaggaggccctggcccggctggaggaggagggccagagcctgaaggatgagatggcccggcacctgcaggagtaccaggacctgctgaatgtgaagctggccctggacattgaaattgccacctacaggaagctgctggagggggaggagaaccgcatcaccatccctgtgcagaccttcagcaacctgcagatccgggagaccagcctggacaccaagtctgtgtctgagggccacctgaagaggaacatcgtggtgaagacagtggagatgagagatggagaggtgatcaaggagagcaagcaggagcacaaggatgtgatgtag

SEQ ID NO: 124066 - DNA, 1224 bp, Artificial Sequence
  derived and/or modified sequence
atggagcggcggcgcatcaccagcgccacccggctgagcctggccaggatgcccccacccctgcccaccagggtggacttcagcctggccggggccctgaatgccggcttcaaggagacccgggccagcgagcgggcagagatgatggagctgaatgacagatttgccagctacatcgagaaggtgcgcttcctggagcagcagaacaaggccctggccgctgagctgaaccagctgcgggccaaggagcccaccaagctggctgatgtgtaccaggccgagctgcgggagctgcggctgcggctggaccagctgacagccaacagcgcccggctggaggtggagcgggacaacctggcccaggacctggccaccgtgcggcagaagctgcaggatgagaccaacctgcggctggaggccgagaacaacctggccgcctaccggcaggaggctgatgaggccaccctggcccggctggacctggagaggaagattgagagcctggaggaggagatccgcttcctgaggaagatccacgaggaggaggtgcgggagctgcaggagcagctggcccggcagcaggtgcacgtggagctggatgtggccaagccagacctgacagctgccctgaaggagatccgcacccagtatgaggccatggccagcagcaacatgcatgaggccgaggagtggtaccgcagcaagtttgctgacctgacagatgctgctgccagaaatgctgagctgctgcggcaggccaagcatgaggccaatgactaccgccggcagctgcagagcctgacctgtgacctggagagcctgcggggcaccaatgaaagcctggagcggcagatgagggagcaggaggagcggcacgtgcgggaggccgccagctaccaggaggccctggcccggctggaggaggagggccagagcctgaaggatgagatggcccggcacctgcaggagtaccaggacctgctgaatgtgaagctggccctggacatcgagatcgccacctacaggaagctgctggagggggaggagaaccgcatcaccatccctgtgcagaccttcagcaacctgcagatccgggagaccagcctggacaccaagtctgtgtctgagggccacctgaagagaaatattgtggtgaagacagtggagatgagagatggagaggtgatcaaggagagcaagcaggagcacaaggatgtgatgtag

SEQ ID NO: 124067 - DNA, 1299 bp, Artificial Sequence
  derived and/or modified sequence
atggagcggcggcggatcaccagcgccgcccggcggagctacgtgtcatcaggggaaatgatggttggcggtctggctcccggtagacggttggggccaggaacccgcctgtccctggctaggatgcctccaccactgcccacgagagtggacttttctttggccggtgccctcaacgctggcttcaaggaaacgagagcaagtgaaagagccgaaatgatggaactgaacgaccgattcgcctcctatattgagaaggttcgatttctggagcagcaaaacaaggcactcgccgccgagctcaaccagctgcgagcgaaagagcctactaagttagctgacgtctatcaagccgaactcagagagctcaggctgcggctcgatcagctgacagccaacagcgctagattggaagtggaaagggataatctcgcgcaagatctcgccaccgtgaggcaaaaactccaggatgagacgaacctgcgccttgaggccgaaaataatctggcagcctatcggcaggaagccgatgaggctacgctggctcgtctggacctggaacgcaagattgagagcctcgaagaagagatccgatttcttcgtaaaattcacgaggaggaggtgagggagcttcaggagcagctggccaggcaacaagttcatgtggaattagatgtggccaagccagatcttaccgctgcgttaaaggagatccgcacccagtatgaggcgatggcctcgagtaacatgcatgaggcagaagagtggtatcggagtaagttcgcagatttgacagacgctgctgctcgcaatgccgaacttttgcggcaagcaaagcacgaggcaaatgactataggaggcaactgcagagtctgacatgcgatttggaatccctaagaggaaccaacgagtcccttgaaaggcagatgagagaacaggaggagcgtcatgttagagaggccgcaagttatcaagaagctctcgcaagattagaagaagaaggacagtcacttaaagacgagatggcaaggcatctacaagagtatcaggacctcctgaacgtaaagctggctctcgatatcgaaatcgcaacgtatagaaagttacttgaaggtgaagaaaaccgaataaccatccctgtccagacgtttagcaatttgcagatccgcgaaacctccttggacaccaagtcggtctcggaaggacacttgaagaggaatatcgtagtcaagactgtggaaatgagagacggggaagtcattaaagaaagcaaacaagaacacaaggatgtgatgtag

SEQ ID NO: 124068 - DNA, 1224 bp, Artificial Sequence
  derived and/or modified sequence
atggagcggcggcggatcaccagcgccacccggctgagcctggcccggatgcccccccctctgccaacacgcgtggacttctcacttgcaggcgcactcaacgctggcttcaaagagacccgggcctctgagagggccgaaatgatggagctcaatgacagattcgccagctacattgaaaaggtgcgattccttgaacagcagaataaagcactcgcagccgaacttaaccaattgcgagcaaaggagccaacgaaactggcggatgtgtatcaggccgagctgagagaactgcgacttaggctcgatcagctgaccgcaaattcagcccggttagaagttgagagagacaatctggcccaggacctcgctaccgtgaggcagaaactgcaagatgagacgaacctgaggctagaagctgaaaacaatctggccgcctaccggcaggaagctgatgaagcaacccttgcaagactcgacctggagagaaaaatcgagtccctcgaagaagagattcggttcctgagaaaaatccatgaagaagaggtgagggagctgcaggaacagctggcaagacaacaggttcacgtcgagttagatgttgccaagccggatctgaccgccgcccttaaggagatccgcacacagtacgaagcaatggccagcagcaacatgcacgaagcagaagagtggtaccggtcaaagttcgctgacctcactgacgccgccgcgagaaacgccgagttgctacgtcaggctaagcacgaggcaaatgattatagaagacagttgcagtctctgacttgtgatctcgaaagcctcagagggaccaacgaatctctagagcgtcagatgcgcgagcaggaggagcggcacgttcgagaggccgcaagctatcaagaggccctggcacggctagaggaggagggacaaagcctgaaggatgagatggcgaggcacctgcaagaataccaggacctgctgaacgtgaagttagctctcgatatcgaaattgccacctatcgcaaactgctggagggggaagaaaaccgaataaccatacctgtacagacattcagcaacctgcagatccgagagacctcactggataccaagagcgtcagtgagggccacctgaagcgaaacatagtcgtgaagacagtggagatgagggatggagaggtcatcaaggagagcaagcaggagcacaaagatgtgatgtag

SEQ ID NO: 124069 - DNA, 1299 bp, Artificial Sequence
  derived and/or modified sequence
atggaacggaggcggatcacatccgcagcgagaaggtcttacgtgtcctcgggggaaatgatggtaggaggattggctcctggaagacgcttgggccctggaaccaggctgagcctggcacggatgcctccgccattaccgactcgggttgatttttcactggcgggagctttgaacgccggtttcaaagaaaccagggctagtgagcgggcagaaatgatggaacttaacgacagatttgcgagttatatcgaaaaagtccgcttcctggagcagcagaataaggccctggctgctgagctgaaccagcttagggccaaggagccaacgaaactcgccgatgtgtatcaggcagagttacgcgaactgcgactccggttggatcaactgacggcgaatagcgcaaggctcgaggttgagagggacaatctcgctcaggacctcgcaaccgtgagacagaaactccaggacgagacaaacctgcgtctggaagctgaaaacaatctggccgcttacagacaggaagctgacgaagccacactggctcgcctggaccttgagaggaaaatagaatctctggaggaagagattcggttcctgagaaagatacacgaggaggaagtccgggaactccaggaacagcttgcacgccagcaggtccacgtcgagttggatgtggccaagcctgacctgacggccgctctgaaggaaatcagaactcagtacgaagccatggcttctagcaatatgcatgaggccgaggaatggtacagaagtaagtttgccgatctgacagacgccgcagccaggaatgccgaattgctgaggcaggccaagcatgaggccaatgattataggcgacagctccagtcactgacgtgcgatctggagagcctgcgcggaaccaatgagtctctcgagcgccaaatgcgcgaacaggaagagcgccacgtccgtgaagctgccagctatcaagaggccttggcacgtctggaagaggaaggacaatcactcaaagatgaaatggctcgccacctgcaggagtatcaggatttacttaatgttaaattggccttggatatcgaaatagccacgtatcggaagttgctcgaaggcgaggagaacaggatcactatacccgtgcaaacttttagcaatctacagattcgcgagacttctcttgacaccaagtccgtgtctgagggacaccttaaacggaacatcgtcgtgaagactgtcgagatgagagacggcgaagtcataaaggagtccaagcaggagcacaaagacgtgatgtag

SEQ ID NO: 124070 - DNA, 1224 bp, Artificial Sequence
  derived and/or modified sequence
atggaacgccgtagaataacctccgcgacccgcctgtcactggctcggatgccacctcctttgcctacaagggtggacttttctttggcgggtgctctaaacgccggattcaaagagaccagggcgagcgagcgtgctgaaatgatggaattgaacgaccgtttcgcttcctacatcgagaaagtgcgattcctggaacaacagaacaaagcgctggccgctgagcttaaccagttgcgggctaaggagcccacaaaactcgccgatgtgtatcaggctgagctgagagagttgaggttaaggttggaccagctgacagccaattccgctaggcttgaagtggagagggataacttggcccaagatttagccaccgtccggcagaaattacaagacgaaaccaaccttcgtctggaggctgagaataacttagcagcctatcgtcaggaggctgacgaggcaacgctggctaggctggacttggaaaggaaaatcgagagtctcgaggaggaaatcagatttctgagaaagatccatgaggaggaggtgagagaactccaggaacagcttgccagacagcaggtacacgtcgaactggatgtggcaaagcccgatttgaccgcagcactgaaggagatcagaacgcagtacgaagcaatggcctcaagtaatatgcacgaggccgaggagtggtaccgcagcaagtttgccgatcttaccgacgccgctgctcggaacgccgagctcctgcgccaggcaaagcacgaggcgaacgactataggagacagctgcagtctctgacatgcgatcttgaatcccttagggggacgaacgagtccctggagaggcaaatgcgcgagcaggaggagaggcatgtgcgggaggcagccagttaccaagaggctttggccagactcgaggaggaaggacagtccctgaaggatgagatggcacgacaccttcaggaatatcaagatcttttgaacgttaagctggccctggacatagaaatcgcaacgtataggaagcttctggaaggtgaggagaaccgcatcactatcccagttcagaccttctcaaatctgcagatccgggagacttcactggacaccaaatcagtgagtgagggtcatttgaaaaggaacattgtggtaaagacggtggagatgcgggacggagaggttatcaaagagtcaaaacaggagcataaagacgttatgtag

SEQ ID NO: 124071 - DNA, 1299 bp, Artificial Sequence
  derived and/or modified sequence
atggagagaagaagaatcaccagcgccgccagaagaagctacgtgagcagcggcgagatgatggtgggcggcctggcccccggcagaagactgggccccggcaccagactgagcctggccagaatgcccccccccctgcccaccagagtggacttcagcctggccggcgccctgaacgccggcttcaaggagaccagagccagcgagagagccgagatgatggagctgaacgacagattcgccagctacatcgagaaggtgagattcctggagcagcagaacaaggccctggccgccgagctgaaccagctgagagccaaggagcccaccaagctggccgacgtgtaccaggccgagctgagagagctgagactgagactggaccagctgaccgccaacagcgccagactggaggtggagagagacaacctggcccaggacctggccaccgtgagacagaagctgcaggacgagaccaacctgagactggaggccgagaacaacctggccgcctacagacaggaggccgacgaggccaccctggccagactggacctggagagaaagatcgagagcctggaggaggagatcagattcctgagaaagatccacgaggaggaggtgagagagctgcaggagcagctggccagacagcaggtgcacgtggagctggacgtggccaagcccgacctgaccgccgccctgaaggagatcagaacccagtacgaggccatggccagcagcaacatgcacgaggccgaggagtggtacagaagcaagttcgccgacctgaccgacgccgccgccagaaacgccgagctgctgagacaggccaagcacgaggccaacgactacagaagacagctgcagagcctgacctgcgacctggagagcctgagaggcaccaacgagagcctggagagacagatgagagagcaggaggagagacacgtgagagaggccgccagctaccaggaggccctggccagactggaggaggagggccagagcctgaaggacgagatggccagacacctgcaggagtaccaggacctgctgaacgtgaagctggccctggacatcgagatcgccacctacagaaagctgctggagggcgaggagaacagaatcaccatccccgtgcagaccttcagcaacctgcagatcagagagaccagcctggacaccaagagcgtgagcgagggccacctgaagagaaacatcgtggtgaagaccgtggagatgagagacggcgaggtgatcaaggagagcaagcaggagcacaaggacgtgatgtag

SEQ ID NO: 124072 - DNA, 1224 bp, Artificial Sequence
  derived and/or modified sequence
atggagagaagaagaatcaccagcgccaccagactgagcctggccagaatgcccccccccctgcccaccagagtggacttcagcctggccggcgccctgaacgccggcttcaaggagaccagagccagcgagagagccgagatgatggagctgaacgacagattcgccagctacatcgagaaggtgagattcctggagcagcagaacaaggccctggccgccgagctgaaccagctgagagccaaggagcccaccaagctggccgacgtgtaccaggccgagctgagagagctgagactgagactggaccagctgaccgccaacagcgccagactggaggtggagagagacaacctggcccaggacctggccaccgtgagacagaagctgcaggacgagaccaacctgagactggaggccgagaacaacctggccgcctacagacaggaggccgacgaggccaccctggccagactggacctggagagaaagatcgagagcctggaggaggagatcagattcctgagaaagatccacgaggaggaggtgagagagctgcaggagcagctggccagacagcaggtgcacgtggagctggacgtggccaagcccgacctgaccgccgccctgaaggagatcagaacccagtacgaggccatggccagcagcaacatgcacgaggccgaggagtggtacagaagcaagttcgccgacctgaccgacgccgccgccagaaacgccgagctgctgagacaggccaagcacgaggccaacgactacagaagacagctgcagagcctgacctgcgacctggagagcctgagaggcaccaacgagagcctggagagacagatgagagagcaggaggagagacacgtgagagaggccgccagctaccaggaggccctggccagactggaggaggagggccagagcctgaaggacgagatggccagacacctgcaggagtaccaggacctgctgaacgtgaagctggccctggacatcgagatcgccacctacagaaagctgctggagggcgaggagaacagaatcaccatccccgtgcagaccttcagcaacctgcagatcagagagaccagcctggacaccaagagcgtgagcgagggccacctgaagagaaacatcgtggtgaagaccgtggagatgagagacggcgaggtgatcaaggagagcaagcaggagcacaaggacgtgatgtag

SEQ ID NO: 124073 - protein, 681 aa, Artificial Sequence
  derived and/or modified sequence
MCGIFAYLNYHVPRTRREILETLIKGLQRLEYRGYDSAGVGFDGGNDKDWEANACKIQLIKKKGKVKALDEEVHKQQDMDLDIEFDVHLGIAHTRWATHGEPSPVNSHPQRSDKNNEFIVIHNGIITNYKDLKKFLESKGYDFESETDTETIAKLVKYMYDNRESQDTSFTTLVERVIQQLEGAFALVFKSVHFPGQAVGTRRGSPLLIGVRSEHKLSTDHIPILYRTGKDKKGSCNLSRVDSTTCLFPVEEKAVEYYFASDASAVIEHTNRVIFLEDDDVAAVVDGRLSIHRIKRTAGDHPGRAVQTLQMELQQIMKGNFSSFMQKEIFEQPESVVNTMRGRVNFDDYTVNLGGLKDHIKEIQRCRRLILIACGTSYHAGVATRQVLEELTELPVMVELASDFLDRNTPVFRDDVCFFLSQSGETADTLMGLRYCKERGALTVGITNTVGSSISRETDCGVHINAGPEIGVASTKAYTSQFVSLVMFALMMCDDRISMQERRKEIMLGLKRLPDLIKEVLSMDDEIQKLATELYHQKSVLIMGRGYHYATCLEGALKIKEITYMHSEGILAGELKHGPLALVDKLMPVIMIIMRDHTYAKCQNALQQVVARQGRPVVICDKEDTETIKNTKRTIKVPHSVDCLQGILSVIPLQLLAFHLAVLRGYDVDFPRNLAKSVTVE

SEQ ID NO: 124074 - DNA, 2046 bp, Artificial Sequence
  derived and/or modified sequence
atgtgcggcatcttcgcctacctgaactaccacgtgcccagaaccagaagagagatcctggagaccctgatcaagggcctgcagagactggagtacagaggctacgacagcgccggcgtgggcttcgacggcggcaacgacaaggactgggaggccaacgcctgcaagatccagctgatcaagaagaagggcaaggtgaaggccctggacgaggaggtgcacaagcagcaggacatggacctggacatcgagttcgacgtgcacctgggcatcgcccacaccagatgggccacccacggcgagcccagccccgtgaacagccacccccagagaagcgacaagaacaacgagttcatcgtgatccacaacggcatcatcaccaactacaaggacctgaagaagttcctggagagcaagggctacgacttcgagagcgagaccgacaccgagaccatcgccaagctggtgaagtacatgtacgacaacagagagagccaggacaccagcttcaccaccctggtggagagagtgatccagcagctggagggcgccttcgccctggtgttcaagagcgtgcacttccccggccaggccgtgggcaccagaagaggcagccccctgctgatcggcgtgagaagcgagcacaagctgagcaccgaccacatccccatcctgtacagaaccggcaaggacaagaagggcagctgcaacctgagcagagtggacagcaccacctgcctgttccccgtggaggagaaggccgtggagtactacttcgccagcgacgccagcgccgtgatcgagcacaccaacagagtgatcttcctggaggacgacgacgtggccgccgtggtggacggcagactgagcatccacagaatcaagagaaccgccggcgaccaccccggcagagccgtgcagaccctgcagatggagctgcagcagatcatgaagggcaacttcagcagcttcatgcagaaggagatcttcgagcagcccgagagcgtggtgaacaccatgagaggcagagtgaacttcgacgactacaccgtgaacctgggcggcctgaaggaccacatcaaggagatccagagatgcagaagactgatcctgatcgcctgcggcaccagctaccacgccggcgtggccaccagacaggtgctggaggagctgaccgagctgcccgtgatggtggagctggccagcgacttcctggacagaaacacccccgtgttcagagacgacgtgtgcttcttcctgagccagagcggcgagaccgccgacaccctgatgggcctgagatactgcaaggagagaggcgccctgaccgtgggcatcaccaacaccgtgggcagcagcatcagcagagagaccgactgcggcgtgcacatcaacgccggccccgagatcggcgtggccagcaccaaggcctacaccagccagttcgtgagcctggtgatgttcgccctgatgatgtgcgacgacagaatcagcatgcaggagagaagaaaggagatcatgctgggcctgaagagactgcccgacctgatcaaggaggtgctgagcatggacgacgagatccagaagctggccaccgagctgtaccaccagaagagcgtgctgatcatgggcagaggctaccactacgccacctgcctggagggcgccctgaagatcaaggagatcacctacatgcacagcgagggcatcctggccggcgagctgaagcacggccccctggccctggtggacaagctgatgcccgtgatcatgatcatcatgagagaccacacctacgccaagtgccagaacgccctgcagcaggtggtggccagacagggcagacccgtggtgatctgcgacaaggaggacaccgagaccatcaagaacaccaagagaaccatcaaggtgccccacagcgtggactgcctgcagggcatcctgagcgtgatccccctgcagctgctggccttccacctggccgtgctgagaggctacgacgtggacttccccagaaacctggccaagagcgtgaccgtggagtag

SEQ ID NO: 124075 - DNA, 2046 bp, Artificial Sequence
  derived and/or modified sequence
atgtgtggcatcttcgcttatctgaattaccatgtcccgcgtacccggagggaaatccttgagacactgatcaaggggctgcagcgtctggagtacaggggatacgatagtgcaggggtgggttttgacggaggcaatgataaggactgggaagccaacgcttgcaagatacaattgataaagaagaaaggcaaggtgaaggctttggacgaagaggtgcataaacaacaggacatggacctcgacatcgagttcgatgtgcatctgggcatcgcccacacccggtgggcaacacatggagagccgtctccggttaacagtcacccacagcggagtgacaagaacaacgaatttatcgttatccacaatggaattatcacgaactataaggatcttaagaagttcctagaaagcaaaggctatgacttcgagtctgaaacagacacagagaccattgccaagctcgtgaaatatatgtacgataaccgggaatcccaggatacttctttcaccacccttgttgagcgggttattcagcagttggagggggccttcgcgttggtcttcaaatctgtccactttcctggacaggcggtcgggacacgccgagggtcccctctgcttatcggcgtgaggtccgagcacaaacttagcactgaccacattccaattctctatcggacaggcaaggacaaaaagggttcttgcaatcttagccgagtcgactcaactacctgcctttttcctgtcgaagaaaaagccgtcgaatactattttgctagcgacgcaagcgccgtgatcgagcacactaaccgagtgattttcctcgaggatgatgatgtggcagctgtagtggatgggagactatccattcataggattaagcgcaccgcgggcgaccatcctgggagagcagtgcagacattgcaaatggagctgcagcagataatgaaagggaacttcagcagtttcatgcagaaggaaatctttgaacagccggagtctgtggttaataccatgagaggtagggtaaacttcgacgactacaccgttaacctcggcggccttaaggaccacatcaaggaaattcaacgttgccggaggttgatcctgattgcttgcggtacttcataccatgcaggtgtggcgacccgtcaggtgctagaggaactgacagaacttcccgtgatggtggaactcgcaagtgatttcttggaccgaaatactcctgtttttcgcgatgatgtatgtttcttcctgtctcagagcggcgagacagccgacaccttgatgggactcaggtattgcaaggagcgcggggcccttactgttggcatcactaacaccgtgggaagctctatttctagggagactgattgcggcgtgcacatcaacgctggacctgagatcggtgtggctagcactaaagcctacacgtcacagtttgtatccctggtcatgttcgccctgatgatgtgcgatgatagaatttctatgcaagaacgccgcaaggaaatcatgcttggtctgaagcgactgcctgacttaattaaagaagtgttgtcaatggatgatgaaatccagaagttggccactgagctctaccaccagaagtccgtgctcattatgggcagaggatatcactacgcaacttgcctggagggggcactcaagataaaggagattacttacatgcacagtgaggggatactggctggagagctgaagcatggccctttggcactggtggataaacttatgcccgtgattatgattattatgagagaccacacctacgccaagtgtcagaacgccctgcagcaagtcgtggccagacagggacggcctgttgtgatctgcgacaaagaggatacagaaaccatcaagaatacgaagcggaccatcaaagtcccacattcagtggactgcctgcagggcattctctcagttatacccctacagttgttggcgttccacctagcagtgttgaggggatatgatgtggacttccctaggaacctggctaagagcgtgactgtggagtag

SEQ ID NO: 124076 - DNA, 3141 bp, Artificial Sequence
  derived and/or modified sequence
tggcggagcccgggaggcggagaaggctgtcgttgccttggccgtcgcatccccgagggagtcgtgtcggcgccaccccggcccccgagcccgcagattgcccaccgaagctcgtgtgtgcacccccgatcccgccagccactcgcccctggcctcgcgggccgtgtctccggcatcatgtgtggtatatttgcttacttaaactaccatgttcctcgaacgagacgagaaatcctggagaccctaatcaaaggccttcagagactggagtacagaggatatgattctgctggtgtgggatttgatggaggcaatgataaagattgggaagccaatgcctgcaaaatccagcttattaagaagaaaggaaaagttaaggcactggatgaagaagttcacaagcaacaagatatggatttggatatagaatttgatgtacaccttggaatagctcatacccgttgggcaacacatggagaacccagtcctgtcaatagccacccccagcgctctgataaaaataatgaatttatcgttattcacaatggaatcatcaccaactacaaagacttgaaaaagtttttggaaagcaaaggctatgacttcgaatctgaaacagacacagagacaattgccaagctcgttaagtatatgtatgacaatcgggaaagtcaagataccagctttactaccttggtggagagagttatccaacaattggaaggtgcttttgcacttgtgtttaaaagtgttcattttcccgggcaagcagttggcacaaggcgaggtagccctctgttgattggtgtacggagtgaacataaactttctactgatcacattcctatactctacagaacaggcaaagacaagaaaggaagctgcaatctctctcgtgtggacagcacaacctgccttttcccggtggaagaaaaagcagtggagtattactttgcttctgatgcaagtgctgtcatagaacacaccaatcgcgtcatctttctggaagatgatgatgttgcagcagtagtggatggacgtctttctatccatcgaattaaacgaactgcaggagatcaccccggacgagctgtgcaaacactccagatggaactccagcagatcatgaagggcaacttcagttcatttatgcagaaggaaatatttgagcagccagagtctgtcgtgaacacaatgagaggaagagtcaactttgatgactatactgtgaatttgggtggtttgaaggatcacataaaggagatccagagatgccggcgtttgattcttattgcttgtggaacaagttaccatgctggtgtagcaacacgtcaagttcttgaggagctgactgagttgcctgtgatggtggaactagcaagtgacttcctggacagaaacacaccagtctttcgagatgatgtttgctttttccttagtcaatcaggtgagacagcagatactttgatgggtcttcgttactgtaaggagagaggagctttaactgtggggatcacaaacacagttggcagttccatatcacgggagacagattgtggagttcatattaatgctggtcctgagattggtgtggccagtacaaaggcttataccagccagtttgtatcccttgtgatgtttgcccttatgatgtgtgatgatcggatctccatgcaagaaagacgcaaagagatcatgcttggattgaaacggctgcctgatttgattaaggaagtactgagcatggatgacgaaattcagaaactagcaacagaactttatcatcagaagtcagttctgataatgggacgaggctatcattatgctacttgtcttgaaggggcactgaaaatcaaagaaattacttatatgcactctgaaggcatccttgctggtgaattgaaacatggccctctggctttggtggataaattgatgcctgtgatcatgatcatcatgagagatcacacttatgccaagtgtcagaatgctcttcagcaagtggttgctcggcaggggcggcctgtggtaatttgtgataaggaggatactgagaccattaagaacacaaaaagaacgatcaaggtgccccactcagtggactgcttgcagggcattctcagcgtgatccctttacagttgctggctttccaccttgctgtgctgagaggctatgatgttgatttcccacggaatcttgccaaatctgtgactgtagagtgaggaatatctatacaaaatgtacgaaactgtatgattaagcaacacaagacaccttttgtatttaaaaccttgatttaaaatatcaccccttgaagcctttttttagtaaatccttatttatatatcagttataattattccactcaatatgtgatttttgtgaagttacctcttacattttcccagtaatttgtggaggactttgaataatggaatctatattggaatctgtatcagaaagattctagctattattttctttaaagaatgctgggtgttgcatttctggaccctccacttcaatctgagaagacaatatgtttctaaaaattggtacttgtttcaccatacttcattcagaccagtgaaagagtagtgcatttaattggagtatctaaagccagtggcagtgtatgctcatacttggacagttagggaagggtttgccaagttttaagagaagatgtgatttattttgaaatttgtttctgttttgtttttaaatcaaactgtaaaacttaaaactgaaaaattttattggtaggatttatatctaagtttggttagccttagtttctcagacttgttgtctattatctgtaggtggaagaaatttaggaagcgaaatattacagtagtgcattggtgggtctcaatccttaacatatttgcacaattttatagcacaaactttaaattcaagctgctttggacaactgacaatatgattttaaatttgaagatgggatgtgtacatgttgggtatcctactactttgtgttttcatctcctaaaagtggtttttatttccttgtatctgtagtcttttattttttaaatgactgctgaatgacatattttatcttgttctttaaaatcacaacacagagctgctattaaattaatattgatatattc

SEQ ID NO: 124077 - DNA, 2046 bp, Artificial Sequence
  derived and/or modified sequence
atgtgtggcatctttgcctacctgaactaccacgtgcccaggacccggcgggagatcctggagaccctcatcaagggcctgcagaggctggagtaccggggctatgattctgctggggtgggctttgatggcggcaatgacaaggactgggaggccaatgcctgcaagatccagctgatcaagaagaagggcaaggtgaaggccctggatgaggaggtgcacaagcagcaggacatggacctggacattgaatttgatgtgcacctgggcatcgcccacacccgctgggccacccatggagagcccagccctgtgaacagccacccccagaggagtgacaagaacaatgagttcatcgtcatccacaacggcatcatcaccaactacaaggacctgaagaagttcctggagagcaagggctatgactttgaaagtgaaacagacacagagaccatcgccaagctggtgaagtacatgtatgacaaccgggagagccaggacaccagcttcaccaccctggtggagagggtcatccagcagctggagggcgcctttgccctggtgttcaagtctgtgcacttccctggccaggccgtgggcacccggcggggcagccccctgctgattggagtgcgctctgagcacaagctgagcacagaccacatccccatcctgtacagaacaggcaaggacaagaagggcagctgcaacctgagccgggtggacagcaccacctgcctcttccctgtggaggagaaggctgtggagtactactttgccagtgatgccagcgctgtgattgagcacaccaacagagtcatcttcctggaggatgatgatgtggccgctgtggtggatggccgcctgagcatccaccgcatcaagaggacagctggggaccaccctggccgggctgtgcagaccctgcagatggagctgcagcagatcatgaagggcaacttcagcagcttcatgcagaaggagatctttgagcagcctgagagcgtggtgaacaccatgaggggccgggtgaactttgatgactacacagtgaacctgggcggcctgaaggaccacatcaaggagatccagcgctgcagaagactcatcctgattgcctgtggcaccagctaccacgccggcgtggccacccggcaggtgctggaggagctgacagagctgcctgtgatggtggagctggccagtgacttcctggacaggaacacccctgtgttcagagatgatgtgtgcttcttcctgagccagagcggggagacagctgacaccctgatgggcctgcgctactgcaaggagcggggggccctgactgtgggcatcaccaacacagtgggcagcagcatcagccgggagacagactgtggggtgcacatcaatgccggccctgagattggagtggccagcaccaaggcctacaccagccagtttgtgtccctggtgatgtttgccctgatgatgtgtgatgaccgcatctccatgcaggagaggaggaaggagatcatgctgggcctgaagaggctgcctgacctgatcaaggaggtgctgtccatggatgatgagatccagaagctggccacagagctgtaccaccagaagtctgtgctgatcatgggccggggctaccactacgccacctgcctggagggcgccctgaagatcaaggagatcacctacatgcacagcgagggcatcctggccggggagctgaagcacggccccctggccctggtggacaagctgatgcctgtgatcatgatcatcatgagggaccacacctacgccaagtgccagaatgccctgcagcaggtggtggcccggcagggccggcctgtggtgatctgtgacaaggaggacacagagaccatcaagaacaccaagaggaccatcaaggtgccccacagcgtggactgcctgcagggcatcctgagcgtcatccccctgcagctgctggccttccacctggccgtgctgcggggctatgatgtggacttccccaggaacctggccaagtctgtgacagtggagtag

SEQ ID NO: 124078 - DNA, 2046 bp, Artificial Sequence
  derived and/or modified sequence
atgtgcggcatcttcgcctacctgaactaccacgtgccccggaccaggagggagatactggaaacattgattaagggcctccagaggttggagtaccgaggatacgattcagccggtgtcggcttcgacggagggaacgacaaggactgggaggccaatgcctgcaaaattcagctcatcaagaaaaaggggaaagtgaaggccctcgatgaggaagttcacaaacagcaggacatggatttagatattgagttcgacgttcatctcgggattgctcacaccagatgggcaacgcacggggagccatctcctgtcaacagtcacccccagcgatcagacaaaaataacgagttcattgtgatccacaatgggataatcactaattacaaagacctgaaaaaattcttagaaagcaaaggatacgattttgaatctgaaaccgacaccgaaacgatcgctaaactcgtaaaatatatgtatgacaatagggaatcccaggatacttccttcacaacgctagtggaaagggtgattcagcagctggaaggcgcgtttgctctggtttttaaatccgtgcattttcctggtcaagctgttgggactcggcgcggtagccctctgctaattggcgtccgctctgagcacaaactgtcaactgatcacattccaatcctctacaggacaggaaaggataaaaagggatcttgtaacctatctcgagtggatagcaccacctgcctgttcccagtggaagagaaagctgtcgagtattactttgcttctgacgcaagcgcagtgatcgagcacacaaatagagtgattttcttggaagatgatgatgttgctgctgtggttgacggccgactgagcattcatcggattaaacgcacagccggcgatcaccccggacgtgccgtacaaacattgcagatggaattgcagcaaatcatgaaaggcaatttttcaagcttcatgcagaaggagatctttgagcagccagagagtgttgttaatacaatgcgcggccgggtgaacttcgatgattatactgtcaacctgggaggcctgaaagaccacatcaaggaaattcagcgctgccgcagactcatcctgattgcctgcggaacctcataccacgcaggagtggctactcggcaggtcctagaggagcttaccgaactacctgtcatggttgagctggccagcgatttcctcgataggaatactccagtttttcgcgacgacgtttgcttctttctgagccagtcaggtgaaaccgccgataccctgatggggctgcggtactgtaaggagcgtggcgccctgactgtcggcattacaaatacagtgggctcgtcaatatctcgggagacagattgcggagtgcatatcaatgccggcccagagattggtgtggcctcaaccaaggcctatacgtcacagttcgtgtctttagtgatgttcgccttgatgatgtgtgatgatcgtatatccatgcaagagcgacggaaagagattatgctcgggctgaagagattgcctgacctcatcaaagaagtcctttctatggatgatgaaatccagaaactggccacagaactctatcatcagaaaagcgtcctgattatgggcagaggttaccactacgcaacatgtctggagggcgccctgaagatcaaagaaatcacctacatgcactccgagggcatcctggcgggcgaattgaaacatgggcccctggctctggttgataaattgatgcccgtaattatgattattatgcgggaccacacctatgcgaagtgtcagaacgcgcttcagcaggttgtggcccgtcagggcaggcctgtagtcatttgtgacaaggaggacaccgagactattaagaacaccaagcggacgatcaaggtgcctcactcagtggattgtctccaaggcattttgagcgtgatccccctccaattattagccttccatctggcagttctgaggggttacgatgtagacttcccgaggaacctggctaagagcgtgacagtggagtag

SEQ ID NO: 124079 - DNA, 2046 bp, Artificial Sequence
  derived and/or modified sequence
atgtgcggaatctttgcctacttaaactaccacgtcccgcgaacccgcagagagatactggaaacccttataaaaggcctacagcggttagaatatagagggtacgattccgcgggagtaggatttgacggaggcaacgataaggactgggaggcaaacgcatgcaagattcaactcatcaagaaaaagggcaaagtcaaggcactcgatgaggaagtgcacaaacagcaagacatggatctggacatcgaatttgacgtgcacctaggcatcgcacatactcgctgggctactcacggagaacccagccctgtgaatagtcacccccagcgttctgacaagaacaacgaatttatcgtgatccacaacgggatcattacaaattacaaggacctgaagaaatttctcgagagcaaaggatatgactttgaaagcgaaacagacacagaaactattgcaaagctcgttaaatatatgtatgataacagggaaagccaggatacatctttcacaactctggtggagagggtcatccagcagttggagggcgcattcgctctcgtgttcaaaagtgtgcatttccctggccaggctgttggcactcggcgtggttcgccattgctcatcggcgtgaggagtgagcacaagctgtctacagaccacatcccaatcctttatcgcacggggaaagataaaaagggctcatgcaacttatccagagtagatagcacaacttgcctgtttcctgtcgaagagaaagcggtggagtactattttgcttctgatgcctctgccgtgatcgagcacaccaaccgggttattttcctcgaggatgacgacgtggcagctgtcgtggacggtcgactgtctattcatagaataaaacgcaccgcgggtgaccatccaggcagagccgtgcagaccctgcagatggagctgcagcagattatgaaaggtaacttctcaagcttcatgcagaaagagattttcgagcagcctgaatccgtggtgaataccatgaggggcagagtgaactttgatgattatacagtcaatctcgggggactgaaagaccacattaaggagattcaacggtgtcgacgcctgatcctgatagcatgtggcacgtcatatcacgctggagtggccaccaggcaggtgctggaagagctaaccgagctcccagtaatggtggagctcgcttccgactttctcgacagaaacacgccagtgtttagagacgatgtgtgtttttttcttagccagtcgggcgaaaccgcagacaccctgatggggttacgctactgcaaggagcgcggagccctgacggtgggtataactaatacggtcggatccagtatcagcagagagactgactgcggggttcatataaatgccggacccgagattggggtcgcgtctactaaggcctacacatctcaatttgttagcctcgttatgtttgcactgatgatgtgcgatgatcgaatcagcatgcaggaacgcagaaaagaaatcatgctcggactcaagcgcctcccagacctgattaaagaagtgctctccatggacgacgagattcagaagctggccactgagctctatcatcaaaaaagcgttctgatcatgggacgcggttaccattatgccacttgccttgagggagctctgaagattaaggaaattacttacatgcatagtgagggcatcttggcaggtgaattaaaacacggccctctggctctggttgacaagttgatgccagtcattatgatcattatgcgggatcatacttatgccaagtgtcagaacgccctgcagcaggtagtcgctcggcagggaaggcctgtggtcatttgtgataaggaagacacagagacgatcaagaataccaaacggactatcaaagttcctcacagcgtagactgccttcaggggatcctcagcgtcatccctctgcaactccttgcgtttcatctggcagtgctcaggggatacgatgtagatttcccacgcaatctggccaaatccgtcacagtcgagtag

SEQ ID NO: 124080 - protein, 217 aa, Artificial Sequence
  derived and/or modified sequence
MAAGSRTSLLLAFGLLCLSWLQEGSAFPTIPLSRLFDNAMLRARRLYQLAYDTYQEFEEAYILKEQKYSFLQNPQTSLCFSESIPTPSNRVKTQQKSNLELLRISLLLIQSWLEPVQLLRSVFANSLVYGASDSNVYRHLKDLEEGIQTLMWRLEDGSPRTGQIFNQSYSKFDTKSHNDDALLKNYGLLYCFRKDMDKVETFLRIVQCRSVEGSCGF

SEQ ID NO: 124081 - DNA, 654 bp, Artificial Sequence
  derived and/or modified sequence
atggccgccggcagcagaaccagcctgctgctggccttcggcctgctgtgcctgagctggctgcaggagggcagcgccttccccaccatccccctgagcagactgttcgacaacgccatgctgagagccagaagactgtaccagctggcctacgacacctaccaggagttcgaggaggcctacatcctgaaggagcagaagtacagcttcctgcagaacccccagaccagcctgtgcttcagcgagagcatccccacccccagcaacagagtgaagacccagcagaagagcaacctggagctgctgagaatcagcctgctgctgatccagagctggctggagcccgtgcagctgctgagaagcgtgttcgccaacagcctggtgtacggcgccagcgacagcaacgtgtacagacacctgaaggacctggaggagggcatccagaccctgatgtggagactggaggacggcagccccagaaccggccagatcttcaaccagagctacagcaagttcgacaccaagagccacaacgacgacgccctgctgaagaactacggcctgctgtactgcttcagaaaggacatggacaaggtggagaccttcctgagaatcgtgcagtgcagaagcgtggagggcagctgcggcttctag

SEQ ID NO: 124082 - DNA, 654 bp, Artificial Sequence
  derived and/or modified sequence
atggcagcaggatctaggacgagcctgctgcttgcctttggcctgttgtgcctaagttggctgcaagaggggtccgctttccctaccatccctctttcccgtctctttgataacgccatgttaagggctcggcgcctgtatcagctggcctacgatacttaccaagagtttgaggaggcatacatcctgaaagaacagaagtatagctttctgcaaaatcctcaaacctcactctgtttttccgaatctatacctaccccatcaaacagagttaaaacccagcagaagtccaacttggaactcctaaggatttcacttctactgatacaatcttggttagaaccagtacaacttctgcggtctgtgtttgccaattcgttggtctacggcgcaagtgattccaacgtatacagacatctcaaagatctggaggagggcatacagaccttgatgtggcgccttgaggacggaagccctaggaccggacagatattcaatcaatcttatagtaagttcgatacaaaatcccacaacgatgacgctctccttaaaaattatggccttctctattgttttaggaaagatatggacaaggtggagacctttttacgcatagttcagtgtaggagtgttgaaggaagctgcggattttag

SEQ ID NO: 124083 - DNA, 654 bp, Artificial Sequence
  derived and/or modified sequence
atggctgctggcagcaggaccagcctgctgctggccttcggcctgctgtgcctgtcctggctgcaggagggcagcgccttccccaccatccccctgagccggctgtttgacaatgccatgctgcgggcccggcggctgtaccagctggcctatgacacctaccaggagtttgaggaggcctacatcctgaaggagcagaagtacagcttcctgcagaacccccagaccagcctgtgcttcagcgagagcatccccacccccagcaacagagtgaagacccagcagaagagcaacctggagctgctgcgcatcagcctgctgctgatccagagctggctggagcctgtgcagctgctgcggtctgtgtttgccaacagcctggtgtatggagccagtgacagcaatgtgtaccgccacctgaaggacctggaggagggcatccagaccctgatgtggaggctggaggatggcagccccaggacaggccagatcttcaaccagagctacagcaagtttgacaccaagagccacaatgatgatgccctgctgaagaactacggcctgctgtactgcttcaggaaggacatggacaaggtggagaccttcctgagaattgtgcagtgccgctctgtggagggcagctgtggcttctag

SEQ ID NO: 124084 - DNA, 654 bp, Artificial Sequence
  derived and/or modified sequence
atggccgccggcagccggaccagcctgctgctggccttcggcctgctctgtctttcctggctccaggagggtagtgccttccccaccatccctctgagtaggttattcgacaacgctatgctgcgagcccgcaggctgtatcaactggcttacgatacctaccaggaattcgaagaagcctacattctgaaggagcagaagtactcttttctgcaaaacccccagacatctctctgctttagcgagagcattccgacaccatcaaacagggttaaaacgcaacagaagtctaatctggaactgctgcggatttcactattactgatccagtcatggcttgagccggtccagctgctccgcagcgtgtttgcgaatagtcttgtgtatggagcaagcgatagcaacgtgtaccgccaccttaaagatctcgaagaaggtatacaaacccttatgtggcgtctggaggacggcagtccccggactgggcagatctttaaccaatcgtactcaaagttcgacacgaagtcacacaatgacgacgcactgcttaagaattatggactgctctactgctttcggaaggatatggataaggtggaaactttcttgaggattgtgcaatgtagatccgtggaaggaagctgcgggttttag

SEQ ID NO: 124085 - DNA, 819 bp, Artificial Sequence
  derived and/or modified sequence
aggatcccaaggcccaactccccgaaccactcagggtcctgtggacagctcacctagcggcaatggctgcaggctcccggacgtccctgctcctggcttttggcctgctctgcctgtcctggcttcaagagggcagtgccttcccaaccattcccttatccaggctttttgacaacgctatgctccgcgcccgtcgcctgtaccagctggcatatgacacctatcaggagtttgaagaagcctatatcctgaaggagcagaagtattcattcctgcagaacccccagacctccctctgcttctcagagtctattccaacaccttccaacagggtgaaaacgcagcagaaatctaacctagagctgctccgcatctccctgctgctcatccagtcatggctggagcccgtgcagctcctcaggagcgtcttcgccaacagcctggtgtatggcgcctcggacagcaacgtctatcgccacctgaaggacctagaggaaggcatccaaacgctgatgtggaggctggaagatggcagcccccggactgggcagatcttcaatcagtcctacagcaagtttgacacaaaatcgcacaacgatgacgcactgctcaagaactacgggctgctctactgcttcaggaaggacatggacaaggtcgagacattcctgcgcatcgtgcagtgccgctctgtggagggcagctgtggcttctagctgcccgggtggcatccctgtgacccctccccagtgcctctcctggtcgtggaaggtgctactccagtgcccaccagccttgtcctaataaaattaagttgca

SEQ ID NO: 124086 - DNA, 654 bp, Artificial Sequence
  derived and/or modified sequence
atggctgccggatccagaacttctttgttactcgcgttcggactgctgtgcctgtcctggttacaggaaggctctgcattccccacaattccattatcccgtctgtttgataatgcaatgctgcgggcaagacgcctgtaccagctggcctacgatacctaccaggagttcgaagaggcttacatcctgaaagaacagaagtatagctttttacagaatccacagacttccctgtgtttctccgagagcatcccaactccgtccaatcgagtgaaaacgcagcaaaaatctaatttggaactccttcgtatctcgctcctattaatacagagctggctcgaacccgtgcagctgttacggtcagtttttgcgaatagccttgtctacggcgcttctgacagcaatgtttaccgacatctcaaggatctggaggagggtattcagactttaatgtggcgactggaagacggcagtccccgtacgggtcagatcttcaatcagagttattcaaaatttgataccaaatcgcataacgacgacgctctcctgaaaaattatggtctattgtactgcttccgcaaagacatggataaggtggagactttccttcggattgttcagtgcagatctgttgagggctcttgtgggttttag

SEQ ID NO: 124087 - DNA, 654 bp, Artificial Sequence
  derived and/or modified sequence
atggcagcaggatcacggaccagcctgctacttgcattcggcctgctgtgcttatcttggctccaggaaggtagcgcctttccaactatcccacttagtagactgtttgacaatgcaatgctgcgcgctagacgactctaccaactagcttacgacacgtaccaggaatttgaggaagcttatatcctgaaagaacagaagtattcctttctgcagaatccgcagacttccctgtgtttttcagagtctataccgacaccctccaatcgggtcaaaacccaacagaaatccaaccttgagctgcttagaatttctctgctgcttatccaatcttggttagagccggttcaacttctcagatcagtatttgcaaattcactagtatacggggcctctgattccaatgtctatcggcatttgaaagacctggaggaagggattcaaacccttatgtggcggctggaggatgggagcccaaggaccgggcagattttcaatcaatcttacagcaaattcgacactaagagtcacaatgacgatgctcttctaaagaactacggcctgctgtattgcttcagaaaggatatggacaaggttgaaacattcctcaggatagtccagtgcaggtcagtggaggggtcatgcggcttttag

SEQ ID NO: 124088 - DNA, 654 bp, Artificial Sequence
  derived and/or modified sequence
atggccgcaggatctcgaaccagtctgttgctggcatttggcctgctctgtctctcctggctgcaggagggatccgcatttcctacaatacccttatcccgactctttgataatgctatgctccgggcgcgccgtctgtaccagctcgcctatgatacctatcaggaattcgaagaggcttatatcttgaaagagcagaagtactcatttctccaaaatcctcagacatctttatgtttttcagagtccatccctactccctctaaccgtgtcaaaacccagcagaaatctaatctggaactgctcagaatttccctcctactcatacaatcatggctagaacccgttcagctgctcaggtcagtctttgcaaactcccttgtgtatggcgcctcagactccaacgtctatcggcacttaaaggatctagaagaaggtatccaaacgctcatgtggcggctggaagatgggagcccccgcaccggacagatctttaaccaatcctactctaaattcgacacaaagtcccataacgatgatgcgctccttaaaaactatgggctcctctattgcttccggaaagacatggacaaggtggaaacatttcttcgaatagtgcagtgccggtctgtggaaggatcttgcgggttttag

SEQ ID NO: 124089 - RNA, 654 nt, Artificial Sequence
  derived and/or modified sequence
auggcagcaggaucacggaccagccugcuacuugcauucggccugcugugcuuaucuuggcuccaggaagguagcgccuuuccaacuaucccacuuaguagacuguuugacaaugcaaugcugcgcgcuagacgacucuaccaacuagcuuacgacacguaccaggaauuugaggaagcuuauauccugaaagaacagaaguauuccuuucugcagaauccgcagacuucccuguguuuuucagagucuauaccgacacccuccaaucgggucaaaacccaacagaaauccaaccuugagcugcuuagaauuucucugcugcuuauccaaucuugguuagagccgguucaacuucucagaucaguauuugcaaauucacuaguauacggggccucugauuccaaugucuaucggcauuugaaagaccuggaggaagggauucaaacccuuauguggcggcuggaggaugggagcccaaggaccgggcagauuuucaaucaaucuuacagcaaauucgacacuaagagucacaaugacgaugcucuucuaaagaacuacggccugcuguauugcuucagaaaggauauggacaagguugaaacauuccucaggauaguccagugcaggucaguggaggggucaugcggcuuuuag

SEQ ID NO: 124090 - RNA, 654 nt, Artificial Sequence
  derived and/or modified sequence
auggccgcaggaucucgaaccagucuguugcuggcauuuggccugcucugucucuccuggcugcaggagggauccgcauuuccuacaauacccuuaucccgacucuuugauaaugcuaugcuccgggcgcgccgucuguaccagcucgccuaugauaccuaucaggaauucgaagaggcuuauaucuugaaagagcagaaguacucauuucuccaaaauccucagacaucuuuauguuuuucagaguccaucccuacucccucuaaccgugucaaaacccagcagaaaucuaaucuggaacugcucagaauuucccuccuacucauacaaucauggcuagaacccguucagcugcucaggucagucuuugcaaacucccuuguguauggcgccucagacuccaacgucuaucggcacuuaaaggaucuagaagaagguauccaaacgcucauguggcggcuggaagaugggagcccccgcaccggacagaucuuuaaccaauccuacucuaaauucgacacaaagucccauaacgaugaugcgcuccuuaaaaacuaugggcuccucuauugcuuccggaaagacauggacaagguggaaacauuucuucgaauagugcagugccggucuguggaaggaucuugcggguuuuag

SEQ ID NO: 124091 - protein, 463 aa, Artificial Sequence
  derived and/or modified sequence
MAGAPGPLRLALLLLGMVGRAGPRPQGATVSLWETVQKWREYRRQCQRSLTEDPPPATDLFCNRTFDEYACWPDGEPGSFVNVSCPWYLPWASSVPQGHVYRFCTAEGLWLQKDNSSLPWRDLSECEESKRGERSSPEEQLLFLYIIYTVGYALSFSALVIASAILLGFRHLHCTRNYIHLNLFASFILRALSVFIKDAALKWMYSTAAQQHQWDGLLSYQDSLSCRLVFLLMQYCVAANYYWLLVEGVYLYTLLAFSVLSEQWIFRLYVSIGWGVPLLFVVPWGIVKYLYEDEGCWTRNSNMNYWLIIRLPILFAIGVNFLIFVRVICIVVSKLKANLMCKTDIKCRLAKSTLTLIPLLGTHEVIFAFVMDEHARGTLRFIKLFTELSFTSFQGLMVAILYCFVNNEVQLEFRKSWERWRLEHLHIQRDSSMKPLKCPTSSLSSGATAGSSMYTATCQASCS

SEQ ID NO: 124092 - DNA, 1392 bp, Artificial Sequence
  derived and/or modified sequence
atggctggggcacccggacctctccggttagccctgctcctactcggcatggtcgggcgcgctggcccgaggcctcagggagcaactgtctcactgtgggagactgtgcagaagtggcgagaataccgtcggcagtgtcaaagatcattgactgaagacccacctcctgcaactgacctattttgtaatcgcacttttgatgagtatgcgtgttggcctgacggggaaccagggagtttcgtcaacgtctcctgtccgtggtatctcccctgggccagttcagtccctcaaggacatgtctaccgcttctgtaccgcagaggggttatggctccagaaggacaactcaagccttccctggcgagatctttccgagtgtgaggagtccaagagaggagaaagatctagcccagaagaacagttgctattcctctacataatatacacagtaggctatgcccttagcttctcagcactagtgatcgcatctgctatcctcctcggattccgacaccttcattgtaccaggaattacatacacttaaatttgttcgcttcttttatactcagagctttgtcagtgttcattaaggacgccgccctgaagtggatgtactctaccgctgcccagcagcaccagtgggacggattattgtcctatcaggacagccttagctgcaggctcgtatttctgctcatgcagtactgtgtggcagcaaattattattggctgctcgtggaaggagtgtacctttatacccttcttgccttttcagtgctctccgaacagtggatatttcggttgtacgtgagcatcggatggggagtacctttactgttcgtggtcccttggggtattgtgaaatacctttacgaggacgagggatgctggacacggaacagcaacatgaattattggctgataataagactccccatactctttgccatcggcgttaatttcctgatttttgtgagagtgatttgcattgtggtgagcaagctcaaagcaaacctgatgtgcaaaacagacatcaagtgccgcctcgcaaagtctacacttaccttaattcctctcctgggcacacacgaagtgatttttgctttcgtgatggatgagcatgcccgaggcacactgcgttttatcaagctcttcacagagctcagcttcacaagcttccagggcctgatggtggctattctctactgcttcgttaataacgaggttcagttggagtttagaaaatcctgggaacggtggagactcgagcacctgcacatccaaagggacagcagtatgaagccactgaaatgtcctacctccagtttatctagcggtgctactgccggaagtagcatgtataccgcaacgtgccaggcttcatgttcctag

SEQ ID NO: 124093 - DNA, 3105 bp, Artificial Sequence
  derived and/or modified sequence
gttccgcaggtggcagcgatggcccagtcctgaactccccgccatggccggcgcccccggcccgctgcgccttgcgctgctgctgctcgggatggtgggcagggccggcccccgcccccagggtgccactgtgtccctctgggagacggtgcagaaatggcgagaataccgacgccagtgccagcgctccctgactgaggatccacctcctgccacagacttgttctgcaaccggaccttcgatgaatacgcctgctggccagatggggagccaggctcgttcgtgaatgtcagctgcccctggtacctgccctgggccagcagtgtgccgcagggccacgtgtaccggttctgcacagctgaaggcctctggctgcagaaggacaactccagcctgccctggagggacttgtcggagtgcgaggagtccaagcgaggggaaagaagctccccggaggagcagctcctgttcctctacatcatctacacggtgggctacgcactctccttctctgctctggttatcgcctctgcgatcctcctcggcttcagacacctgcactgcaccaggaactacatccacctgaacctgtttgcatccttcatcctgcgagcattgtccgtcttcatcaaggacgcagccctgaagtggatgtatagcacagccgcccagcagcaccagtgggatgggctcctctcctaccaggactctctgagctgccgcctggtgtttctgctcatgcagtactgtgtggcggccaattactactggctcttggtggagggcgtgtacctgtacacactgctggccttctcggtcttatctgagcaatggatcttcaggctctacgtgagcataggctggggtgttcccctgctgtttgttgtcccctggggcattgtcaagtacctctatgaggacgagggctgctggaccaggaactccaacatgaactactggctcattatccggctgcccattctctttgccattggggtgaacttcctcatctttgttcgggtcatctgcatcgtggtatccaaactgaaggccaatctcatgtgcaagacagacatcaaatgcagacttgccaagtccacgctgacactcatccccctgctggggactcatgaggtcatctttgcctttgtgatggacgagcacgcccgggggaccctgcgcttcatcaagctgtttacagagctctccttcacctccttccaggggctgatggtggccatattatactgctttgtcaacaatgaggtccagctggaatttcggaagagctgggagcgctggcggcttgagcacttgcacatccagagggacagcagcatgaagcccctcaagtgtcccaccagcagcctgagcagtggagccacggcgggcagcagcatgtacacagccacttgccaggcctcctgcagctgagactccagcgcctgccctccctggggtccttgctgcaggccgggtggccaatccaggtgggagagacactcccagggacaagggaaggaagggacacacacacacacacacacacacacacacacacacacatacatcctgctttccctccccaaacccatcagacaggtaaatgggcagtgcctcctgggaccatggacacattttctcctaggagaagcagcctcctaatttgatcacagtggcgagaggagaggaaaaacgatcgctgtgaaaatgaggaggattgcttcttgtgaaaccacaggcccttggggttcccccagacagagccgcaaatcaaccccagactcaaactcaaggtcaacggcttattagtgaaactggggcttgcaagaggaggtggttctgaaagtggctcttctaacctcagccaaacacagagcgggagtgacgggagcctcctctgcttgcatcacttggggtcaccaccctcccctgtcttctctcaaagggaagctgtttgtgtgtctgggttgcttatttccctcatcttgccccctcatctcactgcccagtttctttttgaggggctttgtttgggccactgccagcagctgtttctggaaatggctgtaggtggtgttgagaaagaatgagcattgagacggtgctcgcttctcctccaggtatttgagttgttttggtgcctgcctctgccatgcccagagaatcagggcaggcttgccaccggggaacccagccctggggtatgagctgccaagtctattttaaagacgctcaagaatcctctggggttcatctagggacacgttaggaatgtccagactgtgggtgtagattacctgccacttccaggagcccagagggccaagagagacattgcctccacctctccttggaaatactttatctgtgaccacacgctgtctcttgagaatttggatacactctctagctttaggggaccatgaagagactctcttagggaaaccaatagtccccatcagcaccatggaggcaggctccccctgcctttgaaattcccccacttgggagcttgtatatacttcactcacttttctttattgctgtgaatagtctgtgtgcacaatgggcaattctgacttctcccatctagtggaaatgagcgaaatcatggttgtagtgatgttgtttgggagagtgcagtagtaattgatttgacccactcacacttggagctaattaaggtttgccctgcctgcagcctcccccacaaataatgaacagcagaaagactggacggggaaacctatcaatcctgcccccagccatggtgaggaagccccaagccatggtgacacacagcagcactgcagatagccagacacatggctatcctagagaggctggcaaggagttcgtggctgcaaaagaagtttctggagcaagagagagctcgctcttgggagtcaggacctccggggagagcagagggttccgacggattcctttatgagtcagtctctctctcccttttaaatggtgggaaccctccccaaaacctttccccagacacattctcctgtgcccctcagagaggcatgtgatgtgcaaggaaaataataggatataaaacacatcaagtagaaaatttcttatacttc

SEQ ID NO: 124094 - DNA, 1392 bp, Artificial Sequence
  derived and/or modified sequence
atggccggggcccctggccccctgcggctggccctgctgctgctgggcatggtgggccgggccggcccccggccccagggcgccaccgtgtccctgtgggagaccgtgcagaagtggagggagtaccgccggcagtgccagaggagcctgacagaggaccccccaccagccacagacctcttctgcaacagaacatttgatgaatatgcctgctggccagatggagagcccggcagctttgtgaatgtgtcctgcccctggtacctgccctgggccagctctgtgccccagggccacgtgtaccgcttctgcacagctgagggcctgtggctgcagaaggacaacagcagcctgccctggagggacctgtctgaatgtgaggagagcaagagaggagagaggagcagccctgaggagcagctgctcttcctgtacatcatctacacagtgggctacgccctgtccttcagcgccctggtgattgccagcgccatcctgctgggcttccgccacctgcactgcaccaggaactacatccacctgaacctgtttgccagcttcatcctgcgggccctgtctgtgttcatcaaggatgctgccctgaagtggatgtacagcacagctgcccagcagcaccagtgggatggcctgctgagctaccaggacagcctgagctgccgcctggtgttcctgctgatgcagtactgtgtggccgccaactactactggctgctggtggagggcgtgtacctgtacaccctgctggccttctctgtgctgtctgagcagtggatcttccggctgtatgtgtccatcggctggggcgtgcccctgctgtttgtggtgccctggggcatcgtgaagtacctgtatgaagatgagggctgctggaccaggaacagcaacatgaactactggctgatcatccggctgcccatcctgtttgccatcggcgtgaacttcctgatctttgtgcgggtcatctgcatcgtggtgtccaagctgaaggccaacctgatgtgcaagacagacatcaagtgccgcctggccaagagcaccctgaccctcatccccctgctgggcacccatgaagtcatctttgcctttgtgatggatgagcacgcccggggcaccctgcgcttcatcaagctgttcacagagctgtccttcaccagcttccagggcctgatggtggccatcctgtactgctttgtgaacaatgaggtgcagctggagttcaggaagtcctgggagcgctggaggctggagcacctgcacatccagagggacagctccatgaagcccctgaagtgccccaccagcagcctgagcagcggggccacagctggcagctccatgtacacagccacctgccaggccagctgcagctag

SEQ ID NO: 124095 - DNA, 1392 bp, Artificial Sequence
  derived and/or modified sequence
atggccggcgcccccggccccctgcggctggccctgctgctgctgggcatggtcgggagggccgggcccaggccacagggagccactgtgtccctttgggaaaccgtgcagaagtggagggaataccgccggcagtgccagcgctctttaactgaggacccaccccccgctacagaccttttttgcaatcgcacctttgacgagtatgcctgctggcccgatggcgaacctggctcttttgtcaacgttagctgcccctggtatctgccttgggcttcttcggtgccacaaggccatgtttaccgtttctgcactgccgaaggcctctggctgcagaaggacaatagctccttgccatggcgggacctgtctgagtgtgaggaaagtaaacgtggcgagcgaagctcacccgaagaacagctgctgtttctgtatatcatctacaccgtaggctatgcgctgagtttttcagctctcgttatcgctagcgctatactgctgggattcagacatctccattgcacaaggaactacatccacctaaatctgtttgcttctttcattctaagggctttgagcgtctttatcaaagatgctgccctcaaatggatgtattcgacggccgcgcagcagcaccaatgggatggcctcctctcatatcaggattctttgtcttgtcgcctggtcttcctgttgatgcagtactgtgtggccgctaactactactggttgctggttgagggtgtgtacctgtacaccctgttggcattctccgtcttaagcgagcaatggatctttagactatacgtgtctattggctggggcgtacccctcctgtttgttgtgccttggggtatcgtcaaatatttgtacgaagatgaggggtgttggactaggaactcgaacatgaactattggctgatcattcgtctacccatactctttgctatcggtgtgaactttctgatcttcgtgagagtcatatgcattgtggtctctaagctaaaggccaatttgatgtgcaagacagacattaagtgtcgcctggccaagtccactctgacgctgatcccactgctgggaacacacgaagtaatattcgcctttgtgatggacgaacacgccagagggacgttacggtttatcaaactgttcactgaactttcgttcacatccttccaaggcttgatggtagcaatcctgtactgctttgtcaataatgaggtgcagctcgagttccggaagtcatgggagaggtggcgtctcgagcacctccacatacagcgggatagctctatgaagcccctgaaatgccctacttcttctctgagctcaggcgccactgccggaagttccatgtatacggcaacctgtcaggccagctgttcctag

SEQ ID NO: 124096 - DNA, 1392 bp, Artificial Sequence
  derived and/or modified sequence
atggcgggtgcccctggcccactaagactggctctactactccttggcatggtcggcagggccggacccaggcctcagggcgctacagttagtctttgggagaccgtacagaagtggagagaatatcgcaggcaatgccaaagaagcctcacggaggatcctcctcccgctacagacctcttttgtaaccgaactttcgatgaatatgcgtgctggccagacggggagcccggttccttcgtgaacgtgagctgtccgtggtatttgccctgggctagcagtgtcccccagggacatgtgtatagattttgtaccgccgaaggactttggctacagaaggataattcctcccttccttggcgtgacctctccgagtgtgaggagtctaagcgcggagagcgctcatcaccagaagagcaactcctgttcctatacatcatttacactgttggctatgccttgtcattttctgcactcgtcatagcttcagctattctgcttggatttcgtcacttgcattgtactcgcaactacatccatctgaacctgtttgcaagcttcatcctgagagccctctctgtgttcattaaagacgctgctctgaaatggatgtattctacagccgctcagcagcaccaatgggacggcctcttatcctaccaggattcactgtcttgccgcctggtatttttactcatgcagtattgtgtggccgctaattattattggctcttagtggagggcgtctatctgtatacactgttggccttctcagtgctgagtgagcagtggatcttcagactttatgtgtcaatcggttggggggtaccactgctattcgtggtaccatgggggattgtgaaatatctctatgaggacgaaggctgttggacccgcaatagtaatatgaactactggctgatcattcgcttaccgatactcttcgccattggagtgaatttcctgatcttcgtgcgagtgatttgtatagtggttagcaaactgaaagccaatctgatgtgtaagaccgacataaagtgtagactggctaagtccaccctgaccctgattccgttgttgggtactcacgaggtcatatttgctttcgtaatggacgagcacgcacgcggaaccctcaggtttattaaactgttcaccgagttgagctttacatcgttccagggtctcatggttgcaatcctttattgtttcgtcaacaacgaggtgcagctggagtttcggaagtcttgggagcggtggaggctggagcacctgcacatccaacgtgatagtagtatgaagcctctgaagtgtccaacgtcttctctctccagcggcgctacagccggtagcagtatgtacactgctacatgccaggcgtcctgttcatag

SEQ ID NO: 124097 - DNA, 1392 bp, Artificial Sequence
  derived and/or modified sequence
atggccggcgcccccggccccctgagactggccctgctgctgctgggcatggtgggcagagccggccccagaccccagggcgccaccgtgagcctgtgggagaccgtgcagaagtggagagagtacagaagacagtgccagagaagcctgaccgaggaccccccccccgccaccgacctgttctgcaacagaaccttcgacgagtacgcctgctggcccgacggcgagcccggcagcttcgtgaacgtgagctgcccctggtacctgccctgggccagcagcgtgccccagggccacgtgtacagattctgcaccgccgagggcctgtggctgcagaaggacaacagcagcctgccctggagagacctgagcgagtgcgaggagagcaagagaggcgagagaagcagccccgaggagcagctgctgttcctgtacatcatctacaccgtgggctacgccctgagcttcagcgccctggtgatcgccagcgccatcctgctgggcttcagacacctgcactgcaccagaaactacatccacctgaacctgttcgccagcttcatcctgagagccctgagcgtgttcatcaaggacgccgccctgaagtggatgtacagcaccgccgcccagcagcaccagtgggacggcctgctgagctaccaggacagcctgagctgcagactggtgttcctgctgatgcagtactgcgtggccgccaactactactggctgctggtggagggcgtgtacctgtacaccctgctggccttcagcgtgctgagcgagcagtggatcttcagactgtacgtgagcatcggctggggcgtgcccctgctgttcgtggtgccctggggcatcgtgaagtacctgtacgaggacgagggctgctggaccagaaacagcaacatgaactactggctgatcatcagactgcccatcctgttcgccatcggcgtgaacttcctgatcttcgtgagagtgatctgcatcgtggtgagcaagctgaaggccaacctgatgtgcaagaccgacatcaagtgcagactggccaagagcaccctgaccctgatccccctgctgggcacccacgaggtgatcttcgccttcgtgatggacgagcacgccagaggcaccctgagattcatcaagctgttcaccgagctgagcttcaccagcttccagggcctgatggtggccatcctgtactgcttcgtgaacaacgaggtgcagctggagttcagaaagagctgggagagatggagactggagcacctgcacatccagagagacagcagcatgaagcccctgaagtgccccaccagcagcctgagcagcggcgccaccgccggcagcagcatgtacaccgccacctgccaggccagctgcagctag

SEQ ID NO: 124098 - protein, 359 aa, Artificial Sequence
  derived and/or modified sequence
MTLESMMACCLSDEVKESKRINAEIEKQLRRDKRDARRELKLLLLGTGESGKSTFIKQMRIIHGAGYSEEDKRGFTKLVYQNIFTAMQAMIRAMETLKILYKYEQNKANALLIREVDVEKVTTFEHQYVSAIKTLWEDPGIQECYDRRREYQLSDSAKYYLTDVDRIATLGYLPTQQDVLRVRVPTTGIIEYPFDLENIIFRMVDVGGQRSERRKWIHCFENVTSIMFLVALSEYDQVLVESDNENRMEESKALFRTIITYPWFQNSSVILFLNKKDLLEDKILYSHLVDYFPEFDGPQRDAQAAREFILKMFVDLNPDSDKIIYSHFTCATDTENIRFVFAAVKDTILQLNLKEYNLV

SEQ ID NO: 124099 - DNA, 1080 bp, Artificial Sequence
  derived and/or modified sequence
atgactttggaatcgatgatggcttgttgcctgtccgacgaggtgaaagaatcaaagagaatcaatgctgagatagagaagcaactcaggagggacaagcgagacgcgcggcgcgaattgaagttgttgctactggggaccggcgaaagcggaaaatctactttcattaagcagatgcggattatccacggcgccggatattcagaagaggacaagcgtggattcacgaagctggtataccagaatatttttacagctatgcaggcaatgattcgcgccatggaaaccctgaaaatcctgtataagtacgagcaaaacaaggccaacgcattactcatccgggaggtcgatgtggagaaggtgacaactttcgagcaccagtacgtctccgcaatcaagaccctctgggaggatcctggcatacaagaatgctacgatcgccggagagagtaccagctgagcgactctgctaaatattacctgacagatgtggaccgtatcgctacattagggtatctgcccacccagcaagacgtgctgagagttagggtgcccacaactggaatcatcgagtatcccttcgatcttgagaacattatctttaggatggtggacgttgggggacaacggagcgagaggcgcaagtggatacactgtttcgaaaatgttaccagtattatgttcctggtggcactcagtgagtatgaccaggtgctcgtggaaagtgacaacgaaaataggatggaggagtcaaaagccctgtttagaacaattatcacgtacccctggtttcagaattcttccgtgatcttgtttttgaataagaaagacctattagaggataagattctatattcgcaccttgtggactattttccagaattcgatggccctcagagagacgcgcaggccgcccgggaattcatcctgaaaatgtttgtggatctgaatccagactccgacaaaattatttacagccacttcacttgtgccacagacaccgagaatatccgttttgtgtttgccgccgtcaaggataccatactgcagttaaacctcaaggagtataatctggtgtag

SEQ ID NO: 124100 - DNA, 1597 bp, Artificial Sequence
  derived and/or modified sequence
gctgcggcggcggcgcgggctgagtgcggccgcgcgggagtccgcggctggcgcggcccgagcggggacccggcggctcgccaggcggcggccgaggcggggcgggccggcccggggccgagggccggtggccgaggccggagggccgcggcgggcggcggccgaggcggctccggccagggccgggccgggggccggggggcggcggcgggcaggcggccgcgtcggccggggccgggacgatgactctggagtccatgatggcgtgttgcctgagcgatgaggtgaaggagtccaagcggatcaacgccgagatcgagaagcagctgcggcgggacaagcgcgacgcccggcgcgagctcaagctgctgctgctcggcacgggcgagagcgggaagagcacgttcatcaagcagatgcgcatcatccacggcgccggctactcggaggaggacaagcgcggcttcaccaagctcgtctaccagaacatcttcaccgccatgcaggccatgatccgggccatggagacgctcaagatcctctacaagtacgagcagaacaaggccaatgcgctcctgatccgggaggtggacgtggagaaggtgaccaccttcgagcatcagtacgtcagtgccatcaagaccctgtgggaggacccgggcatccaggaatgctacgaccgcaggcgcgagtaccagctctccgactctgccaagtactacctgaccgacgttgaccgcatcgccaccttgggctacctgcccacccagcaggacgtgctgcgggtccgcgtgcccaccaccggcatcatcgagtaccctttcgacctggagaacatcatcttccggatggtggatgtggggggccagcggtcggagcggaggaagtggatccactgctttgagaacgtgacatccatcatgtttctcgtcgccctcagcgaatacgaccaagtcctggtggagtcggacaacgagaaccggatggaggagagcaaagccctgttccggaccatcatcacctacccctggttccagaactcctccgtcatcctcttcctcaacaagaaggacctgctggaggacaagatcctgtactcgcacctggtggactacttccccgagttcgatggtccccagcgggacgcccaggcggcgcgggagttcatcctgaagatgttcgtggacctgaaccccgacagcgacaagatcatctactcacacttcacgtgtgccaccgacacggagaacatccgcttcgtgttcgcggccgtgaaggacaccatcctgcagctcaacctcaaggagtacaacctggtctgagcgcccaggcccagggagacgggatggagacacggggcaggaccttccttccacggagcctgcggctgccgggcgggtggcgctgccgagtccgggccggggcctctgcccgcgggaggagatttttttttttcatatttttaacaaatggtttttatttcacagttatcaggggatgtacatctctccctccgtacacttcgcgcaccttctcaccttttgtcaacggcaaaggcagcctttttctggccttgacttatggctcgcttttttct

SEQ ID NO: 124101 - DNA, 1080 bp, Artificial Sequence
  derived and/or modified sequence
atgaccctggagagcatgatggcctgctgcctgagtgatgaggtgaaggagagcaagaggatcaatgctgagattgagaagcagctgcggcgggacaagagagatgcccggcgggagctgaagctgctgctgctgggcactggagagagcggcaagagcaccttcatcaagcagatgaggatcatccatggagctggctacagcgaggaggacaagaggggcttcaccaagctggtgtaccagaacatcttcaccgccatgcaggccatgatccgggccatggagaccctgaagatcctgtacaagtatgagcagaacaaggccaatgccctgctgatccgggaggtggatgtggagaaggtgaccacctttgagcaccagtatgtgtctgccatcaagaccctgtgggaggaccccggcatccaggagtgctatgacagaagaagagagtaccagctgagtgacagcgccaagtactacctgacagatgtggacagaattgccaccctgggctacctgcccacccagcaggatgtgctgcgggtgcgggtgcccaccaccggcatcatcgagtacccctttgacctggagaacatcatcttcaggatggtggatgtgggcggccagaggagtgaaagaaggaagtggatccactgctttgaaaatgtgaccagcatcatgttcctggtggccctgtctgaatatgaccaggtgctggtggagagtgacaatgaaaataggatggaggagagcaaggccctcttccgcaccatcatcacctacccctggttccagaacagcagcgtcatcctcttcctgaacaagaaggacctgctggaggacaagatcctgtacagccacctggtggactacttccctgagtttgatggcccccagagagatgcccaggccgcccgggagttcatcctgaagatgtttgtggacctgaacccagacagcgacaagatcatctacagccacttcacctgtgccacagacacagagaacatccgctttgtgtttgctgctgtgaaggacaccatcctgcagctgaacctgaaggagtacaacctggtgtag

SEQ ID NO: 124102 - DNA, 1080 bp, Artificial Sequence
  derived and/or modified sequence
atgaccctggagagcatgatggcctgctgcctgagcgacgaggtgaaggagagcaaacggatcaacgcagagatcgaaaaacagttaagacgggacaaaagagatgcccgtcgggaactgaagctgctcctcctggggactggtgaatctggtaagtctacttttattaagcagatgagaattatccatggagccggatacagcgaggaggataagaggggcttcacaaaactggtttatcagaacattttcacagctatgcaagcaatgattagggcaatggagaccttgaagatattatataaatatgagcagaataaagccaacgctctgcttatcagggaagtggacgtagaaaaagtgaccacattcgagcaccagtatgtatcggcaattaagaccctttgggaagaccccggtattcaagaatgttatgacaggaggcgagagtaccagttgtccgattctgcgaagtattacctaaccgatgtggacagaattgctactttagggtatctgccaacacaacaggacgtgctcagggtgagagtccccacgaccggcataattgaataccctttcgatttggagaacattatattcaggatggtcgacgtcggtggccaaagaagtgagcgtaggaagtggatccattgctttgaaaacgtcacgtctataatgttccttgtggctttatccgaatacgatcaagttttggtcgagagcgataatgaaaataggatggaagaaagtaaagcacttttcaggaccattattacctatccttggtttcagaactccagtgtaattctctttcttaataagaaagaccttttggaggataagatcctgtacagtcacctcgttgactactttcccgaattcgacggaccccaacgtgatgctcaggcagcaagggaatttatcctgaaaatgttcgttgatctgaatcccgattccgacaagataatctactcccacttcacatgtgccactgacacagagaatatccggtttgtattcgcggctgtgaaggacacgatcctgcagctcaatctgaaggaatataatctggtctag

SEQ ID NO: 124103 - DNA, 1080 bp, Artificial Sequence
  derived and/or modified sequence
atgactcttgaatctatgatggcatgttgtctcagcgatgaggtaaaagagagcaagagaattaatgccgagattgaaaaacagcttcgtcgggataaaagagacgcccgacgagagctcaagctgctcctcctgggaacgggcgagtcggggaagtcaacttttatcaaacaaatgcgcatcatccacggcgcaggttatagcgaggaggacaagagaggttttacaaaacttgtctaccagaacatctttaccgcaatgcaggctatgatccgcgctatggaaacccttaaaattctttacaaatatgaacagaacaaggccaacgcactgcttatcagggaggtggatgtggagaaggtcactacatttgagcaccagtacgtgtccgccataaaaacactttgggaagatccaggaattcaggaatgctacgaccgccgtagagagtaccagctgtctgacagtgcgaaatactatttaaccgacgttgataggatcgccaccctaggctatctcccaacccagcaggacgtgctgagagtgcgcgtgcccaccactgggatcattgaatacccctttgatctggagaacattatatttcgtatggttgatgtgggtggacagcggtctgaacggcgtaagtggattcactgttttgaaaacgtgacatccatcatgttcttggttgcactctccgagtacgatcaggtgttggtggaatccgacaatgaaaatcggatggaagagtcaaaggcactctttcgaacaattatcacatatccctggtttcaaaacagctcagtgattctttttctgaacaaaaaagacctcctggaggacaaaatcctgtactctcatttggtagattacttccctgagttcgacgggcctcagcgcgatgcccaagcagcaagggagttcattttgaagatgtttgtggatttgaacccagattccgacaaaattatttacagccacttcacttgcgcaacagatacagagaacattcgcttcgtgtttgcggctgtcaaagatacaatcctgcaactgaatctcaaggaatacaacctggtctag

SEQ ID NO: 124104 - DNA, 1080 bp, Artificial Sequence
  derived and/or modified sequence
atgacattggagtctatgatggcatgttgcctcagtgacgaagtgaaagagtccaaaagaatcaatgctgagatagaaaaacagctcagacgcgacaagcgggatgctagaagagaattaaaactgctgctactgggaactggggagtcaggtaaatcaaccttcatcaaacaaatgagaatcattcatggcgccggttacagtgaggaggacaaacgtggctttaccaaattggtgtatcagaacattttcacagctatgcaggcaatgattcgtgcaatggaaacgctcaaaattctttacaagtacgagcaaaacaaagccaatgccttgctgattcgggaagtggatgttgaaaaagtgacaacgttcgagcatcagtacgtgtcagctatcaaaaccttgtgggaagacccgggtatacaggagtgttatgataggaggagggagtatcagttgagcgacagcgcaaagtattacttaactgatgttgacaggatcgctaccctgggataccttcccactcagcaggacgtgcttcgggttagagttccaaccaccgggataatagagtatcccttcgacctggaaaacattatttttagaatggtggacgtaggtggccagaggtctgaacggcgcaagtggattcactgttttgaaaatgtcacctctatcatgttccttgttgctttgtccgagtacgaccaagttctggtagaatcagacaacgaaaatagaatggaagaatctaaggccttgtttaggaccatcataacctacccttggttccagaattcctccgtgattctcttcctgaataaaaaggatctcttagaggacaagattttatattctcatttagttgactacttccctgaattcgacgggccccagagagacgcacaggcagctagggagtttatactgaaaatgtttgttgatctgaaccccgactccgacaagattatttactcgcatttcacatgcgccacagatacagagaatattcgattcgtgttcgccgccgtcaaggatacaatcttgcagctgaaccttaaagagtataacctcgtgtag

SEQ ID NO: 124105 - DNA, 1080 bp, Artificial Sequence
  derived and/or modified sequence
atgacgctcgaatctatgatggcctgttgcctgtcagacgaagtgaaggagtccaaacgaattaatgccgagattgagaagcagctaaggcgcgacaagagagacgcacgcagagaactcaaacttttattgctgggaacgggggaatcaggcaagtccaccttcatcaaacagatgcgtattatccacggcgccggttacagcgaggaagacaagagaggattcaccaagttagtatatcagaatatcttcactgcaatgcaggcgatgatccgagcaatggaaactctgaagatcttgtataagtacgaacaaaacaaagccaatgcattactcatccgggaagtagatgttgaaaaagttacaaccttcgagcaccagtacgtcagcgccatcaagacactatgggaggaccctgggatacaggagtgttacgacagacgcagggaatatcaactgtctgatagtgccaagtattatcttaccgacgtcgacagaatcgccacattgggatatctgccaactcaacaggacgtgctcagagtacgggtgcccaccaccgggataattgagtatccattcgacctggagaatatcatttttagaatggtggacgtaggtggccagaggtctgaacggcgcaagtggattcactgttttgaaaatgtcacctctatcatgttccttgttgctttgtccgagtacgaccaagttctggtagaatcagacaacgaaaatagaatggaagaatctaaggccttgtttaggaccatcataacctacccttggttccagaattcctccgtgattctcttcctgaataaaaaggatctcttagaggacaagattttatattctcatttagttgactacttccctgaattcgacgggccccagagagatgcacaggccgccagggaatttatcctgaaaatgttcgtcgatttgaatcctgactccgacaagatcatttattcccactttacttgcgctaccgatacagagaacattaggtttgttttcgccgccgtcaaagatacgatacttcaactgaacctcaaggaatataaccttgtatag

SEQ ID NO: 124106 - DNA, 1080 bp, Artificial Sequence
  derived and/or modified sequence
atgaccctggagagcatgatggcctgctgcctgagcgacgaggtgaaggagagcaagagaatcaacgccgagatcgagaagcagctgagaagagacaagagagacgccagaagagagctgaagctgctgctgctgggcaccggcgagagcggcaagagcaccttcatcaagcagatgagaatcatccacggcgccggctacagcgaggaggacaagagaggcttcaccaagctggtgtaccagaacatcttcaccgccatgcaggccatgatcagagccatggagaccctgaagatcctgtacaagtacgagcagaacaaggccaacgccctgctgatcagagaggtggacgtggagaaggtgaccaccttcgagcaccagtacgtgagcgccatcaagaccctgtgggaggaccccggcatccaggagtgctacgacagaagaagagagtaccagctgagcgacagcgccaagtactacctgaccgacgtggacagaatcgccaccctgggctacctgcccacccagcaggacgtgctgagagtgagagtgcccaccaccggcatcatcgagtaccccttcgacctggagaacatcatcttcagaatggtggacgtgggcggccagagaagcgagagaagaaagtggatccactgcttcgagaacgtgaccagcatcatgttcctggtggccctgagcgagtacgaccaggtgctggtggagagcgacaacgagaacagaatggaggagagcaaggccctgttcagaaccatcatcacctacccctggttccagaacagcagcgtgatcctgttcctgaacaagaaggacctgctggaggacaagatcctgtacagccacctggtggactacttccccgagttcgacggcccccagagagacgcccaggccgccagagagttcatcctgaagatgttcgtggacctgaaccccgacagcgacaagatcatctacagccacttcacctgcgccaccgacaccgagaacatcagattcgtgttcgccgccgtgaaggacaccatcctgcagctgaacctgaaggagtacaacctggtgtag

SEQ ID NO: 124107 - protein, 374 aa, Artificial Sequence
  derived and/or modified sequence
MARSLTWRCCPWCLTEDEKAAARVDQEINRILLEQKKQDRGELKLLLLGPGESGKSTFIKQMRIIHGAGYSEEERKGFRPLVYQNIFVSMRAMIEAMERLQIPFSRPESKHHASLVMSQDPYKVTTFEKRYAAAMQWLWRDAGIRAYYERRREFHLLDSAVYYLSHLERITEEGYVPTAQDVLRSRMPTTGINEYCFSVQKTNLRIVDVGGQKSERKKWIHCFENVIALIYLASLSEYDQCLEENNQENRMKESLALFGTILELPWFKSTSVILFLNKTDILEEKIPTSHLATYFPSFQGPKQDAEAAKRFILDMYTRMYTGCVDGPEGSKKGARSRRLFSHYTCATDTQNIRKVFKDVRDSVLARYLDEINLL

SEQ ID NO: 124108 - DNA, 1125 bp, Artificial Sequence
  derived and/or modified sequence
atggcccgctcattaacctggaggtgttgtccttggtgtctgactgaagatgagaaggcagccgctcgagtggaccaggagatcaatcggatactcctggaacagaagaagcaggaccgaggtgaactcaagttactgctcctgggcccaggcgaaagtggtaaatccacattcattaaacagatgcgaatcattcacggtgctgggtactcggaagaagagcgcaagggattccgtccattggtgtaccagaacatcttcgtatctatgcgcgccatgattgaagcaatggaacggcttcagatccccttcagccgccccgagagtaagcaccacgccagcctggtgatgagccaggatccatataaagttactacattcgaaaagaggtacgctgctgcaatgcagtggctctggcgggacgccggcattcgggcgtattacgagcggagacgggagtttcatctcttagattcagccgtatattatctgagtcacttggagcgaatcacggaggaaggctacgtaccgacggcgcaagacgtcctccggagcaggatgcctacgaccggtattaatgagtactgcttctctgtgcagaaaacaaatctgaggatcgtggatgtggggggtcagaaatccgaacgtaagaagtggatccactgtttcgaaaacgttattgcgctgatctatctcgcaagcctttctgagtacgaccagtgcttagaagaaaacaatcaggagaacaggatgaaggagagtcttgcactcttcggcactatcttagagcttccatggttcaagtctacatccgtgatattattcttaaacaaaacggacattcttgaagagaagattccgacctcccacttagcaacgtatttcccctcttttcaaggtccaaaacaggatgcggaggccgctaagagattcatcttagacatgtatacccggatgtatactggatgcgttgatggcccagaggggagcaagaagggagctagatcgcgacgtctcttctcccattacacttgtgcgacggatacccaaaatatccgcaaagttttcaaagacgttcgcgattccgtccttgctagatacctggatgaaataaacttgttgtag

SEQ ID NO: 124109 - DNA, 2132 bp, Artificial Sequence
  derived and/or modified sequence
ggggagccctggcctccccacctcctcccgtccccaccctgttcccagcactcaagccttgccaccgccgagccgggcttcctgggtgtttcaggcaaggaagtctaggtccctggggggtgacccccaaggaaaaggcagcctccctgcgcacccggttgcccggagccctctccagggccggctgggctgggggttgccctggccagcaggggcccgggggcgatgccacccggtgccgactgaggccaccgcaccatggcccgctcgctgacctggcgctgctgcccctggtgcctgacggaggatgagaaggccgccgcccgggtggaccaggagatcaacaggatcctcttggagcagaagaagcaggaccgcggggagctgaagctgctgcttttgggcccaggcgagagcgggaagagcaccttcatcaagcagatgcggatcatccacggcgccggctactcggaggaggagcgcaagggcttccggcccctggtctaccagaacatcttcgtgtccatgcgggccatgatcgaggccatggagcggctgcagattccattcagcaggcccgagagcaagcaccacgctagcctggtcatgagccaggacccctataaagtgaccacgtttgagaagcgctacgctgcggccatgcagtggctgtggagggatgccggcatccgggcctactatgagcgtcggcgggaattccacctgctcgattcagccgtgtactacctgtcccacctggagcgcatcaccgaggagggctacgtccccacagctcaggacgtgctccgcagccgcatgcccaccactggcatcaacgagtactgcttctccgtgcagaaaaccaacctgcggatcgtggacgtcgggggccagaagtcagagcgtaagaaatggatccattgtttcgagaacgtgatcgccctcatctacctggcctcactgagtgaatacgaccagtgcctggaggagaacaaccaggagaaccgcatgaaggagagcctcgcattgtttgggactatcctggaactaccctggttcaaaagcacatccgtcatcctctttctcaacaaaaccgacatcctggaggagaaaatccccacctcccacctggctacctatttccccagtttccagggccctaagcaggatgctgaggcagccaagaggttcatcctggacatgtacacgaggatgtacaccgggtgcgtggacggccccgagggcagcaagaagggcgcacgatcccgacgcctcttcagccactacacatgtgccacagacacacagaacatccgcaaggtcttcaaggacgtgcgggactcggtgctcgcccgctacctggacgagatcaacctgctgtgacccaggccccacctggggcaggcggcaccggcgggcgggtgggaggtgggagtggctgcagggacccctagtgtccctggtctatctctccagcctcggcccacacgcaagggagtcgggggacggacggcccgctgctggccgctctcttctctgcctctcaccaggacagccgccccccagggtactcctgcccttgcttgactcagtttccctcctttgaaagggaaggagcaaaacggccatttgggatgccagggtggatgaaaaggtgaagaaatcaggggattgaggacttgggtgggtgggcatctctcaggagccccatctccgggcgtgtcacctcctgggcagggttctgggaccctctgtgggtgacgcacaccctgggatggggctagtagagccttcaggcgccttcgggcgtggactctggcgcactctagtggacaggagaaggaacgccttccaggaacctgtggactaggggtgcagggacttccctttgcaaggggtaacagaccgctggaaaacactgtcactttcagagctcggtggctcacagcgtgtcctgccccggtttgcggacgagagaaatcgcggcccacaagcatccccccatcccttgcaggctgggggctgggcatgctgcatcttaaccttttgtatttattccctcaccttctgcagggctccgtgcgggctgaaattaaagatttcttagaggctgcgtcgccagcgtcctgttt

SEQ ID NO: 124110 - DNA, 1125 bp, Artificial Sequence
  derived and/or modified sequence
atggcccggagcctgacctggcgctgctgcccctggtgcctgacagaagatgagaaggctgctgcccgggtggaccaggagatcaaccgcatcctgctggagcagaagaagcaggacagaggagagctgaagctgctgctgctgggccctggagagagcggcaagagcaccttcatcaagcagatgaggatcatccacggggccggctacagcgaggaggagaggaagggcttccggcccctggtgtaccagaacatctttgtgtccatgagggccatgattgaggccatggagcggctgcagatccccttcagcaggcctgagagcaagcaccacgccagcctggtgatgagccaggacccctacaaggtgaccacctttgagaagagatatgctgctgccatgcagtggctgtggagagatgctggcatccgggcctactatgaaagaagaagagagttccacctgctggacagcgctgtgtactacctgagccacctggagcgcatcacagaggagggctacgtgcccacagcccaggatgtgctgcggagcaggatgcccaccaccggcatcaatgagtactgcttctctgtgcagaagaccaacctgcgcatcgtggatgtgggcggccagaagtctgagaggaagaagtggatccactgctttgaaaatgtgattgccctgatctacctggccagcctgtctgaatatgaccagtgcctggaggagaacaaccaggagaacaggatgaaggagagcctggccctgtttggcaccatcctggagctgccctggttcaagagcaccagcgtcatcctcttcctgaacaagacagacatcctggaggagaagatccccaccagccacctggccacctacttccccagcttccagggccccaagcaggatgctgaggccgccaagcgcttcatcctggacatgtacaccaggatgtacacaggctgtgtggatggccctgagggcagcaagaagggggcccggagcagaagactcttcagccactacacctgtgccacagacacccagaacatcaggaaggtgttcaaggatgtgcgggacagcgtgctggcccgctacctggatgagatcaacctgctgtag

SEQ ID NO: 124111 - DNA, 1125 bp, Artificial Sequence
  derived and/or modified sequence
atggcccggagcctgacctggcggtgctgcccctggtgcctgaccgaagacgaaaaagccgcagcaagagtggatcaggaaattaaccgcattctgctcgaacagaagaagcaggatcgtggcgaactgaaactcctcctcttgggaccaggagagtcgggaaagtccacattcataaaacaaatgcgcattattcacggagcgggatattctgaggaggaaaggaaggggtttcgaccactggtgtaccaaaacatcttcgtgtctatgagggccatgatcgaggctatggaaaggttgcagatccctttcagcaggcctgagagcaagcaccatgcgtccctggtgatgagtcaggatccttataaggtgaccacttttgagaagcgatatgccgctgctatgcagtggctttggcgcgacgccgggattcgagcatattatgaaagaaggagagagttccatttgctcgacagcgctgtgtactacttatctcatcttgagcgcataactgaagaaggctatgtgccgactgctcaggatgtgctgaggtcccgtatgccaacaaccggaattaatgagtattgcttttctgtccagaaaaccaacctgcgaatagtagatgttggcggccaaaagagcgaacggaagaagtggatccactgttttgagaatgtgattgcactgatatacctcgcaagcttgtccgagtatgaccagtgcttggaagaaaacaaccaggagaacagaatgaaggaaagtttggccctgtttggtactattctcgaactcccctggtttaaaagcacctcagtgatactatttctgaataagacggacatcctcgaggaaaagatccctacctctcatctggcaacttattttcctagttttcaaggtcccaaacaggacgctgaggcggcaaagcgtttcatcctggacatgtacacccggatgtataccgggtgtgtagacggacccgaaggaagcaaaaagggggctcgcagccggagattgttttcccactacacctgtgcaaccgacacacaaaatatcagaaaagttttcaaggatgtacgggattcagttcttgcccggtatctggacgaaattaacttgctgtag

SEQ ID NO: 124112 - DNA, 1125 bp, Artificial Sequence
  derived and/or modified sequence
atggccaggagtcttacctggcgatgttgtccgtggtgcctgaccgaggacgaaaaggctgccgctagagtggaccaggagattaataggatccttcttgaacagaagaagcaagacaggggagagctcaagctgctgctgctcggcccaggcgaaagcgggaagagtaccttcattaagcaaatgagaataattcatggcgcaggttactcagaggaggagaggaaggggtttagaccgctcgtttatcaaaacattttcgtgtcaatgcgggctatgatcgaggctatggaacgactgcagataccctttagtcgacccgagagcaagcaccacgcgtccttggtgatgagccaagacccgtacaaagtcacaaccttcgaaaagaggtatgccgcagctatgcagtggctttggcgagacgccggtattcgagcctactacgaacgtagaagggagtttcacctgctggatagcgccgtttactatctgagccatctggagcgtatcactgaggagggatatgtgcctacggcccaagatgtactcaggtctaggatgcctaccaccggtattaacgaatactgctttagtgtacagaagaccaacctgaggatcgtggatgtgggaggacagaagtccgagcgtaagaagtggattcattgttttgagaacgtgattgccctaatctacctggcttcactgagtgaatacgatcagtgcctcgaagagaacaatcaggagaacagaatgaaagagtctcttgccttatttgggacaattctggagttgccttggtttaaatccacatctgtgattctgtttctaaataagaccgacatcctagaagagaaaataccaacctctcacctcgccacgtactttccgagcttccaagggcctaagcaggacgctgaggctgcaaaacgctttatccttgatatgtacactcgcatgtacacagggtgtgtggatggtccggagggcagcaaaaaaggagctcgatcccggcgactcttcagccactatacctgcgctaccgacacccagaacattcgcaaggtgtttaaggacgtgagagactctgtgctggctaggtatcttgacgagataaacctgctgtag

SEQ ID NO: 124113 - DNA, 1125 bp, Artificial Sequence
  derived and/or modified sequence
atggccagaagcctgacctggagatgctgcccctggtgcctgaccgaggacgagaaggccgccgccagagtggaccaggagatcaacagaatcctgctggagcagaagaagcaggacagaggcgagctgaagctgctgctgctgggccccggcgagagcggcaagagcaccttcatcaagcagatgagaatcatccacggcgccggctacagcgaggaggagagaaagggcttcagacccctggtgtaccagaacatcttcgtgagcatgagagccatgatcgaggccatggagagactgcagatccccttcagcagacccgagagcaagcaccacgccagcctggtgatgagccaggacccctacaaggtgaccaccttcgagaagagatacgccgccgccatgcagtggctgtggagagacgccggcatcagagcctactacgagagaagaagagagttccacctgctggacagcgccgtgtactacctgagccacctggagagaatcaccgaggagggctacgtgcccaccgcccaggacgtgctgagaagcagaatgcccaccaccggcatcaacgagtactgcttcagcgtgcagaagaccaacctgagaatcgtggacgtgggcggccagaagagcgagagaaagaagtggatccactgcttcgagaacgtgatcgccctgatctacctggccagcctgagcgagtacgaccagtgcctggaggagaacaaccaggagaacagaatgaaggagagcctggccctgttcggcaccatcctggagctgccctggttcaagagcaccagcgtgatcctgttcctgaacaagaccgacatcctggaggagaagatccccaccagccacctggccacctacttccccagcttccagggccccaagcaggacgccgaggccgccaagagattcatcctggacatgtacaccagaatgtacaccggctgcgtggacggccccgagggcagcaagaagggcgccagaagcagaagactgttcagccactacacctgcgccaccgacacccagaacatcagaaaggtgttcaaggacgtgagagacagcgtgctggccagatacctggacgagatcaacctgctgtag

SEQ ID NO: 124114 - protein, 354 aa, Artificial Sequence
  derived and/or modified sequence
MGCTLSAEDKAAVERSKMIDRNLREDGEKAAREVKLLLLGAGESGKSTIVKQMKIIHEAGYSEEECKQYKAVVYSNTIQSIIAIIRAMGRLKIDFGDSARADDARQLFVLAGAAEEGFMTAELAGVIKRLWKDSGVQACFNRSREYQLNDSAAYYLNDLDRIAQPNYIPTQQDVLRTRVKTTGIVETHFTFKDLHFKMFDVGGQRSERKKWIHCFEGVTAIIFCVALSDYDLVLAEDEEMNRMHESMKLFDSICNNKWFTDTSIILFLNKKDLFEEKIKKSPLTICYPEYAGSNTYEEAAAYIQCQFEDLNKRKDTKEIYTHFTCATDTKNVQFVFDAVTDVIIKNNLKDCGLF

SEQ ID NO: 124115 - protein, 302 aa, Artificial Sequence
  derived and/or modified sequence
MKIIHEAGYSEEECKQYKAVVYSNTIQSIIAIIRAMGRLKIDFGDSARADDARQLFVLAGAAEEGFMTAELAGVIKRLWKDSGVQACFNRSREYQLNDSAAYYLNDLDRIAQPNYIPTQQDVLRTRVKTTGIVETHFTFKDLHFKMFDVGGQRSERKKWIHCFEGVTAIIFCVALSDYDLVLAEDEEMNRMHESMKLFDSICNNKWFTDTSIILFLNKKDLFEEKIKKSPLTICYPEYAGSNTYEEAAAYIQCQFEDLNKRKDTKEIYTHFTCATDTKNVQFVFDAVTDVIIKNNLKDCGLF

SEQ ID NO: 124116 - DNA, 1065 bp, Artificial Sequence
  derived and/or modified sequence
atgggctgcacactaagcgccgaggataaggcagcagtcgaacgttctaagatgatcgacaggaacctgagagaagacggagagaaggccgcccgcgaggtgaaactgctgcttttaggggccggggagagcggtaagagcaccatagtaaaacagatgaagatcattcacgaggctgggtattccgaagaggagtgcaagcaatataaggccgtcgtgtacagcaacacgatacagtccatcattgccattatacgcgccatgggaagacttaagatcgactttggagactccgcgcgggccgacgatgcaaggcaattgtttgtcctggccggcgctgccgaggaagggtttatgactgcagaactggccggggtaattaagaggctgtggaaggactctggcgtccaggcttgcttcaatcggtctcgggaataccagctgaatgattcagcagcttactacctgaatgacctagatcgaattgctcagcctaattacattccaacccagcaggacgtgctcagaacacgggtgaaaacgacgggaattgtcgagacacacttcacttttaaggacctccacttcaaaatgttcgatgtgggcggccagaggtccgagcggaagaagtggatccactgttttgaaggagttacagccattattttttgtgtcgcgttgagtgattacgacctcgtgttggccgaagatgaagagatgaaccggatgcacgagtctatgaaactttttgacagtatctgcaacaataagtggtttacagatacgtctattatcttattcttgaataagaaggatctgtttgaggagaaaatcaaaaagtcacctctgaccatttgttacccagaatatgctggaagcaacacctacgaagaggctgctgcatacatccagtgtcagttcgaggatctcaataaacgcaaagacaccaaggagatttatacccatttcacatgtgcgaccgatacaaaaaacgtgcagttcgtgttcgacgccgtgactgatgtgatcataaaaaataacttgaaagactgtgggctattctag

SEQ ID NO: 124117 - DNA, 3347 bp, Artificial Sequence
  derived and/or modified sequence
ggaggggcgggcaggggcggggccgcggcggcgcgcggaggccgagctcggctgggcttggcgaggctgcggcgcggccaccggcgggagtgcagcggccactgtacccagagattcaaaaccccaaacccgggacttgggggcgctgagccgggccgggaagcagagcctggtcgtgaggaacagccgcccgttgctgtctgcccctttgcggacagcgtctccctcgactccgcttaggaagtggtgggggcggcgtggcccccgtcgggaggcgttcgaacgcccgctaggagagagaaaggattcccctgtgcttggagcccgcactcgggcgcggagggagcggcggcaggctctcgctttcggcaccatgggctgcacgctgagcgccgaggacaaggcggcggtggagcggagtaagatgatcgaccgcaacctccgtgaggacggcgagaaggcggcgcgcgaggtcaagctgctgctgctcggtgctggtgaatctggtaaaagtacaattgtgaagcagatgaaaattatccatgaagctggttattcagaagaggagtgtaaacaatacaaagcagtggtctacagtaacaccatccagtcaattattgctatcattagggctatggggaggttgaagatagactttggtgactcagcccgggcggatgatgcacgccaactctttgtgctagctggagctgctgaagaaggctttatgactgcagaacttgctggagttataaagagattgtggaaagatagtggtgtacaagcctgtttcaacagatcccgagagtaccagcttaatgattctgcagcatactatttgaatgacttggacagaatagctcaaccaaattacatcccgactcaacaagatgttctcagaactagagtgaaaactacaggaattgttgaaacccattttactttcaaagatcttcattttaaaatgtttgatgtgggaggtcagagatctgagcggaagaagtggattcattgcttcgaaggagtgacggcgatcatcttctgtgtagcactgagtgactacgacctggttctagctgaagatgaagaaatgaaccgaatgcatgaaagcatgaaattgtttgacagcatatgtaacaacaagtggtttacagatacatccattatactttttctaaacaagaaggatctctttgaagaaaaaatcaaaaagagccctctcactatatgctatccagaatatgcaggatcaaacacatatgaagaggcagctgcatatattcaatgtcagtttgaagacctcaataaaagaaaggacacaaaggaaatatacacccacttcacatgtgccacagatactaagaatgtgcagtttgtttttgatgctgtaacagatgtcatcataaaaaataatctaaaagattgtggtctcttttaagttttgcagttcatggtaaaatgcattttcaaaccaaatgagtacttatatatggatctctgtagactagagtcttgcagcaacacagaatgtaatataaggcaaatgcatctgggacttgaccaaagttgttctgttttgtttttttaactgaaagtaacagaaggacctttcttaaatgtgacagatggtcctgcagtgtgaaactgaaggacagtgttaaagctgggctctagtatattgatgatttctgcataagtgtaaatatgcaaatgtatgtatacatgtatttatgactttagttttcgacattatttttaggttttaagagtggcaacttaggattttagggtgatggctttggaaataacataaatataccttgtactgaatgacagactattactacgtttgccagttttaaacagctttatttatgttcatgtcctgtaaatttttaagtacagtaattaatattaggaaacattacagcccttatctagattatatgtatacttgtattaataaaaatgttatttgtacaaacattgcacagactattttaataacatgatttgttctttaaattttatgtgttttattgaaatgttcttaagatgaatacacctgcctttggatcaactatttaaacattgtatgcattttgatttttcctactttaagaaaataaaataatttaattttacattagattccacgttagatttggtttgaaaaactaaaatttcagatttctgaggatatactgtcttagacttattgtacacacttagtttttattcacttgttttcactctgaattttaatatttggctgatatgaatgcattgcctcaaaggtgatgtcatcttaatttttattcactttaaataactacatttttgtttataactaagtttggagggatcctaagagcatttttgtgggtaaaaaaaaaacctgtggacataatgaattttgagacattgattggtgaggcttttatttcccttgaggagtctcttgtacctagcatacatgatagctccttgttgggaagataacaagaaggatctttgaatactctattgctgatataatgcaagatttaaatttatacatataactaatttcaaatgtaattatcacactatgttaaaattacttttttcccttagataattcaaatttctccacttgcttgagattatatcatttctttttcaattatactattatttctgagaatgaaatggacgattacacttagaaaatgagtaatagtgtttaataagtcagtgattatatgtgtgctcaaataagtgttatgtatcagctagatactgagctttgatagaataattttcttttgattattcatgatgtgtcatctctgaccttgtttcagcaaagtaaacagcactccccaccccaccctcctttttttactcatcttggaaaaggttagtctttcagtacacgttgctggtaagtagtttccaagttacgtgttgtcactgggttgaagtatatttgtgtgtgtgtgtgtgtgtgtgtgtgtgtgtgtaaccataaactatattcatatctgtttcatttggaggattttcttctttgtaatgtaaagaaattcaaagttatcaaagttccttaaatgtgttagtttagattctttatgtgcctttcatgaaagatatgttttcattaattttactggtggacctgtaatatccacattgtgaagctgtgtatgaaattcaactataatatgaataaatttgaatcatgagaattatgggttaaaaagccacaaagaagcacatattggtgaccatcattaatgaaatcctgaactttattctgtgtaattgtgttaataaatcctaataaatttaaatttttaaaattt

SEQ ID NO: 124118 - DNA, 1633 bp, Artificial Sequence
  derived and/or modified sequence
gaaatcagtgcaccttttgtggggcctctgagatggggctgaagcgtctttcctgttaacttcctatggcgactccttaagtggtcaaggagcgctgattacattccccctgcgctgagaaaaggctgcgctggatgcttgatttttcttgctgtgggggcatggaagccacccaagtggggttgggaagctttgctttagtagtaggcaaggcagatactcgagtggtgaaaactgctgtgaaagagcgagagggtcacgccagacaacagggttctgtctccgctgccaccgtttctgatgaatgagatttgccaggtgctggtgaatctggtaaaagtacaattgtgaagcagatgaaaattatccatgaagctggttattcagaagaggagtgtaaacaatacaaagcagtggtctacagtaacaccatccagtcaattattgctatcattagggctatggggaggttgaagatagactttggtgactcagcccgggcggatgatgcacgccaactctttgtgctagctggagctgctgaagaaggctttatgactgcagaacttgctggagttataaagagattgtggaaagatagtggtgtacaagcctgtttcaacagatcccgagagtaccagcttaatgattctgcagcatactatttgaatgacttggacagaatagctcaaccaaattacatcccgactcaacaagatgttctcagaactagagtgaaaactacaggaattgttgaaacccattttactttcaaagatcttcattttaaaatgtttgatgtgggaggtcagagatctgagcggaagaagtggattcattgcttcgaaggagtgacggcgatcatcttctgtgtagcactgagtgactacgacctggttctagctgaagatgaagaaatgaaccgaatgcatgaaagcatgaaattgtttgacagcatatgtaacaacaagtggtttacagatacatccattatactttttctaaacaagaaggatctctttgaagaaaaaatcaaaaagagccctctcactatatgctatccagaatatgcaggatcaaacacatatgaagaggcagctgcatatattcaatgtcagtttgaagacctcaataaaagaaaggacacaaaggaaatatacacccacttcacatgtgccacagatactaagaatgtgcagtttgtttttgatgctgtaacagatgtcatcataaaaaataatctaaaagattgtggtctcttttaagttttgcagttcatggtaaaatgcattttcaaaccaaatgagtacttatatatggatctctgtagactagagtcttgcagcaacacagaatgtaatataaggcaaatgcatctgggacttgaccaaagttgttctgttttgtttttttaactgaaagtaacagaaggacctttcttaaatgtgacagatggtcctgcagtgtgaaactgaaggacagtgttaaagctgggctctagtatattgatgatttctgcataagtgtaaatatgcaaatgtatgtatacatgtatttatgactttagttttcgacattatttttaggttttaagagtggcaacttaggattttagggtgatggctttggaaat

SEQ ID NO: 124119 - DNA, 1065 bp, Artificial Sequence
  derived and/or modified sequence
atgggctgcaccctgtctgctgaggacaaggctgctgtggagaggagcaagatgattgacaggaacctgagagaagatggagagaaggccgcccgggaggtgaagctgctgctgctgggcgctggggagagcggcaagagcaccatcgtgaagcagatgaagatcatccatgaagctggctacagcgaggaggagtgcaagcagtacaaggctgtggtgtacagcaacaccatccagagcatcatcgccatcatccgggccatgggccgcctgaagattgactttggagacagcgcccgggcagatgatgcccggcagctgtttgtgctggccggggctgctgaggagggcttcatgacagctgagctggccggggtcatcaagaggctgtggaaggacagcggcgtgcaggcctgcttcaacagaagccgggagtaccagctgaatgattctgctgcctactacctgaatgacctggaccgcatcgcccagcccaactacatccccacccagcaggatgtgctgcggaccagggtgaagaccaccggcatcgtggagacccacttcaccttcaaggacctgcacttcaagatgtttgatgtgggcggccagaggtctgagaggaagaagtggatccactgctttgaaggagtgacagccatcatcttctgtgtggccctgagtgactatgacctggtgctggccgaggatgaggagatgaacaggatgcatgagagcatgaagctgtttgacagcatctgcaacaacaagtggttcacagacaccagcatcatcctcttcctgaacaagaaggacctgtttgaggagaagatcaagaagagccccctgaccatctgctacccagaatatgccggcagcaacacctatgaggaggccgccgcctacatccagtgccagtttgaggacctgaacaagaggaaggacaccaaggagatctacacccacttcacctgtgccacagacaccaagaatgtgcagtttgtgtttgatgctgtgacagatgtgatcatcaagaacaacctgaaggactgtggcctcttctag

SEQ ID NO: 124120 - DNA, 1065 bp, Artificial Sequence
  derived and/or modified sequence
atgggctgcaccctgagcgccgaggacaaggccgccgtggagcggtctaagatgatcgacaggaacctgagggaggatggtgaaaaggccgctcgagaggttaagctcctactgctcggagccggagaaagtggtaagagtactatcgtaaaacagatgaagattatacacgaggctggttatagcgaggaggagtgtaaacagtacaaagcagtggtgtacagcaatacgatccagtccatcatagcaattattagagctatgggccgtctaaagattgattttggtgattctgctagggccgacgacgctcggcagctattcgttttggccggcgccgccgaagaggggtttatgaccgctgaactggcgggcgttataaagagattgtggaaagatagcggcgttcaggcctgtttcaaccgtagtcgagaatatcaattgaatgattccgccgcctattatttaaacgatctggatcgaatcgcccagcctaactacatccctactcaacaggatgtccttaggactcgcgttaagactactggaatcgttgagacacacttcaccttcaaagatctacacttcaaaatgtttgatgtggggggccagagaagtgaaagaaaaaagtggatacattgctttgaaggcgtcaccgccatcatcttttgtgtcgcgctcagcgattacgatcttgtccttgctgaggatgaggagatgaaccgaatgcatgaatctatgaaactctttgattctatctgcaacaacaagtggttcactgacacgtcgattattttgtttcttaacaagaaggacctcttcgaagaaaagattaaaaaaagtcccctcacaatttgctaccctgagtacgcagggtctaacacgtacgaggaagccgcggcgtacattcagtgccagttcgaagacttaaacaagcggaaggacacaaaggaaatctacactcacttcacatgtgcaactgatacaaagaatgttcagttcgtctttgatgctgtaaccgatgtgatcattaagaataacctgaaagattgtggtttgttctag

SEQ ID NO: 124121 - DNA, 1065 bp, Artificial Sequence
  derived and/or modified sequence
atgggttgtaccctgtccgcggaggacaaagctgccgtagagcgcagtaagatgatcgataggaatttacgcgaggatggtgaaaaagctgcacgggaggtcaagcttctgttgctcggagccggtgagagtggcaagagtacgattgtaaagcagatgaaaattatacatgaggcaggctatagcgaggaagaatgcaagcagtataaggctgtggtgtattcaaacaccatccaaagcatcatagctattatccgagcaatggggagactaaaaattgactttggcgactcggccagggccgatgacgctcgacagctttttgtgctggcaggggctgcagaagagggcttcatgaccgctgagttggctggagtgatcaaacggctgtggaaagattccggggtccaagcatgtttcaatagaagcagagagtatcagcttaatgattccgctgcctattatcttaacgaccttgacagaatcgcccagccaaactacatccctacccagcaggatgtgctgcggacccgggtaaaaactactgggatagttgaaacccattttacattcaaagaccttcactttaagatgtttgacgtgggcggacagcggagtgagcgaaagaagtggattcattgcttcgaaggcgtaacggccattattttttgtgtggcgttatctgattatgacctggtgctggctgaggacgaagagatgaataggatgcacgagtccatgaaactttttgattctatctgcaacaacaagtggtttactgatacttctattattctgttcctcaataagaaggatctgtttgaagaaaagatcaaaaagagcccactaacaatctgctaccccgagtacgctggaagcaatacctatgaagaagccgcagcgtatatccagtgccagtttgaagatcttaacaaaaggaaagacactaaagaaatctacacccacttcacatgtgcaacggatacaaaaaatgtccagtttgtgttcgacgcagtgactgacgtaattattaagaacaacttgaaggattgtggcctgttctag

SEQ ID NO: 124122 - DNA, 1065 bp, Artificial Sequence
  derived and/or modified sequence
atgggctgcaccctgagcgccgaggacaaggccgccgtggagagaagcaagatgatcgacagaaacctgagagaggacggcgagaaggccgccagagaggtgaagctgctgctgctgggcgccggcgagagcggcaagagcaccatcgtgaagcagatgaagatcatccacgaggccggctacagcgaggaggagtgcaagcagtacaaggccgtggtgtacagcaacaccatccagagcatcatcgccatcatcagagccatgggcagactgaagatcgacttcggcgacagcgccagagccgacgacgccagacagctgttcgtgctggccggcgccgccgaggagggcttcatgaccgccgagctggccggcgtgatcaagagactgtggaaggacagcggcgtgcaggcctgcttcaacagaagcagagagtaccagctgaacgacagcgccgcctactacctgaacgacctggacagaatcgcccagcccaactacatccccacccagcaggacgtgctgagaaccagagtgaagaccaccggcatcgtggagacccacttcaccttcaaggacctgcacttcaagatgttcgacgtgggcggccagagaagcgagagaaagaagtggatccactgcttcgagggcgtgaccgccatcatcttctgcgtggccctgagcgactacgacctggtgctggccgaggacgaggagatgaacagaatgcacgagagcatgaagctgttcgacagcatctgcaacaacaagtggttcaccgacaccagcatcatcctgttcctgaacaagaaggacctgttcgaggagaagatcaagaagagccccctgaccatctgctaccccgagtacgccggcagcaacacctacgaggaggccgccgcctacatccagtgccagttcgaggacctgaacaagagaaaggacaccaaggagatctacacccacttcacctgcgccaccgacaccaagaacgtgcagttcgtgttcgacgccgtgaccgacgtgatcatcaagaacaacctgaaggactgcggcctgttctag

SEQ ID NO: 124123 - protein, 355 aa, Artificial Sequence
  derived and/or modified sequence
MGCTVSAEDKAAAERSKMIDKNLREDGEKAAREVKLLLLGAGESGKSTIVKQMKIIHEDGYSEEECRQYRAVVYSNTIQSIMAIVKAMGNLQIDFADPSRADDARQLFALSCTAEEQGVLPDDLSGVIRRLWADHGVQACFGRSREYQLNDSAAYYLNDLERIAQSDYIPTQQDVLRTRVKTTGIVETHFTFKDLHFKMFDVGGQRSERKKWIHCFEGVTAIIFCVALSAYDLVLAEDEEMNRMHESMKLFDSICNNKWFTDTSIILFLNKKDLFEEKITHSPLTICFPEYTGANKYDEAASYIQSKFEDLNKRKDTKEIYTHFTCATDTKNVQFVFDAVTDVIIKNNLKDCGLF

SEQ ID NO: 124124 - protein, 303 aa, Artificial Sequence
  derived and/or modified sequence
MKIIHEDGYSEEECRQYRAVVYSNTIQSIMAIVKAMGNLQIDFADPSRADDARQLFALSCTAEEQGVLPDDLSGVIRRLWADHGVQACFGRSREYQLNDSAAYYLNDLERIAQSDYIPTQQDVLRTRVKTTGIVETHFTFKDLHFKMFDVGGQRSERKKWIHCFEGVTAIIFCVALSAYDLVLAEDEEMNRMHESMKLFDSICNNKWFTDTSIILFLNKKDLFEEKITHSPLTICFPEYTGANKYDEAASYIQSKFEDLNKRKDTKEIYTHFTCATDTKNVQFVFDAVTDVIIKNNLKDCGLF

SEQ ID NO: 124125 - protein, 274 aa, Artificial Sequence
  derived and/or modified sequence
MAIVKAMGNLQIDFADPSRADDARQLFALSCTAEEQGVLPDDLSGVIRRLWADHGVQACFGRSREYQLNDSAAYYLNDLERIAQSDYIPTQQDVLRTRVKTTGIVETHFTFKDLHFKMFDVGGQRSERKKWIHCFEGVTAIIFCVALSAYDLVLAEDEEMNRMHESMKLFDSICNNKWFTDTSIILFLNKKDLFEEKITHSPLTICFPEYTGANKYDEAASYIQSKFEDLNKRKDTKEIYTHFTCATDTKNVQFVFDAVTDVIIKNNLKDCGLF

SEQ ID NO: 124126 - protein, 361 aa, Artificial Sequence
  derived and/or modified sequence
MGCTVSAEDKAAAERSKMIDKNLREDGEKAAREVKLLLLGAGESGKSTIVKQMKIIHEDGYSEEECRQYRAVVYSNTIQSIMAIVKAMGNLQIDFADPSRADDARQLFALSCTAEEQGVLPDDLSGVIRRLWADHGVQACFGRSREYQLNDSAAYYLNDLERIAQSDYIPTQQDVLRTRVKTTGIVETHFTFKDLHFKMFDVGGQRSERKKWIHCFEGVTAIIFCVALSAYDLVLAEDEEMNRMHESMKLFDSICNNKWFTDTSIILFLNKKDLFEEKITHSPLTICFPEYTGANKYDEAASYIQSKFEDLNKRKDTKEIYTHFTCATDTKSRKLFRENYLKLSDPDQQPPPAPLPSDSVP

SEQ ID NO: 124127 - DNA, 1068 bp, Artificial Sequence
  derived and/or modified sequence
atgggatgtaccgtaagcgcagaagataaggccgccgccgaacggagtaagatgatcgacaaaaacttacgcgaggatggagaaaaggctgctcgcgaagtaaagcttctgctccttggagccggagagtctgggaaatctaccatcgttaagcagatgaaaattatccatgaggacggctattccgaagaggagtgcaggcaataccgcgcggttgtttattcaaacaccattcagagcattatggcaattgtgaaggctatgggcaacttacagatcgacttcgctgatcctagccgggcagacgatgcccggcagctttttgctttgagctgcaccgcggaggagcagggggtgcttcctgacgacctgagtggggtgatccggcggctgtgggctgatcacggagtgcaggcttgttttgggagaagtcgggaatatcagctgaacgattcagcggcctattacctcaacgacctggaacgaattgcgcagtcagattacatccccacacaacaggatgtcctgcggacccgcgtgaaaaccaccggaattgtggaaacccatttcacattcaaggacttgcacttcaagatgttcgacgtgggcggtcagcgctccgaaaggaaaaagtggatccactgttttgaaggcgtgacggcgatcatcttttgtgtggctctctctgcctatgacctcgtgctcgctgaggacgaggagatgaatcgcatgcacgaatctatgaaactctttgacagcatttgcaacaataaatggttcaccgacacaagcattattctgtttttgaataagaaggacctctttgaggaaaaaatcacgcatagcccattaacgatttgctttcctgaatataccggggccaacaagtacgacgaagccgcctcttacattcagtctaagttcgaggatcttaataagcggaaggatactaaagagatttatactcattttacttgcgcaactgacacaaagaacgtgcagttcgtcttcgacgccgtgacagacgttattatcaaaaacaatttgaaagactgcggactcttctag

SEQ ID NO: 124128 - DNA, 1086 bp, Artificial Sequence
  derived and/or modified sequence
atggggtgcaccgtctctgctgaagacaaggccgctgctgaacgcagcaagatgatcgacaagaacctgcgcgaagatggggagaaggccgccagagaggtgaagcttctccttctgggagctggagaaagcgggaaaagtactatcgtcaagcagatgaagatcattcacgaggacggttactccgaagaggagtgtaggcagtaccgggccgtagtgtatagtaacactatccagtcaatcatggccatcgtcaaggccatgggaaacttacagatcgactttgctgacccatcccgagctgacgatgcccgccagctcttcgccctttcatgtaccgccgaagaacagggagtgctccctgacgacctttctggggtcattaggcgtctgtgggcagaccacggggtgcaagcatgttttggaagatctcgcgagtatcagctcaatgatagtgctgcatattacctgaacgacttggagcggattgcccagtcagattatatccccactcagcaagacgttctgcgcacccgagtgaagacaactgggatcgtagagactcattttacctttaaggatctgcacttcaaaatgttcgatgtcgggggccagcgctccgagcggaagaagtggatccactgtttcgaaggggtgaccgctatcattttctgcgtggccctaagtgcttacgatctcgtattagcggaggacgaagagatgaataggatgcacgaatccatgaaactgttcgattcaatttgcaacaataagtggtttaccgacacctctattatcctgttcctcaataagaaggacctgtttgaagaaaaaattactcatagtcctctcactatctgttttcccgagtataccggcgcaaataaatacgacgaagctgcgtcatacatccagtccaaattcgaggacctgaacaaacggaaggataccaaggagatttatacacatttcacttgcgccaccgatacgaagtcgcgcaaactgttccgcgagaattacctgaagctgagcgaccctgaccagcagccacctcccgcccctcttcctagcgatagcgtgccctag

SEQ ID NO: 124129 - DNA, 2464 bp, Artificial Sequence
  derived and/or modified sequence
agtgccgggtcccggggtttggaaccacccctattgccttttctccgcgtggccccgcctgcagcccaggcccgagcctgggctgcgcctaacttcccccttcgctccgccctcgagccaatcaacagcctctaatctcctctggccccgcctgcaagcccgccccggcccagtcacaggcttggttcgcccaggccccacccccggcccgccccgccgtcggtgcgcggcggtagggaaggcgcctcccgcagtcgctcggaactgccgacccgagtgcttcccgcagagggctggtggtgggagcggagtgggtcgggcggggccgagccgggccgtgggccgtgtgggggccgggcggcggccgggccggcggacggcgggatgggctgcaccgtgagcgccgaggacaaggcggcggccgagcgctctaagatgatcgacaagaacctgcgggaggacggagagaaggcggcgcgggaggtgaagttgctgctgttgggtgctggggagtcagggaagagcaccatcgtcaagcagatgaagatcatccacgaggatggctactccgaggaggaatgccggcagtaccgggcggttgtctacagcaacaccatccagtccatcatggccattgtcaaagccatgggcaacctgcagatcgactttgccgacccctccagagcggacgacgccaggcagctatttgcactgtcctgcaccgccgaggagcaaggcgtgctccctgatgacctgtccggcgtcatccggaggctctgggctgaccatggtgtgcaggcctgctttggccgctcaagggaataccagctcaacgactcagctgcctactacctgaacgacctggagcgtattgcacagagtgactacatccccacacagcaagatgtgctacggacccgcgtaaagaccacggggatcgtggagacacacttcaccttcaaggacctacacttcaagatgtttgatgtgggtggtcagcggtctgagcggaagaagtggatccactgctttgagggcgtcacagccatcatcttctgcgtagccttgagcgcctatgacttggtgctagctgaggacgaggagatgaaccgcatgcatgagagcatgaagctattcgatagcatctgcaacaacaagtggttcacagacacgtccatcatcctcttcctcaacaagaaggacctgtttgaggagaagatcacacacagtcccctgaccatctgcttccctgagtacacaggggccaacaaatatgatgaggcagccagctacatccagagtaagtttgaggacctgaataagcgcaaagacaccaaggagatctacacgcacttcacgtgcgccaccgacaccaagaacgtgcagttcgtgtttgacgccgtcaccgatgtcatcatcaagaacaacctgaaggactgcggcctcttctgaggggcagcggggcctggcgggatgggccaccgccgactttgtaccccccaacccctgaggaagatgggggcaagaagatcacgctccccgcctgttcccccgccgcttttctcctctttcctctctttgttctcagctccccctgtcccctcagctccagacgtaggggaggggttgccacaggcctccctgtttgaagcctgcccttgtctgagatgctggtaatggccatggtacccccttctgggcatctgttctggtttttaaccattgtcttgttctgtgatgaggggaggggggcacatgctgagtctcccaaggctgcgtctggaggggcccctgcttctccagcctggacccccagctttgcccaacaccagcccctgccccagcccaagtccaaatgtttacagggagcctcctgcccagtcccccaaccccagccgctcggaggccccaaaggaaaaagcacaagaagcgtgagacgccaccattcctggaaaccacagtccacctgctcattctcgtagctttttaaaaaaatgaaagtaaaggaaaaaaaaaaaactgcaaatctagaaaactttttagagaaaaactatttaaaactgtcagatcctgaccagcaagcccccccccagccccccttccaagtgactccgtgccttgagtgtgtctgcgtgtttacacccgtccctctgctggccgcccccgtgcgagcggcacccctgccctgccctccacagaattgggttccaagggctgttccagacaactgccaacgtcactgagggccctgccccagcggccctggccccaggctctattaacctaaaatgtagctccctagcgctaacctaggaaccgccgctgcctgctggggggccacgcccctcatgcccttgtcccaggcccggggccttcagcgttgaacacttccttgcttttttcacatgttttatggaattgttcacctggtttgaaataataaaatgtagaaagaaaaaaaata

SEQ ID NO: 124130 - DNA, 1086 bp, Artificial Sequence
  derived and/or modified sequence
atgggctgcaccgtgagcgccgaggacaaggcggcggccgagcgctctaagatgatcgacaagaacctgcgggaggacggagagaaggcggcgcgggaggtgaagttgctgctgttgggtgctggggagtcagggaagagcaccatcgtcaagcagatgaagatcatccacgaggatggctactccgaggaggaatgccggcagtaccgggcggttgtctacagcaacaccatccagtccatcatggccattgtcaaagccatgggcaacctgcagatcgactttgccgacccctccagagcggacgacgccaggcagctatttgcactgtcctgcaccgccgaggagcaaggcgtgctccctgatgacctgtccggcgtcatccggaggctctgggctgaccatggtgtgcaggcctgctttggccgctcaagggaataccagctcaacgactcagctgcctactacctgaacgacctggagcgtattgcacagagtgactacatccccacacagcaagatgtgctacggacccgcgtaaagaccacggggatcgtggagacacacttcaccttcaaggacctacacttcaagatgtttgatgtgggtggtcagcggtctgagcggaagaagtggatccactgctttgagggcgtcacagccatcatcttctgcgtagccttgagcgcctatgacttggtgctagctgaggacgaggagatgaaccgcatgcatgagagcatgaagctattcgatagcatctgcaacaacaagtggttcacagacacgtccatcatcctcttcctcaacaagaaggacctgtttgaggagaagatcacacacagtcccctgaccatctgcttccctgagtacacaggggccaacaaatatgatgaggcagccagctacatccagagtaagtttgaggacctgaataagcgcaaagacaccaaggagatctacacgcacttcacgtgcgccaccgacaccaaatctagaaaactttttagagaaaactatttaaaactgtcagatcctgaccagcaaccccccccagccccccttccaagtgactccgtgccttga

SEQ ID NO: 124131 - DNA, 1068 bp, Artificial Sequence
  derived and/or modified sequence
atgggctgcaccgtgtctgctgaggacaaggctgctgctgagaggagcaagatgattgacaagaacctgagagaagatggagagaaggccgcccgggaggtgaagctgctgctgctgggcgctggggagagcggcaagagcaccatcgtgaagcagatgaagatcatccatgaagatggctacagcgaggaggagtgccggcagtacagagctgtggtgtacagcaacaccatccagagcatcatggccatcgtgaaggccatgggcaacctgcagattgactttgctgaccccagcagagcagatgatgcccggcagctgtttgccctgagctgcacagctgaggagcagggcgtgctgcctgatgacctgtctggagtcatccggcggctgtgggccgaccatggagtgcaggcctgcttcggccgcagccgggagtaccagctgaatgacagcgctgcctactacctgaatgacctggagagaattgcccagagcgactacatccccacccagcaggatgtgctgcggaccagggtgaagaccactggaattgtggagacccacttcaccttcaaggacctgcacttcaagatgtttgatgtgggcggccagaggtctgagaggaagaagtggatccactgctttgagggcgtgacagccatcatcttctgtgtggccctgagcgcctatgacctggtgctggctgaagatgaggagatgaacaggatgcatgagagcatgaagctgtttgacagcatctgcaacaacaagtggttcacagacaccagcatcatcctcttcctgaacaagaaggacctgtttgaggagaagatcacccacagccccctgaccatctgcttccctgagtacaccggggccaacaagtatgatgaggccgccagctacatccagagcaagtttgaggacctgaacaagaggaaggacaccaaggagatctacacccacttcacctgtgccacagacaccaagaatgtgcagtttgtgtttgatgctgtgacagatgtgatcatcaagaacaacctgaaggactgtggcctcttctag

SEQ ID NO: 124132 - DNA, 1086 bp, Artificial Sequence
  derived and/or modified sequence
atgggctgcaccgtgtctgctgaggacaaggctgctgctgagaggagcaagatgattgacaagaacctgagagaagatggagagaaggccgcccgggaggtgaagctgctgctgctgggcgctggggagagcggcaagagcaccatcgtgaagcagatgaagatcatccatgaagatggctacagcgaggaggagtgccggcagtacagagctgtggtgtacagcaacaccatccagagcatcatggccatcgtgaaggccatgggcaacctgcagattgactttgctgaccccagcagagcagatgatgcccggcagctgtttgccctgagctgcacagctgaggagcagggcgtgctgcctgatgacctgtctggagtcatccggcggctgtgggccgaccatggagtgcaggcctgcttcggccgcagccgggagtaccagctgaatgacagcgctgcctactacctgaatgacctggagagaattgcccagagcgactacatccccacccagcaggatgtgctgcggaccagggtgaagaccactggaattgtggagacccacttcaccttcaaggacctgcacttcaagatgtttgatgtgggcggccagaggtctgagaggaagaagtggatccactgctttgagggcgtgacagccatcatcttctgtgtggccctgagcgcctatgacctggtgctggctgaagatgaggagatgaacaggatgcatgagagcatgaagctgtttgacagcatctgcaacaacaagtggttcacagacaccagcatcatcctcttcctgaacaagaaggacctgtttgaggagaagatcacccacagccccctgaccatctgcttccctgagtacaccggggccaacaagtatgatgaggccgccagctacatccagagcaagtttgaggacctgaacaagaggaaggacaccaaggagatctacacccacttcacctgtgccacagacaccaagagcaggaagctgttccgggagaactacctgaagctgagtgaccctgaccagcagcccccaccagcccccctgcccagcgacagcgtgccctag

SEQ ID NO: 124133 - DNA, 1068 bp, Artificial Sequence
  derived and/or modified sequence
atgggctgcaccgtgagcgccgaggacaaggccgccgccgagcggtctaaaatgatcgacaaaaatctacgcgaggatggagagaaggctgcgcgggaggtgaagcttctgcttctgggcgccggcgaatccggtaagtctaccattgtgaagcagatgaaaatcatacacgaggacggctattctgaggaggagtgtcgacagtatcgggctgtagtgtactccaatactattcagtcaataatggcgattgtgaaagccatgggaaatttacagatagattttgcggatccttctagggccgacgatgctagacagctgttcgccttaagctgcaccgctgaggaacaaggggtgctgccggacgatcttagtggagtgattaggagactttgggcggaccatggggtgcaagcctgttttggcaggtcacgagaatatcagctcaacgattctgccgcatactatttgaacgatctagaacggatcgcccaatctgattacatcccaactcagcaggacgtgctcagaacccgcgtgaagactaccggtatcgtagagacccatttcacgtttaaggaccttcatttcaaaatgtttgatgtcggcggacagcgtagcgaaaggaagaaatggatccactgctttgagggagtaactgctattatcttttgtgtcgccctcagcgcctatgacttggttctcgctgaggacgaagagatgaacaggatgcacgagtccatgaagctgttcgattccatctgcaataataagtggttcactgacacgtccatcatactatttttgaataagaaggacctctttgaagagaagatcactcattcacccctaacaatctgtttccctgaatataccggggccaataaatacgacgaggctgcctcctatatccaaagtaagtttgaagacctcaacaagaggaaggacaccaaggaaatatacacacacttcacctgtgcgactgacaccaagaacgtgcaatttgtattcgacgccgttaccgacgttattatcaagaataatctcaaagattgcgggttgttttag

SEQ ID NO: 124134 - DNA, 1086 bp, Artificial Sequence
  derived and/or modified sequence
atgggctgcaccgtgagcgccgaggacaaggccgccgccgagcggtccaagatgatcgacaaaaacctgcgagaagacggggaaaaagccgcccgagaagtcaaattactgcttttgggcgcaggagagagcgggaaatcgacaatcgtgaaacagatgaaaatcatacatgaagatggctattccgaagaagagtgcaggcagtatagagcggtggtgtattctaacactattcagtccatcatggccatcgtgaaggccatgggcaatttacagatcgactttgccgatccaagcagggccgacgacgctcggcagctctttgccctgtcttgcactgcagaagaacagggagtgctgccagacgacctgagtggggtcatccgcaggctgtgggccgatcatggcgtccaggcttgctttggacggtcacgggagtaccagctaaatgacagcgccgcatattacctgaatgacctcgaaaggatcgcgcagtccgactacattcccacacaacaggatgtcctcagaacaagagttaagaccacaggtatagtggagactcactttacgttcaaggatctccactttaaaatgtttgatgtgggtggccaacgcagcgagaggaaaaaatggatacactgtttcgaaggcgtaaccgccatcatcttctgtgtggctctctcggcttatgacctggtcttggccgaagatgaagagatgaatcggatgcatgagagcatgaaactgtttgacagcatatgcaacaacaagtggtttactgatacctcgatcatcctctttctgaataaaaaggatcttttcgaagaaaagattactcatagccctcttacgatctgtttcccagaatacacaggcgctaacaaatacgatgaggctgcctcttatattcaatcaaaatttgaagacctaaacaagaggaaagatacaaaagagatatatacgcacttcacctgtgccaccgacacaaaaagccgaaaacttttccgtgagaactacctgaagctgtccgaccctgaccagcaacctccccccgcccctctccccagcgattctgtcccgtag

SEQ ID NO: 124135 - DNA, 1068 bp, Artificial Sequence
  derived and/or modified sequence
atgggttgcaccgtgtccgccgaagataaggctgccgctgaaagaagcaagatgatagacaagaatcttagggaggatggagaaaaggccgctcgcgaagtgaagctgctgctgttaggagctggcgaatccggaaaaagtaccattgtgaagcaaatgaagatcatccacgaggatggatactctgaggaggagtgccggcagtatagggctgtggtgtatagcaacactatccagtctattatggcaatagtcaaggcaatgggcaacctccagattgacttcgctgacccgtccagagccgacgatgcacgccaactgttcgcactttcttgtaccgctgaagaacagggcgttctacctgatgacctgtccggcgtgatccggaggctgtgggctgaccatggagtccaggcatgcttcggacgctcaagagaatatcaactgaacgacagtgctgcctactatctaaatgatctcgagagaattgctcaaagcgactatattcccacccagcaagacgttctgcggactagggtcaagacaaccgggatagtggagactcactttactttcaaggatctgcacttcaaaatgttcgatgtgggaggccagcgcagtgagaggaagaagtggatccactgcttcgagggtgtcacagcaataatattctgcgtggcactgtccgcatacgacctagtcctagccgaggacgaagagatgaatcggatgcacgagagcatgaaattattcgactccatttgcaataataagtggttcacggatacctcaatcatcctgtttcttaacaaaaaggacttgtttgaggaaaagattactcactctccgcttactatctgtttccctgagtacaccggcgcaaataagtacgatgaagccgcatcttatatccagtcaaagtttgaagacttaaataaaaggaaggatacaaaggaaatctatactcactttacctgcgctaccgacaccaagaacgtccagtttgtcttcgacgctgtgactgatgtgatcatcaaaaacaacctgaaggactgtggcctcttctag

SEQ ID NO: 124136 - DNA, 1086 bp, Artificial Sequence
  derived and/or modified sequence
atggggtgcaccgtgagcgccgaagacaaggccgctgcagaacggtccaagatgatcgacaaaaatttgagagaggatggcgagaaggctgcaagggaggtgaagcttctgctacttggggcaggagagagtggcaagtcaaccattgtgaagcagatgaagattattcacgaagatggttatagtgaggaagaatgtcgtcaataccgcgctgtagtgtactctaacaccatccagtctattatggccattgtgaaagccatgggcaacctccaaatcgatttcgctgacccatcaagggcggatgacgctaggcagctcttcgcactttcttgcacagctgaagagcagggcgtgctgcccgacgacttgtccggcgtcatcagacgtctgtgggctgaccacggtgttcaggcctgctttgggaggtcaagagagtaccagctcaatgattccgctgcttattacctgaatgatctggaaaggatcgcccagtccgactacattccaacccagcaggacgtgctgcgcacccgggtgaaaacaacagggatcgttgaaacgcacttcactttcaaagatctgcacttcaagatgtttgatgttgggggtcaaagaagcgagcgtaagaagtggatccattgctttgagggagtgactgccatcatcttttgtgtggccctgagtgcttacgaccttgtgttggccgaggatgaagaaatgaacagaatgcacgaaagtatgaaattattcgatagcatctgtaacaataagtggtttaccgacacctccattatacttttcctgaataagaaagacctcttcgaagagaaaattactcatagcccattgactatttgcttccctgaatataccggcgctaataaatacgatgaagcagcctcatatatccaatccaaatttgaagacctgaacaagcgcaaggacaccaaggagatttacacccacttcacgtgtgcaacagataccaaaagccggaagctgttccgcgagaattaccttaaactgagcgatcccgaccagcagccacccccagcgccactgccatccgatagcgtgccctag

SEQ ID NO: 124137 - DNA, 1068 bp, Artificial Sequence
  derived and/or modified sequence
atgggctgcaccgtgagcgccgaggacaaggccgccgccgagagaagcaagatgatcgacaagaacctgagagaggacggcgagaaggccgccagagaggtgaagctgctgctgctgggcgccggcgagagcggcaagagcaccatcgtgaagcagatgaagatcatccacgaggacggctacagcgaggaggagtgcagacagtacagagccgtggtgtacagcaacaccatccagagcatcatggccatcgtgaaggccatgggcaacctgcagatcgacttcgccgaccccagcagagccgacgacgccagacagctgttcgccctgagctgcaccgccgaggagcagggcgtgctgcccgacgacctgagcggcgtgatcagaagactgtgggccgaccacggcgtgcaggcctgcttcggcagaagcagagagtaccagctgaacgacagcgccgcctactacctgaacgacctggagagaatcgcccagagcgactacatccccacccagcaggacgtgctgagaaccagagtgaagaccaccggcatcgtggagacccacttcaccttcaaggacctgcacttcaagatgttcgacgtgggcggccagagaagcgagagaaagaagtggatccactgcttcgagggcgtgaccgccatcatcttctgcgtggccctgagcgcctacgacctggtgctggccgaggacgaggagatgaacagaatgcacgagagcatgaagctgttcgacagcatctgcaacaacaagtggttcaccgacaccagcatcatcctgttcctgaacaagaaggacctgttcgaggagaagatcacccacagccccctgaccatctgcttccccgagtacaccggcgccaacaagtacgacgaggccgccagctacatccagagcaagttcgaggacctgaacaagagaaaggacaccaaggagatctacacccacttcacctgcgccaccgacaccaagaacgtgcagttcgtgttcgacgccgtgaccgacgtgatcatcaagaacaacctgaaggactgcggcctgttctag

SEQ ID NO: 124138 - DNA, 1086 bp, Artificial Sequence
  derived and/or modified sequence
atgggctgcaccgtgagcgccgaggacaaggccgccgccgagagaagcaagatgatcgacaagaacctgagagaggacggcgagaaggccgccagagaggtgaagctgctgctgctgggcgccggcgagagcggcaagagcaccatcgtgaagcagatgaagatcatccacgaggacggctacagcgaggaggagtgcagacagtacagagccgtggtgtacagcaacaccatccagagcatcatggccatcgtgaaggccatgggcaacctgcagatcgacttcgccgaccccagcagagccgacgacgccagacagctgttcgccctgagctgcaccgccgaggagcagggcgtgctgcccgacgacctgagcggcgtgatcagaagactgtgggccgaccacggcgtgcaggcctgcttcggcagaagcagagagtaccagctgaacgacagcgccgcctactacctgaacgacctggagagaatcgcccagagcgactacatccccacccagcaggacgtgctgagaaccagagtgaagaccaccggcatcgtggagacccacttcaccttcaaggacctgcacttcaagatgttcgacgtgggcggccagagaagcgagagaaagaagtggatccactgcttcgagggcgtgaccgccatcatcttctgcgtggccctgagcgcctacgacctggtgctggccgaggacgaggagatgaacagaatgcacgagagcatgaagctgttcgacagcatctgcaacaacaagtggttcaccgacaccagcatcatcctgttcctgaacaagaaggacctgttcgaggagaagatcacccacagccccctgaccatctgcttccccgagtacaccggcgccaacaagtacgacgaggccgccagctacatccagagcaagttcgaggacctgaacaagagaaaggacaccaaggagatctacacccacttcacctgcgccaccgacaccaagagcagaaagctgttcagagagaactacctgaagctgagcgaccccgaccagcagcccccccccgcccccctgcccagcgacagcgtgccctag

SEQ ID NO: 124139 - protein, 359 aa, Artificial Sequence
  derived and/or modified sequence
MTLESIMACCLSEEAKEARRINDEIERQLRRDKRDARRELKLLLLGTGESGKSTFIKQMRIIHGSGYSDEDKRGFTKLVYQNIFTAMQAMIRAMDTLKIPYKYEHNKAHAQLVREVDVEKVSAFENPYVDAIKSLWNDPGIQECYDRRREYQLSDSTKYYLNDLDRVADPAYLPTQQDVLRVRVPTTGIIEYPFDLQSVIFRMVDVGGQRSERRKWIHCFENVTSIMFLVALSEYDQVLVESDNENRMEESKALFRTIITYPWFQNSSVILFLNKKDLLEEKIMYSHLVDYFPEYDGPQRDAQAAREFILKMFVDLNPDSDKIIYSHFTCATDTENIRFVFAAVKDTILQLNLKEYNLV

SEQ ID NO: 124140 - protein, 157 aa, Artificial Sequence
  derived and/or modified sequence
MVDVGGQRSERRKWIHCFENVTSIMFLVALSEYDQVLVESDNENRMEESKALFRTIITYPWFQNSSVILFLNKKDLLEEKIMYSHLVDYFPEYDGPQRDAQAAREFILKMFVDLNPDSDKIIYSHFTCATDTENIRFVFAAVKDTILQLNLKEYNLV

SEQ ID NO: 124141 - protein, 170 aa, Artificial Sequence
  derived and/or modified sequence
MGERWADSQLDSRSTHGTGESGKSTFIKQMRIIHGSGYSDEDKRGFTKLVYQNIFTAMQAMIRAMDTLKIPYKYEHNKAHAQLVREVDVEKVSAFENPYVDAIKSLWNDPGIQECYDRRREYQLSDSTKYYLNDLDRVADPAYLPTQQDVLRVRVPTTGIIEYPFDLQSV

SEQ ID NO: 124142 - DNA, 1080 bp, Artificial Sequence
  derived and/or modified sequence
atgacactcgagtccattatggcgtgctgcctttccgaggaggctaaggaggccaggaggatcaacgatgaaatcgagcggcagctgcgacgcgacaagcgcgacgcccgcagagaactaaagctgctgttactgggtacaggcgagagcgggaagtccaccttcatcaagcagatgcgcataatccacgggagtggctacagtgatgaagacaagagggggttcaccaagctggtgtatcaaaatatctttaccgctatgcaggccatgattcgagccatggatactctgaagataccatataagtatgaacacaacaaggcccacgctcagttggtgagggaggtcgatgtggaaaaggtctccgcattcgagaatccatacgtcgatgcgatcaagagtctgtggaacgacccaggaatacaggagtgttacgacagacgacgagaatatcagttatccgactctacaaaatactaccttaacgatttggaccgcgtggctgacccggcctatctacctacccagcaggacgtgctgagggtacgtgtccccacgacgggtattattgaatatcccttcgacctccagtcagtcatcttcaggatggtagatgttggcgggcagagaagtgaacgcagaaagtggatccactgttttgagaatgtgacaagcattatgttcctcgtcgctctgtcagagtatgatcaagtgctcgtcgagtccgataatgagaaccggatggaggagtccaaggctcttttccgtacaataattacctacccctggttccagaattcgtccgttattttattcctgaacaagaaagatcttttggaggagaagattatgtactcacatttagtagactatttccctgagtacgatggaccacagcgcgacgcccaagcagccagagaatttattttgaaaatgttcgtcgacctcaaccccgattctgacaaaataatttactcccactttacttgcgccaccgatacggaaaatatccggtttgtattcgcagccgtgaaggacaccattctgcagttaaacctgaaagaatataatttagtctag

SEQ ID NO: 124143 - DNA, 474 bp, Artificial Sequence
  derived and/or modified sequence
atggtagatgtgggcggccaaagatcggaacgcagaaagtggatacactgcttcgagaacgtgacttccatcatgttcctggtggcgttgtcagaatacgaccaggtgctggtagaatctgacaacgagaaccggatggaagaatcaaaggctttgtttaggaccataatcacatacccctggtttcagaatagctcagtgatattgtttttgaacaaaaaggacctcctggaggagaagatcatgtattcccaccttgtagactattttcccgaatatgacggtccacaacgtgatgcacaggcagccagagagtttattctgaaaatgtttgtggaccttaacccagacagcgacaagatcatctacagtcacttcacttgcgccacagataccgagaatattagattcgtgtttgctgccgtgaaggacaccatcctacagctgaatctcaaggagtacaatctcgtctag

SEQ ID NO: 124144 - DNA, 513 bp, Artificial Sequence
  derived and/or modified sequence
atgggtgagcgctgggcggactcccagctggatagcaggtctacccatgggacaggagagtctggaaagtcaaccttcattaagcagatgcgaatcatccacggctccgggtactcagacgaagacaagcgtggattcaccaaactggtataccagaacatcttcacagcgatgcaggctatgattagagctatggacacactcaagatcccttataagtacgaacataacaaggcgcatgcccagctcgtgagggaagtggacgtcgagaaggtcagcgcatttgaaaatccttacgtagacgcaattaagagcctgtggaacgatcccggaatccaggaatgctatgatcggagacgggaataccaactgtctgactcaacaaaatattacctcaacgacctggacagagtagccgaccctgcgtacctccctacacagcaagacgtactccgggtgcgggtgccgacaactggcataatagagtatccttttgatctacagagcgtgtag

SEQ ID NO: 124145 - DNA, 6539 bp, Artificial Sequence
  derived and/or modified sequence
cgtcggcccagactatccgctcccaccgcgcccccggcccacctggtggccccggccctggccgccgcccccgcggcggttcccggagctcgtcccggacgcgcgcccgggcggcgggggctcggcggccaccgctgcctcgggggagcgagggcgggagggtgtgtgtgcgcgctgtgagcagggggtgccggcggggctgcagcggaggcactttggaagaatgactctggagtccatcatggcgtgctgcctgagcgaggaggccaaggaagcccggcggatcaacgacgagatcgagcggcagctccgcagggacaagcgggacgcccgccgggagctcaagctgctgctgctcgggacaggagagagtggcaagagtacgtttatcaagcagatgagaatcatccatgggtcaggatactctgatgaagataaaaggggcttcaccaagctggtgtatcagaacatcttcacggccatgcaggccatgatcagagccatggacacactcaagatcccatacaagtatgagcacaataaggctcatgcacaattagttcgagaagttgatgtggagaaggtgtctgcttttgagaatccatatgtagatgcaataaagagtttatggaatgatcctggaatccaggaatgctatgatagacgacgagaatatcaattatctgactctaccaaatactatcttaatgacttggaccgcgtagctgaccctgcctacctgcctacgcaacaagatgtgcttagagttcgagtccccaccacagggatcatcgaatacccctttgacttacaaagtgtcattttcagaatggtcgatgtagggggccaaaggtcagagagaagaaaatggatacactgctttgaaaatgtcacctctatcatgtttctagtagcgcttagtgaatatgatcaagttctcgtggagtcagacaatgagaaccgaatggaggaaagcaaggctctctttagaacaattatcacatacccctggttccagaactcctcggttattctgttcttaaacaagaaagatcttctagaggagaaaatcatgtattcccatctagtcgactacttcccagaatatgatggaccccagagagatgcccaggcagcccgagaattcattctgaagatgttcgtggacctgaacccagacagtgacaaaattatctactcccacttcacgtgcgccacagacaccgagaatatccgctttgtctttgctgccgtcaaggacaccatcctccagttgaacctgaaggagtacaatctggtctaattgtgcctcctagacacccgccctgcccttccctggtgggctattgaagatacacaagagggactgtatttctgtggaaaacaatttgcataatactaatttattgccgtcctggactctgtgtgagcgtgtccacagagtttgtagtaaatattatgattttatttaaactattcagaggaaaaacagaggatgctgaagtacagtcccagcacatttcctctctatcttttttttaggcaaaaccttgtgactcagtgtattttaaattctcagtcatgcactcacaaagataagacttgtttctttctgtctctctctctttttcttttctatggagcaaaacaaagctgatttcccttttttcttcccccgctaattcatacctccctcctgatgtttttcccaggttacaatggcctttatcctagttccattcttggtcaagtttttctctcaaatgatacagtcaggacacatcgttcgatttaagccatcatcagcttaatttaagtttgtagtttttgctgaaggattatatgtattaatacttacggttttaaatgtgttgctttggatacacacatagtttcttttttaatagaatatactgtcttgtctcactttggactgggacagtggatgcccatctaaaagttaagtgtcatttcttttagatgtttaccttcagccatagcttgattgctcagagaaatatgcagaaggcaggatcaaagacacacaggagtcctttcttttgaaatgccacgtgccattgtctttcctcccttctttgcttctttttcttaccctctctttcaattgcagatgccaaaaaagatgccaacagacactacattaccctaatggctgctacccagaacctttttataggttgttcttaatttttttgttgttgttgttcaagcttttcctttcttttttttcttggtgtttgggccacgattttaaaatgacttttattatgggtatgtgttgccaaagctggctttttgtcaaataaaatgaatacgaacttaaaaaataaaagctggtatcttaaaatgtaagagagtaagactgtgaagcctaaaatgactggctgagaatgaaccagaaatgccatttgccaaacagttgtaactagaaatttgattctcacggtccattcttttctttgtccttaagatgacattgttagtgttcacgtcccatgttcagtgtccaaaccggcaatgtaaaaagtatcctgtgtggtttaacaggaaatctgtttatgtctctttatttgaaaccagttttactctcagtggttctttaagttcaatgaagtctgccaggaacattggttggtagtattattccgacacctttaatttccaaaatctgaagttcctgctagtttaccaccttcatgatcttcttgaactggtaactgattaggttgaacttatggaagatttgtggacttaactcaaaagtaacctctcagtgttctatagaacatgtatttgtgtaactgaacctaccaggagaaatgtttggaattctatatgtgcaatttttcaacaaatgcaaaaaaaatacagcacatgtattgacaagcttctgtcaagcagcttgagttgaaatttgatttaagaaaataaatcatgattgttcaaagctgctgggacgttagaattaggccatgatactggtctcattttaactacagtggtatttggcactagtgtaaacttccatataaatcactcttttggaacaacaaagggggagggagaaaaatcacggcctgttaaatgagtaccaaagccgcccaacagtaatgagatgttctcatccttgattctcccagcctcaaacaacacagcttactttttttttcccttgctcagaaagtacctgtaatttaacaaacagactgcctgtaggtatagtgcaattacaaatgctctaatcattgtacatacatctctcttgatattgcagcatccatactggctttgtaatcattaattttttggcagattgaatgtgctgtattgatatgtatctatgtaattgtattgtatgtctatagctaattcacgttttgaataatgttattttatttacttttttaagagaggagaatgtaaatttgtcagtttatttctgactagggatattttctttccatttagaaaagaagaaaaaaaaaaaaccttactgtcatacagagcggtactagcgtcgtgctgtataaaatcatttgcacattcctgagtagaggtatactgattataagacccaaaggtaatttcatagcaaaatacataaaatcagtcggagcttttatacaaacatggaaaccaactttgtagaacttttgccatttgatctaggattggaatatgagcttttatacaattcatattcttatttggcaaatgcacagtttagtattacctctctgatggcctttactagaaaggcagttttagaagctattgtgatccactaaggaaatgttttaacagctagagaccactgcttgcctgaaagggcgttcttaaatttggtgcagcaaaaaaaaaaaaaaaaaaaaaaaaaattaaacaacaacatttgaaggcctacagtgtgtatagagaaaacctcatcacaagatcataagtgttacagttttagggaatcaagatattctatttaatagagctatagtaaatgtagtcaattaaacctgatctcaaagcttgaagaagctgagcaaaacagggaaagattgttatatttgtctttatgaaattgggatggaatttgctatgcagaattgaggtttgtggcttcgctgttcctgtagggtgcatgacaagatcccttctcttgagaaaggaaaaaattgatcaccctagcagcagtgatgcatagaaacctaattttagccacaccagtcaatcgaagctaaaggattttcttttttgtttcttcggggttttattgaaggggctaggggcgggacgggattcttttcagttttgtataaaaacaaagtttactcatgctttatattatattgtgattgcaagcgttataagcgtgtgccactggcctcctattgttgatgcttaggtaatggaggcctgtggtgagttttatggtgacttgggcatgtcttattcaaaaacaaaaacataaaacacagaaacctttcttcagcataccaaggcaagcagccatttcatgactcacttaacacattgcagtgtaccagtttacagatgatttttccctttttgcgtgacatggcagttctaacccccagagaattccttatttgtaaattggaagtttctactatgccttacagagcttaaattcagaagtttgtgcctcatatctgaaacaaagggaaataacacacccattcaaaagtaaataaatctcctagaagtttttgtttttaacatttccatataaagagctctgttgaatgtcatgaatagactggaaaaaaaaattttaagaacctgcatatgttgtttactagcagatgacaactacaaaaggaatctgaagaacacgtaaaacttgtatttttttttttttggtagattaactagcaggcctattttaaaaaggtaattcagctaaagggcaatttacttttttgtacttcagactatcttgattgtcaaagtgtacgaactgtaattttaaaatttatactgccacatgattgtaaattttagttgtcttaagttaggaattggtgaaaagctatttatgctggatttgggtcaaaatgacttatttgcaaaaaaataaataatgggaagaaagggctgtataatgaaatactgcaagactcacatattggttggaaatttccctcaaatcacctaccgattacccttgatttccctttgttttcagtttctcaaaacgaatgaaatgaaatatagcagaatgttaacccatataaaaataaagtgtacccaaatattgtaatgtatattgctgctcttcttcaaattaaataagggtttaaaaccacttaattggtaatcaacatctcaattgatacaaataaggtgtgcttggtatacattaatattttcttccaaagatatatctttggttagaaacacaaaaaaataaaactagtaatattgtatgtttatctatctctacatatttccagcatatgtagcgttaatagatctgtcctggtaactgtgtctttgggatttcattttggttccatcaaattaggaaaagaaatggcttagttgtatatgattagctagagatttttggagccagacacctgctgtttagtagataacttagtacagaccctaaacttgtcatttgtttttctcacagaatagccatttcctgctgtcttcccaatgatcactgccctttcaataacactcttgcctctagaatcatatgttcaaagtatgaatacacacctagcacatagtaggtgctcaaatattaatttcctccttgccttccttatctaccctgtgtcctccatttccccgtatgattccaacccaatatagcaaatgacatttacatgttatgaaaacatctattgggtaaaatcagatcttggataaagaaattctgacttttatataagcttttggtagacagaaaaaacagaaaggtattcgttggtagaacatttttaagttcaggaaagaaagctggaataatactacgtaactttgtccaggttactttgactgaaacacgtttttggtggatttcttttcctcaaagaactctctaaatgcaactccttgctggattcctcacccatcatcctgttggaaacccttactagacctatgtatttagggagttttgtcagaaaacatttttaacttgcagtatttaaaagaatatttactgttcctaaaatgtcattcaaatgcatgtactgtctattgtttggggatgggaactagttttgcaaaaaacacctaatgttgtataataatgccccaatgatcttgctggttaaaaatacagtatttttggccataattttgtactatagtattcttcattgttgagttttgcttccattaaagttgcccgagcccctctcagaatgttttgtattagtaggagtactgaaatacatctttccttccttaacacaccttgtgcatattgcattttccaaaataaacaagtttaatggtttcaaaaaaaaaaaaacaccaaaaaa

SEQ ID NO: 124146 - DNA, 1273 bp, Artificial Sequence
  derived and/or modified sequence
cactgcactccagcctgccagcctgggtgacagaccaagactccttctcaaagaaaaaaaaaaaaacaacttctaaatgcttcattaccgtttttcataggataaagaggctcatgcacaattagttcgagaagttgatgtggagaaggtgtctgcttttgagaatccatatgtagatgcaataaagagtttatggaatgatcctggaatccaggaatgctatgatagacgacgagaatatcaattatctgactctaccaaatactatcttaatgacttggaccgcgtagctgaccctgcctacctgcctacgcaacaagatgtgcttagagttcgagtccccaccacagggatcatcgaatacccctttgacttacaaagtgtcattttcagaatggtcgatgtagggggccaaaggtcagagagaagaaaatggatacactgctttgaaaatgtcacctctatcatgtttctagtagcgcttagtgaatatgatcaagttctcgtggagtcagacaatgagaaccgaatggaggaaagcaaggctctctttagaacaattatcacatacccctggttccagaactcctcggttattctgttcttaaacaagaaagatcttctagaggagaaaatcatgtattcccatctagtcgactacttcccagaatatgatggaccccagagagatgcccaggcagcccgagaattcattctgaagatgttcgtggacctgaacccagacagtgacaaaattatctactcccacttcacgtgcgccacagacaccgagaatatccgctttgtctttgctgccgtcaaggacaccatcctccagttgaacctgaaggagtacaatctggtctaattgtgcctcctagacacccgccctgcccttccctggtgggctattgaagatacacaagagggactgtatttctgtggaaaacaatttgcataatactaatttattgccgtcctggactctgtgtgagcgtgtccacagagtttgtagtaaatattatgattttatttaaactattcagaggaaaaacagaggatgctgaagtacagtcccagcacatttcctctctatcttttttttaggcaaaaccttgtgactcagtgtattttaaattctcagtcatgcactcacaaagataagacttgtttctttctgtctctctctctttttcttttctatggagcaaaacaaagctgatttcccttttttcttcccccgctaattcatacctccctcctgatgtttttc

SEQ ID NO: 124147 - DNA, 551 bp, Artificial Sequence
  derived and/or modified sequence
ggtgtgcatccattatcagtgccctatggggtcaggagggaatgggggaacggtgggcagactcgcagctggattcccggagcactcatgggacaggagagagtggcaagagtacgtttatcaagcagatgagaatcatccatgggtcaggatactctgatgaagataaaaggggcttcaccaagctggtgtatcagaacatcttcacggccatgcaggccatgatcagagccatggacacactcaagatcccatacaagtatgagcacaataaggctcatgcacaattagttcgagaagttgatgtggagaaggtgtctgcttttgagaatccatatgtagatgcaataaagagtttatggaatgatcctggaatccaggaatgctatgatagacgacgagaatatcaattatctgactctaccaaatactatcttaatgacttggaccgcgtagctgaccctgcctacctgcctacgcaacaagatgtgcttagagttcgagtccccaccacagggatcatcgaatacccctttgacttacaaagtgtc

SEQ ID NO: 124148 - DNA, 1080 bp, Artificial Sequence
  derived and/or modified sequence
atgaccctggagagcatcatggcctgctgcctgtctgaggaggccaaggaggcccggcgcatcaatgatgaaattgagcggcagctgcggcgggacaagagagatgcccggcgggagctgaagctgctgctgctgggcactggagagagcggcaagagcaccttcatcaagcagatgaggatcatccacggcagcggctacagtgatgaggacaagaggggcttcaccaagctggtgtaccagaacatcttcaccgccatgcaggccatgatccgggccatggacaccctgaagatcccctacaagtatgagcacaacaaggcccacgcccagctggtgcgggaggtggatgtggagaaggtgtctgcctttgagaacccctacgtggatgccatcaagagcctgtggaatgaccccggcatccaggagtgctatgacagaagaagagagtaccagctgagtgacagcaccaagtactacctgaatgacctggacagagtggccgaccctgcctacctgcccacccagcaggatgtgctgcgggtgcgggtgcccaccaccggcatcatcgagtacccctttgacctgcagagcgtcatcttcaggatggtggatgtgggcggccagaggagtgaaagaaggaagtggatccactgctttgaaaatgtgaccagcatcatgttcctggtggccctgtctgaatatgaccaggtgctggtggagagtgacaatgaaaataggatggaggagagcaaggccctcttccgcaccatcatcacctacccctggttccagaacagcagcgtcatcctcttcctgaacaagaaggacctgctggaggagaagatcatgtacagccacctggtggactacttcccagaatatgatggcccccagagagatgcccaggccgcccgggagttcatcctgaagatgtttgtggacctgaacccagacagcgacaagatcatctacagccacttcacctgtgccacagacacagagaacatccgctttgtgtttgctgctgtgaaggacaccatcctgcagctgaacctgaaggagtacaacctggtgtag

SEQ ID NO: 124149 - DNA, 474 bp, Artificial Sequence
  derived and/or modified sequence
atggtggatgtgggcggccagaggagtgaaagaaggaagtggatccactgctttgaaaatgtgaccagcatcatgttcctggtggccctgtctgaatatgaccaggtgctggtggagagtgacaatgaaaataggatggaggagagcaaggccctcttccgcaccatcatcacctacccctggttccagaacagcagcgtcatcctcttcctgaacaagaaggacctgctggaggagaagatcatgtacagccacctggtggactacttcccagaatatgatggcccccagagagatgcccaggccgcccgggagttcatcctgaagatgtttgtggacctgaacccagacagcgacaagatcatctacagccacttcacctgtgccacagacacagagaacatccgctttgtgtttgctgctgtgaaggacaccatcctgcagctgaacctgaaggagtacaacctggtgtag

SEQ ID NO: 124150 - DNA, 513 bp, Artificial Sequence
  derived and/or modified sequence
atgggagagcgctgggccgacagccagctggacagccgcagcacccacggcaccggggagagcggcaagagcaccttcatcaagcagatgaggatcatccacggcagcggctacagtgatgaggacaagaggggcttcaccaagctggtgtaccagaacatcttcaccgccatgcaggccatgatccgggccatggacaccctgaagatcccctacaagtatgagcacaacaaggcccacgcccagctggtgcgggaggtggatgtggagaaggtgtctgcctttgagaacccctacgtggatgccatcaagagcctgtggaatgaccccggcatccaggagtgctatgacagaagaagagagtaccagctgagtgacagcaccaagtactacctgaatgacctggacagagtggccgaccctgcctacctgcccacccagcaggatgtgctgcgggtgcgggtgcccaccaccggcatcatcgagtacccctttgacctgcagagcgtgtag

SEQ ID NO: 124151 - DNA, 1080 bp, Artificial Sequence
  derived and/or modified sequence
atgaccctggagagcatcatggcctgctgcctgagcgaggaggccaaggaggcaaggagaatcaacgatgagattgagcgacaattgagaagagataaacgagacgcacgtagggagttgaagttgctactcctgggaactggtgagagtgggaaatctacatttattaagcagatgcgaattattcatggaagcggatatagcgatgaggacaagagggggttcaccaaattggtataccagaatatttttacagctatgcaggccatgattcgtgccatggacaccctgaaaattccctataaatacgaacacaacaaggcacacgcacaactggtgagagaagtagatgttgaaaaagtctctgcttttgagaacccatatgtcgatgcgatcaaaagtctgtggaatgaccccggaatccaagagtgttacgacagaagaagggaataccagctgtcggactctacaaagtattacttgaatgatttggaccgagttgcggaccccgcctacctgcccacccagcaggatgttctccgagttcgggttcccaccaccggaatcattgaatacccctttgacctgcagagcgtgatcttccggatggttgatgttggaggccagagaagtgaaagacgcaaatggattcactgtttcgagaatgttaccagcataatgtttctcgttgcgctgtcggagtatgatcaagtgctagtggagtccgacaacgaaaataggatggaggaaagtaaggctctctttcgcacgataataacctatccttggtttcagaatagctcagttatactcttccttaacaaaaaggaccttctggaggagaagatcatgtattcccacctggtggattacttccctgagtacgatggacctcagagagacgcgcaagctgcgagggagttcatcctgaagatgttcgttgatctcaacccagattcagataagattatttatagtcatttcacttgtgccactgacacagaaaatatccggttcgtgtttgcagctgtgaaagacactattctccagcttaacctgaaagaatacaatttagtttag

SEQ ID NO: 124152 - DNA, 474 bp, Artificial Sequence
  derived and/or modified sequence
atggtggacgtgggcggccagcggagcgagcggcggaagtggatccattgtttcgaaaatgtaacctctataatgtttcttgtggccctgtcagagtacgaccaagtcctagtggaatcggataatgaaaatcgtatggaagagtccaaggccctgtttagaactatcatcacctatccttggttccagaacagctccgtcatactgttcctcaacaaaaaagacctgctagaggagaagattatgtacagccacctggtggattattttcccgaatatgacggaccccagcgggatgcgcaagccgctcgcgaatttatcctgaaaatgttcgtggatctgaatccggattctgacaaaattatctacagccacttcacgtgtgctactgacaccgagaatatacgatttgttttcgccgcagtcaaggataccattctgcagctgaacttaaaagagtataacctggtctag

SEQ ID NO: 124153 - DNA, 513 bp, Artificial Sequence
  derived and/or modified sequence
atgggcgagcggtgggccgacagccagctggacagccggagcacccacggaaccggcgagtccgggaagagtaccttcatcaaacagatgcgcataatacacgggtcaggctacagcgatgaggacaagagaggttttaccaaactggtttaccaaaacatcttcactgctatgcaagcaatgattagggccatggatacactgaaaatcccgtacaagtacgagcataacaaagcacacgcgcaacttgttagggaggtggacgtagagaaggtaagcgcctttgagaacccttatgttgatgccatcaagtccctgtggaatgaccctggcatccaggagtgctacgataggagaagggagtatcagttatcagattccacaaaatactatctgaatgacctggatcgtgtggccgaccctgcgtacctgccaacacagcaggatgtccttcgcgtgcgtgtccctactacaggtatcattgaatacccgttcgacctccagtcggtctag

SEQ ID NO: 124154 - DNA, 1080 bp, Artificial Sequence
  derived and/or modified sequence
atgacgctggagtctatcatggcttgctgtctgtctgaggaggcaaaagaggccaggaggataaatgacgaaatcgaaaggcaactgagacgcgacaaacgcgatgccagacgcgaactaaagttgctgctcctgggcaccggcgagagcggcaagtcaacgtttattaaacagatgcgcatcattcacggcagtgggtattcagatgaagataaaaggggatttacaaagctcgtttatcagaatatctttacagccatgcaggcaatgatccgggcaatggataccttgaaaatcccgtacaagtatgagcacaataaagcacatgctcagctggtgagagaggtggatgtggagaaagtgtcagccttcgagaacccatatgtcgacgcgatcaagagcttatggaacgaccctggcattcaggagtgttatgatcgacgcagggaataccagctgtccgattccaccaagtattacttaaacgacttagaccgcgtggccgatccagcctatctgccgacccagcaagacgtgctcagagttagggtgcctactaccggaatcatcgaataccccttcgacttgcagagtgtgattttcagaatggtggatgtaggcggacaacgttccgagcgtcgcaaatggatccactgcttcgaaaatgtgacatcaatcatgtttcttgtggctctgagcgaatatgatcaagtactggtagaaagcgataatgagaaccggatggaggagtcaaaggccctcttccgtaccatcatcacctacccttggttccaaaacagtagcgttattctctttttaaacaaaaaggatctcctggaggagaaaataatgtattcccatcttgtggattatttcccagaatacgacgggccacagagggatgcgcaggctgcaagggagtttattctcaaaatgtttgtagacctcaatcccgattcggataagatcatatatagccacttcacgtgtgcaaccgacactgaaaatatccgatttgtctttgcggctgtgaaagacaccatcctgcagctcaatttgaaggaatacaacctggtatag

SEQ ID NO: 124155 - DNA, 474 bp, Artificial Sequence
  derived and/or modified sequence
atggttgatgtgggcggtcaacgaagcgaacgaaggaagtggatccactgtttcgagaacgttacatcaatcatgtttttggtagctctatccgagtatgaccaggtcttggtggaaagtgacaacgaaaataggatggaagaaagtaaagctctgtttcggacaatcatcacctacccctggttccagaacagctctgtcatcctgttcctaaacaagaaggacctactcgaagagaagattatgtacagtcacctagtggactacttccctgagtacgacgggcctcaaagggacgctcaggcggctcgggagtttatactgaagatgttcgtcgatctgaacccagacagtgataagattatctatagtcactttacttgtgccaccgacacggaaaatatccgctttgttttcgccgcagtgaaggacaccatactacagctcaatctgaaggagtacaatctggtgtag

SEQ ID NO: 124156 - DNA, 513 bp, Artificial Sequence
  derived and/or modified sequence
atgggggaacgctgggccgattcacagttagatagccggtctacacacggtacgggcgaatcagggaagagcacgttcattaagcagatgagaataattcacgggtctgggtactcggacgaggataaacgcggattcacaaagttagtataccaaaacatatttaccgccatgcaagccatgatcagagccatggatacattaaagatcccttataaatacgagcacaacaaggctcatgcccagctggtcagggaggtggacgtggagaaggtgtcagccttcgagaatccctacgtcgacgccataaaaagcctgtggaatgatcctggtatccaggagtgctatgatcgcaggagagaatatcaactgagcgattccacaaaatactatctcaatgatctcgatagagtggctgatccagcatacctacccacacagcaggacgtgttgcgggtgcgggtgcccactaccgggattatcgaataccccttcgacctacagtccgtgtag

SEQ ID NO: 124157 - DNA, 1080 bp, Artificial Sequence
  derived and/or modified sequence
atgaccctggagagcatcatggcctgctgcctgagcgaggaggccaaggaggccagaagaatcaacgacgagatcgagagacagctgagaagagacaagagagacgccagaagagagctgaagctgctgctgctgggcaccggcgagagcggcaagagcaccttcatcaagcagatgagaatcatccacggcagcggctacagcgacgaggacaagagaggcttcaccaagctggtgtaccagaacatcttcaccgccatgcaggccatgatcagagccatggacaccctgaagatcccctacaagtacgagcacaacaaggcccacgcccagctggtgagagaggtggacgtggagaaggtgagcgccttcgagaacccctacgtggacgccatcaagagcctgtggaacgaccccggcatccaggagtgctacgacagaagaagagagtaccagctgagcgacagcaccaagtactacctgaacgacctggacagagtggccgaccccgcctacctgcccacccagcaggacgtgctgagagtgagagtgcccaccaccggcatcatcgagtaccccttcgacctgcagagcgtgatcttcagaatggtggacgtgggcggccagagaagcgagagaagaaagtggatccactgcttcgagaacgtgaccagcatcatgttcctggtggccctgagcgagtacgaccaggtgctggtggagagcgacaacgagaacagaatggaggagagcaaggccctgttcagaaccatcatcacctacccctggttccagaacagcagcgtgatcctgttcctgaacaagaaggacctgctggaggagaagatcatgtacagccacctggtggactacttccccgagtacgacggcccccagagagacgcccaggccgccagagagttcatcctgaagatgttcgtggacctgaaccccgacagcgacaagatcatctacagccacttcacctgcgccaccgacaccgagaacatcagattcgtgttcgccgccgtgaaggacaccatcctgcagctgaacctgaaggagtacaacctggtgtag

SEQ ID NO: 124158 - DNA, 474 bp, Artificial Sequence
  derived and/or modified sequence
atggtggacgtgggcggccagagaagcgagagaagaaagtggatccactgcttcgagaacgtgaccagcatcatgttcctggtggccctgagcgagtacgaccaggtgctggtggagagcgacaacgagaacagaatggaggagagcaaggccctgttcagaaccatcatcacctacccctggttccagaacagcagcgtgatcctgttcctgaacaagaaggacctgctggaggagaagatcatgtacagccacctggtggactacttccccgagtacgacggcccccagagagacgcccaggccgccagagagttcatcctgaagatgttcgtggacctgaaccccgacagcgacaagatcatctacagccacttcacctgcgccaccgacaccgagaacatcagattcgtgttcgccgccgtgaaggacaccatcctgcagctgaacctgaaggagtacaacctggtgtag

SEQ ID NO: 124159 - DNA, 513 bp, Artificial Sequence
  derived and/or modified sequence
atgggcgagagatgggccgacagccagctggacagcagaagcacccacggcaccggcgagagcggcaagagcaccttcatcaagcagatgagaatcatccacggcagcggctacagcgacgaggacaagagaggcttcaccaagctggtgtaccagaacatcttcaccgccatgcaggccatgatcagagccatggacaccctgaagatcccctacaagtacgagcacaacaaggcccacgcccagctggtgagagaggtggacgtggagaaggtgagcgccttcgagaacccctacgtggacgccatcaagagcctgtggaacgaccccggcatccaggagtgctacgacagaagaagagagtaccagctgagcgacagcaccaagtactacctgaacgacctggacagagtggccgaccccgcctacctgcccacccagcaggacgtgctgagagtgagagtgcccaccaccggcatcatcgagtaccccttcgacctgcagagcgtgtag

SEQ ID NO: 124160 - protein, 355 aa, Artificial Sequence
  derived and/or modified sequence
MGCRQSSEEKEAARRSRRIDRHLRSESQRQRREIKLLLLGTSNSGKSTIVKQMKIIHSGGFNLEACKEYKPLIIYNAIDSLTRIIRALAALRIDFHNPDRAYDAVQLFALTGPAESKGEITPELLGVMRRLWADPGAQACFSRSSEYHLEDNAAYYLNDLERIAAADYIPTVEDILRSRDMTTGIVENKFTFKELTFKMVDVGGQRSERKKWIHCFEGVTAIIFCVELSGYDLKLYEDNQTSRMAESLRLFDSICNNNWFINTSLILFLNKKDLLAEKIRRIPLTICFPEYKGQNTYEEAAVYIQRQFEDLNRNKETKEIYSHFTCATDTSNIQFVFDAVTDVIIQNNLKYIGLC

SEQ ID NO: 124161 - protein, 303 aa, Artificial Sequence [sequence omitted]

SEQ ID NO: 124162 - DNA, 1068 bp, Artificial Sequence
  derived and/or modified sequence
atgggttgcaggcagagtagcgaggagaaagaagcagctagacggtccaggagaatcgaccgacacttgaggtccgaaagccagaggcaacgccgcgagatcaagttattactgttgggaactagtaatagtggcaaatcaacgatcgtgaaacagatgaaaatcatccactccggcggtttcaatcttgaggcatgcaaggaatataagcctcttatcatttataatgccatcgactccctcacacggatcataagggcgctggctgctctcagaattgacttccacaaccccgaccgcgcatacgatgcagtacagctgttcgctctgaccggccctgcagagtctaaaggtgaaattactcctgaacttctgggcgtaatgagaaggctgtgggcagaccctggggctcaggcctgcttctctaggtcctcagaatatcatctcgaagataacgctgcatactatcttaacgatcttgaaagaattgccgctgcagattatatccccactgtcgaggacatactgcgttctcgcgatatgaccactggcatagtggagaataaattcaccttcaaagaactgacgtttaagatggtggacgttggcggccagcggagtgagaggaaaaagtggatccactgcttcgaaggagtgaccgcgatcattttctgcgtcgagctgtcaggatacgatctaaaattgtacgaggacaaccagacatcacggatggccgaatcgctgcgactgttcgatagtatttgcaacaataattggtttattaatacttcgctgattcttttcttgaacaagaaggacctgctggccgagaaaatcagaaggattccattgacaatctgctttcccgagtataagggacaaaacacctatgaggaagctgcagtctatatacagcgccagtttgaggacctgaaccgcaacaaagagactaaggaaatctatagccattttacatgtgctacagacaccagcaatattcagttcgttttcgatgccgtcactgatgtgatcattcagaacaacctaaaatacatcggtctgtgttag

SEQ ID NO: 124163 - DNA, 912 bp, Artificial Sequence
  derived and/or modified sequence
atgaagatcattcattcaggcggctttaacctggaggcttgtaaagagtataaaccactaataatctataacgctatagacagcctgaccaggatcattcgggccctcgcagccctacggatcgactttcataatcccgatcgtgcgtatgacgctgtgcagctatttgccctgacaggtccagcagagtccaagggcgagattactcctgaactgttaggtgtcatgcgcagactgtgggctgatcctggggcacaggcttgttttagccgcagtagcgaataccacctggaagataatgccgcctactatctgaacgatctggaaagaatcgccgccgctgactacataccaacagttgaggacatcctgcggtcacgtgatatgactaccggcattgttgaaaacaagttcacctttaaagaactcacatttaaaatggtggacgtagggggacaacgaagtgagcgtaaaaaatggattcactgcttcgaaggcgtgactgccatcatattttgcgtggaactgtcaggatacgatttaaaactgtatgaggataaccagacgagccggatggcagagtctctcagactcttcgacagcatatgtaacaataactggttcatcaatacatctttaattctctttttgaataaaaaagacctcttggcggagaaaatccgccgcatccccctcaccatttgcttccccgaatacaagggacagaacacctatgaagaagctgctgtctatatccagcggcaatttgaggacctcaataggaacaaggaaacgaaggagatctattcccacttcacctgcgccaccgacacaagtaacattcaattcgtgtttgacgccgtaaccgatgtcatcattcagaacaatctgaagtacatcggcctgtgttag

SEQ ID NO: 124164 - DNA, 3340 bp, Artificial Sequence
  derived and/or modified sequence
ggcggcgggcggcgggcggcgggcggcgcgggagggcgggcggagggaaccaggccggccggagtgtgtgcgccgcccgcggtccggtcacgtccccgcgtgggcgccgctgcccgcgtcgtacggaacgagggcgccgcggccccgtgctcgccgccccgccccgccccgccctgcccggagcagctcggcagatgctctgtgctgcggcccggaggtgaagggctggatgcacagtgggagccggaggcggggggctgcagggagcacaccagcgaccggccctccaaccctccagccactcagcaacatcgccacagcaaccagcaaccagacggcagcagccgaggcaaacacaagcggacggcttcccaccgtcgccgaggacagggaatgactacggcaaatcaggccactttgccaactagggaggtggagtgtcactagtggggaggggcggccaccgcccgctgcacagagcgccatgccggctggagaagaggcgctggggcaggggctgcagtgtggctcggcctcacccccctgctggcactgagtgcctccagggcagctgggctcttgtctgcctggtctcagtgtcccctgtggcaagagggagaggtgccccatcccgtgctccttgtctgggcccgctgctgccagaccatgggatgtcggcaaagctcagaggaaaaagaagcagcccggcggtcccggagaattgaccgccacctgcgctcagagagccagcggcaacgccgcgaaatcaagctgctcctgctgggcaccagcaactcaggcaagagcaccatcgtcaaacagatgaagatcatccacagcggcggcttcaacctggaggcctgcaaggagtacaagcccctcatcatctacaatgccatcgactcgctgacccgcatcatccgggccctggccgccctcaggatcgacttccacaaccccgaccgcgcctacgacgctgtgcagctctttgcgctgacgggccccgctgagagcaagggcgagatcacacccgagctgctgggtgtcatgcgacggctctgggccgacccaggggcacaggcctgcttcagccgctccagcgagtaccacctggaggacaacgcggcctactacctgaacgacctggagcgcatcgccgcagctgactatatccccactgtcgaggacatcctgcgctcccgggacatgaccacgggcattgtggagaacaagttcaccttcaaggagctcaccttcaagatggtggacgtgggggggcagaggtcagagcgcaaaaagtggatccactgcttcgagggcgtcacagccatcatcttctgtgtggagctcagcggctacgacctgaaactctacgaggataaccagacaagtcggatggcagagagcttgcgcctctttgactccatctgcaacaacaactggttcatcaacacctcactcatcctcttcctgaacaagaaggacctgctggcagagaagatccgccgcatcccgctcaccatctgctttcccgagtacaagggccagaacacgtacgaggaggccgctgtctacatccagcggcagtttgaagacctgaaccgcaacaaggagaccaaggagatctactcccacttcacctgcgccaccgacaccagtaacatccagtttgtcttcgacgcggtgacagacgtcatcatacagaacaatctcaagtacattggcctttgctgaggagctgggcccggggcccgcctgcctatggtgaaacccacggggtgtcatgccccaacgcgtgctagagaggcccaatccaggggcagaaaacagggggcctaaagaatgtcccccaccccttggcctctgcctccttggccccacatttctgcaaacataaatatttacggatagattgctaggtagatagacacacacacatgcacacacacacatctggagatggcaaaatcctctaaaatgtcgaggtctcttgaagacttgagaagctgtcacaaggtcactacaagcccaacctgccccttcactttgccttcctgagttggccccactccacttgggggtctgcattggattgttagggataggcagcagggctgaggcaaggtaggccaactgcacccctgtcgcctggaggagggccagctcgctgcccgagctctggcctagggaccttgccgctgaccaagagggaggaccagtgcagggtctgtgcaccttccctgctggcctgcacacagctgctcagcaccactttcattctggacctgggaccttaggagccgggtgacagcactaaccagacctccagccactcacagctctttttaaaaaacagcttcaaaatatgcagcaaaaaccaatacaacaaaacgagtggcacgatttatttcaaactaggccagctgggattccagcttttcttctactagtctgatgttttataaatcaaaacctggttttccttctctgacattttttttttgttttgttttttggtttttttttttttttggccaaatctcgtggtgtttcgcagaaaaaaatccagaaaatttcaaatgcagttgagtattcttttttaaatgcagattttcaaaacatattttttttcaggtggtcttttttgtgtctggcttgctgagtgtaaaagttgttatctggacgatctgtctctctgctccaaagaaattttggagtgagtggcagtcctgcgccagcctcgcgggacacgtgttgtacataagcctctgcagtgtcctcttgttaatggtggggttttctgctttgtttttatttaagaaaataaacacgacatatttaaagaaggttctttcacctgggagcaaatgaacaatagctaagtgtcttggtatttaaagagtaaattatttgtggctttgctgagtgaaggaaggggagcaaggggtggtgcccctggtcccagcatgccccgcgcctgagactggctggaaatgctctgactcctgtgaaggcacagccagcgttgtggcctgagggaggccctgctgggaccctgatctgggccttcctgtcccagggcctatgggcaactgcgttgaaaggacgttcgccaagggccgtgtgtaaatacgaactgcgccatggagaggagaggcactgccggagcccttgccagatctccctccctctctccgtgcagtagctgtgtgtccgaggtcagtgtgcggaatcacagccaaggacgtgaagagatgtacgggggaaagagaagctggggattggatgaaagtcaaaggttgtctactttaagaaaataaaataccctgaatggagccca

SEQ ID NO: 124165 - DNA, 1429 bp, Artificial Sequence
  derived and/or modified sequence
agatgctctgtgctgcggcccggaggtgaagggctggatgcacagtgggagccggaggcggggggctgcagggagcacaccagcgaccggccctccaaccctccagccactcagcaacatcgccacagcaaccagcaacgccgcgaaatcaagctgctcctgctgggcaccagcaactcaggcaagagcaccatcgtcaaacagatgaagatcatccacagcggcggcttcaacctggaggcctgcaaggagtacaagcccctcatcatctacaatgccatcgactcgctgacccgcatcatccgggccctggccgccctcaggatcgacttccacaaccccgaccgcgcctacgacgctgtgcagctctttgcgctgacgggccccgctgagagcaagggcgagatcacacccgagctgctgggtgtcatgcgacggctctgggccgacccaggggcacaggcctgcttcagccgctccagcgagtaccacctggaggacaacgcggcctactacctgaacgacctggagcgcatcgccgcagctgactatatccccactgtcgaggacatcctgcgctcccgggacatgaccacgggcattgtggagaacaagttcaccttcaaggagctcaccttcaagatggtggacgtgggggggcagaggtcagagcgcaaaaagtggatccactgcttcgagggcgtcacagccatcatcttctgtgtggagctcagcggctacgacctgaaactctacgaggataaccagacaagtcggatggcagagagcttgcgcctctttgactccatctgcaacaacaactggttcatcaacacctcactcatcctcttcctgaacaagaaggacctgctggcagagaagatccgccgcatcccgctcaccatctgctttcccgagtacaagggccagaacacgtacgaggaggccgctgtctacatccagcggcagtttgaagacctgaaccgcaacaaggagaccaaggagatctactcccacttcacctgcgccaccgacaccagtaacatccagtttgtcttcgacgcggtgacagacgtcatcatacagaacaatctcaagtacattggcctttgctgaggagctgggcccggggcccgcctgcctatggtgaaacccacggggtgtcatgccccaacgcgtgctagagaggcccaatccaggggcagaaaacagggggcctaaagaatgtcccccaccccttggcctctgcctccttggccccacatttctgcaaacataaatatttacggatagattgctaggtagatagacacacacacatgcacacacacacatctggagatggcaaaatcctctaaaatgtcgaggtctcttgaagacttgagaagctgtcacaaggtcactacaagcccaacctgccccttcactt

SEQ ID NO: 124166 - DNA, 1068 bp, Artificial Sequence
  derived and/or modified sequence
atgggctgccggcagagcagcgaggagaaggaggccgcccggcgcagcagaagaattgacagacacctgcggtctgagagccagaggcagaggcgggagatcaagctgctgctgctgggcaccagcaacagcggcaagagcaccatcgtgaagcagatgaagatcatccacagcggcggcttcaacctggaggcctgcaaggagtacaagcccctcatcatctacaatgccatcgacagcctgacccgcatcatccgggccctggccgccctgagaattgacttccacaacccagaccgggcctatgatgctgtgcagctgtttgccctgactggacctgctgagagcaaaggagagatcaccccagagctgctgggcgtgatgaggcggctgtgggccgaccccggggcccaggcctgcttcagccgcagcagcgagtaccacctggaggacaatgctgcctactacctgaatgacctggagagaattgctgctgctgactacatccccaccgtggaggacatcctgcggagccgggacatgaccactggaattgtggagaacaagttcaccttcaaggagctgaccttcaagatggtggatgtgggcggccagaggtctgagaggaagaagtggatccactgctttgagggcgtgacagccatcatcttctgtgtggagctgagcggctatgacctgaagctgtatgaggacaaccagaccagcaggatggccgagagcctgcggctgtttgacagcatctgcaacaacaactggttcatcaacaccagcctcatcctcttcctgaacaagaaggacctgctggccgagaagatccgccgcatccccctgaccatctgcttccctgagtacaagggccagaacacctatgaggaggccgctgtgtacatccagaggcagtttgaggacctgaacagaaacaaggagaccaaggagatctacagccacttcacctgtgccacagacaccagcaacatccagtttgtgtttgatgctgtgacagatgtgatcatccagaacaacctgaagtacatcggcctgtgctag

SEQ ID NO: 124167 - DNA, 912 bp, Artificial Sequence
  derived and/or modified sequence
atgaagatcatccacagcggcggcttcaacctggaggcctgcaaggagtacaagcccctcatcatctacaatgccatcgacagcctgacccgcatcatccgggccctggccgccctgagaattgacttccacaacccagaccgggcctatgatgctgtgcagctgtttgccctgactggacctgctgagagcaaaggagagatcaccccagagctgctgggcgtgatgaggcggctgtgggccgaccccggggcccaggcctgcttcagccgcagcagcgagtaccacctggaggacaatgctgcctactacctgaatgacctggagagaattgctgctgctgactacatccccaccgtggaggacatcctgcggagccgggacatgaccactggaattgtggagaacaagttcaccttcaaggagctgaccttcaagatggtggatgtgggcggccagaggtctgagaggaagaagtggatccactgctttgagggcgtgacagccatcatcttctgtgtggagctgagcggctatgacctgaagctgtatgaggacaaccagaccagcaggatggccgagagcctgcggctgtttgacagcatctgcaacaacaactggttcatcaacaccagcctcatcctcttcctgaacaagaaggacctgctggccgagaagatccgccgcatccccctgaccatctgcttccctgagtacaagggccagaacacctatgaggaggccgctgtgtacatccagaggcagtttgaggacctgaacagaaacaaggagaccaaggagatctacagccacttcacctgtgccacagacaccagcaacatccagtttgtgtttgatgctgtgacagatgtgatcatccagaacaacctgaagtacatcggcctgtgctag

SEQ ID NO: 124168 - DNA, 1068 bp, Artificial Sequence
  derived and/or modified sequence
atgggctgccggcagagcagcgaggagaaggaggccgcccggcggtctaggcggattgatcggcatctccgcagcgaaagccagcgccagagacgggagattaagctgcttctacttggcacatctaacagcgggaagtcgactatagtaaagcagatgaagatcattcacagcggggggttcaacctggaggcttgcaaggagtacaaacctcttataatctacaacgccattgactcacttaccagaattatacgggcactcgctgccctcagaattgacttccataatccagaccgtgcatatgacgctgttcagctgttcgcactaacaggtccagcagagagcaaaggcgagatcacccctgagttacttggcgtcatgcggcggctctgggccgatccaggcgcacaggcctgctttagtcggtcttctgagtaccacctggaagataatgcggcctattacctcaacgatctggagcgaatcgctgccgctgactatattcccaccgtggaggacatactccggagtcgtgatatgactaccggaatagtagaaaataagttcactttcaaggagctgacgttcaagatggtcgacgttgggggccaacgaagcgaacgaaagaagtggattcattgtttcgaaggcgtcaccgctatcatattctgtgtggagcttagcggatacgacctgaagctctacgaggataatcagacttcacgtatggctgagtcactgcggctgtttgatagcatctgtaataataactggtttatcaatacgagcctcatcctgttccttaacaagaaggatctccttgccgagaaaattaggcgtattcctctcaccatttgctttcccgagtacaagggccagaacacctacgaggaggcggcagtgtacatccaaaggcagttcgaggacctgaaccggaacaaggagaccaaagaaatctacagccactttacctgcgccactgatacatccaacatccaatttgtcttcgatgcagttacggatgtgatcatccaaaataacctcaaatacatcgggttgtgctag

SEQ ID NO: 124169 - DNA, 912 bp, Artificial Sequence
  derived and/or modified sequence
atgaagatcatccacagcggcggcttcaacctggaggcctgcaaggagtataagcctctgattatctacaacgccatagacagtttgactcgaattatcagggccctggccgctcttaggatcgatttccacaatcccgaccgcgcctacgacgcagttcagctctttgccctgactggaccagccgagtctaaaggcgagatcactcccgaactccttggggtgatgaggaggctctgggccgatcctggggcccaggcctgtttctcccgctcatccgagtaccatttggaggacaacgccgcctactacctcaacgatttagagagaattgcggcagctgactacatcccaacagtggaggacatactgcggagcagggacatgacaacgggcattgttgagaataagtttactttcaaggagctaaccttcaagatggtagatgtaggagggcagaggtccgagcggaaaaagtggatccactgctttgaaggtgtgactgcaattatcttctgcgttgagttgagcggctatgatttgaagctgtatgaagataaccagacctccagaatggcagagtccttgcgcctattcgacagtatttgtaataataattggtttatcaacacgagtctgattctgttcttgaacaagaaagacctgttggcagagaagattaggcggattcccctcaccatatgttttccagagtataaaggacaaaatacatacgaggaagccgccgtgtatattcaacggcagtttgaagatctgaaccgaaataaggagactaaagaaatctacagccactttacttgcgctacagacactagcaacatccagttcgtcttcgatgcagtcacagacgtaatcatccagaacaacctaaagtatataggcctttgttag

SEQ ID NO: 124170 - DNA, 1068 bp, Artificial Sequence
  derived and/or modified sequence
atgggatgccgtcaatcctctgaggaaaaagaggcggcacgaagaagccgacggatcgacaggcacttgaggagcgagtcgcagcgccagcgacgcgaaataaagctacttctcctcggaacctctaatagtggtaagtccacgatagtgaagcagatgaaaatcatacattctggcggtttcaaccttgaggcctgcaaagagtacaagcccttaattatctataacgccatcgactctctaacacggattattagagcactggctgcgctgaggatagatttccacaaccccgaccgagcctacgatgccgtccagctgtttgcacttactggtccggcagagagtaaaggcgagattactccggaattgctcggagtgatgcgacgactctgggctgaccctggagcacaagcctgcttctccagatccagcgagtaccatctagaagacaatgcagcctattacctgaacgatttggaacgcattgccgcagcagattacatacccaccgtggaggatatcctgcgatcccgcgacatgactacaggcattgtcgaaaacaagtttacctttaaggagctcacattcaagatggtcgacgtgggagggcaaaggagcgaacgcaaaaagtggattcactgctttgagggggttacagcaatcattttctgcgtggagctctccgggtacgatctcaagctctatgaagacaaccaaacatctagaatggccgagtccctgcgtttgttcgactccatctgcaataataactggttcattaatactagcctcattctcttcctgaataagaaagacctgttggcagaaaagatccgacgcattccacttacaatctgtttccccgagtacaaaggtcagaatacctatgaggaagccgcagtgtacattcaacgccagttcgaagacttgaatcgaaataaagagactaaagaaatctacagccattttacctgcgctaccgacaccagtaacattcagttcgtgttcgacgccgttacggatgttattatccagaacaaccttaagtatatcggtctctgttag

SEQ ID NO: 124171 - DNA, 912 bp, Artificial Sequence
  derived and/or modified sequence
atgaaaatcatccactccggcggattcaatctggaagcgtgcaaagagtacaaaccgctgattatctacaacgccattgactctctgacacgcatcattcgagcccttgcggcactaagaatcgattttcataacccggatagagcttatgatgccgtgcaactgttcgctttgaccgggccagcagagagcaagggcgagataacaccagagttgctgggcgtgatgagaaggctctgggctgacccaggggctcaggcttgcttttccagaagctcagaataccatcttgaagataacgcagcctattatctgaatgatttggaacgaatcgctgcggctgattacatccctacagtagaggacatactgagatctcgcgatatgactacaggtatagtggagaacaagttcactttcaaggaactgacctttaagatggtcgacgtgggcggtcaacgatcagagcgcaaaaaatggatacactgttttgagggcgttacagccataatcttctgcgtggaactgtccgggtacgatctcaagttatacgaggacaaccagacatcacgcatggctgagagcctccggttgtttgactccatttgtaataataattggttcattaataccagcttgatactctttctgaataagaaggatctgctagccgagaagatccgcaggatccccctgaccatctgctttcctgagtataaaggccaaaacacatatgaggaagccgctgtctatatccagagacagttcgaggacctgaatcggaataaggaaaccaaagagatatattctcacttcacctgtgcgactgacacctctaacatacaattcgtgtttgacgcggtgactgatgtgataattcagaacaacttaaaatacatcgggttatgctag

SEQ ID NO: 124172 - DNA, 1068 bp, Artificial Sequence
  derived and/or modified sequence
atgggctgcagacagagcagcgaggagaaggaggccgccagaagaagcagaagaatcgacagacacctgagaagcgagagccagagacagagaagagagatcaagctgctgctgctgggcaccagcaacagcggcaagagcaccatcgtgaagcagatgaagatcatccacagcggcggcttcaacctggaggcctgcaaggagtacaagcccctgatcatctacaacgccatcgacagcctgaccagaatcatcagagccctggccgccctgagaatcgacttccacaaccccgacagagcctacgacgccgtgcagctgttcgccctgaccggccccgccgagagcaagggcgagatcacccccgagctgctgggcgtgatgagaagactgtgggccgaccccggcgcccaggcctgcttcagcagaagcagcgagtaccacctggaggacaacgccgcctactacctgaacgacctggagagaatcgccgccgccgactacatccccaccgtggaggacatcctgagaagcagagacatgaccaccggcatcgtggagaacaagttcaccttcaaggagctgaccttcaagatggtggacgtgggcggccagagaagcgagagaaagaagtggatccactgcttcgagggcgtgaccgccatcatcttctgcgtggagctgagcggctacgacctgaagctgtacgaggacaaccagaccagcagaatggccgagagcctgagactgttcgacagcatctgcaacaacaactggttcatcaacaccagcctgatcctgttcctgaacaagaaggacctgctggccgagaagatcagaagaatccccctgaccatctgcttccccgagtacaagggccagaacacctacgaggaggccgccgtgtacatccagagacagttcgaggacctgaacagaaacaaggagaccaaggagatctacagccacttcacctgcgccaccgacaccagcaacatccagttcgtgttcgacgccgtgaccgacgtgatcatccagaacaacctgaagtacatcggcctgtgctag

SEQ ID NO: 124173 - DNA, 912 bp, Artificial Sequence
  derived and/or modified sequence
atgaagatcatccacagcggcggcttcaacctggaggcctgcaaggagtacaagcccctgatcatctacaacgccatcgacagcctgaccagaatcatcagagccctggccgccctgagaatcgacttccacaaccccgacagagcctacgacgccgtgcagctgttcgccctgaccggccccgccgagagcaagggcgagatcacccccgagctgctgggcgtgatgagaagactgtgggccgaccccggcgcccaggcctgcttcagcagaagcagcgagtaccacctggaggacaacgccgcctactacctgaacgacctggagagaatcgccgccgccgactacatccccaccgtggaggacatcctgagaagcagagacatgaccaccggcatcgtggagaacaagttcaccttcaaggagctgaccttcaagatggtggacgtgggcggccagagaagcgagagaaagaagtggatccactgcttcgagggcgtgaccgccatcatcttctgcgtggagctgagcggctacgacctgaagctgtacgaggacaaccagaccagcagaatggccgagagcctgagactgttcgacagcatctgcaacaacaactggttcatcaacaccagcctgatcctgttcctgaacaagaaggacctgctggccgagaagatcagaagaatccccctgaccatctgcttccccgagtacaagggccagaacacctacgaggaggccgccgtgtacatccagagacagttcgaggacctgaacagaaacaaggagaccaaggagatctacagccacttcacctgcgccaccgacaccagcaacatccagttcgtgttcgacgccgtgaccgacgtgatcatccagaacaacctgaagtacatcggcctgtgctag

SEQ ID NO: 124174 - protein, 340 aa, Artificial Sequence [sequence omitted]

SEQ ID NO: 124175 - DNA, 1023 bp, Artificial Sequence
  derived and/or modified sequence
atgggcgagatggagcagctgagacaggaggccgagcagctgaagaagcagatcgccgacgccagaaaggcctgcgccgacgtgaccctggccgagctggtgagcggcctggaggtggtgggcagagtgcagatgagaaccagaagaaccctgagaggccacctggccaagatctacgccatgcactgggccaccgacagcaagctgctggtgagcgccagccaggacggcaagctgatcgtgtgggacagctacaccaccaacaaggtgcacgccatccccctgagaagcagctgggtgatgacctgcgcctacgcccccagcggcaacttcgtggcctgcggcggcctggacaacatgtgcagcatctacaacctgaagagcagagagggcaacgtgaaggtgagcagagagctgagcgcccacaccggctacctgagctgctgcagattcctggacgacaacaacatcgtgaccagcagcggcgacaccacctgcgccctgtgggacatcgagaccggccagcagaagaccgtgttcgtgggccacaccggcgactgcatgagcctggccgtgagccccgacttcaacctgttcatcagcggcgcctgcgacgccagcgccaagctgtgggacgtgagagagggcacctgcagacagaccttcaccggccacgagagcgacatcaacgccatctgcttcttccccaacggcgaggccatctgcaccggcagcgacgacgccagctgcagactgttcgacctgagagccgaccaggagctgatctgcttcagccacgagagcatcatctgcggcatcaccagcgtggccttcagcctgagcggcagactgctgttcgccggctacgacgacttcaactgcaacgtgtgggacagcatgaagagcgagagagtgggcatcctgagcggccacgacaacagagtgagctgcctgggcgtgaccgccgacggcatggccgtggccaccggcagctgggacagcttcctgaagatctggaactag

SEQ ID NO: 124176 - DNA, 1023 bp, Artificial Sequence
  derived and/or modified sequence
atgggagaaatggaacagctgcgccaggaggccgagcagcttaaaaaacagattgccgacgccaggaaagcttgcgctgacgtgactcttgctgaacttgtgtccggactggaagtcgtgggcagagtccagatgaggaccaggaggaccctgcgcgggcatctggcaaaaatttatgcgatgcactgggccaccgatagcaagctgttggtgagtgccagccaagatggaaagttgatagtatgggactcctacacgaccaacaaagtgcatgccatacctctaaggagctcctgggtgatgacatgtgcctacgcaccaagtgggaactttgtggcatgcggggggctcgataacatgtgctccatctacaacttaaaatcgagggagggtaatgttaaggtaagtagagaactttctgcgcacacaggctacctgagttgttgccgtttccttgatgacaataatattgtaacttcttctggcgacacaacctgcgccctgtgggatatcgagacaggccagcagaagacagtgttcgtcgggcatacaggggactgtatgtcactggctgtttcacccgactttaacctattcatcagcggggcatgtgatgccagtgctaagctgtgggatgtgcgtgaaggaacttgccgacagacattcactggtcatgagtcggacatcaatgccatctgtttttttcctaacggcgaggctatatgcaccggttccgacgatgcatcttgccggcttttcgacctcagggccgaccaggaacttatatgtttctcacacgaatcgatcatctgcggcatcacgagcgtggctttctctctgtccgggcgtcttttgtttgctggctatgacgacttcaactgcaacgtgtgggatagcatgaagtcggaacgggtgggcattttgtcgggccacgacaatagggtgtcctgcctcggggtcacggctgacggcatggccgtggcaaccggctcctgggactccttccttaagatctggaactag

SEQ ID NO: 124177 - DNA, 1023 bp, Artificial Sequence
  derived and/or modified sequence
atgggagagatggagcagctgcggcaggaggccgagcagctgaagaagcagattgctgatgccaggaaggcctgtgctgatgtgaccctggccgagctggtgtctggcctggaggtggtgggccgggtgcagatgaggaccaggaggaccctgcggggccacctggccaagatctatgccatgcactgggccacagacagcaagctgctggtgtctgccagccaggacggcaagctgattgtgtgggacagctacaccaccaacaaggtgcacgccatccccctgcggagctcctgggtgatgacctgtgcctatgcccccagcggcaactttgtggcctgtggcggcctggacaacatgtgcagcatctacaacctgaagagccgggagggcaatgtgaaggtgtcccgggagctgagcgcccacacaggctacctgagctgctgccgcttcctggatgacaacaacatcgtgaccagcagcggggacaccacctgtgccctgtgggacattgaaacaggccagcagaagacagtgtttgtgggccacactggagactgcatgagcctggccgtgtccccagacttcaacctcttcatcagcggggcctgtgatgccagcgccaagctgtgggatgtgcgggagggcacctgccggcagaccttcaccggccatgaaagtgacatcaatgccatctgcttcttccccaatggagaggccatctgcaccggcagtgatgatgccagctgccgcctgtttgacctgcgggctgaccaggagctgatctgcttcagccatgagagcatcatctgtggcatcacctctgtggccttcagcctgagcggccgcctgctgtttgctggctatgatgacttcaactgcaatgtgtgggacagcatgaagtctgagcgggtgggcatcctgagcggccatgacaacagagtgtcctgcctgggcgtgacagcagatggcatggctgtggccaccggctcctgggacagcttcctgaagatctggaactag

SEQ ID NO: 124178 - DNA, 1023 bp, Artificial Sequence
  derived and/or modified sequence
atgggcgagatggagcagctgcggcaggaggccgagcagctgaagaaacagattgccgacgcccggaaggcatgtgcggacgtcacccttgctgagctggtttccggccttgaggttgtaggacgcgttcaaatgcgcacccgtaggacgcttaggggacacctggctaaaatctacgccatgcactgggccacagactccaaactgctggtttcagccagccaggatggtaaattgatcgtgtgggattcttataccacaaataaggttcatgctattccattgcggtccagttgggtgatgacatgcgcctacgctccgtctgggaattttgtcgcctgcggtggactggacaacatgtgctcgatctacaaccttaagtctagggaggggaacgtgaaagtgtcgagggaactgtctgcccataccggttatctttcatgctgccggtttcttgacgataataacatcgtaacatccagcggagatacaacttgcgccctgtgggacattgaaactggccagcaaaagacagtgtttgtgggtcatactggagactgcatgtctctcgctgtttccccagatttcaacctcttcatctcaggcgcctgcgatgcttcagcgaagctgtgggacgtgcgcgaggggacctgtcgccagacgtttaccggacatgaaagtgacatcaatgctatatgtttcttcccaaatggagaagcgatttgtacgggatctgacgatgcttcttgccgcctgtttgaccttagagccgaccaagaactgatttgcttcagccacgagagtattatctgtggaatcacctctgtagcgttctccctgtccgggagactgctctttgccgggtatgatgactttaattgcaacgtgtgggacagtatgaagagtgagagggttggaattctgtccggccatgataaccgagtgtcgtgcctcggcgtaactgcagacgggatggccgtcgccactggtagttgggattcctttctcaagatctggaattag

SEQ ID NO: 124179 - DNA, 1023 bp, Artificial Sequence
  derived and/or modified sequence
atgggtgagatggagcagctgcggcaggaggcagagcagctgaaaaaacaaattgccgatgctcggaaggcttgcgccgatgtcacgctcgcagagctggtaagcggtttggaggtggtgggccgtgtgcagatgcgcacacgacgtacgctgcggggacatttagcaaagatctacgccatgcactgggcgaccgatagtaagctgctcgtgtctgcgagccaggatgggaaattgattgtgtgggactcatacacaacaaacaaggttcacgctattccgctgagatcatcctgggttatgacctgtgcctatgcaccaagcggcaatttcgtggcttgcgggggtctggacaacatgtgttctatttacaatctgaagtctagagagggcaatgtcaaggtgagtagggagctaagcgcacataccgggtacctttcatgctgcaggtttctcgacgacaacaatatcgtcacttcaagtggagacaccacatgcgctctgtgggacatcgagaccggccagcagaagacagtgttcgtgggacacacgggcgattgcatgtcactggcggtttctcccgattttaatctttttatttccggggcatgcgacgcctctgccaagctgtgggatgtaagggagggcacgtgtcgccaaaccttcacaggacatgagagcgacatcaatgcaatctgcttctttcccaatggggaggctatatgtaccggcagcgatgacgcgagctgccgcctgtttgatttgcgagccgaccaggagctgatctgtttctctcacgagtccatcatctgtggaatcactagtgttgcgttttctctcagcgggagactgctcttcgctggctacgatgatttcaattgtaacgtttgggatagcatgaaatcagaacgtgtcgggatcctgtccgggcatgataacagagtgtcttgtttaggtgtaactgctgacggcatggccgtggcgactggatcttgggattccttcctgaagatttggaattag

SEQ ID NO: 124180 - DNA, 1923 bp, Artificial Sequence
  derived and/or modified sequence
ccacaataggggcagacctgtccatccttctctgtgggtcccctgtacctttctcccccaacaggatcagacccagaggcagctggttggggtttgtcgagaagaaggattatccagatcagtcctttctaatctcagctcctgcctgtaccctcccatactcaccaaaccctcttccccaccaccctgagctgaggagcacagtttgaggcccccccaaccccccgccggtcggggccaggccaggccaggccagctcctctggcagcagagcctgggcaggtgacgggcgggcgcgggcgtcgcagctgagggagtaaggaggctcccaggaaccggagctggaaacccggccgaggtccagccagagcccaagagccagagtgacccctcgacctgtcagccatgggggagatggagcaactgcgtcaggaagcggagcagctcaagaagcagattgcagatgccaggaaagcctgtgctgacgttactctggcagagctggtgtctggcctagaggtggtgggacgagtccagatgcggacgcggcggacgttaaggggacacctggccaagatttacgccatgcactgggccactgattctaagctgctggtaagtgcctcgcaagatgggaagctgatcgtgtgggacagctacaccaccaacaaggtgcacgccatcccactgcgctcctcctgggtcatgacctgtgcctatgccccatcagggaactttgtggcatgtggggggctggacaacatgtgttccatctacaacctcaaatcccgtgagggcaatgtcaaggtcagccgggagctttctgctcacacaggttatctctcctgctgccgcttcctggatgacaacaatattgtgaccagctcgggggacaccacgtgtgccttgtgggacattgagactgggcagcagaagactgtatttgtgggacacacgggtgactgcatgagcctggctgtgtctcctgacttcaatctcttcatttcgggggcctgtgatgccagtgccaagctctgggatgtgcgagaggggacctgccgtcagactttcactggccacgagtcggacatcaacgccatctgtttcttccccaatggagaggccatctgcacgggctcggatgacgcttcctgccgcttgtttgacctgcgggcagaccaggagctgatctgcttctcccacgagagcatcatctgcggcatcacgtccgtggccttctccctcagtggccgcctactattcgctggctacgacgacttcaactgcaatgtctgggactccatgaagtctgagcgtgtgggcatcctctctggccacgataacagggtgagctgcctgggagtcacagctgacgggatggctgtggccacaggttcctgggacagcttcctcaaaatctggaactgaggaggctggagaaagggaagtggaaggcagtgaacacactcagcagccccctgcccgaccccatctcattcaggtgttctcttctatattccgggtgccattcccactaagctttctcctttgagggcagtggggagcatgggactgtgcctttgggaggcagcatcagggacacaggggcaaagaactgccccatctcctcccatggccttccctccccacagtcctcacagcctctcccttaatgagcaaggacaacctgcccctccccagccctttgcaggcccagcagacttgagtctgaggccccaggccctaggattcctcccccagagccactacctttgtccaggcctgggtggtatagggcgtttggccctgtgactatggctctggcaccactagggtcctggccctcttcttattcatgctttctcctttttctacctttttttctctcctaagacacctgcaataaagtgtagcaccctggta

SEQ ID NO: 124181 - protein, 552 aa, Artificial Sequence
  derived and/or modified sequence
MRLLPLAPGRLRRGSPRHLPSCSPALLLLVLGGCLGVFGVAAGTRRPNVVLLLTDDQDEVLGGMTPLKKTKALIGEMGMTFSSAYVPSALCCPSRASILTGKYPHNHHVVNNTLEGNCSSKSWQKIQEPNTFPAILRSMCGYQTFFAGKYLNEYGAPDAGGLEHVPLGWSYWYALEKNSKYYNYTLSINGKARKHGENYSVDYLTDVLANVSLDFLDYKSNFEPFFMMIATPAPHSPWTAAPQYQKAFQNVFAPRNKNFNIHGTNKHWLIRQAKTPMTNSSIQFLDNAFRKRWQTLLSVDDLVEKLVKRLEFTGELNNTYIFYTSDNGYHTGQFSLPIDKRQLYEFDIKVPLLVRGPGIKPNQTSKMLVANIDLGPTILDIAGYDLNKTQMDGMSLLPILRGASNLTWRSDVLVEYQGEGRNVTDPTCPSLSPGVSQCFPDCVCEDAYNNTYACVRTMSALWNLQYCEFDDQEVFVEVYNLTADPDQITNIAKTIDPELLGKMNYRLMMLQSCSGPTCRTPGVFDPGYRFDPRLMFSNRGSVRTRRFSKHLL

SEQ ID NO: 124182 - protein, 469 aa, Artificial Sequence
  derived and/or modified sequence
MYVPSALCCPSRASILTGKYPHNHHVVNNTLEGNCSSKSWQKIQEPNTFPAILRSMCGYQTFFAGKYLNEYGAPDAGGLEHVPLGWSYWYALEKNSKYYNYTLSINGKARKHGENYSVDYLTDVLANVSLDFLDYKSNFEPFFMMIATPAPHSPWTAAPQYQKAFQNVFAPRNKNFNIHGTNKHWLIRQAKTPMTNSSIQFLDNAFRKRWQTLLSVDDLVEKLVKRLEFTGELNNTYIFYTSDNGYHTGQFSLPIDKRQLYEFDIKVPLLVRGPGIKPNQTSKMLVANIDLGPTILDIAGYDLNKTQMDGMSLLPILRGASNLTWRSDVLVEYQGEGRNVTDPTCPSLSPGVSQCFPDCVCEDAYNNTYACVRTMSALWNLQYCEFDDQEVFVEVYNLTADPDQITNIAKTIDPELLGKMNYRLMMLQSCSGPTCRTPGVFDPGYRFDPRLMFSNRGSVRTRRFSKHLL

SEQ ID NO: 124183 - protein, 532 aa, Artificial Sequence
  derived and/or modified sequence
MRLLPLAPGRLRRGSPRHLPSCSPALLLLVLGGCLGVFGVAAGTRRPNVVLLLTDDQDEVLGGMYVPSALCCPSRASILTGKYPHNHHVVNNTLEGNCSSKSWQKIQEPNTFPAILRSMCGYQTFFAGKYLNEYGAPDAGGLEHVPLGWSYWYALEKNSKYYNYTLSINGKARKHGENYSVDYLTDVLANVSLDFLDYKSNFEPFFMMIATPAPHSPWTAAPQYQKAFQNVFAPRNKNFNIHGTNKHWLIRQAKTPMTNSSIQFLDNAFRKRWQTLLSVDDLVEKLVKRLEFTGELNNTYIFYTSDNGYHTGQFSLPIDKRQLYEFDIKVPLLVRGPGIKPNQTSKMLVANIDLGPTILDIAGYDLNKTQMDGMSLLPILRGASNLTWRSDVLVEYQGEGRNVTDPTCPSLSPGVSQCFPDCVCEDAYNNTYACVRTMSALWNLQYCEFDDQEVFVEVYNLTADPDQITNIAKTIDPELLGKMNYRLMMLQSCSGPTCRTPGVFDPGYRFDPRLMFSNRGSVRTRRFSKHLL

SEQ ID NO: 124184 - DNA, 1659 bp, Artificial Sequence
  derived and/or modified sequence
atgcgccttcttcccctcgcgccaggtaggctgcgcagaggatcaccaaggcatctccctagttgctcgccagccttgttgcttctggttctgggagggtgtctaggcgtgtttggcgtagctgccggcacaagaaggcccaatgtcgtattattactaactgacgaccaagatgaggtcctgggtggcatgaccccccttaagaaaacaaaggctctgatcggagagatgggtatgactttttcttcagcttacgtgccgtccgctctgtgttgcccttcccgggcttcaattcttacaggaaagtatccacacaaccatcacgtggtaaataatactctggagggaaactgtagctccaaaagttggcagaagatccaggaacccaatacatttcccgccatcctgcgctccatgtgcggctaccaaacgttcttcgcagggaaatacctgaacgaatacggggcaccagatgccggtggtcttgaacatgttcccctgggatggtcgtattggtatgctctggagaagaactcaaagtactacaattatactctgagtataaacggtaaggcgcgaaaacacggggaaaactactccgtggattacctgaccgacgtgttagccaacgtatcgttggattttttggactacaagtcaaactttgaaccctttttcatgatgatcgcgactcctgccccccacagcccatggactgccgcgccacagtatcagaaggccttccagaacgtcttcgcccctaggaacaaaaacttcaatattcacggtaccaataaacactggcttattagacaggccaagaccccgatgaccaactcaagcatacagtttctggacaacgcattcaggaaacgttggcagacgctgctatccgtggacgatcttgtggagaaacttgtaaaaaggcttgagtttactggagagctgaataacacatatatcttctacacttctgataacggctaccatactggccagttttccctgccaatagataagaggcaactttacgaattcgatatcaaggtgcctctcctggtgcggggccccggaatcaagcccaaccagacctctaagatgctggtggccaacatcgatttaggaccaaccatcctcgatatcgctgggtacgatctcaataaaactcaaatggacgggatgtcactcctgccgatcctgagaggagcctcaaacctgacctggcggagtgacgttctggtcgaataccagggcgaaggccgcaatgtgacagatcctacgtgccctagcctgtcacccggtgtctctcaatgctttccagattgtgtctgcgaggatgcttacaacaacacctacgcttgcgtacggacgatgagtgctctgtggaatctacaatattgtgagtttgacgaccaggaggtctttgtcgaggtttacaatctgaccgctgaccctgaccagattacaaatatcgccaagacaattgacccagagctgctgggaaaaatgaactacaggctgatgatgttgcagtcgtgttccggccccacatgcagaacgcctggcgtgtttgatccgggatatcgttttgacccccggctgatgttcagtaatcgaggctcagtcaggacgagacggtttagcaaacacttattatag

SEQ ID NO: 124185 - DNA, 1410 bp, Artificial Sequence
  derived and/or modified sequence
atgtacgtcccatctgccttgtgttgtccctcacgggcttcaatcctaactgggaagtatccgcacaaccatcacgtcgtaaataacacactcgaaggcaactgcagctccaaatcttggcagaagatacaagaacccaatactttcccagccatcctacgctcgatgtgtggataccagactttttttgcggggaagtatctgaatgagtacggggctcctgacgctggagggctggagcacgtccccctgggttggtcctactggtacgccttggagaagaacagtaagtattataactacactctcagtatcaatggaaaagcaagaaagcatggcgaaaattattccgtggactacctgacagacgtcctggccaacgtctcactggatttcctcgattataaaagtaatttcgagcctttctttatgatgattgccacccccgcaccgcacagcccctggaccgcagcccctcagtaccaaaaggcattccagaacgtgtttgcacccagaaacaaaaacttcaacatccatggcacaaataaacactggctgatccggcaagctaagaccccaatgactaattcttccatccaatttttggacaatgcattccggaagcgctggcagacattgctgtctgtggatgacctggtcgaaaaactggtcaaacgactggagtttacaggagagttgaataacacatacatcttttacacaagtgataatggatatcacacaggtcagtttagtctgccaattgataaacggcagttgtacgagttcgatatcaaggtgccacttctggtccgtgggcccggtatcaaacctaaccagacgagcaagatgctagtcgccaacattgatctgggcccaacaatcctggacattgcgggctacgatcttaataaaacccaaatggacggaatgagtcttctgccaattctgcgcggggccagcaaccttacatggcgcagtgatgtcctggtcgagtaccagggagagggaagaaatgttacagatcctacttgtccgtcactctcacctggtgtgtctcaatgctttcccgactgcgtgtgcgaggatgcatacaataatacatacgcctgtgtgcgtacaatgtcggccctgtggaacctgcagtattgcgaatttgacgaccaagaggtcttcgtggaggtgtataacttaacagccgatcctgatcagatcactaacatcgccaagaccattgaccctgaactcctgggcaaaatgaactatagattgatgatgctgcagtcttgcagcggaccaacctgccgcactccaggggtttttgaccccggatatcggtttgatcctaggctgatgttcagcaacaggggctcagtccgcacgcggcgattctcaaagcatctgctgtag

SEQ ID NO: 124186 - DNA, 1599 bp, Artificial Sequence
  derived and/or modified sequence
atgcgactgttacccttggccccaggacgattgcgacggggtagcccccgccacctgccttcctgcagccccgccttattgctgctggtcctcggaggctgcctgggtgtctttggcgtggcggctggaaccagacgacctaacgtggtcctactgctgactgatgatcaggatgaggtgctcggcggaatgtacgtgccctctgccctgtgctgtccttccagagccagtatccttaccgggaagtatccccataaccatcatgtagtgaacaacacactggagggtaactgctcttcaaagtcttggcaaaagatccaggagcccaataccttcccagctattttacggagcatgtgtgggtatcaaacattcttcgcaggcaaatacctcaacgaatacggcgcccccgatgcaggtgggctcgagcacgtgcctctcggctggagctattggtacgcattggaaaaaaacagcaaatattacaactatactctctccatcaacggcaaagccagaaaacacggggagaactactcagtcgactacctaactgatgtcctggccaatgtgtccttggacttcctggactacaagagcaactttgagccattttttatgatgatagcgacacccgccccccatagcccttggaccgctgctccgcagtaccagaaagccttccagaacgtcttcgcaccacgcaataagaatttcaatattcacgggacaaacaaacactggctgattcggcaagcaaaaacccccatgaccaatagcagtattcaatttctggataatgcattcagaaagcgctggcaaacccttctctcagtggacgacctggtcgagaaattggttaagagactggagtttacaggcgaactgaacaatacctacattttctatacctccgacaacggataccacactggtcagttctcccttccaattgataaaagacaactgtacgaatttgatatcaaggtgcccttgctggttaggggtccaggcattaaacccaatcagacatccaaaatgctggtcgctaacattgaccttggcccgactattcttgacatcgccggatacgacttaaataagacacaaatggacggtatgtctctgctgcctattctccggggggcttccaatctgacatggagaagcgatgtgctggtggagtatcagggcgagggccgcaacgtgaccgacccaacgtgcccatccctgtctccaggtgtctcacagtgctttcctgactgcgtgtgtgaagatgcgtataacaacacctacgcctgtgtgcgtaccatgagcgcactgtggaatctgcagtactgcgagtttgatgatcaggaagtgttcgttgaggtctataacctaacagccgatccggaccagattacaaacattgcaaaaaccatcgacccagaattgctcggaaaaatgaactatcgcttaatgatgttacaatcctgttctggaccgacatgccggactcctggcgtgttcgacccagggtataggtttgaccctaggctcatgttcagcaaccgtggcagcgtgcggacccgtcgttttagcaagcatctgctgtag

SEQ ID NO: 124187 - DNA, 5122 bp, Artificial Sequence
  derived and/or modified sequence
cccctgtccctggctcacgtgatcgcgcctagggagaaaacgtctgactccagccaccggccttcaaggcacggctttttattccttcggctggtcggcctctcgcccttcagctacctgtgcgtccctccgtcccgtcccgtcccggggtcaccccggagcctgtccgctatgcggctcctgcctctagccccaggtcggctccggcggggcagcccccgccacctgccctcctgcagcccagcgctgctactgctggtgctgggcggctgcctgggggtcttcggggtggctgcgggaacccggaggcccaacgtggtgctgctcctcacggacgaccaggacgaagtgctcggcggcatgacaccgctaaagaaaaccaaagctctcatcggagagatggggatgactttttccagtgcttatgtgccaagtgctctctgctgccccagcagagccagtatcctgacaggaaagtacccacataatcatcacgttgtgaacaacactctggaggggaactgcagtagtaagtcctggcagaagatccaagaaccaaatactttcccagcaattctcagatcaatgtgtggttatcagaccttttttgcagggaaatatttaaatgagtacggagccccagatgcaggtggactagaacacgttcctctgggttggagttactggtatgccttggaaaagaattctaagtattataattacaccctgtctatcaatgggaaggcacggaagcatggtgaaaactatagtgtggactacctgacagatgttttggctaatgtctccttggactttctggactacaagtccaactttgagcccttcttcatgatgatcgccactccagcgcctcattcgccttggacagctgcacctcagtaccagaaggctttccagaatgtctttgcaccaagaaacaagaacttcaacatccatggaacgaacaagcactggttaattaggcaagccaagactccaatgactaattcttcaatacagtttttagataatgcatttaggaaaaggtggcaaactctcctctcagttgatgaccttgtggagaaactggtcaagaggctggagttcactggggagctcaacaacacttacatcttctatacctcagacaatggctatcacacaggacagttttccttgccaatagacaagagacagctgtatgagtttgatatcaaagttccactgttggttcgaggacctgggatcaaaccaaatcagacaagcaagatgctggttgccaacattgacttgggtcctactattttggacattgctggctacgacctaaataagacacagatggatgggatgtccttattgcccattttgagaggtgccagtaacttgacctggcgatcagatgtcctggtggaataccaaggagaaggccgtaacgtcactgacccaacatgcccttccctgagtcctggcgtatctcaatgcttcccagactgtgtatgtgaagatgcttataacaatacctatgcctgtgtgaggacaatgtcagcattgtggaatttgcagtattgcgagtttgatgaccaggaggtgtttgtagaagtctataatctgactgcagacccagaccagatcactaacattgctaaaaccatagacccagagcttttaggaaagatgaactatcggttaatgatgttacagtcctgttctgggccaacctgtcgcactccaggggtttttgaccccggatacaggtttgacccccgtctcatgttcagcaatcgcggcagtgtcaggactcgaagattttccaaacatcttctgtagcgacctcacacagcctctgcagatggatccctgcacgcctctttctgatgaagtgattgtagtaggtgtctgtagctagtcttcaagaccacacctggaagagtttctgggctggctttaagtcctgtttgaaaaagcaacccagtcagctgacttcctcgtgcaatgtgttaaactgtgaactctgcccatgtgtcaggagtggctgtctctggtctcttcctttagctgacaaggacactcctgaggtctttgttctcactgtattctttttatcctggggccacagttcttgattattcctcttgtggttaaagactgaatttgtaaacccattcagataaatggcagtactttaggacacacacaaacacacagacacaccttttgatatgtaagcttgacctaaagtcaaaggacctgtgtagcatttcagattgagcacttcactatcaaaaatactaacatcacatggcttgaagagtaaccatcagagctgaatcatccaagtaagaacaagtaccattgttgattgataagtagagatacattttttatgatgttcatcacagtgtggtaaggttgcaaattcaaaacatgtcacccaagctctgttcatgtttttgtgaattctaggctggtgctgcactgaaatagagcagtaagcttgtgataaaggccaattccaggtagctcttgaaggtgatagccatctactttccagtggctgccaaccacagggagtgccagttaacactggaaggattaaggcaaggtcccttctcttgagactcccctctgagatctgaaaaatgaagtggcttaggaacatcagcagtgaagaactgccaagagttggtgaaggttgtctcttccgagggccttctgaagacagggctcttgaacagacaagtggaagggctgtaccagggataaaggaaagaagtgcctgtccagcagggagcttgaatttaagttccatgtatgaagtcattggctctatctgcatttttctgtcattctcttcatttgttttaaggtggaaaattttcttacagttgatgcaaagtatcaactactttaccctaccttctccccttttagatgggttcttcctgagttttggagtcttgtatgattatcagtattcccctgtcaaaatcaaatctattcaggtttcttcactgttgagaacacctaaatgtttttatttttgagaagtggggacagagtctcactatgtcacccaggctggagtgcaatggcatgatctcagctcactgcaaccttcgcctcctgggttcaagcgattctcctgcctccgcctcctgagtagctgggattataggcacgcaccaccacgcccagctaattttttgtatttttagtagagacagagtttcaccatgttggccaggctggtcttgaactcctgaccttgtgatccacccacctcggcctcccagagtgctgggattacaggcatgagccaccacgcttggctaagaacacctaaatttttatgtttcttggctcaaaaaccagttccatttctaatgttgtcctcacaagaaggctaattggtggtgagacagcaggggaggaggaagagctgtggtttgtaacttgttcaactcaggcaataagcgattttagctttatttaaagtcttctgtccagctttaagcactttgtaagacatggctgaaagtagcttttctatcagaattgcagatagtcatgttgggctaacagtcaattggatatattcctttacctcacatgaccccagcaactgtggtggtatctagaggtgaaacaggcaagtgaaatggacacctctgctgtgaatgttttagagaaggaaattcaaaaaatgttgtaactgaaagcactgttgaatatgggtatcggctttctttttcactttgactcttaacattatcagtcaacttccacattaatgaaagttgaccatagttatttccaaataaaaagaaaccaactcttaccaggtcttggactgtgatgtcatattattcagttttatgcttgttcctgagcagaactcataagagtgacatagtcagctgctgacggcacctcagccacgccactcttactcagttcagtgggtgtgcttgcgtggtaggatgtggtgcagccctctctacgctcttctatttttggtatatttcctatctaaccttcaaatagcttccaattctttttttcttggactggcttcattctgaatttgtgctaaaataatctttcataaagagacctcagtttatagcgtaacagactacacaatgcactgatgttttcataatgtttaagggacccactgcaagaagcttgctgcctccttttaattgtattcatttagattttgattttccatgttaagaaggtgaggtccatgttggtgcccttcagagtagagaaccatgtaaacattaggaatgaacagaggccttaggaatgaatagagagtttgccttatacaatttcctgttacaaagctctccctctcatgcaaagtagggaacaccttttgagcatctttgaatttgacaaatggtgctgttgcaaacactttttttttgagatgaagtctcgcggttgtcacccgggctggagtgcagtggcgtgatctcggctcactgcaacttccacctcctgggttccagcagttctcctgcctcagcctcccaagtagctgagattacaggcgcctgccaccccacctggctgatttttgtaattttagtagagacggggtttcaccatgttggccaggctgattaactcctgacctcaggtgatccacctttctcggcctcccaaagtgctgggattacgggtgtgagccaccgtgcccggcctgcaaacacattttaattgacaacactagggctgttgtacaaaatagtaatgatagccatggaagttttaccttattctgtgagaagtgttcttaaacttattaagtgtctaaactaaggtttagtgcttttttaaaggaaagttgtcccaggattcatcctaaagaaagcaaaagttaattcaactgatccaccaatggaattagatgggtagagttgggttcttgagttttaccaccacttagttcccactgaattttgtaacttcctgtgtttgcatcctctgttcctattctgcccttgctctgtgtcatctcagtcatttgacttagaaagtgcccttcaaaaggaccctgttcactgctgcacttttcaatgaattaaaatttatttctgttcta

SEQ ID NO: 124188 - DNA, 1824 bp, Artificial Sequence
  derived and/or modified sequence
gtctgactccagccaccggccttcaaggcacggctttttattccttcggctggtcggcctctcgcccttcagctacctgtgcctgccctcctgcagcccagcgctgctactgctggtgctgggcggctgcctgggggtcttcggggtggctgcgggaacccggaggcccaacgtggtgctgctcctcacggacgaccaggacgaagtgctcggcggcatgtatgtgccaagtgctctctgctgccccagcagagccagtatcctgacaggaaagtacccacataatcatcacgttgtgaacaacactctggaggggaactgcagtagtaagtcctggcagaagatccaagaaccaaatactttcccagcaattctcagatcaatgtgtggttatcagaccttttttgcagggaaatatttaaatgagtacggagccccagatgcaggtggactagaacacgttcctctgggttggagttactggtatgccttggaaaagaattctaagtattataattacaccctgtctatcaatgggaaggcacggaagcatggtgaaaactatagtgtggactacctgacagatgttttggctaatgtctccttggactttctggactacaagtccaactttgagcccttcttcatgatgatcgccactccagcgcctcattcgccttggacagctgcacctcagtaccagaaggctttccagaatgtctttgcaccaagaaacaagaacttcaacatccatggaacgaacaagcactggttaattaggcaagccaagactccaatgactaattcttcaatacagtttttagataatgcatttaggaaaaggtggcaaactctcctctcagttgatgaccttgtggagaaactggtcaagaggctggagttcactggggagctcaacaacacttacatcttctatacctcagacaatggctatcacacaggacagttttccttgccaatagacaagagacagctgtatgagtttgatatcaaagttccactgttggttcgaggacctgggatcaaaccaaatcagacaagcaagatgctggttgccaacattgacttgggtcctactattttggacattgctggctacgacctaaataagacacagatggatgggatgtccttattgcccattttgagaggtgccagtaacttgacctggcgatcagatgtcctggtggaataccaaggagaaggccgtaacgtcactgacccaacatgcccttccctgagtcctggcgtatctcaatgcttcccagactgtgtatgtgaagatgcttataacaatacctatgcctgtgtgaggacaatgtcagcattgtggaatttgcagtattgcgagtttgatgaccaggaggtgtttgtagaagtctataatctgactgcagacccagaccagatcactaacattgctaaaaccatagacccagagcttttaggaaagatgaactatcggttaatgatgttacagtcctgttctgggccaacctgtcgcactccaggggtttttgaccccggatacaggtttgacccccgtctcatgttcagcaatcgcggcagtgtcaggactcgaagattttccaaacatcttctgtagcgacctcacacagcctctgcagatggatccctgcacgcctctttctgatgaagtgattgtagtaggtgtctgtagctagtcttcaagaccacacctggaagagtttctgggctggctttaagtcctgtttgaaaaagcaacccagtcagctgacttcctcgtgcaatgtgttaaactgtgaactctgcccatgtgtc

SEQ ID NO: 124189 - DNA, 2020 bp, Artificial Sequence
  derived and/or modified sequence
acgtgatcgcgcctagggagaaaacgtctgactccagccaccggccttcaaggcacggctttttattccttcggctggtcggcctctcgcccttcagctacctgtgcgtccctccgtcccgtcccgtcccggggtcaccccggagcctgtccgctatgcggctcctgcctctagccccaggtcggctccggcggggcagcccccgccacctgccctcctgcagcccagcgctgctactgctggtgctgggcggctgcctgggggtcttcggggtggctgcgggaacccggaggcccaacgtggtgctgctcctcacggacgaccaggacgaagtgctcggcggcatgtatgtgccaagtgctctctgctgccccagcagagccagtatcctgacaggaaagtacccacataatcatcacgttgtgaacaacactctggaggggaactgcagtagtaagtcctggcagaagatccaagaaccaaatactttcccagcaattctcagatcaatgtgtggttatcagaccttttttgcagggaaatatttaaatgagtacggagccccagatgcaggtggactagaacacgttcctctgggttggagttactggtatgccttggaaaagaattctaagtattataattacaccctgtctatcaatgggaaggcacggaagcatggtgaaaactatagtgtggactacctgacagatgttttggctaatgtctccttggactttctggactacaagtccaactttgagcccttcttcatgatgatcgccactccagcgcctcattcgccttggacagctgcacctcagtaccagaaggctttccagaatgtctttgcaccaagaaacaagaacttcaacatccatggaacgaacaagcactggttaattaggcaagccaagactccaatgactaattcttcaatacagtttttagataatgcatttaggaaaaggtggcaaactctcctctcagttgatgaccttgtggagaaactggtcaagaggctggagttcactggggagctcaacaacacttacatcttctatacctcagacaatggctatcacacaggacagttttccttgccaatagacaagagacagctgtatgagtttgatatcaaagttccactgttggttcgaggacctgggatcaaaccaaatcagacaagcaagatgctggttgccaacattgacttgggtcctactattttggacattgctggctacgacctaaataagacacagatggatgggatgtccttattgcccattttgagaggtgccagtaacttgacctggcgatcagatgtcctggtggaataccaaggagaaggccgtaacgtcactgacccaacatgcccttccctgagtcctggcgtatctcaatgcttcccagactgtgtatgtgaagatgcttataacaatacctatgcctgtgtgaggacaatgtcagcattgtggaatttgcagtattgcgagtttgatgaccaggaggtgtttgtagaagtctataatctgactgcagacccagaccagatcactaacattgctaaaaccatagacccagagcttttaggaaagatgaactatcggttaatgatgttacagtcctgttctgggccaacctgtcgcactccaggggtttttgaccccggatacaggtttgacccccgtctcatgttcagcaatcgcggcagtgtcaggactcgaagattttccaaacatcttctgtagcgacctcacacagcctctgcagatggatccctgcacgcctctttctgatgaagtgattgtagtaggtgtctgtagctagtcttcaagaccacacctggaagagtttctgggctggctttaagtcctgtttgaaaaagcaacccagtcagctgacttcctcgtgcaatgtgttaaactgtgaactctgcccatgtgtcaggagtggctgtctctggtctcttcctttagctgacaaggacactcctgaggtctttgttctcactgta

SEQ ID NO: 124190 - DNA, 1659 bp, Artificial Sequence
  derived and/or modified sequence
atgaggctgctgcccctggcccctggccgcctgcggcggggcagccccaggcacctgcccagctgcagccctgccctgctgctgctggtgctgggcggctgcctgggcgtgtttggagtggccgccggcacccggcggcccaacgtggtgctgctgctgacagatgaccaggatgaggtgctgggcggcatgacccccctgaagaagaccaaggccctgattggagagatgggcatgaccttcagcagcgcctacgtgcccagcgccctgtgctgccccagccgggccagcatcctgaccgggaagtacccccacaaccaccacgtggtgaacaacaccctggagggcaactgcagcagcaagtcctggcagaagatccaggagcccaacaccttccctgccatcctgcgctccatgtgtggctaccagaccttctttgctgggaagtacctgaatgaatatggagccccagatgctgggggcctggagcacgtgcccctgggctggagctactggtacgccctggagaagaacagcaagtactacaactacaccctgagcatcaatggcaaggccaggaagcatggagagaactacagcgtggactacctgacagatgtgctggccaacgtgtccctggacttcctggactacaagagcaactttgagcccttcttcatgatgattgccaccccagccccccacagcccctggacagctgccccccagtaccagaaggccttccagaatgtgtttgcccccaggaacaagaacttcaacatccacggcaccaacaagcactggctgatccggcaggccaagacccccatgaccaacagcagcatccagttcctggacaatgccttcaggaagcgctggcagaccctgctgtctgtggatgacctggtggagaagctggtgaagaggctggagttcaccggggagctgaacaacacctacatcttctacaccagtgacaatggctaccacacaggccagttcagcctgcccatcgacaagaggcagctgtatgaatttgacatcaaggtgcccctgctggtgcggggccctggcatcaagcccaaccagaccagcaagatgctggtggccaacatcgacctgggccccaccatcctggacattgctggctatgacctgaacaagacccagatggatggcatgagcctgctgcccatcctgcggggggccagcaacctgacctggaggagtgatgtgctggtggagtaccagggcgagggcagaaatgtgacagaccccacctgccccagcctgagccctggggtgtcccagtgcttcccagactgtgtgtgtgaagatgcctacaacaacacctacgcctgtgtgaggaccatgtctgccctgtggaacctgcagtactgtgaatttgatgaccaggaggtgtttgtggaggtgtacaacctgacagctgaccctgaccagatcaccaacatcgccaagaccattgatcctgagctgctgggcaagatgaactaccgcctgatgatgctgcagagctgcagcggccccacctgcaggaccccaggagtgtttgaccccggctacagatttgacccccggctgatgttcagcaacagaggctctgtgaggacccggcgcttcagcaagcacctgctgtag

SEQ ID NO: 124191 - DNA, 1410 bp, Artificial Sequence
  derived and/or modified sequence
atgtatgtgcccagcgccctgtgctgccccagccgggccagcatcctgaccgggaagtacccccacaaccaccacgtggtgaacaacaccctggagggcaactgcagcagcaagtcctggcagaagatccaggagcccaacaccttccctgccatcctgcgctccatgtgtggctaccagaccttctttgctgggaagtacctgaatgaatatggagccccagatgctgggggcctggagcacgtgcccctgggctggagctactggtacgccctggagaagaacagcaagtactacaactacaccctgagcatcaacgggaaggccaggaagcacggggagaactacagcgtggactacctgacagatgtgctggccaacgtgtccctggacttcctggactacaagagcaactttgagcccttcttcatgatgattgccaccccagccccccacagcccctggacagctgccccccagtaccagaaggccttccagaatgtgtttgcccccaggaacaagaacttcaacatccacggcaccaacaagcactggctgatccggcaggccaagacccccatgaccaacagcagcatccagttcctggacaatgccttcaggaagcgctggcagaccctgctgtctgtggatgacctggtggagaagctggtgaagaggctggagttcaccggggagctgaacaacacctacatcttctacaccagtgacaatggctaccacacaggccagttcagcctgcccatcgacaagaggcagctgtatgaatttgacatcaaggtgcccctgctggtgcggggccctggcatcaagcccaaccagaccagcaagatgctggtggccaacatcgacctgggccccaccatcctggacattgctggctatgacctgaacaagacccagatggatggcatgagcctgctgcccatcctgcggggggccagcaacctgacctggaggagtgatgtgctggtggagtaccagggcgagggcagaaatgtgacagaccccacctgccccagcctgagccctggggtgtcccagtgcttcccagactgtgtgtgtgaagatgcctacaacaacacctacgcctgtgtgaggaccatgtctgccctgtggaacctgcagtactgtgaatttgatgaccaggaggtgtttgtggaggtgtacaacctgacagctgaccctgaccagatcaccaacatcgccaagaccatcgaccctgagctgctgggcaagatgaactaccgcctgatgatgctgcagagctgcagcggccccacctgcaggaccccaggagtgtttgatcctggctacagatttgacccccggctgatgttcagcaacagaggctctgtgaggacccggcgcttcagcaagcacctgctgtag

SEQ ID NO: 124192 - DNA, 1599 bp, Artificial Sequence
  derived and/or modified sequence
atgaggctgctgcccctggcccctggccgcctgcggcggggcagccccaggcacctgcccagctgcagccctgccctgctgctgctggtgctgggcggctgcctgggcgtgtttggagtggccgccggcacccggcggcccaacgtggtgctgctgctgacagatgaccaggatgaggtgctgggcggcatgtatgtgcccagcgccctgtgctgccccagccgggccagcatcctgaccgggaagtacccccacaaccaccacgtggtgaacaacaccctggagggcaactgcagcagcaagtcctggcagaagatccaggagcccaacaccttccctgccatcctgcgctccatgtgtggctaccagaccttctttgctgggaagtacctgaatgaatatggagccccagatgctgggggcctggagcacgtgcccctgggctggagctactggtacgccctggagaagaacagcaagtactacaactacaccctgagcatcaatggcaaggccaggaagcatggagagaactacagcgtggactacctgacagatgtgctggccaacgtgtccctggacttcctggactacaagagcaactttgagcccttcttcatgatgattgccaccccagccccccacagcccctggacagctgccccccagtaccagaaggccttccagaatgtgtttgcccccaggaacaagaacttcaacatccacggcaccaacaagcactggctgatccggcaggccaagacccccatgaccaacagcagcatccagttcctggacaatgccttcaggaagcgctggcagaccctgctgtctgtggatgacctggtggagaagctggtgaagaggctggagttcaccggggagctgaacaacacctacatcttctacaccagtgacaatggctaccacacaggccagttcagcctgcccatcgacaagaggcagctgtatgaatttgacatcaaggtgcccctgctggtgcggggccctggcatcaagcccaaccagaccagcaagatgctggtggccaacatcgacctgggccccaccatcctggacattgctggctatgacctgaacaagacccagatggatggcatgagcctgctgcccatcctgcggggggccagcaacctgacctggaggagtgatgtgctggtggagtaccagggcgagggcagaaatgtgacagaccccacctgccccagcctgagccctggggtgtcccagtgcttcccagactgtgtgtgtgaagatgcctacaacaacacctacgcctgtgtgaggaccatgtctgccctgtggaacctgcagtactgtgaatttgatgaccaggaggtgtttgtggaggtgtacaacctgacagctgaccctgaccagatcaccaacatcgccaagaccattgatcctgagctgctgggcaagatgaactaccgcctgatgatgctgcagagctgcagcggccccacctgcaggaccccaggagtgtttgaccccggctacagatttgacccccggctgatgttcagcaacagaggctctgtgaggacccggcgcttcagcaagcacctgctgtag

SEQ ID NO: 124193 - DNA, 1659 bp, Artificial Sequence
  derived and/or modified sequence
atgcggctgctgcccctggcccccggccggctgcggcggggcagcccccgccacttaccctcatgttcccctgcccttttgctgctggtcctcggaggttgcttaggtgtctttggcgtggcagccggtaccaggagaccgaatgtggtcctcctattgaccgacgatcaggacgaggtgctcggcggcatgacccctcttaaaaaaaccaaagcattgataggagaaatgggaatgaccttttcctcagcatatgtgccaagcgccctgtgttgcccatccagggcatcaatacttaccggcaagtatcctcataatcaccatgtggtgaataataccttggaggggaattgcagttctaagagctggcagaaaatccaggagccaaacactttccccgctattctgaggtccatgtgcgggtatcagacctttttcgcaggcaaataccttaatgaatatggtgccccggacgcaggtggactggagcatgtaccactgggctggagctattggtatgctctggaaaagaactctaagtattacaactacaccctgagtattaatggaaaggcgagaaagcatggcgagaattactctgttgactacctcacagacgtcttggcgaacgtgagtcttgattttcttgactacaagagcaacttcgagccgttttttatgatgattgctaccccagcccctcactctccttggacagcggcacctcagtaccaaaaggcctttcagaatgtattcgctcctagaaacaaaaactttaacattcatggtaccaacaagcattggcttatcagacaggccaagacgccaatgaccaatagttctatccaatttctggacaacgcatttcgtaaacggtggcaaactttgctgtcagtcgacgatttggttgagaaacttgtcaaaaggttggaatttaccggtgagttaaacaatacctatatcttttatacatcagataatggctatcacaccggacaattctccctcccaatcgataagaggcagctctatgaattcgacatcaaggtgccgcttctggtgcgcggtccagggatcaaaccaaatcaaacaagtaaaatgctggtggccaatatagatctaggtcccacaattttggatattgcaggttacgacctgaataaaacccagatggatggaatgtcccttcttcccatacttaggggcgcttccaaccttacctggcgttccgatgtcctggtggagtatcagggtgaggggaggaacgttaccgatccaacctgccccagtttgtcaccaggggtatcacagtgttttcccgactgcgtgtgcgaggatgcttacaacaatacttacgcctgcgtgcgcaccatgtccgctctgtggaacctccagtactgtgagtttgatgatcaggaggtgttcgttgaggtctataacctgacagcagatcccgaccaaatcacaaatattgccaagaccatcgatcctgagctgctgggcaaaatgaattaccggctgatgatgctgcagagctgcagtggacccacctgccgaactcccggcgtgttcgaccccggatacaggtttgaccctcgcctaatgttctctaaccgcggatccgtgaggacgcgccgcttctcaaagcacctactctag

SEQ ID NO: 124194 - DNA, 1410 bp, Artificial Sequence
  derived and/or modified sequence
atgtacgtgcccagcgccctgtgctgccccagccgggccagcatcctgaccggaaagtaccctcacaaccatcacgtagtcaataatactctggagggcaactgctcctcaaaatcttggcagaagatccaggagccaaataccttccctgcaatcctaagatcaatgtgcgggtatcagacattcttcgctggaaaatatttaaatgagtacggggcccccgacgccggcggcctggaacatgtgccactcggctggtcctattggtatgccttggaaaagaacagcaagtactacaactacaccctctccattaacggaaaggcccgcaagcacggtgagaattacagtgttgattacctaactgatgtgttagcaaacgtgagtcttgattttcttgattacaaatccaattttgagccttttttcatgatgatagccactccggctcctcactccccctggaccgctgctccccagtatcagaaggcctttcagaacgtttttgctccaaggaacaagaattttaatattcatggtacaaacaaacactggttgatccgacaggccaagacacctatgaccaactcctccattcagttcctcgacaacgcgttccgtaagcggtggcagacactcctgagcgtggatgatcttgtggaaaaactcgtgaagcggctcgagtttactggagaactgaacaacacttatattttttacacatccgacaacggttaccacactggccagttttctctccctatcgataaaaggcagctgtatgagtttgatattaaggtgcccctgctggtccgagggccagggatcaaaccgaaccagacctcaaagatgctggttgccaatatcgacctgggaccgactatccttgatatagccggctacgacctgaacaaaacccagatggacggtatgtcactcctgcccatactccgcggcgctagcaacctaacctggagaagtgacgttctcgtggaatatcaaggcgagggaaggaatgtgaccgaccccacatgcccttctttaagccccggtgtctcccagtgtttcccagattgtgtgtgcgaggatgcctataacaatacctacgcctgcgttagaacaatgtcagctttgtggaacctgcaatattgtgagtttgacgatcaagaagttttcgtggaagtatacaacttaactgccgaccctgatcagatcaccaatattgccaaaaccattgatccagaactgctcggaaagatgaattatcgtctaatgatgctacagtcttgttcaggaccaacctgtcgtactcccggcgtcttcgatcccggctatcggttcgacccacgcctgatgtttagtaacagaggttctgtgcgtacgcgccggttttcgaaacacctgctttag

SEQ ID NO: 124195 - DNA, 1599 bp, Artificial Sequence
  derived and/or modified sequence
atgcggctgctgcccctggcccccggccggctgcggcggggcagccctcgtcacctgccatcctgctcccccgccctcttgctgctcgttctcggtggatgtttgggagtgttcggtgtcgctgctggaacccggagaccgaatgtcgtgctacttctgaccgacgaccaggacgaagttctgggcgggatgtacgtcccttcagcgctgtgctgtccctctcgtgccagcattttaacaggcaagtatccacacaaccaccatgtggtaaataacacattagaagggaattgctcctccaagagttggcagaaaatacaggaaccgaatacctttcctgccattttgagaagcatgtgcggctaccagaccttctttgcaggcaagtacctaaacgaatatggggcacctgacgccggaggacttgaacatgtcccactaggatggtcctattggtacgccctggagaaaaacagcaaatactataattatacactgtctatcaacggcaaggctcgcaagcacggcgagaactacagcgtggactacttaacggatgtcttagctaatgtgtcccttgattttctggactacaagtcaaattttgagcctttttttatgatgatcgccacaccagccccacactcaccgtggacggctgctccccagtaccagaaggctttccagaacgtgtttgcacccagaaataaaaattttaacatccacggtacaaacaagcattggctcatccgtcaggccaaaaccccaatgaccaattcctctatccagttcctggataacgcgtttagaaagagatggcagacgcttctgagcgtggacgacctggtcgaaaagcttgtgaaacgattggagtttactggcgaactcaataacacatatattttctatacatccgataatggctaccatacagggcagtttagtctgcccattgataagagacagctgtacgagtttgatatcaaagtccctctcctcgtcagagggcctggcattaagcccaatcagacatctaaaatgttggtcgctaatattgatctaggacccaccatcctcgacatcgccggatatgatctcaacaaaacccagatggatggtatgtccctcctgccaatactgaggggcgcctcaaacctaacgtggcggagcgacgtgctagtggaataccaaggagaagggaggaatgtcactgaccccacatgcccaagtctgtctcctggagtctcacagtgttttcccgattgtgtgtgcgaagatgcttacaacaatacttacgcgtgcgtgcgaactatgtcagccttgtggaacctccaatactgtgagtttgacgaccaagaggtctttgtggaggtctacaatctgaccgccgatcctgatcaaatcaccaacatcgcgaagactatcgaccctgagttgctcgggaagatgaactatagactcatgatgctccagagctgttcaggccccacatgtcgtacccctggtgtgtttgaccccgggtataggtttgacccccgcctgatgttcagcaatagggggagtgtaaggactagacgattttcgaaacatctgctatag

SEQ ID NO: 124196 - DNA, 1659 bp, Artificial Sequence
  derived and/or modified sequence
atgaggctgctgccgcttgcaccgggacgcctcaggcggggttctcctcgacatctcccatcttgctctccagcactccttctgttggttctcggtgggtgcctgggcgtgtttggagtcgcggcaggaactcggaggccaaacgtagtgctcctgctgacagacgatcaggacgaggttctgggcggaatgactccactcaagaagacaaaggccttaataggagaaatgggcatgactttttcctccgcctatgttccaagtgctctttgctgcccatctcgggcttcaatattgacaggtaagtatcctcacaatcatcatgtggttaacaacacattagaaggaaactgttcatccaagtcctggcaaaaaattcaggagccgaatacatttcctgcaatcttgcgctctatgtgtggctaccagacatttttcgcgggaaagtacctcaacgaatatggggcacctgacgctggaggattggagcatgtgccccttgggtggtcgtactggtatgctttagagaagaattctaaatactacaactacacactgtcaatcaatggcaaagccaggaaacatggggagaactactctgtggactacttgaccgatgtgctggccaacgtatctttagatttcctcgattacaagagtaattttgaaccattttttatgatgatcgcaacgcccgcacctcatagcccatggaccgctgctccccagtatcagaaagcttttcagaacgtgttcgctcctcgtaataagaattttaacattcatggaacaaataagcattggttgataagacaggctaagaccccaatgactaattcctcgatccaattcctggacaatgcttttcggaagaggtggcagacactgttgtcagtggatgacttagtagagaaactcgttaaaagactcgagtttaccggagagcttaacaacacctatatcttctatacctcggataacgggtatcacactggccagttttccctcccaatcgacaaacgacagctatatgaattcgatatcaaggtcccactcctggtgcgtgggccaggtattaagcccaatcagacatccaaaatgctagtagcaaatatcgatctgggcccaaccatcctcgatatagctgggtacgacctcaacaaaacacaaatggacggaatgtcccttctgccaattctgcgtggtgcatctaatctgacttggcgatctgatgttctggtcgagtaccagggcgaaggacggaacgtgacagacccaacctgcccaagcctctcacccggagtctctcagtgcttccctgattgcgtgtgtgaagacgcctacaataacacttacgcgtgcgtaagaactatgtccgctctgtggaacctgcagtactgcgagttcgatgatcaggaggtgttcgtggaggtttacaaccttactgccgatccggatcaaatcacaaacatcgccaagacaatcgaccccgagctcctcggcaagatgaactatcgtctgatgatgcttcagtcttgcagcggccctacttgtagaacccctggggttttcgacccaggctaccgcttcgacccaagattgatgttcagcaacaggggcagcgttcgcactcgacgcttttccaagcacctgctatag

SEQ ID NO: 124197 - DNA, 1410 bp, Artificial Sequence
  derived and/or modified sequence
atgtacgtgccttcagccctctgctgtcccagtcgcgcaagcatcctcaccgggaagtatcctcacaaccaccacgttgtgaataatactcttgagggcaactgctcctctaaatcatggcagaaaattcaggagcctaatacatttcccgctattcttaggtcaatgtgtgggtaccagacgttttttgccggtaagtacctgaatgagtacggagcacccgatgcagggggactggagcacgtgccactggggtggagctactggtatgctctcgagaaaaatagtaaatattacaattatacattgtccatcaatggcaaggcacgcaagcacggcgaaaactatagcgtggactatttaacagatgtactggctaatgtgtccctggactttctggactacaagagcaattttgagcccttttttatgatgattgccacccccgcacctcacagcccctggacggccgcacctcaatatcagaaggcgttccaaaacgtgtttgctcctcgcaataaaaattttaatatccatggcactaataaacactggctgatccgtcaggccaagacaccaatgacgaatagttccattcagttcctggacaatgcctttagaaaacgctggcagacactcctgagcgtagatgacctggtcgagaaattggtgaaaaggctagaattcacaggggaattgaacaatacctacattttttacacttctgacaacggttaccatactggacagtttagtctgcccattgataaacggcagctgtatgagtttgacatcaaagtccccttgctagtcaggggcccaggtatcaaacccaaccaaacttccaaaatgctggtggcaaatatcgatctggggcctacaatactggatatagcgggttatgacctaaacaagacccaaatggatggtatgtctttgctcccaatccttcgcggagccagtaacctgacgtggaggtctgatgtcctggtggagtaccaaggcgaaggccgtaatgtcacagaccccacctgccccagcttatctccaggggtttctcaatgttttcctgactgtgtgtgcgaggatgcttataataacacatacgcctgcgtgaggacaatgagcgccctctggaacctgcaatactgcgaattcgatgaccaggaagttttcgttgaggtgtacaacctcactgccgatcctgaccaaatcacaaacatcgccaagaccatcgaccccgaacttctgggaaagatgaactaccggctgatgatgttgcagtcctgctctgggcctacctgccggacaccgggagtgtttgatcccggataccggttcgaccccagactaatgttctcgaatagaggcagcgttcgaacccgtcggttttcgaagcacttactatag

SEQ ID NO: 124198 - DNA, 1599 bp, Artificial Sequence
  derived and/or modified sequence
atgcggttactcccgctagcccctggcagactccgtcgcggatcacctcgccacttaccgtcatgtagcccagcattattactgttggtgctgggtgggtgcttaggggtatttggcgttgccgcaggcactaggaggcccaacgtcgtgctgctgctcaccgacgatcaggacgaagtcctgggtgggatgtacgtaccatcagcattatgttgccctagccgagcgagcattcttaccggcaaatacccccataatcaccatgtggtgaataatactcttgagggcaattgttcttcgaagagttggcagaagatacaggaacccaatacgtttccagccattttgcgatcaatgtgtgggtatcagacttttttcgcagggaagtatctcaacgagtatggtgctcctgacgcaggtgggctagaacatgtgccccttggctggtcttactggtacgccctggagaagaattctaaatactacaattacacgctcagcatcaatggcaaagcaagaaagcatggcgaaaattatagcgtcgattacctcactgatgttctggccaacgtctctctggatttcctggactacaagagcaacttcgagcccttcttcatgatgatcgcaacccccgctccccacagcccatggactgcggcacctcagtaccagaaagcgtttcaaaacgtgttcgcgcctagaaataagaacttcaatatccatggtaccaacaagcactggctcattagacaagctaagacacccatgaccaattcatccatacagtttttggacaatgcttttcggaagcggtggcagaccttgctatccgttgatgacctggttgaaaaattggtgaagcgactggaattcaccggcgaacttaataacacatatatattctatacttccgataacggatatcacactggccaattcagcttgccaattgataagcggcagctctacgaatttgacatcaaggtccccctcctggtacggggaccaggaatcaagccaaaccagacttccaagatgctagtggcaaatatcgacttggggcctaccatcctcgatattgctggatacgatctgaataaaactcaaatggacgggatgtccttgctcccgatccttcgtggagcctcaaatctaacttggcgttccgacgtgctggtcgaataccagggcgagggacggaatgtgacagatcctacctgtccgtccctttcaccaggcgtctcacaatgtttcccagactgtgtgtgcgaggatgcatacaacaacacctatgcttgcgtcaggacaatgtcggccctgtggaacctgcagtactgtgagttcgatgatcaagaggttttcgtggaagtgtacaacctcacagcagaccccgatcagattaccaacatcgctaaaacgatcgacccagagttgctggggaagatgaattataggctgatgatgttgcagagctgtagcggcccaacttgccgcacccctggggtcttcgatccaggataccgctttgacccccgactgatgttcagtaatcgcggatccgtcaggaccagacgcttttctaagcatttgctgtag

SEQ ID NO: 124199 - DNA, 1659 bp, Artificial Sequence
  derived and/or modified sequence
atgagactgctgcccctggcccccggcagactgagaagaggcagccccagacacctgcccagctgcagccccgccctgctgctgctggtgctgggcggctgcctgggcgtgttcggcgtggccgccggcaccagaagacccaacgtggtgctgctgctgaccgacgaccaggacgaggtgctgggcggcatgacccccctgaagaagaccaaggccctgatcggcgagatgggcatgaccttcagcagcgcctacgtgcccagcgccctgtgctgccccagcagagccagcatcctgaccggcaagtacccccacaaccaccacgtggtgaacaacaccctggagggcaactgcagcagcaagagctggcagaagatccaggagcccaacaccttccccgccatcctgagaagcatgtgcggctaccagaccttcttcgccggcaagtacctgaacgagtacggcgcccccgacgccggcggcctggagcacgtgcccctgggctggagctactggtacgccctggagaagaacagcaagtactacaactacaccctgagcatcaacggcaaggccagaaagcacggcgagaactacagcgtggactacctgaccgacgtgctggccaacgtgagcctggacttcctggactacaagagcaacttcgagcccttcttcatgatgatcgccacccccgccccccacagcccctggaccgccgccccccagtaccagaaggccttccagaacgtgttcgcccccagaaacaagaacttcaacatccacggcaccaacaagcactggctgatcagacaggccaagacccccatgaccaacagcagcatccagttcctggacaacgccttcagaaagagatggcagaccctgctgagcgtggacgacctggtggagaagctggtgaagagactggagttcaccggcgagctgaacaacacctacatcttctacaccagcgacaacggctaccacaccggccagttcagcctgcccatcgacaagagacagctgtacgagttcgacatcaaggtgcccctgctggtgagaggccccggcatcaagcccaaccagaccagcaagatgctggtggccaacatcgacctgggccccaccatcctggacatcgccggctacgacctgaacaagacccagatggacggcatgagcctgctgcccatcctgagaggcgccagcaacctgacctggagaagcgacgtgctggtggagtaccagggcgagggcagaaacgtgaccgaccccacctgccccagcctgagccccggcgtgagccagtgcttccccgactgcgtgtgcgaggacgcctacaacaacacctacgcctgcgtgagaaccatgagcgccctgtggaacctgcagtactgcgagttcgacgaccaggaggtgttcgtggaggtgtacaacctgaccgccgaccccgaccagatcaccaacatcgccaagaccatcgaccccgagctgctgggcaagatgaactacagactgatgatgctgcagagctgcagcggccccacctgcagaacccccggcgtgttcgaccccggctacagattcgaccccagactgatgttcagcaacagaggcagcgtgagaaccagaagattcagcaagcacctgctgtag

SEQ ID NO: 124200 - DNA, 1410 bp, Artificial Sequence
  derived and/or modified sequence
atgtacgtgcccagcgccctgtgctgccccagcagagccagcatcctgaccggcaagtacccccacaaccaccacgtggtgaacaacaccctggagggcaactgcagcagcaagagctggcagaagatccaggagcccaacaccttccccgccatcctgagaagcatgtgcggctaccagaccttcttcgccggcaagtacctgaacgagtacggcgcccccgacgccggcggcctggagcacgtgcccctgggctggagctactggtacgccctggagaagaacagcaagtactacaactacaccctgagcatcaacggcaaggccagaaagcacggcgagaactacagcgtggactacctgaccgacgtgctggccaacgtgagcctggacttcctggactacaagagcaacttcgagcccttcttcatgatgatcgccacccccgccccccacagcccctggaccgccgccccccagtaccagaaggccttccagaacgtgttcgcccccagaaacaagaacttcaacatccacggcaccaacaagcactggctgatcagacaggccaagacccccatgaccaacagcagcatccagttcctggacaacgccttcagaaagagatggcagaccctgctgagcgtggacgacctggtggagaagctggtgaagagactggagttcaccggcgagctgaacaacacctacatcttctacaccagcgacaacggctaccacaccggccagttcagcctgcccatcgacaagagacagctgtacgagttcgacatcaaggtgcccctgctggtgagaggccccggcatcaagcccaaccagaccagcaagatgctggtggccaacatcgacctgggccccaccatcctggacatcgccggctacgacctgaacaagacccagatggacggcatgagcctgctgcccatcctgagaggcgccagcaacctgacctggagaagcgacgtgctggtggagtaccagggcgagggcagaaacgtgaccgaccccacctgccccagcctgagccccggcgtgagccagtgcttccccgactgcgtgtgcgaggacgcctacaacaacacctacgcctgcgtgagaaccatgagcgccctgtggaacctgcagtactgcgagttcgacgaccaggaggtgttcgtggaggtgtacaacctgaccgccgaccccgaccagatcaccaacatcgccaagaccatcgaccccgagctgctgggcaagatgaactacagactgatgatgctgcagagctgcagcggccccacctgcagaacccccggcgtgttcgaccccggctacagattcgaccccagactgatgttcagcaacagaggcagcgtgagaaccagaagattcagcaagcacctgctgtag

SEQ ID NO: 124201 - DNA, 1599 bp, Artificial Sequence
  derived and/or modified sequence
atgagactgctgcccctggcccccggcagactgagaagaggcagccccagacacctgcccagctgcagccccgccctgctgctgctggtgctgggcggctgcctgggcgtgttcggcgtggccgccggcaccagaagacccaacgtggtgctgctgctgaccgacgaccaggacgaggtgctgggcggcatgtacgtgcccagcgccctgtgctgccccagcagagccagcatcctgaccggcaagtacccccacaaccaccacgtggtgaacaacaccctggagggcaactgcagcagcaagagctggcagaagatccaggagcccaacaccttccccgccatcctgagaagcatgtgcggctaccagaccttcttcgccggcaagtacctgaacgagtacggcgcccccgacgccggcggcctggagcacgtgcccctgggctggagctactggtacgccctggagaagaacagcaagtactacaactacaccctgagcatcaacggcaaggccagaaagcacggcgagaactacagcgtggactacctgaccgacgtgctggccaacgtgagcctggacttcctggactacaagagcaacttcgagcccttcttcatgatgatcgccacccccgccccccacagcccctggaccgccgccccccagtaccagaaggccttccagaacgtgttcgcccccagaaacaagaacttcaacatccacggcaccaacaagcactggctgatcagacaggccaagacccccatgaccaacagcagcatccagttcctggacaacgccttcagaaagagatggcagaccctgctgagcgtggacgacctggtggagaagctggtgaagagactggagttcaccggcgagctgaacaacacctacatcttctacaccagcgacaacggctaccacaccggccagttcagcctgcccatcgacaagagacagctgtacgagttcgacatcaaggtgcccctgctggtgagaggccccggcatcaagcccaaccagaccagcaagatgctggtggccaacatcgacctgggccccaccatcctggacatcgccggctacgacctgaacaagacccagatggacggcatgagcctgctgcccatcctgagaggcgccagcaacctgacctggagaagcgacgtgctggtggagtaccagggcgagggcagaaacgtgaccgaccccacctgccccagcctgagccccggcgtgagccagtgcttccccgactgcgtgtgcgaggacgcctacaacaacacctacgcctgcgtgagaaccatgagcgccctgtggaacctgcagtactgcgagttcgacgaccaggaggtgttcgtggaggtgtacaacctgaccgccgaccccgaccagatcaccaacatcgccaagaccatcgaccccgagctgctgggcaagatgaactacagactgatgatgctgcagagctgcagcggccccacctgcagaacccccggcgtgttcgaccccggctacagattcgaccccagactgatgttcagcaacagaggcagcgtgagaaccagaagattcagcaagcacctgctgtag

SEQ ID NO: 124202 - protein, 112 aa, Artificial Sequence
  derived and/or modified sequence
MFAKLKKKIAEETAVAQRPGGATRIPRSVSKESVASMGADSGDDFASDGSSSREDLSSQLLRRNEQIRKLEARLSDYAEQVRNLQKIKEKLEIALEKHQDSSMRKFQEQNET

SEQ ID NO: 124203 - DNA, 252 bp, Artificial Sequence
  derived and/or modified sequence
tgacaggagctgctgaaggagaagaccctggccgagcagaacctggaggacaccagacagcagctgctggccgccagaagcagccaggccaaggccatcaacaccctggagaccagagtgagagagctggagcagaccctgcaggccagcgaggagcagctgcagcagagcaagggcatcgtggccgcccaggagacccagatccaggagctggtgagcgcctactggagctgctgcatccccggcccctag

SEQ ID NO: 124204 - DNA, 339 bp, Artificial Sequence
  derived and/or modified sequence
atgttcgccaagctgaagaagaagatcgccgaggagaccgccgtggcccagagacccggcggcgccaccagaatccccagaagcgtgagcaaggagagcgtggccagcatgggcgccgacagcggcgacgacttcgccagcgacggcagcagcagcagagaggacctgagcagccagctgctgagaagaaacgagcagatcagaaagctggaggccagactgagcgactacgccgagcaggtgagaaacctgcagaagatcaaggagaagctggagatcgccctggagaagcaccaggacagcagcatgagaaagttccaggagcagaacgagacctag

SEQ ID NO: 124205 - DNA, 252 bp, Artificial Sequence
  derived and/or modified sequence
tagcaggaactgctgaaggaaaagactcttgctgagcagaatttagaagataccagacagcaattgttagctgctagaagcagtcaagcaaaagcaatcaacacgttagaaacccgggtgagagagctggagcagacactgcaagccagcgaagaacaactccagcaaagcaaaggcattgttgcagctcaggagacccagatccaggagctcgtttcagcctactggagttgctgtataccaggtccctag

SEQ ID NO: 124206 - DNA, 339 bp, Artificial Sequence
  derived and/or modified sequence
atgtttgctaagcttaagaagaagattgctgaagaaacagctgtcgcccagagaccggggggagccacacgcatccctaggtccgtctcaaaggaaagtgtcgcatccatgggggccgacagcggtgacgattttgccagcgatgggtctagttcgcgcgaggacctgagtagccaactcctgaggcggaacgagcagattcgtaagctagaagcccgcctgagtgactacgcagagcaggtgagaaacctgcagaagattaaagaaaagcttgagattgctctggaaaagcaccaggattcatcaatgaggaagttccaggaacaaaatgagacctag

SEQ ID NO: 124207 - DNA, 522 bp, Artificial Sequence
  derived and/or modified sequence
gcaagaactcctgaaagagaaaacacttgctgagcagaatttggaggataccagacaacagctcttggcagccagaagcagccaggctaaggccattaacaccctggagactcgggtgagagaactggagcagaccttgcaggcctctgaggagcagctccaacagagcaagggcattgtggctgcccaggaaactcagatacaggagctcgtaagtgcttattggagctgctgcattccaggcccttaatgctttctctccaggcctttgcagatgctccaaactcattccgaacttcggcaacggtacctggacctgcccatagatacagttcttgtgctggatgtgagcaggccagcagcagggggtggagggagtcaggacctaatggtgggcctgagttacctgggaggtgcaccagcagctcctttccaccttacatcccaccttctggtccagcctggtcctggggctgtcagaggtggcagctccgctaggagtcaagcctcaacttgcaatca

SEQ ID NO: 124208 - DNA, 252 bp, Artificial Sequence
  derived and/or modified sequence
tgacaggagctgctgaaggagaagaccctggccgagcagaacctggaggacacccggcagcagctgctggccgcccggagcagccaggccaaggccatcaacaccctggagaccagggtgcgggagctggagcagaccctgcaggccagcgaggagcagctgcagcagagcaagggcatcgtggccgcccaggagacccagatccaggagctggtgtctgcctactggagctgctgcatccctggcccctag

SEQ ID NO: 124209 - DNA, 339 bp, Artificial Sequence
  derived and/or modified sequence
atgtttgccaagctgaagaagaagattgctgaggagacagctgtggcccagaggcctggaggagccacccgcatccccaggtctgtgtccaaggagagcgtggcctccatgggcgctgacagcggagatgactttgccagtgatggcagcagcagccgggaggacctgagcagccagctgctgcggagaaatgagcagatcaggaagctggaggcccggctgagtgactatgcagagcaggtgaggaacctgcagaagatcaaggagaagctggagatcgccctggagaagcaccaggacagctccatgaggaagttccaggagcagaatgagacctag

SEQ ID NO: 124210 - DNA, 252 bp, Artificial Sequence
  derived and/or modified sequence
tgacaggagctgctgaaggagaagaccctggccgagcagaacctggaagatacacgtcaacagctccttgcagcgaggtcgtcacaggctaaggctattaatacattggagacacgtgtgcgcgaacttgagcaaaccctgcaggccagcgaggagcagcttcaacagtctaaaggtatagtggctgcacaggaaacacaaatccaggaattagtgagcgcttattggtcttgctgtatccctggcccttag

SEQ ID NO: 124211 - DNA, 339 bp, Artificial Sequence
  derived and/or modified sequence
atgttcgccaagctgaagaagaagatcgccgaggagaccgccgtggcacaacgcccaggaggagccaccagaatcccacgttccgtgtctaaggaatcagtcgcgtccatgggggcagactccggagacgatttcgccagcgacggatctagcagtcgggaggatctgtcttcccaactgctgcggcggaacgagcagattaggaagctcgaggcacgcctcagcgactacgccgagcaggtaagaaacttgcaaaagatcaaggagaagttggaaatagccctggagaagcatcaggatagctcgatgagaaagtttcaggaacagaatgagacgtag

SEQ ID NO: 124212 - DNA, 252 bp, Artificial Sequence
  derived and/or modified sequence
tgacaggaactcctgaaggagaaaactcttgccgagcagaacttagaggacacaagacaacaactgctggccgcacgctcgtcacaagccaaggccatcaacaccctggagacgcgagtgagggaacttgaacagactcttcaagcctctgaggaacagttgcagcaaagcaaaggtatcgtcgctgcacaggagacgcagattcaagagttggtatctgcctattggtcctgttgcatccctggaccttag

SEQ ID NO: 124213 - DNA, 589 bp, Artificial Sequence
  derived and/or modified sequence
tgagaagcagtttggacccagctgaaaaattttatttatggagacttgtaatcagcctgatatacagagaacactctggactggaaatatagtcagatcctgtgttgccataagcccttggcccacatttaagtgggaatgcagctagcttggatgtctgaaactttgtaggcgcctctgtctgaatcctgaacacaggcaccaggactactgagagctcgtcatctgtgcaggatagccacacagcaaacatgtttgcaaaactgaagaagaaaattgcagaagagactgctgttgctcagaggccaggaggtgctactaggatcccacggtctgtgagcaaggaatcagttgcctcaatgggagctgactcaggagatgactttgcttccgatggaagcagctccagagaagatctttcatcccagcttctgagaaggaatgaacagatacggaagttagaggccagactttctgactatgctgaacaggtccgaaacttgcagaagataaaagagaagcttgaaattgcattagaaaaacaccaggattcttccatgcggaaatttcaagagcagaatgagacatt

SEQ ID NO: 124214 - DNA, 339 bp, Artificial Sequence
  derived and/or modified sequence
atgttcgccaagttaaagaaaaagattgccgaggagacagctgtggctcagcggccaggcggtgccacgcggatccctagatccgtgagtaaggaatctgtcgcatctatgggagcagattctggagatgattttgccagcgacggctccagctctcgtgaagacctctcctcccagcttttacgccgtaacgagcagattagaaaacttgaggcacggctttcagattacgcagaacaggtgaggaacctacagaagattaaggagaagctcgagattgccctcgaaaagcaccaagattcaagtatgagaaaatttcaggaacagaatgagacatag

SEQ ID NO: 124215 - protein, 2230 aa, Artificial Sequence
  derived and/or modified sequence
MFKKLKQKISEEQQQLQQALAPAQASSNSSTPTRMRSRTSSFTEQLDEGTPNRESGDTQSFAQKLQLRVPSVESLFRSPIKESLFRSSSKESLVRTSSRESLNRLDLDSSTASFDPPSDMDSEAEDLVGNSDSLNKEQLIQRLRRMERSLSSYRGKYSELVTAYQMLQREKKKLQGILSQSQDKSLRRIAELREELQMDQQAKKHLQEEFDASLEEKDQYISVLQTQVSLLKQRLRNGPMNVDVLKPLPQLEPQAEVFTKEENPESDGEPVVEDGTSVKTLETLQQRVKRQENLLKRCKETIQSHKEQCTLLTSEKEALQEQLDERLQELEKIKDLHMAEKTKLITQLRDAKNLIEQLEQDKGMVIAETKRQMHETLEMKEEEIAQLRSRIKQMTTQGEELREQKEKSERAAFEELEKALSTAQKTEEARRKLKAEMDEQIKTIEKTSEEERISLQQELSRVKQEVVDVMKKSSEEQIAKLQKLHEKELARKEQELTKKLQTREREFQEQMKVALEKSQSEYLKISQEKEQQESLALEELELQKKAILTESENKLRDLQQEAETYRTRILELESSLEKSLQENKNQSKDLAVHLEAEKNKHNKEITVMVEKHKTELESLKHQQDALWTEKLQVLKQQYQTEMEKLREKCEQEKETLLKDKEIIFQAHIEEMNEKTLEKLDVKQTELESLSSELSEVLKARHKLEEELSVLKDQTDKMKQELEAKMDEQKNHHQQQVDSIIKEHEVSIQRTEKALKDQINQLELLLKERDKHLKEHQAHVENLEADIKRSEGELQQASAKLDVFQSYQSATHEQTKAYEEQLAQLQQKLLDLETERILLTKQVAEVEAQKKDVCTELDAHKIQVQDLMQQLEKQNSEMEQKVKSLTQVYESKLEDGNKEQEQTKQILVEKENMILQMREGQKKEIEILTQKLSAKEDSIHILNEEYETKFKNQEKKMEKVKQKAKEMQETLKKKLLDQEAKLKKELENTALELSQKEKQFNAKMLEMAQANSAGISDAVSRLETNQKEQIESLTEVHRRELNDVISIWEKKLNQQAEELQEIHEIQLQEKEQEVAELKQKILLFGCEKEEMNKEITWLKEEGVKQDTTLNELQEQLKQKSAHVNSLAQDETKLKAHLEKLEVDLNKSLKENTFLQEQLVELKMLAEEDKRKVSELTSKLKTTDEEFQSLKSSHEKSNKSLEDKSLEFKKLSEELAIQLDICCKKTEALLEAKTNELINISSSKTNAILSRISHCQHRTTKVKEALLIKTCTVSELEAQLRQLTEEQNTLNISFQQATHQLEEKENQIKSMKADIESLVTEKEALQKEGGNQQQAASEKESCITQLKKELSENINAVTLMKEELKEKKVEISSLSKQLTDLNVQLQNSISLSEKEAAISSLRKQYDEEKCELLDQVQDLSFKVDTLSKEKISALEQVDDWSNKFSEWKKKAQSRFTQHQNTVKELQIQLELKSKEAYEKDEQINLLKEELDQQNKRFDCLKGEMEDDKSKMEKKESNLETELKSQTARIMELEDHITQKTIEIESLNEVLKNYNQQKDIEHKELVQKLQHFQELGEEKDNRVKEAEEKILTLENQVYSMKAELETKKKELEHVNLSVKSKEEELKALEDRLESESAAKLAELKRKAEQKIAAIKKQLLSQMEEKEEQYKKGTESHLSELNTKLQEREREVHILEEKLKSVESSQSETLIVPRSAKNVAAYTEQEEADSQGCVQKTYEEKISVLQRNLTEKEKLLQRVGQEKEETVSSHFEMRCQYQERLIKLEHAEAKQHEDQSMIGHLQEELEEKNKKYSLIVAQHVEKEGGKNNIQAKQNLENVFDDVQKTLQEKELTCQILEQKIKELDSCLVRQKEVHRVEMEELTSKYEKLQALQQMDGRNKPTELLEENTEEKSKSHLVQPKLLSNMEAQHNDLEFKLAGAEREKQKLGKEIVRLQKDLRMLRKEHQQELEILKKEYDQEREEKIKQEQEDLELKHNSTLKQLMREFNTQLAQKEQELEMTIKETINKAQEVEAELLESHQEETNQLLKKIAEKDDDLKRTAKRYEEILDAREEEMTAKVRDLQTQLEELQKKYQQKLEQEENPGNDNVTIMELQTQLAQKTTLISDSKLKEQEFREQIHNLEDRLKKYEKNVYATTVGTPYKGGNLYHTDVSLFGEPTEFEYLRKVLFEYMMGRETKTMAKVITTVLKFPDDQTQKILEREDARLMFTSPRSGIF

SEQ ID NO: 124216 - DNA, 6693 bp, Artificial Sequence
  derived and/or modified sequence
atgtttaagaagttgaagcagaagatcagcgaggaacagcagcagctgcagcaggccttggcccctgcccaagctagctccaacagcagcacccctactcggatgcgatcccggacctcttcgttcaccgagcagctggacgagggaacacccaacagggaaagtggggacactcagtcctttgctcagaagctacaactgagagtcccatcagtggagagcctgtttagatctccgatcaaggagtctctgtttcggtccagctccaaggaatcccttgtgcgaaccagttcacgcgagagcctgaacaggttggatctcgacagttcaactgctagcttcgacccacctagtgatatggattcagaggctgaagatttggttgggaattctgattctctgaataaagaacagctgatccagagattacggcgcatggagagaagcctcagctcgtatcgcggcaaatattccgagctcgtcacggcgtatcaaatgttacagcgtgagaaaaagaaactacagggaattctgagtcaatctcaagacaagtctctgcgccgtattgctgaacttagggaggaactccagatggaccagcaggccaagaaacacttgcaggaagaatttgatgccagcttggaggagaaagaccagtatatttcggtcctgcagacacaggtgtccctccttaagcagagattacgcaatggcccgatgaacgtagatgtccttaagccccttccccagttggaacctcaggccgaggtctttacaaaagaggagaatcctgagtctgatggcgagccagttgttgaggacggaacctccgtgaaaacgctggagacactgcagcagcgtgtcaagaggcaggagaacttacttaagcgctgtaaagagacaatacagtctcacaaagagcagtgcacccttttaacgtccgagaaggaagccctgcaggagcagctggatgagcgtttgcaggaactggagaaaatcaaggaccttcacatggccgagaagaccaagttaattactcaattgcgtgatgcgaaaaacttgatcgaacagttggaacaggacaaaggcatggtcatcgctgaaacaaagagacaaatgcatgaaactttggaaatgaaggaagaagaaatcgcccagctcaggtcccggatcaaacaaatgacaacccagggcgaggagttgagagagcagaaggaaaagtcggagcgggctgcttttgaggagctggaaaaagccctatccacagcccagaaaaccgaggaggcccgacgaaaactaaaggccgaaatggatgagcagataaaaaccatcgaaaaaacatctgaagaggagcgaatctcccttcagcaggaactgtcccgtgtgaagcaggaggtggttgatgtgatgaaaaaaagcagcgaggagcaaattgcgaagctgcagaaattgcatgagaaggagctggctcgaaaggagcaggagctgactaaaaagctccaaaccagggaaagagagttccaagagcagatgaaggtagctttagagaaatcccagagcgagtacctgaaaatctcccaggagaaggagcagcaggagtcactggcgctcgaggaactcgaactccagaagaaggccattctcactgaaagcgaaaataaactgcgtgatctgcaacaagaggcagagacttatagaactaggatactggagctggagtccagcctagaaaagtcactgcaggagaacaagaaccagagcaaagatctggccgtgcatctggaagccgaaaagaataagcataacaaggaaattaccgtcatggtggaaaaacacaaaaccgaactagagagcttaaagcaccaacaagacgctctatggaccgaaaagctgcaggttctgaaacagcagtaccagaccgagatggagaaactgcgtgagaagtgtgagcaggaaaaggagacacttttaaaagacaaggagatcatctttcaagcccacatcgaggaaatgaatgaaaagaccctcgaaaagctggacgtaaagcagacggaattggagagcttgtctagcgagttgagtgaggtcctcaaggcgcgccacaaacttgaggaagaactgtcggtgctgaaggatcagacagacaaaatgaaacaggagttggaggctaaaatggacgagcaaaagaaccaccaccagcagcaggtggattccatcattaaggagcatgaggtcagcatccaacgtaccgagaaggcacttaaggatcagatcaatcagcttgagctcctgctcaaggaaagagacaaacatctgaaggaacaccaagcccacgttgaaaatttggaggcagatattaagcgcagcgaaggtgagctgcagcaggcttctgcaaagctggacgtgtttcagtcttaccagtcggcaacacacgaacagaccaaggcatacgaagagcagttggcccaactccaacagaaactcctggacctggaaaccgaaaggatcctgcttaccaagcaggtcgccgaggtggaagctcaaaagaaggatgtctgtacagagctggacgcacataagattcaggtgcaggatttgatgcagcagttggaaaagcaaaattccgaaatggagcagaaagtgaagtcgctgacccaggtctatgaatctaagcttgaagacggaaataaggagcaggagcagaccaagcagatacttgtcgagaaagagaatatgatcctgcaaatgcgcgaaggccaaaagaaagagattgagattctgacccaaaagctgagcgccaaagaagattccattcatatattgaatgaagagtacgaaacaaagtttaagaaccaagaaaagaagatggagaaggttaaacagaaagccaaggagatgcaggaaaccctcaaaaaaaaactgctagatcaggaagccaagttaaaaaaggaattggagaacacagcacttgagttaagccagaaggagaaacagttcaacgccaaaatgcttgaaatggcacaagccaatagcgccggtatttccgatgctgtttcacgacttgaaacaaatcagaaagagcagatcgagtcgttaacggaagtgcacagaagggaactgaatgacgtgatcagcatttgggagaagaaacttaaccagcaggctgaggagctacaagagatacatgagattcagctgcaagagaaggagcaagaggtggccgaactgaagcagaaaattttattattcggatgtgaaaaagaagagatgaataaagaaatcacatggctaaaagaggaaggcgttaagcaggataccaccctcaatgagttacaggaacagctgaaacaaaaaagcgctcatgtgaactcacttgcccaggatgagaccaaactgaaggcacacttggagaagcttgaggtcgacctcaacaaatctctcaaggagaatacttttttgcaggaacagttggttgagctcaagatgctggccgaagaggataaaagaaaagtgagcgaacttacctccaagctgaaaacaacggatgaggagttccagtccctgaagtcatcccacgaaaagagcaacaaaagcctcgaggacaagagcttggaattcaagaagttgagcgaagaactggccatccagttagacatctgctgcaagaagaccgaggccctgctggaagctaagaccaacgaactcataaacatttcatccagcaaaacgaatgccatcttatcaagaatcagccattgtcagcatcggaccacaaaggtgaaggaggctctgctcatcaagacgtgtactgtgtccgagctggaagcccagctgcggcagctgacagaagagcagaacaccctgaacatcagctttcagcaagccactcatcaattggaggagaaagaaaaccaaatcaaatcgatgaaggcagacattgagtctcttgtaactgagaaggaagcactacagaaagaagggggcaatcaacagcaggccgcttctgagaaggagtcctgtattacccagctcaagaaggaactgtctgagaacatcaacgccgttactctgatgaaggaggagctgaaggaaaaaaaagtcgaaattagctctctctctaagcagctgaccgacctcaacgtgcagctccagaactccattagtctgtcagaaaaggaggctgccatatcttctctgcgcaagcagtacgacgaggaaaagtgtgagttactcgatcaggttcaggacctgagtttcaaagtcgatacacttagtaaagagaaaatttcggccctggagcaggtggacgattggtctaataaattttcagagtggaaaaagaaggcccagtcaagatttacacagcaccagaatacagtcaaagagctgcagatacagctcgagctgaaatccaaagaggcctacgaaaaggacgaacaaattaatcttctgaaggaagaattggaccagcaaaacaaaaggttcgattgcctgaagggcgaaatggaggatgacaagagcaaaatggagaagaaggagtcaaacctggaaaccgaattgaaatcacagactgctcgcatcatggagttggaggaccacataacgcagaagaccatagaaattgagagcctgaatgaggttctaaaaaattataaccaacagaaggacattgagcataaagaacttgtgcaaaagctgcaacacttccaggagcttggagaggagaaggataatagagttaaggaggccgaagagaaaatccttaccctggagaatcaggtttattcaatgaaagccgagctggaaacgaaaaaaaaggagctcgagcacgtcaacttgtcagtcaagtcaaaggaggaagaactgaaggcgctagaagatcgactcgagagcgaatccgccgctaagctcgctgagcttaaaagaaaggctgagcagaagatagccgccattaagaaacagctgctgagtcagatggaggagaaagaagagcagtataaaaagggcaccgaatcccacctaagcgagttgaataccaaattacaagaaagagagcgcgaggtccatatcctagaggagaagctgaagtcggtcgagtctagccaaagtgagaccctcatcgtaccacgaagtgctaagaatgtggcagcttatacggagcaggaggaggctgatagccaaggctgtgtccagaaaacctatgaggaaaaaatctccgtcctccagcggaacttaactgaaaaagagaagctgctgcagcgcgtgggacaggaaaaagaagagactgtgagctcccactttgagatgcggtgtcagtatcaggagcgtctgatcaagctcgagcacgccgaggctaagcagcacgaggatcagagcatgataggacatctgcaggaagaattggaggagaagaacaagaagtattcacttatcgtggcccagcacgttgagaaggagggaggtaagaacaacattcaggccaagcagaatctcgagaatgtgttcgacgacgtccagaaaacattgcaggagaaagagctcacatgtcagatcctcgagcagaagattaaggagcttgatagttgcctggttagacagaaggaagtccatagggtcgaaatggaggagctcacttcaaagtatgagaaactccaagcactgcagcagatggacggacgcaataaacctacagaactcctggaagagaataccgaagaaaagtctaagagtcaccttgtccagcctaaattgcttagcaacatggaggcacagcacaacgacctggaatttaaattggctggagccgagcgcgagaaacagaagcttgggaaggagatagtcagactccagaaggaccttcggatgttgagaaaggaacaccagcaggagctggagattctgaagaaggagtatgaccaggaacgggaggaaaagatcaaacaagagcaggaggacctggaactgaaacataactccacgcttaaacagctaatgcgggagttcaacacacagttggcccagaaggagcaggaattagagatgacaatcaaggagacgataaacaaggcacaagaggtggaagccgaactgctggagtctcaccaggaagaaacgaaccagcttctcaagaagattgccgagaaggacgacgatctgaaacgaaccgccaagagatacgaggagatcttagacgcacgtgaggaagaaatgacggccaaggtgcgggacctacagacacagctggaagagctccagaagaagtaccaacagaagctagaacaggaggagaatcctggaaacgacaacgtaactattatggagctccagacccagctagcccagaagactactctcatctctgatagcaaactcaaagagcaagagtttcgagagcagattcacaacctggaggacagattgaaaaaatacgagaaaaacgtttacgcaacaaccgtaggtaccccatataagggaggcaatttatatcacactgacgtgagcctctttggagagccaacagaatttgagtatctgcggaaggtattgttcgagtatatgatggggcgcgagacaaagacgatggctaaggtgatcactacagtcctgaagtttcctgacgatcagactcagaagatccttgagagggaggacgcgagactgatgttcacatccccacggtccggtattttttag

SEQ ID NO: 124217 - DNA, 7772 bp, Artificial Sequence
  derived and/or modified sequence
atgtgcgggacccgacattgtgcttgtcccatccggtgctccgtagttagcctctgtgagctccacgtaggccgcgcaagcgcccttggcgcacagttcacctgctgccgttgtcgtcgccgccgcggctcccggggctggatggggggccgaggccagccagtggcacccggaagaaagagacgcggcggcggcgacgccgacaccctcaggacgagtgtccggacttgcccacagcctcaaggaggagacggcgaggcccggcccccgctgtccctggtgtaaagaagtcgccgtagccgtcgcggccgggactccccgggctctcgcccttcaggtttcgttgacactcaggaccgtacgtacgctgcgccatgttcaagaaactgaagcaaaagatcagcgaggagcagcagcagctccagcaggcgctggctcctgctcaggcgtcctccaattcttcaacaccaacaagaatgaggagcaggacatcttcatttacagagcaacttgatgaaggtacacccaatagagagtcaggtgacacacagtcttttgcacagaagctccagctccgggtgccctccgtggagtctttgtttcgaagtccgataaaggaatctctattccggtcttcttctaaagagtctttggtacgaacatcttccagagaatccctgaatcgacttgacctggacagttctactgccagttttgatccaccctctgatatggatagcgaggctgaagacttggtagggaattcagacagtctcaacaaagaacagttgattcagcggttgcgaagaatggaacgaagcttaagtagctacaggggaaaatattctgagcttgttacagcttatcagatgcttcagagagagaagaaaaagctacaaggtatattaagtcagagtcaggataaatcacttcggagaatagcagaattaagagaggagctccaaatggaccagcaggcaaagaaacatctgcaagaggagtttgatgcatctttagaggagaaagatcagtatatcagtgttctccaaactcaggtttctctactgaaacaacgattacgaaatggcccgatgaatgttgatgtactgaaaccacttcctcagctggaaccacaggctgaagtcttcactaaagaagagaatccagaaagtgatggagagccagtagtggaagatggaacttctgtaaaaacactggaaacactccagcaaagagtgaagcgtcaagagaacctacttaagcgttgtaaggaaacaattcagtcacataaggaacaatgtacactattaactagtgaaaaagaagctctgcaagaacaactggatgaaagacttcaagaactagaaaagataaaggaccttcatatggccgagaagactaaacttatcactcagttgcgtgatgcaaagaacttaattgaacagcttgaacaagataagggaatggtaatcgcagagacaaaacgtcagatgcatgaaaccctggaaatgaaagaagaagaaattgctcaactccgtagtcgcatcaaacagatgactacccagggagaggaattacgggaacagaaagaaaagtccgaaagagctgcttttgaggaacttgaaaaagctttgagtacagcccaaaaaacagaggaagcacggagaaaactgaaggcagaaatggatgaacaaataaaaactatcgaaaaaacaagtgaggaggaacgcatcagtcttcaacaggaattaagtcgggtgaaacaggaggttgttgatgtaatgaaaaaatcctcagaagaacaaattgctaagctacagaagcttcatgaaaaggagctggccagaaaagagcaggaactgaccaagaagcttcagacccgagaaagggaatttcaggaacaaatgaaagtagctcttgaaaagagtcaatcagaatatttgaagatcagccaagaaaaagaacagcaagaatctttggccctagaagagttagagttgcagaaaaaagcaatcctcacagaaagtgaaaataaacttcgggaccttcagcaagaagcagagacttacagaactagaattcttgaattggaaagttctttggaaaaaagcttacaagaaaacaaaaatcagtcaaaagatttggctgttcatctggaagctgaaaaaaataagcacaataaggagattacagtcatggttgaaaaacacaagacagaattggaaagccttaagcatcagcaggatgccctttggactgaaaaactccaagtcttaaagcaacaatatcagactgaaatggaaaaacttagggaaaagtgtgaacaagaaaaagaaacattgttgaaagacaaagagattatcttccaggcccacatagaagaaatgaatgaaaagactttagaaaagcttgatgtgaagcaaacagaactagaatcattatcttctgaactgtcagaagtattaaaagcccgtcacaaactagaagaggaactttctgttctgaaagatcaaacagataaaatgaagcaggaattagaggccaagatggatgaacagaaaaatcatcaccagcagcaagttgacagtatcattaaagaacacgaggtatctatccagaggactgagaaggcattaaaagatcaaattaatcaacttgagcttctcttgaaggaaagggacaagcatttgaaagagcatcaggctcatgtagaaaatttagaggcagatattaaaaggtctgaaggggaactccagcaggcatctgctaagctggacgtttttcagtcttaccagagtgccacacatgagcagacaaaagcatatgaggaacagttggcccaattgcagcagaagttgttggatttggaaacagaaagaattcttcttaccaaacaggttgctgaagttgaagcacaaaagaaagatgtttgtactgagttagatgctcacaaaatccaggtgcaggacttaatgcagcaacttgaaaaacaaaatagtgaaatggagcaaaaagtaaaatctttaacccaagtctatgagtccaaacttgaagatggtaacaaagaacaggaacagacaaagcaaatcttggtggaaaaggaaaatatgattttacaaatgagagaaggacagaagaaagaaattgagatactcacacagaaattgtcagccaaggaggacagtattcatattttgaatgaggaatatgaaaccaaatttaaaaaccaagaaaaaaagatggaaaaagttaagcagaaagcaaaggagatgcaagaaacgttaaagaaaaaattactggatcaggaagccaaacttaagaaagagcttgaaaatactgctctagagcttagtcagaaagaaaaacagtttaatgccaaaatgctggaaatggcacaggctaactcagctggaatcagtgatgcagtgtcaagactggaaacaaaccaaaaagaacaaatagaaagtcttactgaggttcatcgacgagaactcaatgatgtcatatcaatctgggaaaagaaacttaatcagcaagctgaagaacttcaggaaatacatgaaatccaattacaggaaaaagaacaagaggtagcagaactgaaacaaaagatcctcctatttgggtgtgaaaaagaagagatgaacaaggaaataacatggctgaaggaagaaggtgttaagcaggatacaacattaaatgaattacaggaacagttaaagcagaagtctgcccatgtgaattctcttgcacaagatgaaactaaactgaaagctcatcttgaaaagctagaggttgacttgaataagtctctgaaggaaaatacttttcttcaagagcagctagttgaactgaagatgctggcagaagaagataagcggaaggtttctgagttgactagcaagttgaaaaccacagatgaagaattccagagtttgaaatcttcacatgaaaaaagtaacaaaagcctagaggacaagagcttggaatttaaaaaactgtctgaggaactagcgattcagctagatatttgctgtaagaaaaccgaagccttattagaagctaaaacaaatgagctaatcaacattagtagtagtaaaactaatgccattctttctaggatttctcattgtcagcaccgtacaactaaagttaaggaggcactgttaattaaaacttgcacagtttctgaattagaagcacaacttagacagttgacagaggagcaaaatacactaaatatttcttttcaacaggctactcatcagttagaagaaaaagaaaatcaaattaagagcatgaaggctgatattgaaagtcttgtaacagaaaaagaagccttacagaaggaaggaggcaatcagcaacaggctgcttctgaaaaggagtcttgtataacacagttgaagaaagagttatctgaaaacatcaatgctgtcacattgatgaaagaagagcttaaagaaaaaaaagttgagattagcagtcttagtaaacaactaactgatttgaatgttcagcttcaaaatagcatcagcctatccgaaaaagaagcagccatttcatcactaagaaagcagtatgatgaagaaaaatgtgaattgctggatcaggtgcaagatttatcttttaaagttgacactctgagtaaagagaaaatttctgctcttgagcaggtagatgactggtccaataaattctcagaatggaagaagaaagcacagtcaagatttacacagcatcaaaacactgttaaagaattgcagatccagcttgagttaaaatcaaaggaagcttatgaaaaggatgagcagataaatttattgaaggaagagcttgatcagcaaaataaaagatttgattgtttaaagggtgaaatggaagacgacaagagcaagatggagaaaaaggagtctaatttagaaacagagttaaagtctcaaacagcaagaattatggaattagaggaccatattacccagaaaactattgaaatagagtccttaaatgaagttcttaaaaattacaatcaacaaaaggatattgaacacaaagaattggttcagaaacttcaacattttcaagagttaggagaagaaaaggacaacagggttaaagaagctgaagaaaaaatcttaacacttgaaaaccaagtttattccatgaaagctgaacttgaaactaagaagaaagaattagaacatgtgaatttaagtgtgaaaagcaaagaggaggagttaaaggcattggaagataggcttgagtcagaaagtgctgcaaaattagcagagttgaagagaaaagctgaacaaaaaattgctgccattaagaagcagttgttatctcaaatggaagagaaagaagaacagtataaaaaaggtacagaaagccatttgagtgagctaaatacaaaattgcaggaaagagaaagggaagttcacatcttggaagaaaaacttaagtcagtggaaagttcacagtcagaaacattaattgtacccagatcagcaaaaaatgtggcagcatatactgaacaagaagaagcagattcccaaggctgtgtgcagaagacatatgaagaaaaaatcagtgttttacaaagaaacttaactgaaaaagaaaagctattgcagagggtagggcaggaaaaagaagagacagtttcttctcattttgaaatgcgatgccaataccaggagcgcttaataaagctagaacatgctgaggcaaagcaacatgaagatcaaagtatgataggtcatcttcaagaggagcttgaagaaaaaaacaagaaatattccttgatagtagcccagcatgtggaaaaagaaggaggtaaaaataacatacaggcaaagcaaaacttggaaaatgtgtttgacgacgtccagaaaaccctccaggagaaggaactaacctgtcagattttggagcaaaagataaaagagctggattcctgcttagtaagacagaaagaagtacatagagttgaaatggaagagttgacctcaaaatatgaaaaattacaggctttacaacagatggatggaagaaataaacccacagaacttttggaagaaaacactgaagaaaagtccaaatcacatttggtccaacccaaattgcttagtaacatggaagcccagcacaatgatctggagtttaaattagccggggcagaacgggagaaacagaaactgggcaaggagattgttagattgcagaaagaccttcgaatgttgagaaaggagcatcagcaagaattggaaatactaaagaaagaatatgatcaagaaagggaagagaaaatcaaacaggagcaggaagatcttgaactgaagcacaattccacattaaaacagctgatgagggagtttaatacacagctggcacaaaaggaacaagagctggaaatgaccataaaagaaactatcaataaggcccaggaggtggaggctgaacttttagaaagccatcaagaagagacaaatcagttacttaaaaaaattgctgagaaagatgatgatctaaaacgaacagccaaaagatatgaagaaatccttgatgctcgtgaagaagaaatgactgcaaaagtaagggacctgcagactcaacttgaggagctgcagaagaaataccagcaaaagctagagcaggaggagaaccctggcaatgataatgtaacaattatggagctacagacacagctagcacagaagacgactttaatcagtgattcgaaattgaaagagcaagagttcagagaacagattcacaatttagaagaccgtttgaagaaatatgaaaagaatgtatatgcaacaactgtggggacaccttacaaaggtggcaatttgtaccatacggatgtctcactctttggagaacctaccgaatttgagtatttgcgaaaagtgctttttgagtatatgatgggtcgtgagactaagaccatggcaaaagttataaccaccgtactgaagttccctgatgatcagactcagaaaattttggaaagagaagatgctcggctgatgtttacttcacctcgcagtggtatcttctgagtaaaccatcagtctgtgcttagttaacatgtgtcatggctccgatcttcatcttgaagaagagtgacattgggtgactgctgcttggaaaactgtccacacttgctactctttgagaatgaagttgtcattcagggcccctcatgtagccaaaagaccaagaaaaatctggcccacagataagttgcagactgcctttaaaatagattttatcagtggagaaatggtgatagttttttcttcagttttctcttgggaagagttttatgttgtttaaaagatattttgataacttaacctgctttatgggcttacataatattcctttcatccattctttttaaagaacggcttacctttcctatttatttttagggtgattttttaaaaagacttgtgcaatacattttgaggtgaaacttagtggattttttctgataaattagagcatttaattgactattttattcaggttgatctgttgaatatttgctaaagaccagttctttaagctaagacatgtaaaaaatcccaaatggcagtacctcattgtttacttagcttttgtacttatatttttcagaggaaaaaacactactgtaaattgtgaatagccaatacataactgtattgtatgcaaatctgtgattgttggcagtgtcatctctgagaaacagataaataaagtttatttactatataaca

SEQ ID NO: 124218 - DNA, 6693 bp, Artificial Sequence
  derived and/or modified sequence
atgttcaagaagctgaagcagaagatcagcgaggagcagcagcagctgcagcaggccctggccccagcccaggccagcagcaacagcagcacccccaccaggatgaggagcaggaccagcagcttcacagagcagctggatgagggcacccccaaccgggagagcggggacacccagagctttgcccagaagctgcagctgcgggtgcccagcgtggagagcctcttccgcagccccatcaaggagagcctcttccgcagcagcagcaaggagagcctggtgaggaccagcagccgggagagcctgaaccggctggacctggacagcagcacagccagctttgacccccccagcgacatggacagcgaggccgaggacctggtgggcaacagcgacagcctgaacaaggagcagctgatccagaggctgcggaggatggagaggagcctgagcagctaccggggcaagtacagcgagctggtgacagcctaccagatgctgcagcgggagaagaagaagctgcagggcatcctgagccagagccaggacaagagcctgcggagaattgctgagctgcgggaggagctgcagatggaccagcaggccaagaagcacctgcaggaggagtttgatgccagcctggaggagaaggaccagtacatctctgtgctgcagacccaggtgtccctgctgaagcagaggctgagaaatggccccatgaatgtggatgtgctgaagcccctgccccagctggagccccaggccgaggtgttcaccaaggaggagaaccctgagagtgatggagagcctgtggtggaggatggcacctctgtgaagaccctggagaccctgcagcagagggtgaagaggcaggagaacctgctgaagcgctgcaaggagaccatccagagccacaaggagcagtgcaccctgctgaccagcgagaaggaggccctgcaggagcagctggatgagcggctgcaggagctggagaagatcaaggacctgcacatggccgagaagaccaagctgatcacccagctgagagatgccaagaacctgattgagcagctggagcaggacaagggcatggtgattgctgagaccaagaggcagatgcatgagaccctggagatgaaggaggaggagatcgcccagctgcggagccgcatcaagcagatgaccacccagggcgaggagctgcgggagcagaaggagaagtcagaaagagctgcctttgaggagctggagaaggccctgagcacagcccagaagacagaggaggcccggaggaagctgaaggccgagatggatgagcagatcaagaccatcgagaagaccagcgaggaggagcgcatcagcctgcagcaggagctgagccgggtgaagcaggaggtggtggatgtgatgaagaagagcagcgaggagcagatcgccaagctgcagaagctgcacgagaaggagctggccaggaaggagcaggagctgaccaagaagctgcagacccgggagcgggagttccaggagcagatgaaggtggccctggagaagagccagagcgagtacctgaagatcagccaggagaaggagcagcaggagagcctggccctggaggagctggagctgcagaagaaggccatcctgacagaaagtgagaacaagctgcgggacctgcagcaggaggccgagacctaccgcacccgcatcctggagctggagagcagcctggagaagagcctgcaggagaacaagaaccagagcaaggacctggccgtgcacctggaggccgagaagaacaagcacaacaaggagatcaccgtgatggtggagaagcacaagacagagctggagagcctgaagcaccagcaggatgccctgtggacagagaagctgcaggtgctgaagcagcagtaccagacagagatggagaagctgcgggagaagtgtgagcaggagaaggagaccctgctgaaggacaaggagatcatcttccaggcccacatcgaggagatgaatgagaagaccctggagaagctggatgtgaagcagacagagctggagagcctgagcagcgagctgtctgaggtgctgaaggcccggcacaagctggaggaggagctgtctgtgctgaaggaccagacagacaagatgaagcaggagctggaggccaagatggatgagcagaagaaccaccaccagcagcaggtggacagcatcatcaaggagcacgaggtgtccatccagaggacagagaaggccctgaaggaccagatcaaccagctggagctgctgctgaaggagcgggacaagcacctgaaggagcaccaggcccacgtggagaacctggaggccgacatcaagaggtctgagggggagctgcagcaggccagcgccaagctggatgtgttccagagctaccagagcgccacccatgagcagaccaaggcctatgaggagcagctggcccagctgcagcagaagctgctggacctggagacagagcgcatcctgctgaccaagcaggtggccgaggtggaggcccagaagaaggatgtgtgcacagagctggatgcccacaagatccaggtgcaggacctgatgcagcagctggagaagcagaacagcgagatggagcagaaggtgaagagcctgacccaggtgtatgagagcaagctggaggatggcaacaaggagcaggagcagaccaagcagatcctggtggagaaggagaacatgatcctgcagatgagggagggccagaagaaggagattgagatcctgacccagaagctgagcgccaaggaggacagcatccacatcctgaatgaggagtatgagaccaagttcaagaaccaggagaagaagatggagaaggtgaagcagaaggccaaggagatgcaggagaccctgaagaagaagctgctggaccaggaggccaagctgaagaaggagctggagaacacagccctggagctgagccagaaggagaagcagttcaatgccaagatgctggagatggcccaggccaacagcgctggcatcagtgatgctgtgtcccggctggagaccaaccagaaggagcagatcgagagcctgacagaggtgcacagaagagagctgaatgatgtgatcagcatctgggagaagaagctgaaccagcaggccgaggagctgcaggagatccacgagatccagctgcaggagaaggagcaggaggtggccgagctgaagcagaagatcctgctgtttggctgtgagaaggaggagatgaacaaggagatcacctggctgaaggaggagggcgtgaagcaggacaccaccctgaatgagctgcaggagcagctgaagcagaagagcgcccacgtgaacagcctggcccaggatgagaccaagctgaaggcccacctggagaagctggaggtggacctgaacaagagcctgaaggagaacaccttcctgcaggagcagctggtggagctgaagatgctggccgaggaggacaagaggaaggtgtctgagctgaccagcaagctgaagaccacagatgaggagttccagagcctgaagagcagccatgagaagagcaacaagagcctggaggacaagagcctggagttcaagaagctgtctgaggagctggccatccagctggacatctgctgcaagaagacagaggccctgctggaggccaagaccaatgaactcatcaacatcagcagcagcaagaccaatgccatcctgagccgcatcagccactgccagcacaggaccaccaaggtgaaggaggccctgctgatcaagacctgcaccgtgtctgagctggaggcccagctgcggcagctgacagaggagcagaacaccctgaacatctccttccagcaggccacccaccagctggaggagaaggagaaccagatcaagtccatgaaggctgacatcgagagcctggtgacagagaaggaggccctgcagaaggagggcggcaaccagcagcaggccgccagcgagaaggagagctgcatcacccagctgaagaaggagctgtctgagaacatcaatgctgtgaccctgatgaaggaggagctgaaggagaagaaggtggagatcagcagcctgagcaagcagctgacagacctgaatgtgcagctgcagaacagcatcagcctgtctgagaaggaggccgccatcagcagcctgaggaagcagtatgatgaggagaagtgtgagctgctggaccaggtgcaggacctgtccttcaaggtggacaccctgagcaaggagaagatcagcgccctggagcaggtggatgactggagcaacaagttcagcgagtggaagaagaaggcccagagccgcttcacccagcaccagaacacagtgaaggagctgcagatccagctggagctgaagagcaaggaggcctatgagaaggatgagcagatcaacctgctgaaggaggagctggaccagcagaacaagagatttgactgcctgaagggggagatggaggatgacaagagcaagatggagaagaaggagagcaacctggagacagagctgaagagccagacagcccgcatcatggagctggaggaccacatcacccagaagaccattgaaattgagagcctgaatgaggtgctgaagaactacaaccagcagaaggacatcgagcacaaggagctggtgcagaagctgcagcacttccaggagctgggggaggagaaggacaacagagtgaaggaggccgaggagaagatcctgaccctggagaaccaggtgtacagcatgaaggccgagctggagaccaagaagaaggagctggagcacgtgaacctgtctgtgaagagcaaggaggaggagctgaaggccctggaggaccggctggagagcgagagcgctgccaagctggccgagctgaagaggaaggccgagcagaagattgctgccatcaagaagcagctgctgagccagatggaggagaaggaggagcagtacaagaagggcacagagagccacctgtctgagctgaacaccaagctgcaggagcgggagcgggaggtgcacatcctggaggagaagctgaagtctgtggagagcagccagagcgagaccctgattgtgcccaggtctgccaagaatgtggccgcctacacagagcaggaggaggccgacagccagggctgtgtgcagaagacctatgaggagaagatctctgtgctgcagaggaacctgacagagaaggagaagctgctgcagagggtgggccaggagaaggaggagaccgtgagcagccactttgagatgcgctgccagtaccaggagcggctcatcaagctggagcacgccgaggccaagcagcacgaggaccagagcatgattggccacctgcaggaggagctggaggagaagaacaagaagtacagcctgattgtggcccagcacgtggagaaggagggcggcaagaacaacatccaggccaagcagaacctggagaatgtgtttgatgatgtgcagaagaccctgcaggagaaggagctgacctgccagatcctggagcagaagatcaaggagctggacagctgcctggtgcggcagaaggaggtgcaccgggtggagatggaggagctgaccagcaaatatgagaagctgcaggccctgcagcagatggatggaagaaacaagcccacagagctgctggaggagaacacagaggagaagagcaagagccacctggtgcagcccaagctgctgagcaacatggaggcccagcacaatgacctggagttcaagctggccggggctgagcgggagaagcagaagctgggcaaggagatcgtgcggctgcagaaggacctgaggatgctgaggaaggagcaccagcaggagctggagatcctgaagaaggagtatgaccaggagcgggaggagaagatcaagcaggagcaggaggacctggagctgaagcacaacagcaccctgaagcagctgatgagggagttcaacacccagctggcccagaaggagcaggagctggagatgaccatcaaggagaccatcaacaaggcccaggaggtggaggccgagctgctggagagccaccaggaggagaccaaccagctgctgaagaagattgctgagaaggatgatgacctgaagaggacagccaagagatatgaggagatcctggatgcccgggaggaggagatgacagccaaggtgcgggacctgcagacccagctggaggagctgcagaagaagtaccagcagaagctggagcaggaggagaaccctggaaatgacaacgtgaccatcatggagctgcagacccagctggcccagaagaccaccctcatcagtgacagcaagctgaaggagcaggagttccgggagcagatccacaacctggaggaccggctgaagaagtatgagaagaatgtgtatgccaccaccgtgggcaccccctacaagggcggcaacctgtaccacacagatgtgtccctgtttggagagcccacagaatttgagtacctgaggaaggtgctgtttgagtacatgatgggccgggagaccaagaccatggccaaggtgatcaccaccgtgctgaagttcccagatgaccagacccagaagatcctggagcgggaggatgcccggctgatgttcaccagccccaggagcggcatcttctag

SEQ ID NO: 124219 - DNA, 6693 bp, Artificial Sequence
  derived and/or modified sequence
atgttcaagaagctgaagcagaagatcagcgaggagcagcagcagctgcagcaggccctcgcacccgcccaagcttcatccaatagcagcacccccacaaggatgcgctctaggacatccagctttacagaacagctcgacgagggcacccctaatcgagagagtggagatactcagagcttcgctcagaaactgcagctgcgggtgcccagtgtggagagcctgtttcggagcccgattaaggagagcttgttcagatcctcgagtaaagagtctctggttcggaccagcagcagggaatccttgaacaggttggatctcgatagctcaactgcctcttttgatccccccagcgacatggactccgaagccgaagatctggtagggaattctgattccctgaacaaggaacagcttattcaacgacttcgacggatggaacggagcttatcgagttacagaggaaaatactcagagctggtgacggcctaccagatgctgcagagagaaaagaaaaagttacaggggattctgtcccaaagccaggacaaaagcttgcggcggattgcagagctccgcgaggagctgcagatggatcagcaggccaaaaaacatctccaggaagagttcgatgccagtcttgaagagaaggatcagtacatctccgtgctccagactcaggtatcattactgaagcagcggttacgcaacggacctatgaatgttgacgtgctgaaacctctgccgcagctcgaaccccaggccgaggtgttcaccaaggaagagaacccagagtcagatggggagccagtggtggaggacggaacctcagtgaaaaccctggagaccctccagcagcgagtcaaacgacaagagaacctgcttaaacgctgcaaagagacaatccaaagccacaaggagcagtgtaccctcctcacatcagagaaggaagccctgcaagaacaactcgacgaacgacttcaggagctggagaagattaaagacctacacatggcggagaagactaaactcattacacagttgagggatgcaaaaaatctcatagaacagctggaacaggataagggaatggtgatcgccgagacgaagcgccagatgcacgagactcttgaaatgaaggaagaagagattgcgcagcttcgatccagaataaaacagatgaccacccaaggcgaggaacttagagaacagaaagagaagagcgaaagagctgcattcgaggaactcgagaaggccctctccaccgcgcagaaaacggaggaagcgcgaaggaagcttaaagcagagatggacgagcagattaaaaccatcgaaaagacaagtgaagaagaacgaatttcgctgcagcaggaattgtctcgcgtgaaacaggaggtggtcgacgtgatgaagaagagctctgaagagcagatcgcgaaactccagaagctgcatgagaaagagttggcgagaaaagagcaggagctaactaaaaagctccagaccagagaacgggagttccaggagcagatgaaggtggcattagagaagtcccaatctgaatatctgaaaatttcccaggagaaagagcagcaagagagtctggctctggaagagctggagctccagaagaaggccatcctaaccgaatcagagaataaactgcgagatctgcagcaagaagccgagacttatagaactagaattctagaactcgagagctcgcttgagaaatccctgcaagagaataagaatcaatcaaaagatttagctgtgcacctggaagccgagaagaacaagcataataaggaaattacagtaatggtcgagaagcataagactgagctcgagtcccttaagcatcagcaggatgccctgtggactgagaaacttcaagtgctcaagcagcagtaccaaacagagatggaaaagcttcgggagaaatgcgaacaagaaaaagagaccctgctgaaagacaaagagatcattttccaagcacatatcgaggaaatgaacgaaaagaccctcgagaagctggacgtcaagcaaaccgagcttgaaagcctcagctccgagctctccgaagtgctgaaagcccgtcataagctagaggaggagctgtcagtccttaaagaccaaacggataagatgaaacaggagcttgaggccaaaatggatgaacagaaaaaccaccatcagcaacaggtcgacagcatcatcaaggaacatgaggtctccatccagcgcacggaaaaagcccttaaggaccagattaatcagctggaattgctcctgaaagaaagggataagcacctaaaagaacatcaagcccacgtggagaatctggaggccgatattaaacggtctgagggggagctgcagcaggcctcagcaaagcttgacgtgttccagagctaccagagcgcgacccacgaacaaacaaaggcctacgaggagcagctagcccagttgcagcagaaactattggacctagaaactgaaagaatcctactcacaaaacaggtggccgaagtggaagcccagaagaaagacgtctgtaccgagctcgacgcccataagatccaagttcaggatctgatgcagcagcttgagaaacagaactcagaaatggagcagaaagtaaaaagccttacgcaggtgtacgagtcaaagctggaagatgggaataaggagcaggagcagacaaaacagatcctggtcgagaaagagaatatgattctgcagatgcgcgaaggtcaaaagaaggagatcgagatcctgactcagaaactgagcgctaaagaggactcaatccatatcctgaacgaggaatacgagaccaagtttaaaaatcaggaaaagaagatggagaaggtgaagcagaaggccaaggaaatgcaagagacactcaaaaaaaaactgctcgatcaggaggccaagctaaaaaaagagttggaaaatacggcgttggagctctctcagaaggagaaacagttcaatgcaaagatgctggaaatggctcaagctaacagcgcaggtatatctgatgccgtgtcaaggcttgagactaaccaaaaggagcaaatcgagagtctcactgaagttcatcgtcgcgagctaaatgacgtcatcagtatatgggagaaaaaactcaatcagcaggctgaggagttgcaagaaattcacgagatccagcttcaggagaaggaacaggaagtggcagagctcaagcagaaaatcctgctctttggctgcgagaaagaagaaatgaacaaggagattacgtggctgaaagaggagggtgtcaagcaagataccaccctgaatgagctgcaagagcaattgaagcagaaatctgctcacgtgaattccctggcacaggatgagaccaagttgaaggcccaccttgaaaaactggaggtggacttgaataaaagcctaaaggagaacacatttctgcaagagcaactcgttgagctgaagatgctggcagaagaggacaagagaaaggtgagcgagctcacaagcaagctcaagactactgacgaagagtttcagagcctgaagtccagtcacgagaaaagtaacaaatcactggaagacaagtcccttgagttcaagaagttgtccgaggaactggccattcaattggatatctgttgcaagaaaactgaggctctcctggaagcgaaaactaacgagcttattaacatctcttcaagtaagactaacgccatcctgtcaagaatttcccactgccaacaccgtacaaccaaggtgaaggaggcacttttaataaagacctgtaccgttagtgaactggaggctcaattgcgtcaactgactgaggagcaaaacaccctgaatatcagtttccagcaggctacacaccagctggaggagaaagagaatcagatcaaatcaatgaaggcagacatagagtctctagtgaccgaaaaagaagcgctgcagaaggagggggggaatcagcagcaggccgccagcgagaaagaatcatgcatcacacagctgaagaaggaactctctgaaaacattaacgccgtcacactcatgaaagaggagctcaaagagaaaaaagtggaaatatcgagcctttccaaacagctgacagacctcaacgtgcagctgcagaactcgatcagcctgtccgagaaagaggctgccatctcctctctgcggaagcaatacgatgaagagaagtgtgaacttctggaccaagtccaagacttgagctttaaggtggacactctgagtaaagaaaaaattagtgctcttgagcaggttgatgactggtctaataagtttagcgaatggaagaaaaaggcgcagtccagattcacccaacatcagaacactgtcaaggaattgcagatccagcttgaactgaagtcgaaagaagcttatgagaaagacgagcagattaacctgttaaaagaggaattggatcagcagaataagaggttcgactgcttgaaaggagagatggaggacgataagtctaagatggaaaaaaaggagtccaatctggagaccgaacttaagtctcagacagctcgaattatggagttagaggatcacatcacacaaaaaaccatagagatcgagtcactcaatgaagtattgaagaattataaccagcaaaaagacatcgagcataaggagctggtacagaaattacagcatttccaggaactcggagaagagaaggataacagggtaaaggaagccgaagaaaagattttgaccctggagaaccaagtgtactctatgaaagctgaactggagaccaaaaaaaaggaactggagcatgtcaacctgagcgttaagagcaaggaggaggagttaaaggcgctggaggatcgcctagagtctgaatcagcagcaaagctagctgagttaaaaaggaaagcagaacagaagattgccgccatcaagaaacagctgctgagccagatggaggagaaagaagaacaatacaaaaaaggaaccgaatctcacctgtcagagctcaatacgaaactacaggaaagagaacgcgaggtacatattctcgaggaaaagctgaaatccgtggagagctcacagtctgagaccctaatagttccacgatctgccaaaaacgtggcagcttatacagagcaagaagaagccgactctcagggatgtgtgcaaaaaacttatgaggagaaaatcagcgtcctccaacgcaacttgacggaaaaggagaagcttctacagcgggtgggccaggaaaaagaggaaactgtgagttcccacttcgaaatgcgctgtcagtaccaagagcggttaattaagcttgagcatgcagaggcgaagcagcacgaggatcagagtatgattggccatttgcaagaggagcttgaagaaaagaacaagaaatattccttaatcgtggctcagcacgtggagaaggaaggtggtaagaataatatccaggcaaagcagaacctcgaaaacgtcttcgacgacgttcaaaaaacactccaggaaaaagagttgacatgtcagatactggagcagaagatcaaggaattggactcctgtctagtccggcagaaagaagtgcaccgcgtcgaaatggaagagttgaccagcaagtacgaaaaattgcaggcgttgcagcagatggacgggagaaataagcccacagaactgctcgaggaaaatactgaggagaaatccaagagtcatctggttcagcccaagcttctgtccaacatggaagcccagcacaatgaccttgagttcaagctggcaggagcagagcgggagaagcagaagctgggtaaggaaattgtcagactccagaaggatctcagaatgctacgcaaggaacaccagcaggaactggagatcctgaaaaaagaatatgaccaagagcgggaagaaaaaattaagcaagagcaggaggatctagagctaaaacataactccacgctgaaacagctgatgagagagtttaatacgcagttggcccagaaggagcaggaactagagatgaccattaaggaaacaattaataaggcccaggaagtcgaagctgaactgctcgaatcacaccaggaggaaaccaaccagctgctgaaaaagatcgctgagaaagacgatgacttgaaaaggaccgccaaaaggtatgaggagatcctcgatgcacgagaggaggagatgacagcaaaggtgcgagacctgcagactcagctggaggagctgcagaaaaagtatcagcaaaagctggaacaagaagagaatccgggcaacgacaatgtgaccattatggaactgcagacccagctggctcaaaaaaccacactcatcagtgattccaagttaaaagagcaggagttcagggagcagatacacaatctggaggacagactgaaaaaatatgagaagaatgtctacgcgaccaccgtgggtacgccatacaagggaggcaatttataccacactgatgtgtcacttttcggggagcccaccgagttcgaatacttaaggaaagtcctgtttgaatacatgatggggagggagactaagaccatggccaaggttatcacaactgttcttaagtttcccgatgatcagacacagaagatccttgagcgggaggacgcccgactcatgttcaccagcccgcgctccgggatcttttag

SEQ ID NO: 124220 - DNA, 6692 bp, Artificial Sequence
  derived and/or modified sequence
atgtttaagaaacttaagcaaaaaatttccgaggagcaacagcaacttcagcaagccctggcaccagcgcaggcctcctctaacagctccacaccaacgaggatgcgaagccggacatcatctttcaccgaacagctggacgagggaacgcccaatagagagtccggcgatactcagagtttcgcccagaagctccaactgcgcgtgccctctgttgagagtctcttccggtcaccaataaaggaatcgttgttcagaagctctagtaaggagtctcttgtccgaacatcttccagggagtctctgaaccggctggacctggactccagcaccgcaagttttgaccccccttctgatatggatagcgaagccgaggatctggtcggcaattcagatagtctcaataaggagcagctgattcagaggctgagacgcatggagagaagtctgtcttcttaccgcggtaaatacagcgaactagtgactgcctaccagatgctccaaagggagaagaaaaagttgcagggaattctcagtcagagccaggacaagtctctgcgccgtatcgccgagctcagagaggagctgcagatggaccaacaagcgaaaaagcatctgcaagaggaatttgacgcttccctggaggagaaagatcagtacatctcagttcttcaaacccaggtgtccctgctgaagcaaaggctgcggaatggaccaatgaacgttgatgtgctgaaacctctcccacaattggaaccacaggcagaggtcttcactaaggaggaaaatcctgaatctgacggcgagcccgtggttgaggatggaacgagtgtgaagaccctggagaccctccaacagcgggttaaacggcaagagaacctgctgaaacggtgtaaagagactatccaatcccataaggaacagtgcacactgttgaccagcgagaaagaagccctccaggaacagctggacgaaaggttgcaggagcttgaaaagatcaaggaccttcatatggccgaaaaaactaaattgatcacacagttgcgcgacgcaaaaaatctgattgaacagctggagcaagataaaggtatggtcatcgctgaaaccaagcgccagatgcatgaaactctggaaatgaaagaggaggagattgcccaactccgctcacgtatcaagcagatgacgacccagggagaggaactaagggaacagaaggagaaatctgaaagggccgcttttgaggagcttgaaaaagctctgagtactgcccagaaaaccgaggaggccagaagaaagctcaaggctgagatggacgagcagatcaaaactatcgagaagacgtccgaagaagagagaatatccctgcaacaggagctgagccgcgtcaaacaagaagtggtggacgttatgaagaagtctagcgaggagcaaattgccaagcttcagaaactccacgaaaaggagttggcccgtaaagaacaggagctgacgaagaaactccagactcgtgagcgggagttccaggaacagatgaaagttgcccttgaaaagagccagtccgaatatctcaagataagtcaggagaaagaacagcaggagagcctcgcccttgaggagctggaactgcagaagaaggcgattctaacagaatccgagaacaagctgagagacctacagcaagaagccgagacgtatcgcacccgcatcctggaactcgagagcagcctggaaaaatccctgcaggagaacaaaaatcagagcaaagacctcgcagtgcaccttgaggctgagaagaacaaacacaacaaggagattacagtgatggttgaaaagcataaaaccgagctggagtcactgaaacaccaacaggacgccctgtggacagagaagctgcaagtgttgaagcagcagtaccagacagaaatggaaaagctgcgtgagaaatgtgagcaggaaaaggagaccctactgaaagacaaagagataattttccaagcacacattgaggaaatgaacgagaaaacactggaaaagcttgacgttaaacagacagaactcgagagcctgtcctccgagctctccgaagtccttaaagcacggcataaactggaagaagaactgtccgtgctgaaagatcagaccgacaaaatgaagcaggagttagaagctaaaatggatgaacagaagaatcaccaccaacagcaggtggactcaataattaaagagcacgaagtaagcattcagagaaccgaaaaagccctaaaggaccagatcaaccagttggagctgctcctgaaagagagagacaagcacctgaaggaacaccaggcccacgtagagaatttagaggccgacataaagcgaagcgagggagagctgcagcaggctagtgcaaaactggacgtgtttcagtcctatcagagcgcaacccacgagcagaccaaagcatacgaagagcagctagctcagctgcagcagaaactgctcgatcttgagacggaaaggatcctgttaaccaaacaggttgcggaagttgaggcacagaaaaaggacgtgtgtacagagctggacgcccacaagatccaagtgcaggatttgatgcagcagctagaaaaacagaactctgaaatggaacagaaagtcaaatcactgacccaggtttatgagagtaaattagaggatggtaacaaggaacaggagcagacaaaacagattctcgtcgagaaagagaacatgatcctacagatgagggagggacaaaagaaggaaatcgaaatcctgacacaaaaactgtccgccaaggaggacagtatacacatcctcaacgaagaatacgagacaaaatttaaaaaccaggaaaagaagatggagaaggtgaagcaaaaggctaaagagatgcaagagacacttaaaaaaaaacttctggaccaggaggcaaaacttaaaaaggagctggagaacacagccctggagctcagccaaaaggagaaacagttcaatgcaaaaatgctggagatggctcaggcgaattcagccggaatctctgacgccgtgtcccgcctggagactaaccagaaggagcagatcgaatcactgaccgaggtgcaccgacgggaactgaacgacgtgattagcatctgggagaaaaaactgaaccaacaggccgaggaattacaggagatccacgagattcagctgcaggagaaggaacaggaggttgcagaactgaagcagaaaatcctcttgttcggctgcgagaaagaggaaatgaacaaagaaatcacgtggctgaaggaggagggtgtcaaacaagacaccactctcaacgaactccaggagcagctgaagcagaaatccgctcacgtcaactcactagcccaggatgagacaaaactaaaggcccatctcgaaaaactggaggtcgatctcaataaatcattgaaagaaaacacttttttgcaagaacagcttgttgagcttaaaatgctcgcagaggaggacaagcgcaaggttagcgaattaacatcaaaactgaaaactaccgatgaggaattccaatctctcaagtcgtctcacgagaaaagtaataaaagtctggaggacaagagcctggagttcaagaagttaagtgaggaactggcaattcagctggacatttgttgtaaaaaaaccgaagcgcttctggaggctaagactaatgagctgattaatataagtagctctaagactaatgccattctctcccggatcagccactgccagcaccggacaacaaaagtaaaagaagcactgcttattaaaacttgtacagtgtctgagctcgaagcacagctccgccagctgaccgaagagcaaaatactctcaacatttcctttcagcaagccacacaccaattggaagagaaggaaaaccagattaaatcgatgaaagcagatatcgagtcactggtgacagagaaggaggcactgcagaaagaaggcggtaatcaacagcaagccgcatctgagaaagaatcttgcatcacacagctgaagaaagagcttagtgaaaacataaatgcagttacgctgatgaaggaggaactgaaggagaaaaaagtggagattagctcactctctaagcaactgactgatctgaacgttcagcttcagaatagcatctccctcagcgagaaagaggctgctattagcagcctgagaaagcagtatgacgaggagaaatgcgaactgcttgaccaggtccaagatctctccttcaaggtggatacattgtcaaaagagaagatttccgccctggaacaggtggacgattggtccaacaagttctcggaatggaagaagaaagcccagagtcggtttacgcaacaccagaacacagtgaaggaactccagatccaattagagttgaagagtaaagaagcgtatgaaaaagatgagcagattaatttgttgaaggaagagctcgatcaacagaacaaacggttcgattgtcttaagggagagatggaagacgataaatctaagatggagaagaaggaaagtaacctggaaaccgagctgaaatcccagaccgctagaataatggagctggaggaccacatcactcagaaaactatcgaaattgaatctctgaacgaggtcctgaagaattacaatcagcagaaagatatcgagcacaaagagctcgttcagaaacttcagcacttccaggagttgggtgaggaaaaggataacagagtgaaggaggccgaggagaagatcctgacgcttgaaaaccaggtctacagtatgaaagctgagctcgaaaccaagaaaaaagaactggaacatgtaaacttaagtgttaagagtaaggaggaggaactgaaggctctcgaagaccggttggaaagcgaaagtgcagccaagctggctgagctgaaaagaaaggccgagcaaaaaatcgccgcaatcaaaaagcaattactttcacagatggaggaaaaagaggaacagtacaagaaggggacagaatcccacttaagcgaactgaacactaaattgcaagagcgggaacgcgaagtgcatatcctcgaggaaaagctgaagtccgtagagtccagccagtctgaaaccctgattgttccccgatcagcaaagaacgttgccgcatacaccgaacaggaggaagcggactctcaaggatgtgtacaaaagacgtacgaagagaaaatttccgtgctccagcgcaatttgactgagaaggagaagttgctgcaaagagttggacaggagaaggaggagaccgtgtcttcccactttgagatgcgctgccagtaccaggagaggctgattaaactggaacacgctgaagccaaacaacacgaagatcagtcgatgattggacaccttcaggaagaactggaggagaaaaataagaaatacagtctgattgttgcccaacatgtggagaaggagggaggaaaaaacaacatacaagcaaagcagaatctagagaacgttttcgatgacgtgcagaagaccctacaagaaaaagagctgacttgccagatcctggaacagaaaattaaagagctcgatagttgtctggtgaggcaaaaagaagtccatagagttgagatggaagagttaacatctaagtatgagaagctgcaagccctgcagcagatggacggacggaataagcccaccgaacttctggaggaaaatacagaggagaaatcaaagagtcatttagtgcagcccaagttgttgtccaatatggaggcacaacacaacgacttagaatttaagttggcgggagccgaaagagagaaacagaagttgggcaaagaaatcgtgcgcctgcagaaggacctccgtatgcttaggaaagaacatcagcaggagctggaaattctgaagaaagagtacgatcaagagcgcgaagagaaaatcaaacaggagcaggaggacctggagctaaagcacaactccactctcaaacaactcatgagagagttcaatacccaacttgcacagaaagagcaggagctggaaatgactattaaggaaacaatcaacaaggcccaggaggtggaggccgagctgttggagtcccaccaagaggagacgaatcagctcctaaagaagatagctgagaaggacgacgacctgaaaaggacagcaaagagatacgaagagattctcgatgccagggaagaagagatgaccgctaaagttagggacctgcagactcagctggaagagctccagaagaaataccagcagaaattggaacaggaagagaaccctgggaacgacaatgttactatcatggagttgcagacacagctagctcagaagaccaccttaatctccgattctaagctgaaggagcaggaatttcgggaacagattcacaatctggaagatcgcctgaagaagtatgagaaaaatgtttatgccactactgtggggacaccttacaaaggcggaaacctgtaccatacggacgttagcctgtttggagaacctacggaattcgagtacctgcgcaaagtgctgtttgagtacatgatgggccgagagactaagaccatggctaaggttattactacggtcctcaaatttccagatgaccagacacagaagatcttggagcgagaggatgcacggctgatgtttacatccccacgatccggcatatttta

SEQ ID NO: 124221 - DNA, 6693 bp, Artificial Sequence
  derived and/or modified sequence
atgttcaagaagctgaagcagaagatcagcgaggagcagcagcagctgcagcaggccctggcccccgcccaggccagcagcaacagcagcacccccaccagaatgagaagcagaaccagcagcttcaccgagcagctggacgagggcacccccaacagagagagcggcgacacccagagcttcgcccagaagctgcagctgagagtgcccagcgtggagagcctgttcagaagccccatcaaggagagcctgttcagaagcagcagcaaggagagcctggtgagaaccagcagcagagagagcctgaacagactggacctggacagcagcaccgccagcttcgacccccccagcgacatggacagcgaggccgaggacctggtgggcaacagcgacagcctgaacaaggagcagctgatccagagactgagaagaatggagagaagcctgagcagctacagaggcaagtacagcgagctggtgaccgcctaccagatgctgcagagagagaagaagaagctgcagggcatcctgagccagagccaggacaagagcctgagaagaatcgccgagctgagagaggagctgcagatggaccagcaggccaagaagcacctgcaggaggagttcgacgccagcctggaggagaaggaccagtacatcagcgtgctgcagacccaggtgagcctgctgaagcagagactgagaaacggccccatgaacgtggacgtgctgaagcccctgccccagctggagccccaggccgaggtgttcaccaaggaggagaaccccgagagcgacggcgagcccgtggtggaggacggcaccagcgtgaagaccctggagaccctgcagcagagagtgaagagacaggagaacctgctgaagagatgcaaggagaccatccagagccacaaggagcagtgcaccctgctgaccagcgagaaggaggccctgcaggagcagctggacgagagactgcaggagctggagaagatcaaggacctgcacatggccgagaagaccaagctgatcacccagctgagagacgccaagaacctgatcgagcagctggagcaggacaagggcatggtgatcgccgagaccaagagacagatgcacgagaccctggagatgaaggaggaggagatcgcccagctgagaagcagaatcaagcagatgaccacccagggcgaggagctgagagagcagaaggagaagagcgagagagccgccttcgaggagctggagaaggccctgagcaccgcccagaagaccgaggaggccagaagaaagctgaaggccgagatggacgagcagatcaagaccatcgagaagaccagcgaggaggagagaatcagcctgcagcaggagctgagcagagtgaagcaggaggtggtggacgtgatgaagaagagcagcgaggagcagatcgccaagctgcagaagctgcacgagaaggagctggccagaaaggagcaggagctgaccaagaagctgcagaccagagagagagagttccaggagcagatgaaggtggccctggagaagagccagagcgagtacctgaagatcagccaggagaaggagcagcaggagagcctggccctggaggagctggagctgcagaagaaggccatcctgaccgagagcgagaacaagctgagagacctgcagcaggaggccgagacctacagaaccagaatcctggagctggagagcagcctggagaagagcctgcaggagaacaagaaccagagcaaggacctggccgtgcacctggaggccgagaagaacaagcacaacaaggagatcaccgtgatggtggagaagcacaagaccgagctggagagcctgaagcaccagcaggacgccctgtggaccgagaagctgcaggtgctgaagcagcagtaccagaccgagatggagaagctgagagagaagtgcgagcaggagaaggagaccctgctgaaggacaaggagatcatcttccaggcccacatcgaggagatgaacgagaagaccctggagaagctggacgtgaagcagaccgagctggagagcctgagcagcgagctgagcgaggtgctgaaggccagacacaagctggaggaggagctgagcgtgctgaaggaccagaccgacaagatgaagcaggagctggaggccaagatggacgagcagaagaaccaccaccagcagcaggtggacagcatcatcaaggagcacgaggtgagcatccagagaaccgagaaggccctgaaggaccagatcaaccagctggagctgctgctgaaggagagagacaagcacctgaaggagcaccaggcccacgtggagaacctggaggccgacatcaagagaagcgagggcgagctgcagcaggccagcgccaagctggacgtgttccagagctaccagagcgccacccacgagcagaccaaggcctacgaggagcagctggcccagctgcagcagaagctgctggacctggagaccgagagaatcctgctgaccaagcaggtggccgaggtggaggcccagaagaaggacgtgtgcaccgagctggacgcccacaagatccaggtgcaggacctgatgcagcagctggagaagcagaacagcgagatggagcagaaggtgaagagcctgacccaggtgtacgagagcaagctggaggacggcaacaaggagcaggagcagaccaagcagatcctggtggagaaggagaacatgatcctgcagatgagagagggccagaagaaggagatcgagatcctgacccagaagctgagcgccaaggaggacagcatccacatcctgaacgaggagtacgagaccaagttcaagaaccaggagaagaagatggagaaggtgaagcagaaggccaaggagatgcaggagaccctgaagaagaagctgctggaccaggaggccaagctgaagaaggagctggagaacaccgccctggagctgagccagaaggagaagcagttcaacgccaagatgctggagatggcccaggccaacagcgccggcatcagcgacgccgtgagcagactggagaccaaccagaaggagcagatcgagagcctgaccgaggtgcacagaagagagctgaacgacgtgatcagcatctgggagaagaagctgaaccagcaggccgaggagctgcaggagatccacgagatccagctgcaggagaaggagcaggaggtggccgagctgaagcagaagatcctgctgttcggctgcgagaaggaggagatgaacaaggagatcacctggctgaaggaggagggcgtgaagcaggacaccaccctgaacgagctgcaggagcagctgaagcagaagagcgcccacgtgaacagcctggcccaggacgagaccaagctgaaggcccacctggagaagctggaggtggacctgaacaagagcctgaaggagaacaccttcctgcaggagcagctggtggagctgaagatgctggccgaggaggacaagagaaaggtgagcgagctgaccagcaagctgaagaccaccgacgaggagttccagagcctgaagagcagccacgagaagagcaacaagagcctggaggacaagagcctggagttcaagaagctgagcgaggagctggccatccagctggacatctgctgcaagaagaccgaggccctgctggaggccaagaccaacgagctgatcaacatcagcagcagcaagaccaacgccatcctgagcagaatcagccactgccagcacagaaccaccaaggtgaaggaggccctgctgatcaagacctgcaccgtgagcgagctggaggcccagctgagacagctgaccgaggagcagaacaccctgaacatcagcttccagcaggccacccaccagctggaggagaaggagaaccagatcaagagcatgaaggccgacatcgagagcctggtgaccgagaaggaggccctgcagaaggagggcggcaaccagcagcaggccgccagcgagaaggagagctgcatcacccagctgaagaaggagctgagcgagaacatcaacgccgtgaccctgatgaaggaggagctgaaggagaagaaggtggagatcagcagcctgagcaagcagctgaccgacctgaacgtgcagctgcagaacagcatcagcctgagcgagaaggaggccgccatcagcagcctgagaaagcagtacgacgaggagaagtgcgagctgctggaccaggtgcaggacctgagcttcaaggtggacaccctgagcaaggagaagatcagcgccctggagcaggtggacgactggagcaacaagttcagcgagtggaagaagaaggcccagagcagattcacccagcaccagaacaccgtgaaggagctgcagatccagctggagctgaagagcaaggaggcctacgagaaggacgagcagatcaacctgctgaaggaggagctggaccagcagaacaagagattcgactgcctgaagggcgagatggaggacgacaagagcaagatggagaagaaggagagcaacctggagaccgagctgaagagccagaccgccagaatcatggagctggaggaccacatcacccagaagaccatcgagatcgagagcctgaacgaggtgctgaagaactacaaccagcagaaggacatcgagcacaaggagctggtgcagaagctgcagcacttccaggagctgggcgaggagaaggacaacagagtgaaggaggccgaggagaagatcctgaccctggagaaccaggtgtacagcatgaaggccgagctggagaccaagaagaaggagctggagcacgtgaacctgagcgtgaagagcaaggaggaggagctgaaggccctggaggacagactggagagcgagagcgccgccaagctggccgagctgaagagaaaggccgagcagaagatcgccgccatcaagaagcagctgctgagccagatggaggagaaggaggagcagtacaagaagggcaccgagagccacctgagcgagctgaacaccaagctgcaggagagagagagagaggtgcacatcctggaggagaagctgaagagcgtggagagcagccagagcgagaccctgatcgtgcccagaagcgccaagaacgtggccgcctacaccgagcaggaggaggccgacagccagggctgcgtgcagaagacctacgaggagaagatcagcgtgctgcagagaaacctgaccgagaaggagaagctgctgcagagagtgggccaggagaaggaggagaccgtgagcagccacttcgagatgagatgccagtaccaggagagactgatcaagctggagcacgccgaggccaagcagcacgaggaccagagcatgatcggccacctgcaggaggagctggaggagaagaacaagaagtacagcctgatcgtggcccagcacgtggagaaggagggcggcaagaacaacatccaggccaagcagaacctggagaacgtgttcgacgacgtgcagaagaccctgcaggagaaggagctgacctgccagatcctggagcagaagatcaaggagctggacagctgcctggtgagacagaaggaggtgcacagagtggagatggaggagctgaccagcaagtacgagaagctgcaggccctgcagcagatggacggcagaaacaagcccaccgagctgctggaggagaacaccgaggagaagagcaagagccacctggtgcagcccaagctgctgagcaacatggaggcccagcacaacgacctggagttcaagctggccggcgccgagagagagaagcagaagctgggcaaggagatcgtgagactgcagaaggacctgagaatgctgagaaaggagcaccagcaggagctggagatcctgaagaaggagtacgaccaggagagagaggagaagatcaagcaggagcaggaggacctggagctgaagcacaacagcaccctgaagcagctgatgagagagttcaacacccagctggcccagaaggagcaggagctggagatgaccatcaaggagaccatcaacaaggcccaggaggtggaggccgagctgctggagagccaccaggaggagaccaaccagctgctgaagaagatcgccgagaaggacgacgacctgaagagaaccgccaagagatacgaggagatcctggacgccagagaggaggagatgaccgccaaggtgagagacctgcagacccagctggaggagctgcagaagaagtaccagcagaagctggagcaggaggagaaccccggcaacgacaacgtgaccatcatggagctgcagacccagctggcccagaagaccaccctgatcagcgacagcaagctgaaggagcaggagttcagagagcagatccacaacctggaggacagactgaagaagtacgagaagaacgtgtacgccaccaccgtgggcaccccctacaagggcggcaacctgtaccacaccgacgtgagcctgttcggcgagcccaccgagttcgagtacctgagaaaggtgctgttcgagtacatgatgggcagagagaccaagaccatggccaaggtgatcaccaccgtgctgaagttccccgacgaccagacccagaagatcctggagagagaggacgccagactgatgttcaccagccccagaagcggcatcttctag

SEQ ID NO: 124222 - protein, 413 aa, Artificial Sequence
  derived and/or modified sequence
MAPPSVFAEVPQAQPVLVFKLTADFREDPDPRKVNLGVGAYRTDDCHPWVLPVVKKVEQKIANDNSLNHEYLPILGLAEFRSCASRLALGDDSPALKEKRVGGVQSLGGTGALRIGADFLARWYNGTNNKNTPVYVSSPTWENHNAVFSAAGFKDIRSYRYWDAEKRGLDLQGFLNDLENAPEFSIVVLHACAHNPTGIDPTPEQWKQIASVMKHRFLFPFFDSAYQGFASGNLERDAWAIRYFVSEGFEFFCAQSFSKNFGLYNERVGNLTVVGKEPESILQVLSQMEKIVRITWSNPPAQGARIVASTLSNPELFEEWTGNVKTMADRILTMRSELRARLEALKTPGTWNHITDQIGMFSFTGLNPKQVEYLVNEKHIYLLPSGRINVSGLTTKNLDYVATSIHEAVTKIQ

SEQ ID NO: 124223 - protein, 366 aa, Artificial Sequence
  derived and/or modified sequence
MAPPSVFAEVPQAQPVLVFKLTADFREDPDPRKVNLGVGAYRTDDSPALKEKRVGGVQSLGGTGALRIGADFLARWYNGTNNKNTPVYVSSPTWENHNAVFSAAGFKDIRSYRYWDAEKRGLDLQGFLNDLENAPEFSIVVLHACAHNPTGIDPTPEQWKQIASVMKHRFLFPFFDSAYQGFASGNLERDAWAIRYFVSEGFEFFCAQSFSKNFGLYNERVGNLTVVGKEPESILQVLSQMEKIVRITWSNPPAQGARIVASTLSNPELFEEWTGNVKTMADRILTMRSELRARLEALKTPGTWNHITDQIGMFSFTGLNPKQVEYLVNEKHIYLLPSGRINVSGLTTKNLDYVATSIHEAVTKIQ

SEQ ID NO: 124224 - protein, 392 aa, Artificial Sequence
  derived and/or modified sequence
MQVWSPWKGAMCPRPHKPAYRTDDCHPWVLPVVKKVEQKIANDNSLNHEYLPILGLAEFRSCASRLALGDDSPALKEKRVGGVQSLGGTGALRIGADFLARWYNGTNNKNTPVYVSSPTWENHNAVFSAAGFKDIRSYRYWDAEKRGLDLQGFLNDLENAPEFSIVVLHACAHNPTGIDPTPEQWKQIASVMKHRFLFPFFDSAYQGFASGNLERDAWAIRYFVSEGFEFFCAQSFSKNFGLYNERVGNLTVVGKEPESILQVLSQMEKIVRITWSNPPAQGARIVASTLSNPELFEEWTGNVKTMADRILTMRSELRARLEALKTPGTWNHITDQIGMFSFTGLNPKQVEYLVNEKHIYLLPSGRINVSGLTTKNLDYVATSIHEAVTKIQ

SEQ ID NO: 124225 - DNA, 1242 bp, Artificial Sequence
  derived and/or modified sequence
atggcccctccgtccgtctttgctgaggtcccacaggctcagcccgttctggtatttaaactgacggcagatttcagagaggacccagaccctcgaaaggtgaatttaggcgtaggcgcttaccggaccgacgactgccatccgtgggtgctgccggttgttaaaaaggttgaacagaagatagcgaatgataattcattaaaccacgaatatctgccgatccttggtctggccgaatttaggtcatgtgccagtcggctggctctgggcgatgactcacccgccctcaaagaaaaacgggtcgggggagtgcagtcccttggaggcacgggcgccttacggatcggggccgattttctagctcgatggtataacggcaccaacaataagaatacgcctgtgtacgtgtcttctccaacctgggagaatcacaacgccgtattctcggcagctggctttaaggacattagatcctaccgttactgggatgcagagaaaaggggattggatctgcagggcttcttgaacgacctggagaacgcacctgagttcagcattgtggtgctacatgcttgcgcccataaccctaccggtattgatcccacccccgaacaatggaaacagattgcctctgtgatgaagcatagattcctgtttcctttcttcgattcagcctaccaggggttcgcctcaggtaatcttgaaagagacgcctgggcaattcgatacttcgtctccgagggctttgagtttttttgtgctcagagctttagcaagaactttggcttgtacaatgaaagagtcggcaacctgaccgtcgtgggtaaggaacctgaatctatacttcaagtgttgtcccaaatggagaagatcgtgagaatcacctggtccaaccctcctgcccaaggggcaagaatagtcgcgtctacgctcagcaatcctgagctttttgaagagtggactggaaatgtaaagacaatggcggatcgtatactgaccatgagatctgaacttagggcgaggttggaggcactgaaaacccctggtacgtggaatcacatcactgaccagataggtatgttttccttcactggactgaaccccaagcaagtggaatacctggtaaacgagaagcacatctatctgctcccgagcggaagaataaatgtctccggtttaacaacgaagaatctggactacgttgccacttccatccacgaggctgttactaaaatccagtag

SEQ ID NO: 124226 - DNA, 1101 bp, Artificial Sequence
  derived and/or modified sequence
atggctcctccgtcagtcttcgcagaggtgccgcaggcacagccagtactggtttttaagctaactgctgattttcgcgaggaccccgacccgcgcaaggtgaacttgggcgtaggcgcttacaggacagacgacagccctgcacttaaggaaaagagggtgggaggtgtgcaatccctgggaggtacaggggcactgcgcataggagcagatttcctcgccagatggtataacggaaccaataacaagaatacgcccgtgtatgtcagttctccgacatgggagaaccacaatgcagtgttttcagctgccgggtttaaggatattcgttcttacagatattgggatgctgagaagcgcgggttggatttgcagggcttccttaacgatctcgagaacgcaccagagtttagcattgtggtgctgcacgcgtgcgctcataatccgaccggcatcgatccgaccccagaacagtggaaacagatcgcatccgtaatgaagcaccggtttctttttccgttcttcgacagcgcctaccaaggtttcgccagcggtaacctggagcgggacgcctgggccatccgatactttgtttctgagggctttgaattcttctgtgcccagtccttctctaaaaattttggcctctataacgaaagggtgggtaacttaaccgtggtgggtaaggaacctgaatccatcctgcaagtgcttagtcagatggagaagatcgtccgaattacttggagcaatccacccgctcaaggcgccaggatcgtggccagcactttaagtaaccccgaactcttcgaagaatggacgggaaatgtcaagactatggcagaccggatactgactatgagaagcgaactgagagcccggttagaggccctgaaaaccccaggcacctggaaccatattacggatcagattggaatgttcagcttcactggcctgaatccaaaacaggtggaatacctggtgaatgagaaacacatctatctgctcccgtccggccgtatcaacgtatcaggattgaccaccaagaacctggattacgtggcgacgagtattcatgaggccgtgacgaagatccaatag

SEQ ID NO: 124227 - DNA, 1179 bp, Artificial Sequence
  derived and/or modified sequence
atgcaggtctggtcaccttggaaaggagctatgtgcccgcgcccacacaaacccgcatatcgtaccgacgactgccatccttgggttcttcccgtcgtgaaaaaggtagaacagaaaatcgccaacgataactctctcaatcacgaatacctgcccatcctgggactggccgaattccgctcttgcgcctcacgactggctttaggggacgattcacccgccttgaaagagaagcgagtggggggcgttcagagcctcgggggcacgggagccctccggattggagcggatttcctggctcgctggtataacgggactaataataagaatacgcctgtgtacgtgagttccccaacatgggagaatcacaatgccgtgttctctgcagctggttttaaggatatacggagctaccgatattgggatgccgaaaagaggggactcgacctgcagggatttctcaacgacttggaaaacgctcccgagttctctatagtggttctacatgcatgcgctcacaatccaactggtatcgatccgactccagaacagtggaagcagattgcctcagtcatgaaacacaggtttctctttcctttttttgactcagcgtatcagggttttgcctctgggaatctcgagagggatgcctgggctatccggtattttgtttctgagggattcgaattcttctgcgcacagtctttctccaagaattttggcctgtacaacgaaagagtgggaaacctgaccgtggttggaaaggaacccgaatccatcctgcaggtcttgtcccaaatggagaagattgtgcggattacgtggtcaaatccccccgcacagggcgcacgtattgtggctagcacgctctctaatcctgagcttttcgaagagtggactggcaacgttaagaccatggccgaccgaattctgactatgcgttcagagctgagggcacggctcgaagcactgaaaactcctggcacatggaaccatatcacagatcagattggtatgttttcgttcacaggccttaacccaaagcaggtcgaataccttgtgaacgaaaaacatatctacctcttgcctagcggaaggattaatgtcagcggccttactacaaagaacctggattacgtggccacctcaatccatgaagcagtgaccaagatccagtag

SEQ ID NO: 124228 - DNA, 1947 bp, Artificial Sequence
  derived and/or modified sequence
gaaatctcttgattcctagtctctcgatatggcacctccgtcagtctttgccgaggttccgcaggcccagcctgtcctggtcttcaagctcactgccgacttcagggaggatccggacccccgcaaggtcaacctgggagtgggagcatatcgcacggatgactgccatccctgggttttgccagtagtgaagaaagtggagcagaagattgctaatgacaatagcctaaatcacgagtatctgccaatcctgggcctggctgagttccggagctgtgcttctcgtcttgcccttggggatgacagcccagcactcaaggagaagcgggtaggaggtgtgcaatctttggggggaacaggtgcacttcgaattggagctgatttcttagcgcgttggtacaatggaacaaacaacaagaacacacctgtctatgtgtcctcaccaacctgggagaatcacaatgctgtgttttccgctgctggttttaaagacattcggtcctatcgctactgggatgcagagaagagaggattggacctccagggcttcctgaatgatctggagaatgctcctgagttctccattgttgtcctccacgcctgtgcacacaacccaactgggattgacccaactccggagcagtggaagcagattgcttctgtcatgaagcaccggtttctgttccccttctttgactcagcctatcagggcttcgcatctggaaacctggagagagatgcctgggccattcgctattttgtgtctgaaggcttcgagttcttctgtgcccagtccttctccaagaacttcgggctctacaatgagagagtcgggaatctgactgtggttggaaaagaacctgagagcatcctgcaagtcctttcccagatggagaagatcgtgcggattacttggtccaatccccccgcccagggagcacgaattgtggccagcaccctctctaaccctgagctctttgaggaatggacaggtaatgtgaagacaatggctgaccggattctgaccatgagatctgaactcagggcacgactagaagccctcaaaacccctgggacctggaaccacatcactgatcaaattggcatgttcagcttcactgggttgaaccccaagcaggttgagtatctggtcaatgaaaagcacatctacctgctgccaagtggtcgaatcaacgtgagtggcttaaccaccaaaaatctagattacgtggccacctccatccatgaagcagtcaccaaaatccagtgaagaaacaccacccgtccagtaccaccaaagtagttctctgtcatgtgtgttccctgcctgcacaaacctacatgtacataccatggattagagacacttgcaggactgaaaggctgctctggtgaggcagcctctgtttaaaccggccccacatgaagagaacatcccttgagacgaatttggagactgggattagagcctttggaggtcaaagcaaattaagatttttatttaagaataaaagagtactttgatcatgagacataggtatcttgtccctctcactaaaaaggagtgttgtgtgtggcggccacgtgcttctatgtggtgtttgactctgtacaaattctagtcccaaagatcaagttgtctgaaggagccaaagtgtgaatgtgggtgtcggctgcggcattaaattcatcatctcaacccagagtgtctggtctccctgctctttctgcatggttgtgtccctagtcctaagctttggttctttagggtgactgtggtaagaaggatatttaatcatgacatgcacggacacgtacatatttaactgaaacaagttttaccaaacagtatttactcgtgatgtgcgtagtgcattctgatatttttgagccattctattgtgttctacttcacctaaaaaaataaaataaaaatgttgatcaaga

SEQ ID NO: 124229 - DNA, 1536 bp, Artificial Sequence
  derived and/or modified sequence
gtcgcaacggccagacctgacctgccagctccgggcgtggggtgaaatctcttgattcctagtctctcgatatggcacctccgtcagtctttgccgaggttccgcaggcccagcctgtcctggtcttcaagctcactgccgacttcagggaggatccggacccccgcaaggtcaacctgggagtgggagcatatcgcacggatgacagcccagcactcaaggagaagcgggtaggaggtgtgcaatctttggggggaacaggtgcacttcgaattggagctgatttcttagcgcgttggtacaatggaacaaacaacaagaacacacctgtctatgtgtcctcaccaacctgggagaatcacaatgctgtgttttccgctgctggttttaaagacattcggtcctatcgctactgggatgcagagaagagaggattggacctccagggcttcctgaatgatctggagaatgctcctgagttctccattgttgtcctccacgcctgtgcacacaacccaactgggattgacccaactccggagcagtggaagcagattgcttctgtcatgaagcaccggtttctgttccccttctttgactcagcctatcagggcttcgcatctggaaacctggagagagatgcctgggccattcgctattttgtgtctgaaggcttcgagttcttctgtgcccagtccttctccaagaacttcgggctctacaatgagagagtcgggaatctgactgtggttggaaaagaacctgagagcatcctgcaagtcctttcccagatggagaagatcgtgcggattacttggtccaatccccccgcccagggagcacgaattgtggccagcaccctctctaaccctgagctctttgaggaatggacaggtaatgtgaagacaatggctgaccggattctgaccatgagatctgaactcagggcacgactagaagccctcaaaacccctgggacctggaaccacatcactgatcaaattggcatgttcagcttcactgggttgaaccccaagcaggttgagtatctggtcaatgaaaagcacatctacctgctgccaagtggtcgaatcaacgtgagtggcttaaccaccaaaaatctagattacgtggccacctccatccatgaagcagtcaccaaaatccagtgaagaaacaccacccgtccagtaccaccaaagtagttctctgtcatgtgtgttccctgcctgcacaaacctacatgtacataccatggattagagacacttgcaggactgaaaggctgctctggtgaggcagcctctgtttaaaccggccccacatgaagagaacatcccttgagacgaatttggagactgggattagagcctttggaggtcaaagcaaattaagatttttatttaagaataaaagagtactttgatcatgagacataggtatcttgtccctctcactaaaaaggagtgttgtgtgtggcggccacgtgcttctatgtggtgtttgactctgtacaaattctagtcccaaagatca

SEQ ID NO: 124230 - DNA, 1432 bp, Artificial Sequence
  derived and/or modified sequence
aaggatgtagtgctctggagtgtgagcagctcggggagtggagcggacccaacccaggtcgtggagactgtgggagaagccgaggcccagtgtggcgctgcctgaagagggcggcgccggagaggaggctggatccacgaaggcttcctaaaacctgcccattttacagatgcaggtgtggagtccctggaaaggggcgatgtgtccgaggccgcacaaaccagcatatcgcacggatgactgccatccctgggttttgccagtagtgaagaaagtggagcagaagattgctaatgacaatagcctaaatcacgagtatctgccaatcctgggcctggctgagttccggagctgtgcttctcgtcttgcccttggggatgacagcccagcactcaaggagaagcgggtaggaggtgtgcaatctttggggggaacaggtgcacttcgaattggagctgatttcttagcgcgttggtacaatggaacaaacaacaagaacacacctgtctatgtgtcctcaccaacctgggagaatcacaatgctgtgttttccgctgctggttttaaagacattcggtcctatcgctactgggatgcagagaagagaggattggacctccagggcttcctgaatgatctggagaatgctcctgagttctccattgttgtcctccacgcctgtgcacacaacccaactgggattgacccaactccggagcagtggaagcagattgcttctgtcatgaagcaccggtttctgttccccttctttgactcagcctatcagggcttcgcatctggaaacctggagagagatgcctgggccattcgctattttgtgtctgaaggcttcgagttcttctgtgcccagtccttctccaagaacttcgggctctacaatgagagagtcgggaatctgactgtggttggaaaagaacctgagagcatcctgcaagtcctttcccagatggagaagatcgtgcggattacttggtccaatccccccgcccagggagcacgaattgtggccagcaccctctctaaccctgagctctttgaggaatggacaggtaatgtgaagacaatggctgaccggattctgaccatgagatctgaactcagggcacgactagaagccctcaaaacccctgggacctggaaccacatcactgatcaaattggcatgttcagcttcactgggttgaaccccaagcaggttgagtatctggtcaatgaaaagcacatctacctgctgccaagtggtcgaatcaacgtgagtggcttaaccaccaaaaatctagattacgtggccacctccatccatgaagcagtcaccaaaatccagtgaagaaacaccacccgtccagtaccaccaaagtagttctctgtcatgtgtgttccctgcctgcacaaacctacatgtacataccat

SEQ ID NO: 124231 - DNA, 1242 bp, Artificial Sequence
  derived and/or modified sequence
atggcccctccttctgtgtttgctgaggtgccccaggcccagcctgtgctggtgttcaagctgacagctgacttcagagaagatcctgaccccaggaaggtgaacctgggcgtgggcgcctacagaacagatgactgccacccctgggtgctgcctgtggtgaagaaggtggagcagaagatcgccaatgacaacagcctgaaccacgagtacctgcccatcctgggcctggccgagttccgcagctgtgccagccggctggccctgggagatgacagccctgccctgaaggagaagagggtgggcggcgtgcagagcctgggcggcaccggggccctgagaattggagctgacttcctggcccgctggtacaacggcaccaacaacaagaacacccctgtgtatgtgagcagccccacctgggagaaccacaatgctgtgttttctgctgctggcttcaaggacatccgcagctaccgctactgggatgctgagaagaggggcctggacctgcagggcttcctgaatgacctggagaatgcccctgagttcagcatcgtggtgctgcacgcctgtgcccacaaccccactggaattgaccccaccccagagcagtggaagcagatcgcctctgtgatgaagcaccgcttcctgttccccttctttgacagcgcctaccagggctttgccagcggcaacctggagagagatgcctgggccatccgctactttgtgtctgagggctttgagttcttctgtgcccagagcttcagcaagaactttggcctgtacaatgaaagagtgggcaacctgactgtggtgggcaaggagcctgagagcatcctgcaggtgctgagccagatggagaagatcgtgcgcatcacctggagcaaccccccagcccagggcgcccgcatcgtggccagcaccctgagcaaccctgagctgtttgaggagtggacaggaaatgtgaagaccatggctgaccgcatcctgaccatgaggtctgagctgcgggcccggctggaggccctgaagaccccaggcacctggaaccacatcacagaccagatcggcatgttctccttcaccggcctgaaccccaagcaggtggagtacctggtgaatgagaagcacatctacctgctgcccagcggccgcatcaacgtgtctggcctgaccaccaagaacctggactatgtggccaccagcatccacgaggccgtgaccaagatccagtag

SEQ ID NO: 124232 - DNA, 1101 bp, Artificial Sequence
  derived and/or modified sequence
atggcccctccttctgtgtttgctgaggtgccccaggcccagcctgtgctggtgttcaagctgacagctgacttcagagaagatcctgaccccaggaaggtgaacctgggcgtgggcgcctacagaacagatgacagccctgccctgaaggagaagagggtgggcggcgtgcagagcctgggcggcactggagccctgcgcatcggggctgacttcctggcccgctggtacaacggcaccaacaacaagaacacccctgtgtatgtgagcagccccacctgggagaaccacaatgctgtgttttctgctgctggcttcaaggacatccgcagctaccgctactgggatgctgagaagaggggcctggacctgcagggcttcctgaatgacctggagaatgcccctgagttcagcatcgtggtgctgcacgcctgtgcccacaaccccaccggcatcgaccccaccccagagcagtggaagcagatcgcctctgtgatgaagcaccgcttcctgttccccttctttgattctgcctaccagggctttgccagcggcaacctggagagagatgcctgggccatccgctactttgtgtctgagggctttgagttcttctgtgcccagagcttcagcaagaactttggcctgtacaatgaaagagtgggcaacctgactgtggtgggcaaggagcctgagagcatcctgcaggtgctgagccagatggagaagatcgtgcgcatcacctggagcaaccccccagcccagggcgccagaattgtggccagcaccctgagcaaccctgagctgtttgaggagtggacaggaaatgtgaagaccatggctgaccgcatcctgaccatgaggtctgagctgcgggcccggctggaggccctgaagaccccaggcacctggaaccacatcacagaccagatcggcatgttctccttcaccggcctgaaccccaagcaggtggagtacctggtgaatgagaagcacatctacctgctgcccagcggccgcatcaacgtgtctggcctgaccaccaagaacctggactatgtggccaccagcatccatgaagctgtgaccaagatccagtag

SEQ ID NO: 124233 - DNA, 1179 bp, Artificial Sequence
  derived and/or modified sequence
atgcaggtgtggagcccctggaagggggccatgtgcccccggccccacaagccagcctacagaacagatgactgccacccctgggtgctgcctgtggtgaagaaggtggagcagaagatcgccaatgacaacagcctgaaccacgagtacctgcccatcctgggcctggccgagttccgcagctgtgccagccggctggccctgggagatgacagccctgccctgaaggagaagagggtgggcggcgtgcagagcctgggcggcactggagccctgcgcatcggggctgacttcctggcccgctggtacaacggcaccaacaacaagaacacccctgtgtatgtgagcagccccacctgggagaaccacaatgctgtgttttctgctgctggcttcaaggacatccgcagctaccgctactgggatgctgagaagaggggcctggacctgcagggcttcctgaatgacctggagaatgcccctgagttcagcatcgtggtgctgcacgcctgtgcccacaaccccaccggcatcgaccccaccccagagcagtggaagcagatcgcctctgtgatgaagcaccgcttcctgttccccttctttgattctgcctaccagggctttgccagcggcaacctggagagagatgcctgggccatccgctactttgtgtctgagggctttgagttcttctgtgcccagagcttcagcaagaactttggcctgtacaatgaaagagtgggcaacctgactgtggtgggcaaggagcctgagagcatcctgcaggtgctgagccagatggagaagatcgtgcgcatcacctggagcaaccccccagcccagggcgccagaattgtggccagcaccctgagcaaccctgagctgtttgaggagtggacaggaaatgtgaagaccatggctgaccgcatcctgaccatgaggtctgagctgcgggcccggctggaggccctgaagaccccaggcacctggaaccacatcacagaccagatcggcatgttctccttcaccggcctgaaccccaagcaggtggagtacctggtgaatgagaagcacatctacctgctgcccagcggccgcatcaacgtgtctggcctgaccaccaagaacctggactatgtggccaccagcatccatgaagctgtgaccaagatccagtag

SEQ ID NO: 124234 - DNA, 1242 bp, Artificial Sequence
  derived and/or modified sequence
atggccccccccagcgtgttcgccgaggtgccccaggcccagcccgtgcttgtgttcaagctgacagccgattttcgcgaggatcccgacccgagaaaagtcaatttgggagtcggggcctaccggaccgacgactgccatccttgggtgctgccagtggtgaaaaaggttgagcagaagatagccaatgacaactcgctcaatcacgaatacctgccgattcttggcttggccgagtttagaagctgtgcttccagacttgcccttggcgatgatagtcccgcccttaaggagaagagggtcggcggcgttcagagtctgggcgggacaggtgccctccgcattggggcagactttctggcaaggtggtacaacggaacgaacaataagaatacccctgtgtatgtctcatccccaacatgggagaaccataacgcagtgttctcagcagcgggattcaaagacatacggtcatataggtactgggatgcagagaaacgcggtctggacttacaaggattcctcaacgacttagagaatgctcctgagttttctatagtggtgctgcatgcgtgcgcccacaatccgaccgggattgaccccactcccgaacagtggaaacagatcgcctcagttatgaaacacaggttcctttttcctttttttgattccgcctaccaggggtttgcctctggcaacctggaacgcgatgcctgggctattcgttatttcgtctccgaagggtttgagtttttctgcgctcagtctttcagtaaaaattttgggttgtataatgaacgcgtaggcaacctgacggtggtcggcaaagagccggaaagtatcctgcaagtgttatcccaaatggaaaagatagtcaggatcacttggtctaacccacccgcccagggagcgagaatcgtggcctctaccttatctaatccggaactgtttgaagaatggaccgggaatgttaaaacgatggctgatcgcattctcaccatgagatcggagctgagggctcggctggaagcactgaaaactccaggaacttggaaccatataaccgaccagattggaatgttttcctttaccggcctgaatccaaagcaagtggagtatttagtgaatgagaagcatatctatctcttgccgagcggccggatcaatgtgtcaggcttgaccactaaaaacctcgattacgtcgccacgagcattcatgaagccgtcacaaaaattcagtag

SEQ ID NO: 124235 - DNA, 1101 bp, Artificial Sequence
  derived and/or modified sequence
atggccccccccagcgtgttcgccgaggtgccccaggcccagcccgtactggtctttaagctgactgcggactttagggaagatcctgatcctagaaaagtcaacctcggggtcggcgcctatagaaccgatgattcccccgccctaaaggaaaagcgggtgggaggggtgcagtcactcggaggcacgggagctttaaggattggagcagattttttagcgcgttggtacaacgggacaaacaataagaacaccccggtgtacgtctcatcaccaacatgggaaaatcacaacgctgtgttcagtgccgcaggcttcaaggatatacgaagttacagatactgggatgccgaaaaacgcggtctcgacctccagggctttctcaatgacctggaaaatgcccccgagttcagcattgtagtcttgcacgcctgtgcacataacccgacaggcatcgatccgacgcctgaacaatggaagcagattgcctcagtgatgaaacatcgttttctgttcccatttttcgattccgcataccagggtttcgcgagcgggaacttggagcgggatgcttgggccatacggtacttcgttagcgagggtttcgagttcttctgcgcccagtctttctcaaagaactttggactctacaatgagagagtcggaaatctgaccgtagttgggaaggaacccgaatccatcttgcaggttctgagtcagatggaaaaaattgtcagaatcacttggagtaaccctcccgcccagggagcccgcatagttgcctctactctgtcgaatcccgaattgtttgaggaatggacgggcaacgttaagacgatggccgatcgcatactcacaatgcgcagtgaactgagggcccggctggaggccctcaagaccccaggcacgtggaatcacatcactgaccagattgggatgtttagttttacaggcctaaaccctaaacaggtagaatatctcgtgaatgagaagcacatctacttattgccctccggaaggataaacgtctctgggctcaccactaagaatctggattatgtcgctacctctatccatgaagccgtgacgaaaatccaatag

SEQ ID NO: 124236 - DNA, 1179 bp, Artificial Sequence
  derived and/or modified sequence
atgcaggtgtggagcccctggaagggcgccatgtgcccccggccccacaaaccagcctaccggaccgacgattgccacccatgggtattgcctgtggtgaaaaaagttgagcagaaaatcgccaatgataactcacttaatcacgagtatctcccgatactggggcttgccgaatttcggtcctgcgcctcaagactcgccctcggtgatgactctcccgcactcaaggaaaaacgtgtaggcggcgttcagagccttggcggcacaggagctctcaggataggagccgactttctcgcacgctggtacaatggcacgaacaacaaaaacacgcccgtgtacgttagtagtccgacatgggagaaccacaatgcagtgttcagtgccgcaggatttaaagatatccggagctacagatattgggacgcggagaaacgcgggctggatctgcagggcttcctgaacgacctggagaatgcgccagaattctccatcgtggttcttcatgcatgcgcacacaaccccaccggcattgatcccacccccgaacagtggaaacagatcgcctctgtgatgaagcaccggttcttatttcctttctttgacagtgcttaccagggatttgcgtcaggcaacctggaaagagacgcgtgggctatccgttactttgtttctgaaggatttgaattcttctgcgcccagtcgttcagcaaaaacttcggactttataatgaacgggtgggaaacctgaccgtagtgggaaaggagcccgaatcgattctgcaggtcctgtctcagatggaaaaaattgtaagaattacctggtccaaccccccagcccaaggcgcccgtatcgtagccagcactctctctaatcccgagcttttcgaagaatggactggtaatgtgaaaactatggctgatcgaattttgactatgaggtccgaattacgcgcgagattagaggccttgaagacgcccggaacctggaaccatataaccgaccaaatcggcatgttctcttttacaggactcaacccaaaacaggtcgagtatcttgtgaacgaaaagcacatctacctgctcccaagcgggagaattaacgtcagcggcctcaccaccaagaacctggattatgtggctacatccattcatgaggccgtcactaagatccagtag

SEQ ID NO: 124237 - DNA, 1242 bp, Artificial Sequence
  derived and/or modified sequence
atggccccaccttcagtgtttgctgaggtgcctcaggcgcagccggtgctggtattcaagctcactgcggattttagggaggaccctgatcctaggaaagtcaatctcggagtgggggcatacaggactgacgattgccacccgtgggtcctgcctgtggttaaaaaggtggaacagaaaatcgctaacgataattctctgaaccacgagtacctccccatccttggcctcgccgagtttagatcttgtgccagccggctagccctcggtgatgacagtccagctttaaaggaaaaacgagtcggaggggtccagtctctcggtggcactggagccttgagaatcggagctgacttcctggccagatggtacaatggtacgaataacaagaatacacctgtgtacgtgtcatcacctacctgggagaatcacaatgccgtcttctccgccgctggctttaaagatatccgctcctatagatactgggacgctgaaaagcgtggcctggatctgcagggattcctgaatgacttagaaaatgcccctgaattttctattgtggtcctccatgcatgtgcccataaccccacgggaatcgatcccacccctgagcagtggaagcaaatcgcctctgtgatgaagcatcgcttcttgttcccgttcttcgatagcgcctaccagggatttgcatccggaaatctggaaagggacgcgtgggcgataaggtatttcgtgagcgaggggtttgaatttttttgcgcacaaagcttctccaagaacttcgggctgtataacgagagagttgggaatctgaccgtggttgggaaggaaccagagagcatccttcaggtactgagtcaaatggagaaaatcgttagaatcacatggtccaatcctcctgctcagggcgctagaatcgtggcgtccacattaagtaatcctgaactgttcgaagaatggaccgggaacgttaaaaccatggccgatcgcatcctcaccatgaggagtgagctcagggcacggctggaagcattgaagacgcccggaacatggaatcacatcaccgatcagatcgggatgttttctttcaccggactcaacccaaaacaggtcgaatacctcgtgaacgagaagcatatctacctgcttccttccggcagaatcaatgtctctgggctgacaacaaagaacttagactatgttgcgacatctatacatgaggctgtaacaaaaatccagtag

SEQ ID NO: 124238 - DNA, 1101 bp, Artificial Sequence
  derived and/or modified sequence
atggcgcctcctagtgtcttcgctgaggttccccaggctcaacccgtgctggtgtttaagcttacggcggactttcgcgaggatcctgatccaagaaaagtgaatcttggggttggtgcttacaggacagatgattctcctgcccttaaggagaagcgggtggggggagtgcaaagcctgggcggtaccggcgctcttcgcatcggggctgattttctggcacgctggtataatggcaccaacaataaaaacactcccgtttacgtaagctcccctacctgggagaatcacaacgctgtttttagcgccgcaggcttcaaggatattcgttcatatcgctactgggacgccgaaaagcgtggccttgatttgcaaggttttctgaacgatctcgaaaacgcaccagagttcagtatagtagttttacacgcctgcgcccacaatccaaccggaattgatccaacccccgagcagtggaagcagattgcgtctgtgatgaaacaccgattcctgttcccattcttcgactctgcctatcagggattcgcttctggaaacctggagagagatgcctgggccattaggtatttcgtaagtgaaggtttcgaatttttttgcgcccagtccttcagcaaaaactttggcctctacaatgagcgggtgggcaacctcaccgtggtgggtaaggaacccgaatctatactgcaggtgctgtcccagatggagaagattgtacgcatcacttggtctaacccacccgctcagggcgctcggattgtcgctagcacactcagtaacccggagctatttgaggagtggaccggtaatgtcaaaacaatggcggataggattctcactatgcgctctgagctgagagccaggctcgaagccctcaagaccccaggaacttggaaccatattactgaccagataggcatgttttcttttaccggcctaaatcccaaacaggtcgaatacctggttaatgaaaaacacatttaccttctcccatccggtaggattaatgtgtccggactgactaccaagaatctcgattacgtggcaacatcaattcatgaagcagttaccaagatccagtag

SEQ ID NO: 124239 - DNA, 1179 bp, Artificial Sequence
  derived and/or modified sequence
atgcaggtctggtccccctggaagggggcaatgtgtccacgaccacataaaccagcctatcgcactgacgactgtcatccatgggtgctgcccgtggttaagaaagtcgaacaaaagatcgctaatgataacagcctcaatcacgagtacttgccaatcctgggcttagctgagtttcgctcctgtgcgtcacgcctggccctgggagacgatagtccagcactcaaagaaaagcgcgtcggcggagtacagagcctcggcggaacaggcgcacttcggattggagccgacttcctcgccagatggtacaacggcaccaataataaaaacacgcctgtgtatgtgagcagcccgacgtgggagaatcataacgccgtgtttagcgcggcaggctttaaggacatccggagctataggtactgggacgctgaaaaaaggggcctcgacctgcaaggatttttgaatgatctcgaaaatgccccagagttctcgattgtcgtgctgcacgcatgtgcacataatcctaccggcattgaccccacacccgagcagtggaaacagatcgcttctgttatgaaacatcgctttctgtttcctttctttgactcagcctatcagggattcgcttcgggcaatctggagcgggacgcttgggctatccggtacttcgtttctgagggcttcgagttcttctgcgcccagtcgttctccaagaattttggcctgtataacgagagagtcgggaatctgaccgtcgtgggcaaggaaccagaaagcatcctccaggtgctctcgcagatggaaaaaatcgtcagaataacgtggagcaatcctcccgctcaaggcgcaagaatcgtagcgtccaccctgagcaatccagagctgttcgaggagtggacaggaaacgtgaaaactatggcagacagaatcctcacaatgcgatcggagctgcgcgctcgactcgaggccttgaagactccaggcacctggaatcacatcacagaccagattggtatgttctcctttaccggcctgaacccgaaacaggtagagtacctggtcaatgagaagcacatatacctgctgcctagtgggagaatcaatgtgtctggactgaccacaaaaaaccttgactacgtggctaccagcatccacgaggcagtgactaaaatccagtag

SEQ ID NO: 124240 - DNA, 1242 bp, Artificial Sequence
  derived and/or modified sequence
atggccccccccagcgtgttcgccgaggtgccccaggcccagcccgtgctggtgttcaagctgaccgccgacttcagagaggaccccgaccccagaaaggtgaacctgggcgtgggcgcctacagaaccgacgactgccacccctgggtgctgcccgtggtgaagaaggtggagcagaagatcgccaacgacaacagcctgaaccacgagtacctgcccatcctgggcctggccgagttcagaagctgcgccagcagactggccctgggcgacgacagccccgccctgaaggagaagagagtgggcggcgtgcagagcctgggcggcaccggcgccctgagaatcggcgccgacttcctggccagatggtacaacggcaccaacaacaagaacacccccgtgtacgtgagcagccccacctgggagaaccacaacgccgtgttcagcgccgccggcttcaaggacatcagaagctacagatactgggacgccgagaagagaggcctggacctgcagggcttcctgaacgacctggagaacgcccccgagttcagcatcgtggtgctgcacgcctgcgcccacaaccccaccggcatcgaccccacccccgagcagtggaagcagatcgccagcgtgatgaagcacagattcctgttccccttcttcgacagcgcctaccagggcttcgccagcggcaacctggagagagacgcctgggccatcagatacttcgtgagcgagggcttcgagttcttctgcgcccagagcttcagcaagaacttcggcctgtacaacgagagagtgggcaacctgaccgtggtgggcaaggagcccgagagcatcctgcaggtgctgagccagatggagaagatcgtgagaatcacctggagcaacccccccgcccagggcgccagaatcgtggccagcaccctgagcaaccccgagctgttcgaggagtggaccggcaacgtgaagaccatggccgacagaatcctgaccatgagaagcgagctgagagccagactggaggccctgaagacccccggcacctggaaccacatcaccgaccagatcggcatgttcagcttcaccggcctgaaccccaagcaggtggagtacctggtgaacgagaagcacatctacctgctgcccagcggcagaatcaacgtgagcggcctgaccaccaagaacctggactacgtggccaccagcatccacgaggccgtgaccaagatccagtag

SEQ ID NO: 124241 - DNA, 1101 bp, Artificial Sequence
  derived and/or modified sequence
atggccccccccagcgtgttcgccgaggtgccccaggcccagcccgtgctggtgttcaagctgaccgccgacttcagagaggaccccgaccccagaaaggtgaacctgggcgtgggcgcctacagaaccgacgacagccccgccctgaaggagaagagagtgggcggcgtgcagagcctgggcggcaccggcgccctgagaatcggcgccgacttcctggccagatggtacaacggcaccaacaacaagaacacccccgtgtacgtgagcagccccacctgggagaaccacaacgccgtgttcagcgccgccggcttcaaggacatcagaagctacagatactgggacgccgagaagagaggcctggacctgcagggcttcctgaacgacctggagaacgcccccgagttcagcatcgtggtgctgcacgcctgcgcccacaaccccaccggcatcgaccccacccccgagcagtggaagcagatcgccagcgtgatgaagcacagattcctgttccccttcttcgacagcgcctaccagggcttcgccagcggcaacctggagagagacgcctgggccatcagatacttcgtgagcgagggcttcgagttcttctgcgcccagagcttcagcaagaacttcggcctgtacaacgagagagtgggcaacctgaccgtggtgggcaaggagcccgagagcatcctgcaggtgctgagccagatggagaagatcgtgagaatcacctggagcaacccccccgcccagggcgccagaatcgtggccagcaccctgagcaaccccgagctgttcgaggagtggaccggcaacgtgaagaccatggccgacagaatcctgaccatgagaagcgagctgagagccagactggaggccctgaagacccccggcacctggaaccacatcaccgaccagatcggcatgttcagcttcaccggcctgaaccccaagcaggtggagtacctggtgaacgagaagcacatctacctgctgcccagcggcagaatcaacgtgagcggcctgaccaccaagaacctggactacgtggccaccagcatccacgaggccgtgaccaagatccagtag

SEQ ID NO: 124242 - DNA, 1179 bp, Artificial Sequence
  derived and/or modified sequence
atgcaggtgtggagcccctggaagggcgccatgtgccccagaccccacaagcccgcctacagaaccgacgactgccacccctgggtgctgcccgtggtgaagaaggtggagcagaagatcgccaacgacaacagcctgaaccacgagtacctgcccatcctgggcctggccgagttcagaagctgcgccagcagactggccctgggcgacgacagccccgccctgaaggagaagagagtgggcggcgtgcagagcctgggcggcaccggcgccctgagaatcggcgccgacttcctggccagatggtacaacggcaccaacaacaagaacacccccgtgtacgtgagcagccccacctgggagaaccacaacgccgtgttcagcgccgccggcttcaaggacatcagaagctacagatactgggacgccgagaagagaggcctggacctgcagggcttcctgaacgacctggagaacgcccccgagttcagcatcgtggtgctgcacgcctgcgcccacaaccccaccggcatcgaccccacccccgagcagtggaagcagatcgccagcgtgatgaagcacagattcctgttccccttcttcgacagcgcctaccagggcttcgccagcggcaacctggagagagacgcctgggccatcagatacttcgtgagcgagggcttcgagttcttctgcgcccagagcttcagcaagaacttcggcctgtacaacgagagagtgggcaacctgaccgtggtgggcaaggagcccgagagcatcctgcaggtgctgagccagatggagaagatcgtgagaatcacctggagcaacccccccgcccagggcgccagaatcgtggccagcaccctgagcaaccccgagctgttcgaggagtggaccggcaacgtgaagaccatggccgacagaatcctgaccatgagaagcgagctgagagccagactggaggccctgaagacccccggcacctggaaccacatcaccgaccagatcggcatgttcagcttcaccggcctgaaccccaagcaggtggagtacctggtgaacgagaagcacatctacctgctgcccagcggcagaatcaacgtgagcggcctgaccaccaagaacctggactacgtggccaccagcatccacgaggccgtgaccaagatccagtag

SEQ ID NO: 124243 - protein, 430 aa, Artificial Sequence
  derived and/or modified sequence
MALLHSGRVLPGIAAAFHPGLAAAASARASSWWTHVEMGPPDPILGVTEAFKRDTNSKKMNLGVGAYRDDNGKPYVLPSVRKAEAQIAAKNLDKEYLPIGGLAEFCKASAELALGENSEVLKSGRFVTVQTISGTGALRIGASFLQRFFKFSRDVFLPKPTWGNHTPIFRDAGMQLQGYRYYDPKTCGFDFTGAVEDISKIPEQSVLLLHACAHNPTGVDPRPEQWKEIATVVKKRNLFAFFDMAYQGFASGDGDKDAWAVRHFIEQGINVCLCQSYAKNMGLYGERVGAFTMVCKDADEAKRVESQLKILIRPMYSNPPLNGARIAAAILNTPDLRKQWLQEVKVMADRIIGMRTQLVSNLKKEGSTHNWQHITDQIGMFCFTGLKPEQVERLIKEFSIYMTKDGRISVAGVTSSNVGYLAHAIHQVTK

SEQ ID NO: 124244 - protein, 189 aa, Artificial Sequence
  derived and/or modified sequence
MALLHSGRVLPGIAAAFHPGLAAAASARASSWWTHVEMGPPDPILGVTEAFKRDTNSKKMNLGVGAYRDDNGKPYVLPSVRKAEAQIAAKNLDKEYLPIGGLAEFCKDFLSSAEMSFCPNQPGETTHPSSGMLACSYKVIGIMTPRLAVLTSQALWRIFQKYQSRVFFFCMPAPTIPREWTRVRNSGRK

SEQ ID NO: 124245 - DNA, 1293 bp, Artificial Sequence
  derived and/or modified sequence
atggctctcctgcacagtggacgcgtgcttccagggatagcagccgcgttccatccaggcctggcagccgcggcctctgccagagcctctagttggtggactcacgtcgagatgggccctccagatccaatactgggcgtcaccgaggcctttaaacgagatacaaattcgaagaagatgaacctgggggttggggcatacagagatgataatggcaaaccatacgttctccccagtgtccgtaaggcagaggcccagatcgccgcgaaaaacttagataaagagtacctgccaatcggagggttggccgagttctgtaaggccagcgccgagttagcgttgggcgaaaactcagaagtacttaaatccggccggtttgtgactgtccagaccatctccgggactggcgctctgcgtataggggcttccttcctgcagaggttttttaagtttagccgtgatgtgttcctgccgaaacctacatgggggaaccatacgcccattttcagggatgccggcatgcagctgcagggttacagatactacgaccctaaaacttgtgggttcgattttaccggagctgtcgaggacatcagtaaaatcccggagcagtctgtacttctcctgcatgcatgtgcacacaatcccactggagtcgacccaaggcctgagcagtggaaggagatcgcaaccgttgtcaaaaaacgaaatctgtttgcattctttgacatggcgtaccagggcttcgcctccggcgacggggacaaagatgcctgggctgtgcgccacttcattgagcagggaattaatgtctgtctgtgtcagagctacgccaaaaatatgggactgtatggggagagagtgggagcttttactatggtgtgtaaagacgctgatgaggcaaaacgggtggagtcccaactgaagattcttatccggcccatgtactctaacccgccattgaatggcgctcgtatcgccgccgcgatcctgaataccccagatttgaggaaacagtggctccaagaagtgaaagtcatggcagaccgaattatcgggatgcgcacccagctcgtgtcaaaccttaagaaagagggctctacccacaattggcagcatattactgatcaaattgggatgttctgtttcacgggactgaaaccagaacaggtggagagactgataaaggaattcagcatttatatgaccaaggatgggcgtatctccgtcgcaggtgtgacaagctccaatgttgggtacctggcccacgccattcatcaggtgaccaagtag

SEQ ID NO: 124246 - DNA, 570 bp, Artificial Sequence
  derived and/or modified sequence
atggcgctcctgcacagtggacgggtgctccccggaatcgccgcagccttccatccagggcttgccgccgctgcctcggccagggcctcctcctggtggacccatgtggagatgggaccccctgaccctattctgggagtcactgaagccttcaagcgcgacacaaactctaaaaagatgaacctgggggtgggggcatatcgggacgataacggcaagccatacgtgctgcccagtgtacgaaaagccgaagctcagatcgccgctaagaatttggataaggagtatctcccgataggtggccttgcagaattctgtaaggacttcttgagctctgctgaaatgtcattttgccctaatcagcctggtgagaccacacatcctagttctggtatgctcgcttgtagttataaagtaatcggcatcatgacgccccgtttggctgttctcactagccaggcactgtggaggatcttccagaagtatcagagtcgggtcttcttcttctgtatgccagctcccaccattccaagggaatggactcgggtgagaaattctggtcgcaagtag

SEQ ID NO: 124247 - DNA, 2385 bp, Artificial Sequence
  derived and/or modified sequence
gctcgccctctgctccgtcctgcggctgcccactgccctcctacggtccaccatggccctgctgcactccggccgcgtcctccccgggatcgccgccgccttccacccgggcctcgccgccgcggcctctgccagagccagctcctggtggacccatgtggaaatgggacctccagatcccattctgggagtcactgaagcctttaagagggacaccaatagcaaaaagatgaatctgggagttggtgcctaccgggatgataatggaaagccttacgttctgcctagcgtccgcaaggcagaggcccagattgccgcaaaaaatttggacaaggaatacctgcccattgggggactggctgaattttgcaaggcatctgcagaactagccctgggtgagaacagcgaagtcttgaagagtggccggtttgtcactgtgcagaccatttctggaactggagccttaaggatcggagccagttttctgcaaagattttttaagttcagccgagatgtctttctgcccaaaccaacctggggaaaccacacacccatcttcagggatgctggcatgcagctacaaggttatcggtattatgaccccaagacttgcggttttgacttcacaggcgctgtggaggatatttcaaaaataccagagcagagtgttcttcttctgcatgcctgcgcccacaatcccacgggagtggacccgcgtccggaacagtggaaggaaatagcaacagtggtgaagaaaaggaatctctttgcgttctttgacatggcctaccaaggctttgccagtggtgatggtgataaggatgcctgggctgtgcgccacttcatcgaacagggcattaatgtttgcctctgccaatcatatgccaagaacatgggcttatatggtgagcgtgtaggagccttcactatggtctgcaaagatgcggatgaagccaaaagggtagagtcacagttgaagatcttgatccgtcccatgtattccaaccctcccctcaatggggcccggattgctgctgccattctgaacaccccagatttgcgaaaacaatggctgcaagaagtgaaagtcatggctgaccgcatcattggcatgcggactcaactggtctccaacctcaagaaggagggttccacccacaattggcaacacatcaccgaccaaattggcatgttctgtttcacagggctaaagcctgaacaggtggagcggctgatcaaggagttctccatctacatgacaaaagatggccgcatctctgtggcaggggtcacctccagcaacgtgggctaccttgcccatgccattcaccaggtcaccaagtaatgtccctggtgcgaggaaacagagacaacctttctgtcttcagcctctgctattgagagcttcacacagacaatgagagagggtggatggtggtgagtggatcatttctttcagccacagtgtgtaacactcagcatttgaatgtttctcagaaaagaacatgtagtgacacagggcagaggcatccatggctggcgtctggaatattaaaccaaactctccccggtccttttttctccaacttttctcaaagagtttacatgtgcaagaaagtcatcgcaccaaaaaacctgtcaattatgccattgcaatatttcagaagctttaactgaagtgtcaggttcctcgtgagaaacagcacacgttagaggctttgagagaaggcctagttctgtcatgagtagtcggcctcgtgtctgtcctcccatcttggaacaaccttatcaacaggccgcactgcagaaatgatgttttatgaaaaccaatgaggctgctgccactccagcaagggaaataatgcagtttcctgtcttatttaagaaaaagagaaggctctcttttctcccttgtcattgccgttcttttccttacacgcaaagattttttaactattgcagattttcatcccattctactgcttgattgaccatcaactccatcctatcgagatttatttaagaatgaagaacataattttctgctgatgctgtaccctcacccttttcagcaaagaatagtggagagtaggaaactgtactttatctcggcatcctcttgaatgatagtgcaagtttctccagttgggatgttgtctctgcccggttggacctcctccctttgttgaatgtggtgtgcagcctctcatctcacactgtgagtccagcggcgcagggtggtaccaggaaagaggatattctaggctttgcgtgctgctagctgggttcaggcttcacccactggaaagaaccaccatctgctctaaccatgtagacttattgcggcctggtttctctgttacaataaaattactgtagacccaa

SEQ ID NO: 124248 - DNA, 1293 bp, Artificial Sequence
  derived and/or modified sequence
atggccctgctgcacagcggccgggtgctgcccggcattgctgctgccttccaccctggcctggccgccgccgccagcgcccgggccagctcctggtggacccacgtggagatgggccccccagaccccatcctgggcgtgacagaggccttcaagagggacaccaacagcaagaagatgaacctgggcgtgggcgcctacagagatgacaatggcaagccctacgtgctgcccagcgtgaggaaggccgaggcccagattgctgccaagaacctggacaaggagtacctgcccatcggcggcctggccgagttctgcaaggccagcgctgagctggccctgggggagaacagcgaggtgctgaagagcggccgctttgtgacagtgcagaccatctctggaactggagccctgcgcatcggggccagcttcctgcagcgcttcttcaagttcagcagagatgtgttcctgcccaagcccacctggggcaaccacacccccatcttcagagatgctggcatgcagctgcagggctaccgctactatgaccccaagacctgtggctttgacttcaccggggctgtggaggacatcagcaagatccctgagcagagcgtgctgctgctgcacgcctgtgcccacaaccccactggagtggaccccaggcctgagcagtggaaggagatcgccaccgtggtgaagaagaggaacctgtttgccttctttgacatggcctaccagggctttgccagcggagatggagacaaggatgcctgggccgtgcgccacttcatcgagcagggcatcaacgtgtgcctgtgccagagctatgccaagaacatgggcctgtatggagagcgggtgggcgccttcaccatggtgtgcaaggatgctgatgaggccaagagggtggagagccagctgaagatcctgatccggcccatgtacagcaacccccccctgaatggagccagaattgctgctgccatcctgaacaccccagacctgaggaagcagtggctgcaggaggtgaaggtgatggctgaccgcatcatcggcatgaggacccagctggtgagcaacctgaagaaggagggcagcacccacaactggcagcacatcacagaccagatcggcatgttctgcttcaccggcctgaagccagagcaggtggagcggctcatcaaggagttcagcatctacatgaccaaggatggccgcatctctgtggccggcgtgaccagcagcaatgtgggctacctggcccacgccatccaccaggtgaccaagtag

SEQ ID NO: 124249 - DNA, 570 bp, Artificial Sequence
  derived and/or modified sequence
atggccctgctgcacagcggccgggtgctgcccggcattgctgctgccttccaccctggcctggccgccgccgccagcgcccgggccagctcctggtggacccacgtggagatgggccccccagaccccatcctgggcgtgacagaggccttcaagagggacaccaacagcaagaagatgaacctgggcgtgggcgcctacagagatgacaatggcaagccctacgtgctgcccagcgtgaggaaggccgaggcccagattgctgccaagaacctggacaaggagtacctgcccatcggcggcctggccgagttctgcaaggacttcctgagcagcgctgagatgtccttctgccccaaccagcccggggagaccacccaccccagcagcggcatgctggcctgcagctacaaggtgattggcatcatgaccccccggctggccgtgctgaccagccaggccctgtggaggatcttccagaagtaccagagcagggtcttcttcttctgcatgcctgcccccaccatcccccgggagtggaccagggtgaggaacagcggcaggaagtag

SEQ ID NO: 124250 - DNA, 1293 bp, Artificial Sequence
  derived and/or modified sequence
atggccctgctgcacagcggccgggtgctgcccggcatcgccgccgccttccatccagggctagctgccgccgctagtgccagagctagttcgtggtggacacacgtggaaatgggtccacccgatcccattctcggcgttactgaggcattcaaaagagacacgaacagcaagaagatgaacctaggggtcggcgcctatagagatgacaatggaaaaccttacgtactcccatctgttaggaaggctgaagcccagattgccgccaaaaacctggacaaggaatacctgcccatagggggcctcgctgaattttgcaaggcctccgcggagctcgcattgggcgagaattctgaagtcctcaagtctggccgatttgttactgttcagaccattagtgggaccggcgccctgcgaataggcgcctccttcttacagagattttttaagtttagtagagacgttttcctcccgaagcccacatggggtaatcatacccccattttcagggatgctggaatgcagttgcaagggtatcggtactacgaccccaagacctgcgggtttgattttactggggccgtggaggatatcagcaagatacctgagcagagcgtcctgcttctgcacgcatgtgcacataatccaacaggcgtggaccctcgaccagagcaatggaaggagatcgctaccgtcgtcaaaaaacggaatctgttcgcattttttgatatggcataccaagggtttgcatcaggtgacggcgataaggatgcatgggctgtccggcacttcatcgagcaggggatcaatgtgtgtctgtgccagtcctatgcaaaaaacatgggcctctatggtgagcgcgttggcgcgttcaccatggtttgcaaagatgccgacgaggccaagcgcgtcgaatcgcagctcaagattcttattagacccatgtactcgaacccccctctcaatggagcccgcattgccgccgctattcttaatactcctgaccttcgcaagcagtggctgcaggaagtcaaagttatggctgacaggattattgggatgagaacccagttggtatccaacctcaaaaaagaaggctctactcacaattggcagcacatcacggaccagatcggaatgttctgttttaccgggctgaagcccgagcaggtcgaaagactgatcaaagagttcagcatttacatgaccaaggatggcagaatcagtgttgccggagtgacttccagcaatgtggggtatctcgcccatgctatccaccaagtgacgaaatag

SEQ ID NO: 124251 - DNA, 570 bp, Artificial Sequence
  derived and/or modified sequence
atggccctgctgcacagcggccgggtgctgcccggcatcgccgccgcgtttcaccccgggctcgcagcggcagcctcagccagagcctcatcctggtggacgcacgttgagatgggcccacccgatcctattctaggggtgacagaggctttcaaacgggataccaattccaagaagatgaatctcggagtaggtgcctatcgggatgataatggcaaaccttatgtgctcccatccgtgcggaaggccgaagctcaaattgccgccaaaaacctagacaaggagtacttgcctataggcggattagctgagttttgtaaggattttctgagctcagctgagatgtctttctgccccaatcagcccggcgagacaacacacccatcaagcggcatgctcgcgtgtagttataaggttatcggaatcatgaccccacggctggccgtgctcacatcccaggccttatggaggatcttccagaagtaccagagccgagtgttctttttttgtatgcctgcccccaccattccacgtgagtggacacgggtgcgcaattcagggagaaagtag

SEQ ID NO: 124252 - DNA, 1293 bp, Artificial Sequence
  derived and/or modified sequence
atggctctactacactcgggacgggttttgcccggtatcgcagctgccttccacccaggactcgctgcagctgcttccgctcgggcttcttcctggtggacccacgtcgagatggggccacccgacccaatcctgggagttacagaagctttcaaaagagatactaatagcaaaaaaatgaaccttggggtaggcgcttatcgagatgacaatggcaagccctatgttttgccaagcgtcagaaaggccgaggctcagattgccgctaagaatctggacaaggaatacttgccgattggaggacttgccgagttctgtaaagcctctgccgagctggcgctgggggaaaacagtgaggttctaaaatcgggcaggttcgtgacagttcagaccatttcggggaccggtgcactgcgtatcggggctagcttcctgcagcggtttttcaagtttagccgcgacgttttcctgccaaaacccacatgggggaatcacacacccatttttcgagatgccggtatgcaactgcagggctacaggtactacgacccgaaaacatgcgggtttgatttcactggagctgtggaggatatttcaaaaattccggaacagagtgtcctcctcctacatgcctgcgctcataacccaacaggtgtggacccccgacccgaacagtggaaagagatcgctactgtggtgaagaaaaggaacctcttcgccttttttgatatggcctaccaagggtttgcctccggggacggcgacaaagatgcttgggccgtcaggcacttcatagaacaaggtatcaatgtgtgtctgtgtcagtcttatgctaagaacatggggttgtatggcgaacgagtaggcgctttcactatggtttgcaaggacgccgatgaggccaagcgtgtcgagtctcagttaaaaatactgatccggccaatgtattcgaaccctcccttgaacggggcacgaatagctgcggctatactgaacactccggatctgcgaaaacaatggctccaggaggttaaggtaatggccgaccgaatcatcgggatgcggactcaactcgtaagtaatttaaagaaagaaggttctactcataattggcagcacatcacggaccagattgggatgttctgctttaccggccttaaacctgagcaggtagaacgcctgattaaagaattttcgatctatatgactaaagatggccgaatctccgtggctggagtcacaagttccaatgtcgggtacctggcccacgctatccatcaggttactaaatag

SEQ ID NO: 124253 - DNA, 570 bp, Artificial Sequence
  derived and/or modified sequence
atggcgctcctgcacagcgggcgagtgctgcctggtatcgcggctgctttccacccgggactcgccgctgccgcaagtgctagggcctcctcctggtggacgcacgtagagatgggccctcccgacccaatactcggggtcacggaagcctttaagagggatacaaattctaagaaaatgaatctaggagttggagcatatagagatgataacggcaaaccatacgtgttgcccagcgtcaggaaggcagaagcacagatcgcggctaagaacttggacaaggaatatctgccaattgggggtttggccgagttctgcaaggacttcctctccagtgcagagatgagtttctgtcccaaccagcccggtgagacaacccacccatcctctggcatgctggcctgctcctacaaagtcatcggaattatgacaccgaggctggccgtgctgactagtcaggccctttggaggattttccaaaagtatcaatcacgcgtctttttcttttgtatgccagcccctactattcctcgcgagtggacgagagttaggaatagcggccgaaagtag

SEQ ID NO: 124254 - DNA, 1293 bp, Artificial Sequence
  derived and/or modified sequence
atggccctgctgcacagcggcagagtgctgcccggcatcgccgccgccttccaccccggcctggccgccgccgccagcgccagagccagcagctggtggacccacgtggagatgggcccccccgaccccatcctgggcgtgaccgaggccttcaagagagacaccaacagcaagaagatgaacctgggcgtgggcgcctacagagacgacaacggcaagccctacgtgctgcccagcgtgagaaaggccgaggcccagatcgccgccaagaacctggacaaggagtacctgcccatcggcggcctggccgagttctgcaaggccagcgccgagctggccctgggcgagaacagcgaggtgctgaagagcggcagattcgtgaccgtgcagaccatcagcggcaccggcgccctgagaatcggcgccagcttcctgcagagattcttcaagttcagcagagacgtgttcctgcccaagcccacctggggcaaccacacccccatcttcagagacgccggcatgcagctgcagggctacagatactacgaccccaagacctgcggcttcgacttcaccggcgccgtggaggacatcagcaagatccccgagcagagcgtgctgctgctgcacgcctgcgcccacaaccccaccggcgtggaccccagacccgagcagtggaaggagatcgccaccgtggtgaagaagagaaacctgttcgccttcttcgacatggcctaccagggcttcgccagcggcgacggcgacaaggacgcctgggccgtgagacacttcatcgagcagggcatcaacgtgtgcctgtgccagagctacgccaagaacatgggcctgtacggcgagagagtgggcgccttcaccatggtgtgcaaggacgccgacgaggccaagagagtggagagccagctgaagatcctgatcagacccatgtacagcaacccccccctgaacggcgccagaatcgccgccgccatcctgaacacccccgacctgagaaagcagtggctgcaggaggtgaaggtgatggccgacagaatcatcggcatgagaacccagctggtgagcaacctgaagaaggagggcagcacccacaactggcagcacatcaccgaccagatcggcatgttctgcttcaccggcctgaagcccgagcaggtggagagactgatcaaggagttcagcatctacatgaccaaggacggcagaatcagcgtggccggcgtgaccagcagcaacgtgggctacctggcccacgccatccaccaggtgaccaagtag

SEQ ID NO: 124255 - DNA, 570 bp, Artificial Sequence
  derived and/or modified sequence
atggccctgctgcacagcggcagagtgctgcccggcatcgccgccgccttccaccccggcctggccgccgccgccagcgccagagccagcagctggtggacccacgtggagatgggcccccccgaccccatcctgggcgtgaccgaggccttcaagagagacaccaacagcaagaagatgaacctgggcgtgggcgcctacagagacgacaacggcaagccctacgtgctgcccagcgtgagaaaggccgaggcccagatcgccgccaagaacctggacaaggagtacctgcccatcggcggcctggccgagttctgcaaggacttcctgagcagcgccgagatgagcttctgccccaaccagcccggcgagaccacccaccccagcagcggcatgctggcctgcagctacaaggtgatcggcatcatgacccccagactggccgtgctgaccagccaggccctgtggagaatcttccagaagtaccagagcagagtgttcttcttctgcatgcccgcccccaccatccccagagagtggaccagagtgagaaacagcggcagaaagtag

SEQ ID NO: 124256 - protein, 558 aa, Artificial Sequence
  derived and/or modified sequence
MELRARGWWLLCAAAALVACARGDPASKSRSCGEVRQIYGAKGFSLSDVPQAEISGEHLRICPQGYTCCTSEMEENLANRSHAELETALRDSSRVLQAMLATQLRSFDDHFQHLLNDSERTLQATFPGAFGELYTQNARAFRDLYSELRLYYRGANLHLEETLAEFWARLLERLFKQLHPQLLLPDDYLDCLGKQAEALRPFGEAPRELRLRATRAFVAARSFVQGLGVASDVVRKVAQVPLGPECSRAVMKLVYCAHCLGVPGARPCPDYCRNVLKGCLANQADLDAEWRNLLDSMVLITDKFWGTSGVESVIGSVHTWLAEAINALQDNRDTLTAKVIQGCGNPKVNPQGPGPEEKRRRGKLAPRERPPSGTLEKLVSEAKAQLRDVQDFWISLPGTLCSEKMALSTASDDRCWNGMARGRYLPEVMGDGLANQINNPEVEVDITKPDMTIRQQIMQLKIMTNRLRSAYNGNDVDFQDASDDGSGSGSGDGCLDDLCSRKVSRKSSSSRTPLTHALPGLSEQEGQKTSAASCPQPPTFLLPLLLFLALTVARPRWR

SEQ ID NO: 124257 - DNA, 1677 bp, Artificial Sequence
  derived and/or modified sequence
atggaacttagggcgagaggctggtggctgctgtgtgcagctgctgccctggtcgcttgcgcccgaggtgacccagcttcaaagtctcggagctgtggagaggttagacagatttacggggctaaaggtttctccctgagcgatgtcccacaggcggagattagcggtgaacatctgaggatctgtcctcagggctacacatgttgcactagtgagatggaagagaatttagcgaaccgtagtcatgcagagcttgagactgcattacgcgattcctctagagtactgcaggctatgctcgcaacacaactgcggagctttgatgaccactttcagcacctcctgaacgacagcgaacgtaccctgcaggcaacatttccaggagcatttggtgagctgtacacccagaacgcaagagcattccgcgatctgtattcagagctcagactgtactaccggggcgctaatttacatctagaggagaccctggccgaattctgggcccggctgctcgagcgactgttcaaacagctgcacccccagcttctgctgcctgacgactaccttgactgccttggtaagcaggctgaggctctcaggccgttcggggaagctccccgggagcttcgcctcagggcgacccgggcattcgtggccgcccggagctttgtgcaggggctgggcgtggcatcagacgtggttcggaaagtggcacaggtccctcttggcccggaatgctctcgcgccgtaatgaaactcgtttattgcgctcactgtctgggagttcccggcgccaggccctgtccagactactgtcggaatgtcttaaagggatgtcttgccaaccaggccgaccttgatgctgaatggagaaacttgctagacagcatggttctgatcacagacaagttttggggtaccagtggcgtggagtccgtgatcggtagcgtgcacacctggctcgctgaggccatcaatgctctgcaggacaatagggacaccctcaccgcgaaagtcatccaggggtgtggcaatcctaaggtcaacccgcaggggcccggccccgaagagaagcgcaggcggggaaagttggccccaagagagcgccctccatccgggactctcgagaagctcgtgagcgaggcaaaggcacagctgagggatgttcaggatttttggatctctttgcccgggacactttgctccgagaagatggctctgtctactgcttctgatgacagatgttggaacggaatggctcggggtaggtacctgcctgaggtcatgggagacggcctcgccaaccaaattaataacccagaggtggaggttgacataactaagccggatatgaccatccgtcagcagattatgcaattgaagattatgactaatagactccgcagcgcctacaacggaaacgacgtagacttccaggatgcttcagatgatggctcagggagcgggtccggcgatggttgccttgacgacctctgtagtcgcaaggtaagccgcaagagtagctcttctcgtactccacttacacatgcattacctggcctgtccgagcaggaaggccaaaaaacaagtgcggcctcctgtccacagcctccaactttcctgcttcccctcctgctgttcctcgctctcactgttgcccgtcccaggtggcggtag

SEQ ID NO: 124258 - DNA, 3711 bp, Artificial Sequence
  derived and/or modified sequence
gggactgcgctagcccgccgcgctctgggctgcccgagcgagcgttcggacctcgcaccccgcgcgccccgcgccgccgccgccgccggcttttgttgtctccgcctcctcggccgccgccgcctctggaccgcgagccgcgcgcgccgggaccttggctctgcccttcgcgggcgggaactgcgcaggacccggccaggatccgagagaggcgcgggcgggtggccgggggcgccgccggccccgccatggagctccgggcccgaggctggtggctgctatgtgcggccgcagcgctggtcgcctgcgcccgcggggacccggccagcaagagccggagctgcggcgaggtccgccagatctacggagccaagggcttcagcctgagcgacgtgccccaggcggagatctcgggtgagcacctgcggatctgtccccagggctacacctgctgcaccagcgagatggaggagaacctggccaaccgcagccatgccgagctggagaccgcgctccgggacagcagccgcgtcctgcaggccatgcttgccacccagctgcgcagcttcgatgaccacttccagcacctgctgaacgactcggagcggacgctgcaggccaccttccccggcgccttcggagagctgtacacgcagaacgcgagggccttccgggacctgtactcagagctgcgcctgtactaccgcggtgccaacctgcacctggaggagacgctggccgagttctgggcccgcctgctcgagcgcctcttcaagcagctgcacccccagctgctgctgcctgatgactacctggactgcctgggcaagcaggccgaggcgctgcggcccttcggggaggccccgagagagctgcgcctgcgggccacccgtgccttcgtggctgctcgctcctttgtgcagggcctgggcgtggccagcgacgtggtccggaaagtggctcaggtccccctgggcccggagtgctcgagagctgtcatgaagctggtctactgtgctcactgcctgggagtccccggcgccaggccctgccctgactattgccgaaatgtgctcaagggctgccttgccaaccaggccgacctggacgccgagtggaggaacctcctggactccatggtgctcatcaccgacaagttctggggtacatcgggtgtggagagtgtcatcggcagcgtgcacacgtggctggcggaggccatcaacgccctccaggacaacagggacacgctcacggccaaggtcatccagggctgcgggaaccccaaggtcaacccccagggccccgggcctgaggagaagcggcgccggggcaagctggccccgcgggagaggccaccttcaggcacgctggagaagctggtctccgaagccaaggcccagctccgcgacgtccaggacttctggatcagcctcccagggacactgtgcagtgagaagatggccctgagcactgccagtgatgaccgctgctggaacgggatggccagaggccggtacctccccgaggtcatgggtgacggcctggccaaccagatcaacaaccccgaggtggaggtggacatcaccaagccggacatgaccatccggcagcagatcatgcagctgaagatcatgaccaaccggctgcgcagcgcctacaacggcaacgacgtggacttccaggacgccagtgacgacggcagcggctcgggcagcggtgatggctgtctggatgacctctgcagccggaaggtcagcaggaagagctccagctcccggacgcccttgacccatgccctcccaggcctgtcagagcaggaaggacagaagacctcggctgccagctgcccccagcccccgaccttcctcctgcccctcctcctcttcctggcccttacagtagccaggccccggtggcggtaactgccccaaggccccagggacagaggccaaggactgactttgccaaaaatacaacacagacgatatttaattcacctcagcctggagaggcctggggtgggacagggagggccggcggctctgagcaggggcaggcgcagaggtcccagccccaggcctggcctcgcctgcctttctgccttttaattttgtatgaggtcctcaggtcagctgggagccagtgtgcccaaaagccatgtatttcagggacctcaggggcacctccggctgcctagccctccccccagctccctgcaccgccgcagaagcagcccctcgaggcctacagaggaggcctcaaagcaacccgctggagcccacagcgagcctgtgccttcctccccgcctcctcccactgggactcccagcagagcccaccagccagccctggcccaccccccagcctccagagaagccccgcacgggctgtctgggtgtccgccatccagggtctggcagagcctctgagatgatgcatgatgccctcccctcagcgcaggctgcagagcccggccccacctccctgcgcccttgaggggccccagcgtctgcagggtgacgcctgagacagcaccactgctgaggagtctgaggactgtcctcccacagacctgcagtgaggggccctccatgcgcagatgaggggccactgacccacctgcgcttctgctggaggaggggaagctgggcccaaaggcccagggaggcagcgtgggctctgccaatgtgggctgcccctcgcacacagggctcacagggcaggccttgctggggtccagggctgttggaggaccccgagggctgaggagcagccaggacccgcctgctcccatcctcacccagatcaggaaccagggcctccctgttcacggtgacacaggtcagggctcagagtgaccctcagctgtcacctgctcacagggatgctggtggctggtgagaccccgcactgcagacgggaatgcctaggtcccttcccgacccagccagctgcagggcacggggacctggatagttaagggcttttccaaacatgcatccatttactgacacttcctgtccttgttcatggagagctgttcgctcctcccagatggcttcggagggccgcagggcccaccttggaccctggtgacctcctgtcactcactgaggccatcagggccctgccccaggcctggacgggccctccttccctcctgtgccccagctgccaggcggccctggggaggggtggtgtggtgttgggaaggggtcctgcagggggaggaggacttggagggtctgggggcagctgtcctgaaccgactgaccctgaggaggccgcttagtgctgctttgcttttcatcaccgtcccgcacagtggacggaggtccccggttgctggtcaggtccccatggcttgttctctggaacctgactttagatgttttgggatcaggagcccccaacacaggcaagtccaccccataataaccctgccagtgccagggtgggctggggactctggcacagtgatgccgggcgccaggacagcagcactcccgctgcacacagacggcctaggggtggcgctcagaccccaccctacgctcatctctggaaggggcagccctgagtggtcactggtcagggcagtggccaagcctgctgtgtccttcctccacaaggtccccccaccgctcagtgtcagcgggtgacgtgtgttcttttgagtccttgtatgaataaaaggctggaaaccta

SEQ ID NO: 124259 - DNA, 1677 bp, Artificial Sequence
  derived and/or modified sequence
atggagctgcgggcccggggctggtggctgctgtgtgccgctgctgccctggtggcctgtgcccggggggaccctgccagcaagagccgcagctgtggggaggtgcggcagatctatggagccaagggcttcagcctgagtgatgtgccccaggccgagatctctggagagcacctgcgcatctgcccccagggctacacctgctgcaccagcgagatggaggagaacctggccaacagaagccatgctgagctggagacagccctgcgggacagcagccgggtgctgcaggccatgctggccacccagctgcggagctttgatgaccacttccagcacctgctgaatgacagcgagaggaccctgcaggccaccttccctggggccttcggggagctgtacacccagaatgcccgggccttccgggacctgtacagcgagctgcggctgtactacagaggagccaacctgcacctggaggagaccctggccgagttctgggcccggctgctggagcggctcttcaagcagctgcacccccagctgctgctgcctgatgactacctggactgcctgggcaagcaggccgaggccctgcggccctttggagaggccccccgggagctgcggctgcgggccacccgggcctttgtggccgcccggagctttgtgcagggcctgggcgtggccagtgatgtggtgaggaaggtggcccaggtgcccctgggcccagaatgttccagagctgtgatgaagctggtgtactgtgcccactgcctgggcgtgcctggggcccggccctgcccagactactgcagaaatgtgctgaagggctgcctggccaaccaggccgacctggatgctgagtggaggaacctgctggacagcatggtgctgatcacagacaagttctggggcaccagcggcgtggagagcgtcatcggctctgtgcacacctggctggccgaggccatcaatgccctgcaggacaacagagacaccctgacagccaaggtgatccagggctgcggcaaccccaaggtgaacccccagggccctggccctgaggagaagagaagaagaggcaagctggccccccgggagcggccccccagcggcaccctggagaagctggtgtctgaggccaaggcccagctgagagatgtgcaggacttctggatcagcctgcccggcaccctgtgcagcgagaagatggccctgagcacagccagtgatgaccgctgctggaatggcatggcccggggccgctacctgcctgaggtgatgggagatggcctggccaaccagatcaacaaccctgaggtggaggtggacatcaccaagccagacatgaccatccggcagcagatcatgcagctgaagatcatgaccaaccggctgcggagcgcctacaatggaaatgatgtggacttccaggatgccagtgatgatggcagcggcagcggcagcggagatggctgcctggatgacctgtgcagcaggaaggtgtccaggaagagcagcagcagcaggacccccctgacccacgccctgcccggcctgtctgagcaggagggccagaagaccagcgctgccagctgcccccagccccccaccttcctgctgcccctgctgctcttcctggccctgactgtggcccggccccgctggaggtag

SEQ ID NO: 124260 - DNA, 1677 bp, Artificial Sequence
  derived and/or modified sequence
atggagctgcgggcccggggctggtggctgctgtgcgccgccgccgctctggtggcttgcgctagaggcgaccccgcttcgaaatcccgaagctgcggggaagtgagacagatttacggcgcaaagggtttctccctgtccgatgtccctcaggctgagatcagcggcgaacacctgcggatttgcccccagggatacacttgttgcaccagcgagatggaagaaaacctggccaacagatcccatgctgagttagaaacagccctgagggattctagcagagttctccaagctatgttagccacacagctacggagctttgacgaccactttcagcatctcctgaacgactctgaaaggacccttcaagccactttcccaggggcattcggggagctctacacacagaatgcacgcgcatttcgcgatctgtattctgaactgcgcctatattatagaggagccaacctccacctcgaggagacacttgcagaattttgggcacgactgttagaacgcctctttaagcagctgcatcctcaattactcctgcctgatgactatttagactgcctgggtaaacaggcggaagccttgcggcctttcggggaagccccccgcgagctgaggctgagggccactcgggcattcgttgccgctcgcagcttcgtccaaggattaggggtcgcatccgacgttgtgaggaaagtggctcaggtccctctcggtccagagtgttcgcgcgccgtcatgaagcttgtttactgcgcacactgcctgggtgttcctggagctaggccctgtccagactattgcaggaacgtgctgaaaggatgcttggcaaatcaggccgatttggatgccgagtggcggaacctgctggatagtatggtccttattacggataaattctggggaaccagtggggttgagtccgtcatcggctctgttcacacctggctagctgaagctatcaatgcactacaggacaaccgagatacactcacggccaaggtgatccaggggtgtggcaaccctaaagttaatcctcagggtcctggccccgaagagaaacgcagaagaggcaaactcgcacctcgcgaacggcccccgtcaggcacgcttgaaaaactggtctccgaggcaaaggcccaactcagagacgttcaggatttctggatctctctccctggaacgctgtgttctgaaaagatggccttgagtaccgcgagtgacgaccgatgttggaacgggatggctcgaggccgttatcttccagaagtaatgggggacggtttggctaatcagatcaacaacccagaagtggaagtagacatcacgaaaccagacatgaccataagacagcagatcatgcagctgaagataatgaccaacaggttaagatctgcatataacgggaacgatgtggattttcaggatgcgagcgatgacggatctggatccgggtctggagatggctgtctggacgacttgtgtagcagaaaagtcagcaggaagagctcaagctcccggacccccctgacacatgcactccccggcctctccgagcaggagggacagaagacatcagcggcatcctgccctcagccccccacattcctgctgccactgctcctctttctcgctttgacagttgcgaggccgcggtggcgttag

SEQ ID NO: 124261 - DNA, 1677 bp, Artificial Sequence
  derived and/or modified sequence
atggagctcagagcccgaggatggtggcttctctgtgcagcagccgctcttgtcgcgtgtgcgcgtggtgatcctgctagcaagagcaggtcttgcggagaggtgagacagatctatggggcaaaaggcttctctctttctgacgtgccccaggctgagatatccggtgagcacttgcgaatatgccctcaagggtacacctgttgcacttcagaaatggaagaaaatcttgccaaccgcagccacgccgaactcgagacggcgctgagggatagctcacgtgtccttcaggctatgctggccactcaattacgatcatttgacgaccacttccagcacctgctcaacgatagtgaacggaccttgcaggcaaccttcccaggagcatttggggagctctatacacagaacgctcgagctttcagagacctatattccgaattaagactgtactaccggggagctaacctacacctggaggagacactggcagagttttgggctcggttgcttgagcggctattcaaacagctgcatcctcaacttttattaccggacgattacctggattgcctgggaaagcaggccgaagccctgagaccgttcggagaggctcctagggagttacgcctgcgagcaacacgtgccttcgtggcagcacgatccttcgttcagggcctgggggttgcgtcagatgtcgtgaggaaggtggcccaagttcctctgggcccagaatgttcccgggcagtaatgaagctagtttactgcgcccattgcttgggcgtgcccggtgcgcgtccatgtcctgactactgccggaatgttcttaagggctgcctggccaaccaggccgatctggatgcggaatggagaaaccttctggatagtatggtgctcattacagataagttttggggaacttctggcgtagagtctgtaatcggtagcgtccacacctggcttgctgaagctatcaacgcactgcaggataaccgagacaccctaaccgcgaaggttattcaaggctgtggtaatcctaaagtgaaccctcagggaccaggaccagaggaaaaacgaaggaggggaaagctggcacccagagaacggccaccctcgggtaccctggagaaacttgtgagcgaagctaaggctcaactacgcgatgtgcaggatttttggatttcgttacccggaactctgtgctcagaaaaaatggctttgtccactgcatcggacgataggtgttggaacgggatggctaggggtcgttatttacctgaggtgatgggggatgggctcgccaaccaaatcaataacccagaggtagaagtagacattaccaagcctgacatgacgatccggcagcagattatgcagttgaaaataatgactaataggctgaggtccgcctataatgggaatgacgtcgatttccaggacgcctcggacgacggcagcggctccggaagcggagatggttgcctggatgacctgtgttctcgtaaagtgtcgagaaagtcttcctcctcaagaacccctctaacacatgctctgcctgggttatctgaacaggaggggcagaaaacttccgcggcatcttgcccgcagccgccaacgttcctcctaccgctccttctgtttctggctttgactgtggccagaccacgctggcgatag

SEQ ID NO: 124262 - DNA, 1677 bp, Artificial Sequence
  derived and/or modified sequence
atggagctgagagccagaggctggtggctgctgtgcgccgccgccgccctggtggcctgcgccagaggcgaccccgccagcaagagcagaagctgcggcgaggtgagacagatctacggcgccaagggcttcagcctgagcgacgtgccccaggccgagatcagcggcgagcacctgagaatctgcccccagggctacacctgctgcaccagcgagatggaggagaacctggccaacagaagccacgccgagctggagaccgccctgagagacagcagcagagtgctgcaggccatgctggccacccagctgagaagcttcgacgaccacttccagcacctgctgaacgacagcgagagaaccctgcaggccaccttccccggcgccttcggcgagctgtacacccagaacgccagagccttcagagacctgtacagcgagctgagactgtactacagaggcgccaacctgcacctggaggagaccctggccgagttctgggccagactgctggagagactgttcaagcagctgcacccccagctgctgctgcccgacgactacctggactgcctgggcaagcaggccgaggccctgagacccttcggcgaggcccccagagagctgagactgagagccaccagagccttcgtggccgccagaagcttcgtgcagggcctgggcgtggccagcgacgtggtgagaaaggtggcccaggtgcccctgggccccgagtgcagcagagccgtgatgaagctggtgtactgcgcccactgcctgggcgtgcccggcgccagaccctgccccgactactgcagaaacgtgctgaagggctgcctggccaaccaggccgacctggacgccgagtggagaaacctgctggacagcatggtgctgatcaccgacaagttctggggcaccagcggcgtggagagcgtgatcggcagcgtgcacacctggctggccgaggccatcaacgccctgcaggacaacagagacaccctgaccgccaaggtgatccagggctgcggcaaccccaaggtgaacccccagggccccggccccgaggagaagagaagaagaggcaagctggcccccagagagagaccccccagcggcaccctggagaagctggtgagcgaggccaaggcccagctgagagacgtgcaggacttctggatcagcctgcccggcaccctgtgcagcgagaagatggccctgagcaccgccagcgacgacagatgctggaacggcatggccagaggcagatacctgcccgaggtgatgggcgacggcctggccaaccagatcaacaaccccgaggtggaggtggacatcaccaagcccgacatgaccatcagacagcagatcatgcagctgaagatcatgaccaacagactgagaagcgcctacaacggcaacgacgtggacttccaggacgccagcgacgacggcagcggcagcggcagcggcgacggctgcctggacgacctgtgcagcagaaaggtgagcagaaagagcagcagcagcagaacccccctgacccacgccctgcccggcctgagcgagcaggagggccagaagaccagcgccgccagctgcccccagccccccaccttcctgctgcccctgctgctgttcctggccctgaccgtggccagacccagatggagatag

SEQ ID NO: 124263 - protein, 560 aa, Artificial Sequence
  derived and/or modified sequence
MELENIVANTVLLKAREGGGGNRKGKSKKWRQMLQFPHISQCEELRLSLERDYHSLCERQPIGRLLFREFCATRPELSRCVAFLDGVAEYEVTPDDKRKACGRQLTQNFLSHTGPDLIPEVPRQLVTNCTQRLEQGPCKDLFQELTRLTHEYLSVAPFADYLDSIYFNRFLQWKWLERQPVTKNTFRQYRVLGKGGFGEVCACQVRATGKMYACKKLEKKRIKKRKGEAMALNEKQILEKVNSRFVVSLAYAYETKDALCLVLTLMNGGDLKFHIYHMGQAGFPEARAVFYAAEICCGLEDLHRERIVYRDLKPENILLDDHGHIRISDLGLAVHVPEGQTIKGRVGTVGYMAPEVVKNERYTFSPDWWALGCLLYEMIAGQSPFQQRKKKIKREEVERLVKEVPEEYSERFSPQARSLCSQLLCKDPAERLGCRGGSAREVKEHPLFKKLNFKRLGAGMLEPPFKPDPQAIYCKDVLDIEQFSTVKGVELEPTDQDFYQKFATGSVPIPWQNEMVETECFQELNVFGLDGSVPPDLDWKGQPPAPPKKGLLQRLFSRQR

SEQ ID NO: 124264 - protein, 589 aa, Artificial Sequence
  derived and/or modified sequence
MELENIVANTVLLKAREGGGGNRKGKSKKWRQMLQFPHISQCEELRLSLERDYHSLCERQPIGRLLFREFCATRPELSRCVAFLDGVAEYEVTPDDKRKACGRQLTQNFLSHTGPDLIPEVPRQLVTNCTQRLEQGPCKDLFQELTRLTHEYLSVAPFADYLDSIYFNRFLQWKWLERQPVTKNTFRQYRVLGKGGFGEVCACQVRATGKMYACKKLEKKRIKKRKGEAMALNEKQILEKVNSRFVVSLAYAYETKDALCLVLTLMNGGDLKFHIYHMGQAGFPEARAVFYAAEICCGLEDLHRERIVYRDLKPENILLDDHGHIRISDLGLAVHVPEGQTIKGRVGTVGYMAPEVVKNERYTFSPDWWALGCLLYEMIAGQSPFQQRKKKIKREEVERLVKEVPEEYSERFSPQARSLCSQLLCKDPAERLGCRGGSAREVKEHPLFKKLNFKRLGAGMLEPPFKPDPQAIYCKDVLDIEQFSTVKGVELEPTDQDFYQKFATGSVPIPWQNEMVETECFQELNVFGLDGSVPPDLDWKGQPPAPPKKGLLQRLFSRQRIAVETAATARKSSPPASSPQPEAPTSSWR

SEQ ID NO: 124265 - DNA, 1789 bp, Artificial Sequence
  derived and/or modified sequence
cccatggagctcgagaacatcgtagcgaacacggtgctactcaaggcccgggaaggtggcggtggaaatcgcaaaggcaaaagcaagaaatggcggcagatgctccagttccctcacatcagccagtgcgaagagctgcggctcagcctcgagcgtgactatcacagcctgtgcgagcggcagcccattgggcgcctgctgttccgagagttctgtgccacgaggccggagctgagccgctgcgtcgccttcctggatggggtggccgagtatgaagtgaccccggatgacaagcggaaggcatgtgggcggcagctaacgcagaattttctgagccacacgggtcctgacctcatccctgaggtcccccggcagctggtgacgaactgcacccagcggctggagcagggtccctgcaaagaccttttccaggaactcacccggctgacccacgagtacctgagcgtggccccttttgccgactacctcgacagcatctacttcaaccgtttcctgcagtggaagtggctggaaaggcagccagtgaccaaaaacaccttcaggcaataccgagtcctgggcaaaggtggctttggggaggtgtgcgcctgccaggtgcgggccacaggtaagatgtatgcctgcaagaagctagagaaaaagcggatcaagaagcggaaaggggaggccatggcgctgaacgagaagcagatcctggagaaagtgaacagtaggtttgtagtgagcttggcctacgcctatgagaccaaggacgcgctgtgcctggtgctgacactgatgaacgggggcgacctcaagttccacatctaccacatgggccaggctggcttccccgaagcgcgggccgtcttctacgccgccgagatctgctgtggcctggaggacctgcaccgggagcgcatcgtgtacagggacctgaagcccgagaacatcttgctggatgaccacggccacatccgcatctctgacctgggactagctgtgcatgtgcccgagggccagaccatcaaagggcgtgtgggcaccgtgggttacatggctccggaggtggtgaagaatgaacggtacacgttcagccctgactggtgggcgctcggctgcctcctgtacgagatgatcgcaggccagtcgcccttccagcagaggaagaagaagatcaagcgggaggaggtggagcggctggtgaaggaggtccccgaggagtattccgagcgcttttccccgcaggcccgctcactttgctcacagctcctctgcaaggaccctgccgaacgcctggggtgtcgtgggggcagtgcccgcgaggtgaaggagcaccccctctttaagaagctgaacttcaagcggctgggagctggcatgctggagccgccgttcaagcctgacccccaggccatttactgcaaggatgttctggacattgaacagttctctacggtcaagggcgtggagctggagcctaccgaccaggacttctaccagaagtttgccacaggcagtgtgcccatcccctggcagaacgagatggtggagaccgagtgcttccaagagctgaatgtctttgggctggatggctcagttcccccagacctggactggaagggccagccacctgcacctcctaaaaagggactgctgcagagactcttcagtcgccaaaggtgagcagtgtgggctccccgtgggttggccttgctgcctggcctcggggagccacgggcagcccttccatggcaaaggcaagatgtgggagaaagaagtctggtgc

SEQ ID NO: 124266 - DNA, 2571 bp, Artificial Sequence
  derived and/or modified sequence
cccatggagctcgagaacatcgtagcgaacacggtgctactcaaggcccgggaaggtggcggtggaaatcgcaaaggcaaaagcaagaaatggcggcagatgctccagttccctcacatcagccagtgcgaagagctgcggctcagcctcgagcgtgactatcacagcctgtgcgagcggcagcccattgggcgcctgctgttccgagagttctgtgccacgaggccggagctgagccgctgcgtcgccttcctggatggggtggccgagtatgaagtgaccccggatgacaagcggaaggcatgtgggcggcagctaacgcagaattttctgagccacacgggtcctgacctcatccctgaggtcccccggcagctggtgacgaactgcacccagcggctggagcagggtccctgcaaagaccttttccaggaactcacccggctgacccacgagtacctgagcgtggccccttttgccgactacctcgacagcatctacttcaaccgtttcctgcagtggaagtggctggaaaggcagccagtgaccaaaaacaccttcaggcaataccgagtcctgggcaaaggtggctttggggaggtgtgcgcctgccaggtgcgggccacaggtaagatgtatgcctgcaagaagctagagaaaaagcggatcaagaagcggaaaggggaggccatggcgctgaacgagaagcagatcctggagaaagtgaacagtaggtttgtagtgagcttggcctacgcctatgagaccaaggacgcgctgtgcctggtgctgacactgatgaacgggggcgacctcaagttccacatctaccacatgggccaggctggcttccccgaagcgcgggccgtcttctacgccgccgagatctgctgtggcctggaggacctgcaccgggagcgcatcgtgtacagggacctgaagcccgagaacatcttgctggatgaccacggccacatccgcatctctgacctgggactagctgtgcatgtgcccgagggccagaccatcaaagggcgtgtgggcaccgtgggttacatggctccggaggtggtgaagaatgaacggtacacgttcagccctgactggtgggcgctcggctgcctcctgtacgagatgatcgcaggccagtcgcccttccagcagaggaagaagaagatcaagcgggaggaggtggagcggctggtgaaggaggtccccgaggagtattccgagcgcttttccccgcaggcccgctcactttgctcacagctcctctgcaaggaccctgccgaacgcctggggtgtcgtgggggcagtgcccgcgaggtgaaggagcaccccctctttaagaagctgaacttcaagcggctgggagctggcatgctggagccgccgttcaagcctgacccccaggccatttactgcaaggatgttctggacattgaacagttctctacggtcaagggcgtggagctggagcctaccgaccaggacttctaccagaagtttgccacaggcagtgtgcccatcccctggcagaacgagatggtggagaccgagtgcttccaagagctgaatgtctttgggctggatggctcagttcccccagacctggactggaagggccagccacctgcacctcctaaaaagggactgctgcagagactcttcagtcgccaaaggattgctgtggaaactgcagcgacagcgaggaagagctccccacccgcctctagcccccagcccgaggcccccaccagcagttggcggtagcagctactccgagcgccgtttacagttttgcacagtgatcttccccattgtccactcaagtcgtggcctggggaacacagacggagctgtccccagtgtcctccgtccctcagcccctggcctggctgagtttggcagggcctgggccatccctgggacaaaggtgcgtcccttcagctcttctccgtggagctcggggctttctgtatttatgtatttgtacgaatgtatatagcgaccagagcattcttaattcccgccgcagacctggcgcccccgccttggctcctgggggcagccagccctggctgggagagcgggagctggcagaggagccactgccaaactcaaggctcctctggcccagcttggatggctgagggtggtcacacccctgagccttcagcactgtgctggccaccccggcctctgagtaagactcgtgcctccccctgctgccctgggctcaggctgctaccctctggggcccaaagctgtcccttctcagtgcttgtcagcgctgggtctggggcctctgtatgccctaggcctgtgccaaagtggccagagattgggctgcctgtgatacccatcagcccactgccccggccggcccagataggtctgcctctgccttccagctcccacagcctggtccctgatactgggctctgtcctgcagacacctctttcagaaacgcccaagcccagcccctaggagggggtggggcatccctggtcaaccctcaaacattccggactcccctcataacaatagacacatgtgcccagcaataa

SEQ ID NO: 124267 - DNA, 1770 bp, Artificial Sequence
  derived and/or modified sequence
atggagttagaaaatatcgttgctaatactgtcctgctcaaagcgcgtgagggaggtggcggtaaccgcaaaggaaagtccaagaaatggagacagatgctgcagtttcctcacatttcacagtgcgaagagctccggctgtcactggaaagagattaccattctctgtgcgagagacaacctattgggcgtctcctgtttagagagttttgcgccacgcgcccagagttgagtcgatgcgtcgccttcctggatggcgtagccgagtatgaagttacccctgatgataaaagaaaagcatgcggccgacagcttacccaaaatttcctgtcacacacgggtccagacctgattccggaagtgcctcgccagctggtaaccaattgcactcagagactggagcaaggcccttgtaaagacctctttcaggaactcactcgcctcacccatgagtacctttccgtggctccgttcgcagattacctcgattccatttacttcaaccgttttttacagtggaagtggctcgagcggcagccagtcacaaagaacacctttaggcagtatcgagtgctgggcaagggagggtttggagaggtgtgcgcctgtcaagtgagggccaccggtaagatgtacgcttgtaagaagttagaaaagaagaggataaaaaagagaaagggggaggctatggccctaaatgaaaaacagatcctggaaaaagttaattcccgctttgtagtctcactggcttacgcctacgagactaaggatgcactgtgcttggttctcaccctcatgaacggaggcgacctaaagtttcatatatatcacatggggcaggcaggcttcccagaggcgagggccgtcttttatgcagcagaaatatgttgcggtcttgaagacctgcatcgggagcgaatagtttaccgagaccttaaacccgaaaacatcctgctagatgaccacggccacatcaggatcagtgatcttgggcttgccgtgcatgtgcctgaaggacagactattaagggacgggttggaacagtcggctacatggcccctgaggttgtaaaaaatgagcgctacacgttctccccagattggtgggcgttaggatgtcttttatacgagatgatcgccggacagtccccttttcaacagcggaagaaaaaaatcaaacgagaggaggttgaacgactagtgaaggaagtcccggaggagtactccgagcgtttcagtccacaggccagatcattgtgctcacagctgctgtgcaaggacccggctgagagactgggatgtaggggagggtctgcgagggaggttaaagagcatcctctgtttaaaaagctcaactttaaaagattaggagccgggatgctggagcctccattcaagccagaccctcaagcaatctactgcaaggatgtgttagatatcgagcagttcagtaccgtgaagggagtggaactggagcctacggaccaggacttttaccaaaaatttgccaccggaagcgtgcctatcccctggcagaacgagatggttgaaaccgaatgctttcaggagctgaacgtgtttggtttagacggcagtgtcccacccgacctggactggaaaggacaacctcccgcccctcccaagaaagggttactacaacggttattttcacgccagcggattgcggtcgaaacggcggccactgctaggaaaagctcacctcctgctagttcaccccagccagaagcaccaacgagctcctggaggtag

SEQ ID NO: 124268 - DNA, 1770 bp, Artificial Sequence
  derived and/or modified sequence
atggagctggagaacatcgtggccaacacagtgctgctgaaggcccgggagggcggcggcggcaacaggaagggcaagagcaagaagtggaggcagatgctgcagttcccccacatcagccagtgtgaggagctgcggctgagcctggagcgggactaccacagcctgtgtgagcggcagcccatcggccgcctgctcttccgggagttctgtgccaccaggcctgagctgagccgctgtgtggccttcctggatggagtggccgagtatgaggtgaccccagatgacaagaggaaggcctgtggccggcagctgacccagaacttcctgagccacactggaccagacctgatccctgaggtgccccggcagctggtgaccaactgcacccagaggctggagcagggcccctgcaaggacctcttccaggagctgacccggctgacccatgagtacctgtctgtggccccctttgctgactacctggacagcatctacttcaaccgcttcctgcagtggaagtggctggagcggcagcctgtgaccaagaacaccttccggcagtacagagtgctgggcaagggcggctttggagaggtgtgtgcctgccaggtgcgggccaccgggaagatgtatgcctgcaagaagctggagaagaagaggatcaagaagaggaagggggaggccatggccctgaatgagaagcagatcctggagaaggtgaacagcagatttgtggtgtccctggcctatgcctatgagaccaaggatgccctgtgcctggtgctgaccctgatgaatggaggagacctgaagttccacatctaccacatgggccaggccggcttccctgaggcccgggctgtgttctacgccgctgagatctgctgcggcctggaggacctgcaccgggagagaattgtgtacagagacctgaagccagagaacatcctgctggatgaccacggccacatccgcatcagtgacctgggcctggccgtgcacgtgcctgagggccagaccatcaagggccgggtgggcaccgtgggctacatggcccctgaggtggtgaagaatgaaagatacaccttctccccagactggtgggccctgggctgcctgctgtatgagatgattgctggccagagccccttccagcagaggaagaagaagatcaagcgggaggaggtggagcggctggtgaaggaggtgcctgaggagtacagcgagcgcttcagcccccaggcccggagcctgtgcagccagctgctgtgcaaggaccctgctgagcggctgggctgccggggcggcagcgcccgggaggtgaaggagcaccccctcttcaagaagctgaacttcaagaggctgggcgccggcatgctggagccccccttcaagccagacccccaggccatctactgcaaggatgtgctggacatcgagcagttcagcacagtgaagggcgtggagctggagcccacagaccaggacttctaccagaagtttgccaccggctctgtgcccatcccctggcagaatgagatggtggagacagagtgcttccaggagctgaatgtgtttggcctggatggctctgtgcccccagacctggactggaagggccagcccccagccccacccaagaagggcctgctgcagaggctcttcagccggcagagaattgctgtggagacagctgccacagccaggaagagcagccccccagccagcagcccccagcctgaggcccccaccagctcctggaggtag

SEQ ID NO: 124269 - DNA, 1770 bp, Artificial Sequence
  derived and/or modified sequence
atggagctggagaacatcgtggccaacaccgtgctgctgaaggcccgggagggcggtgggggaaaccgcaaaggcaagtcaaaaaagtggcgccaaatgctgcaattcccccacatcagccaatgcgaggaactcagactaagtttggaaagagattaccactcattatgcgaaagacaacctatcggccgcctgctgttccgcgagttctgcgccacaaggcctgaactgtcccggtgtgtggctttcctcgatggggtagccgaatatgaggtcacccccgatgacaagagaaaagcatgtggccgacagttgacgcagaacttcctgagtcacacaggcccagatctgatacccgaggtaccacgtcagctagtgacaaactgcacacaacggctggaacaggggccctgcaaggacttgtttcaggaactcacccgactcactcacgagtacctcagcgtcgctccatttgcagactacctggacagcatatacttcaaccgctttcttcaatggaagtggctggagcggcagcctgtaaccaaaaatactttcagacagtaccgggtgttgggtaaagggggtttcggggaggtgtgcgcatgccaggtgagggcgacgggaaagatgtacgcttgcaaaaaactcgaaaaaaagcgcattaagaaaagaaagggggaggctatggccctaaacgagaagcagatattagagaaagtgaatagccggttcgtcgtgtcccttgcttatgcctacgaaactaaggacgccttatgcttggtgctgaccctgatgaacggtggtgacttaaagtttcatatataccacatgggccaggccgggttccccgaggctagagcagtattctacgccgcggaaatctgttgcggccttgaggatctccaccgggaacggatcgtctaccgggatctcaagcctgaaaacatcctcctggacgaccatggacacattagaatttcagacctcggcctggcggtgcacgtcccggaagggcagaccattaaaggaagagtgggaacagtggggtacatggccccagaggtagtcaaaaacgagcgatacactttttccccggactggtgggccttagggtgtctcctatacgaaatgatcgcaggccagagtccctttcaacagcggaagaagaagatcaaaagagaggaagtagagcgattggtgaaagaagtgcctgaggaatattctgagcgtttctcaccccaggcacggtctctctgtagtcagctgctctgtaaggaccctgctgaacggctgggatgccggggagggtcagccagggaggtgaaggagcaccccttgtttaaaaaactgaacttcaagcggctgggggcgggaatgttagagccaccctttaagcctgatccacaggcaatctactgtaaggatgtgcttgatatagagcaatttagcacagtgaaaggtgtggagttggagcctacggatcaggatttttaccagaaatttgcaacaggctccgtacccatcccatggcagaatgagatggtggaaacagaatgcttccaagagttgaacgttttcggattagatggctccgttcctccagacctcgactggaaaggtcagccgccagccccacccaaaaagggcctgttgcagagacttttttcacgacagaggatagccgtggagaccgcagcaactgctagaaagtctagcccaccggccagctccccccaaccagaggcccccacctcatcctggagatag

SEQ ID NO: 124270 - DNA, 1770 bp, Artificial Sequence
  derived and/or modified sequence
atggagttagagaatattgtagccaataccgtgctgctgaaggcaagggagggagggggtggcaaccgaaagggtaagagcaagaaatggaggcagatgttacaatttccacacatatcccagtgtgaggagctgcgcctgagcttagagcgcgattatcactcgctctgtgaaaggcagcccattggaagattgctcttccgggagttctgcgcaacaaggccagaactgagcaggtgtgtggcttttttggacggcgtggccgaatatgaggtgacgccagatgataagcggaaggcatgtgggagacaactcacgcaaaactttttaagccacacagggccagacctcattcccgaagtgccccgtcaattagtcaccaactgtactcagagactggagcagggaccgtgcaaggatctgtttcaagagctaacaagactgacccatgagtacctcagcgtggctccttttgcagattacctggattccatctacttcaatcggttcctgcagtggaagtggttggaaagacagcccgttaccaagaataccttccgacagtaccgggtgcttgggaaaggaggttttggcgaagtgtgtgcttgccaggtgcgcgctacaggtaagatgtatgcatgcaaaaagttggaaaagaagcggattaagaagagaaagggcgaggctatggctttgaatgaaaagcaaattctggaaaaggtcaactctcggttcgtagtgtctttggcatatgcctacgagacgaaggatgctttgtgcttggtccttactctgatgaacggcggtgatttgaaatttcatatctaccatatgggccaggctggctttcccgaagcccgagctgtattttacgcggctgagatctgttgcggcctcgaggacctgcatcgcgagcggattgtctatagggatctgaagcctgagaacatcttgctcgacgaccatggccacatacgcatatctgacctggggctggctgtgcatgtaccggaagggcaaacaattaaagggagagtgggaacagtgggctatatggcacccgaggtcgtgaaaaacgaacgctacaccttctcgccagactggtgggcgctgggatgtctcctctacgagatgatcgcaggccaatccccattccagcagaggaaaaagaagattaaaagggaggaggtagagcgactggtcaaagaagtgcctgaagagtattctgaacgatttagcccacaggccaggtccttgtgcagtcagctattgtgtaaagacccagccgaacgtctgggatgtcggggagggagcgcaagagaagtcaaggaacatccacttttcaagaagcttaatttcaaacgactcggggctggaatgctggagcctccttttaagcccgaccctcaggcaatttattgcaaagacgtactggacattgagcagttctcaacagttaagggagtggaattggaaccgactgatcaggatttctaccaaaagttcgctactgggagcgtgcccattccctggcagaacgagatggtcgagacagaatgttttcaggagctgaacgtgtttgggcttgacgggtctgtgccacctgacctcgattggaagggccaacctcctgctcctcccaagaaaggtctgttgcagcggttattcagccggcagagaatcgccgtagagaccgcagccacagcaaggaagtcctcgccgccagccagctcaccccagcccgaagcccctacctcctcctggagatag

SEQ ID NO: 124271 - DNA, 1770 bp, Artificial Sequence
  derived and/or modified sequence
atggagctggagaacatcgtggccaacaccgtgctgctgaaggccagagagggcggcggcggcaacagaaagggcaagagcaagaagtggagacagatgctgcagttcccccacatcagccagtgcgaggagctgagactgagcctggagagagactaccacagcctgtgcgagagacagcccatcggcagactgctgttcagagagttctgcgccaccagacccgagctgagcagatgcgtggccttcctggacggcgtggccgagtacgaggtgacccccgacgacaagagaaaggcctgcggcagacagctgacccagaacttcctgagccacaccggccccgacctgatccccgaggtgcccagacagctggtgaccaactgcacccagagactggagcagggcccctgcaaggacctgttccaggagctgaccagactgacccacgagtacctgagcgtggcccccttcgccgactacctggacagcatctacttcaacagattcctgcagtggaagtggctggagagacagcccgtgaccaagaacaccttcagacagtacagagtgctgggcaagggcggcttcggcgaggtgtgcgcctgccaggtgagagccaccggcaagatgtacgcctgcaagaagctggagaagaagagaatcaagaagagaaagggcgaggccatggccctgaacgagaagcagatcctggagaaggtgaacagcagattcgtggtgagcctggcctacgcctacgagaccaaggacgccctgtgcctggtgctgaccctgatgaacggcggcgacctgaagttccacatctaccacatgggccaggccggcttccccgaggccagagccgtgttctacgccgccgagatctgctgcggcctggaggacctgcacagagagagaatcgtgtacagagacctgaagcccgagaacatcctgctggacgaccacggccacatcagaatcagcgacctgggcctggccgtgcacgtgcccgagggccagaccatcaagggcagagtgggcaccgtgggctacatggcccccgaggtggtgaagaacgagagatacaccttcagccccgactggtgggccctgggctgcctgctgtacgagatgatcgccggccagagccccttccagcagagaaagaagaagatcaagagagaggaggtggagagactggtgaaggaggtgcccgaggagtacagcgagagattcagcccccaggccagaagcctgtgcagccagctgctgtgcaaggaccccgccgagagactgggctgcagaggcggcagcgccagagaggtgaaggagcaccccctgttcaagaagctgaacttcaagagactgggcgccggcatgctggagccccccttcaagcccgacccccaggccatctactgcaaggacgtgctggacatcgagcagttcagcaccgtgaagggcgtggagctggagcccaccgaccaggacttctaccagaagttcgccaccggcagcgtgcccatcccctggcagaacgagatggtggagaccgagtgcttccaggagctgaacgtgttcggcctggacggcagcgtgccccccgacctggactggaagggccagccccccgccccccccaagaagggcctgctgcagagactgttcagcagacagagaatcgccgtggagaccgccgccaccgccagaaagagcagcccccccgccagcagcccccagcccgaggcccccaccagcagctggagatag

SEQ ID NO: 124272 - protein, 190 aa, Artificial Sequence
  derived and/or modified sequence
MAFIAKSFYDLSAISLDGEKVDFNTFRGRAVLIENVASLCGTTTRDFTQLNELQCRFPRRLVVLGFPCNQFGHQENCQNEEILNSLKYVRPGGGYQPTFTLVQKCEVNGQNEHPVFAYLKDKLPYPYDDPFSLMTDPKLIIWSPVRRSDVAWNFEKFLIGPEGEPFRRYSRTFPTINIEPDIKRLLKVAI

SEQ ID NO: 124273 - DNA, 573 bp, Artificial Sequence
  derived and/or modified sequence
atggccttcatcgctaaaagtttttatgatttaagcgcaataagcctggacggagagaaagtcgactttaacacctttaggggcagggccgttctgatcgagaatgtggcctccttatgagggacgaccacaagagacttcacacaactgaacgaactgcagtgccgcttccctaggcgacttgtggtcctaggattcccctgcaaccagtttgggcatcaggagaattgccagaatgaggaaatccttaattctcttaagtatgtgcgacccggcggaggataccagccaacctttaccctcgtgcagaagtgtgaggtgaacggccagaatgaacatcccgtgtttgcgtatcttaaggataagctaccctatccatacgatgacccattctccctgatgactgatcctaaactcattatctggtcccctgtgagacgaagcgatgtggcttggaactttgagaagtttctcatcggacctgagggtgaaccatttcgtaggtattcaaggactttcccgactattaacatcgagccggacatcaaacggctcctaaaggttgctatctag

SEQ ID NO: 124274 - DNA, 990 bp, Artificial Sequence
  derived and/or modified sequence
cttcctggctcctccttcctccccacccctctaataggctcataagtgggctcaggcctctctgcggggctcactctgcgcttcaccatggctttcattgccaagtccttctatgacctcagtgccatcagcctggatggggagaaggtagatttcaatacgttccggggcagggccgtgctgattgagaatgtggcttcgctctgaggcacaaccacccgggacttcacccagctcaacgagctgcaatgccgctttcccaggcgcctggtggtccttggcttcccttgcaaccaatttggacatcaggagaactgtcagaatgaggagatcctgaacagtctcaagtatgtccgtcctgggggtggataccagcccaccttcacccttgtccaaaaatgtgaggtgaatgggcagaacgagcatcctgtcttcgcctacctgaaggacaagctcccctacccttatgatgacccattttccctcatgaccgatcccaagctcatcatttggagccctgtgcgccgctcagatgtggcctggaactttgagaagttcctcatagggccggagggagagcccttccgacgctacagccgcaccttcccaaccatcaacattgagcctgacatcaagcgcctccttaaagttgccatatagatgtgaactgctcaacacacagatctcctactccatccagtcctgaggagccttaggatgcagcatgccttcaggagacactgctggacctcagcattcccttgatatcagtccccttcactgcagagccttgcctttcccctctgcctgtttccttttcctctcccaaccctctggttggtgattcaacttgggctccaagacttgggtaagctctgggccttcacagaatgatggcaccttcctaaaccctcatgggtggtgtctgagaggcgtgaagggcctggagccactctgctagaagagaccaataaagggcaggtgtggaaa

SEQ ID NO: 124275 - DNA, 567 bp, Artificial Sequence
  derived and/or modified sequence
atggccttcatcgccaagagcttctatgacctgagcgccatcagcctggatggagagaaggtggacttcaacaccttccggggccgggctgtgctgattgaaaatgtggccagcggcaccaccacccgggacttcacccagctgaatgagctgcagtgccgcttcccccggcggctggtggtgctgggcttcccctgcaaccagtttggccaccaggagaactgccagaatgaggagatcctgaacagcctgaagtatgtgcggcctgggggcggctaccagcccaccttcaccctggtgcagaagtgtgaggtgaatggccagaatgagcaccctgtgtttgcctacctgaaggacaagctgccctacccctatgatgaccccttcagcctgatgacagaccccaagctgatcatctggagccctgtgcggcggagtgatgtggcctggaactttgagaagttcctgattggccctgagggggagcccttccgccgctacagcaggaccttccccaccatcaacatcgagccagacatcaagaggctgctgaaggtggccatctag

SEQ ID NO: 124276 - DNA, 573 bp, Artificial Sequence
  derived and/or modified sequence
atggccttcatcgccaagagcttctacgacctgagcgccatcagcctggatggggagaaagtcgacttcaacaccttcagaggaagggctgtgctcattgaaaacgtggcttccctttgaggcaccacgacgcgggatttcactcagcttaatgaactccagtgcagatttccacgcagactggtcgtactgggtttcccttgcaaccagtttgggcaccaggagaattgccagaacgaggaaatcctgaatagtttgaaatatgtcaggccaggagggggttatcagccaacgttcacattggtgcaaaagtgtgaggtgaatggacagaatgagcacccagtgtttgcctatctgaaggacaagctcccttacccatatgatgaccctttctccttgatgactgatccaaaattgatcatttggagtcctgtccgacgcagtgacgtggcctggaactttgagaaattcctcataggcccagagggagaaccgttcaggcgatacagccggacatttccgactatcaacatagagcccgacattaagagacttctcaaagtggccatatag

SEQ ID NO: 124277 - DNA, 573 bp, Artificial Sequence
  derived and/or modified sequence
atggctttcatcgcaaagtcattttatgacctgagcgcaatcagccttgatggcgaaaaagtcgactttaatacgttccggggtcgtgcagtactgatcgagaacgtggccagtttgtgaggcacaacaacccgggattttacacaattaaacgaactgcagtgtcgctttccccgacgactggtggtactcggattcccatgcaatcagtttggccaccaggagaactgccagaacgaggagatcctgaacagtctgaagtacgtgcgacccggtgggggatatcagccgacattcaccctggtacagaaatgcgaggtgaacggccagaatgagcaccctgttttcgcctacctcaaagacaagctcccttacccctatgatgatcccttttccctcatgactgatcccaagctgattatttggtccccggtcagaaggtcagacgtcgcctggaactttgagaagtttctcataggacctgaaggcgaaccgttcagacgttacagccgaacgttcccgaccatcaatatcgaacctgatattaagcggcttctgaaggtggctatttag

SEQ ID NO: 124278 - DNA, 573 bp, Artificial Sequence
  derived and/or modified sequence
atggccttcatcgccaagagcttctacgacctgagcgccatcagcctggacggcgagaaggtggacttcaacaccttcagaggcagagccgtgctgatcgagaacgtggccagcctgtgaggcaccaccaccagagacttcacccagctgaacgagctgcagtgcagattccccagaagactggtggtgctgggcttcccctgcaaccagttcggccaccaggagaactgccagaacgaggagatcctgaacagcctgaagtacgtgagacccggcggcggctaccagcccaccttcaccctggtgcagaagtgcgaggtgaacggccagaacgagcaccccgtgttcgcctacctgaaggacaagctgccctacccctacgacgaccccttcagcctgatgaccgaccccaagctgatcatctggagccccgtgagaagaagcgacgtggcctggaacttcgagaagttcctgatcggccccgagggcgagcccttcagaagatacagcagaaccttccccaccatcaacatcgagcccgacatcaagagactgctgaaggtggccatctag

SEQ ID NO: 124279 - protein, 226 aa, Artificial Sequence
  derived and/or modified sequence
MARLLQASCLLSLLLAGFVSQSRGQEKSKMDCHGGISGTIYEYGALTIDGEEYIPFKQYAGKYVLFVNVASYCGLTGQYIELNALQEELAPFGLVILGFPCNQFGKQEPGENSEILPTLKYVRPGGGFVPNFQLFEKGDVNGEKEQKFYTFLKNSCPPTSELLGTSDRLFWEPMKVHDIRWNFEKFLVGPDGIPIMRWHHRTTVSNVKMDILSYMRRQAALGVKRK

SEQ ID NO: 124280 - protein, 72 aa, Artificial Sequence
  derived and/or modified sequence
MARLLQASCLLSLLLAGFVSQSRGQEKSKMDCHGGISGTIYEYGALTIDGEEYIPFKQYAGKYVLFVNVASY

SEQ ID NO: 124281 - DNA, 681 bp, Artificial Sequence
  derived and/or modified sequence
atggccagactgctgcaggccagctgcctgctgagcctgctgctggccggcttcgtgagccagagcagaggccaggagaagagcaagatggactgccacggcggcatcagcggcaccatctacgagtacggcgccctgaccatcgacggcgaggagtacatccccttcaagcagtacgccggcaagtacgtgctgttcgtgaacgtggccagctactgaggcctgaccggccagtacatcgagctgaacgccctgcaggaggagctggcccccttcggcctggtgatcctgggcttcccctgcaaccagttcggcaagcaggagcccggcgagaacagcgagatcctgcccaccctgaagtacgtgagacccggcggcggcttcgtgcccaacttccagctgttcgagaagggcgacgtgaacggcgagaaggagcagaagttctacaccttcctgaagaacagctgcccccccaccagcgagctgctgggcaccagcgacagactgttctgggagcccatgaaggtgcacgacatcagatggaacttcgagaagttcctggtgggccccgacggcatccccatcatgagatggcaccacagaaccaccgtgagcaacgtgaagatggacatcctgagctacatgagaagacaggccgccctgggcgtgaagagaaagtag

SEQ ID NO: 124282 - DNA, 219 bp, Artificial Sequence
  derived and/or modified sequence
atggccagactgctgcaggccagctgcctgctgagcctgctgctggccggcttcgtgagccagagcagaggccaggagaagagcaagatggactgccacggcggcatcagcggcaccatctacgagtacggcgccctgaccatcgacggcgaggagtacatccccttcaagcagtacgccggcaagtacgtgctgttcgtgaacgtggccagctactag

SEQ ID NO: 124283 - DNA, 681 bp, Artificial Sequence
  derived and/or modified sequence
atggcccgcttgctgcaggcatcttgtcttctgtctttactcctcgcagggtttgtgagccagagtcgcggtcaagagaaatcgaaaatggactgccatggcgggatatctggcaccatttatgagtatggagcgctgacgattgacggagaggaatacatacctttcaaacaatacgcagggaaatacgtgctctttgtcaacgtggcatcctactgaggtctcaccgggcagtacattgagctcaacgccctacaagaggagcttgctcctttcggattggtgatactgggctttccatgtaatcaattcggcaagcaggagccgggggaaaacagcgagatcctacccacgctgaagtacgttcgccctggcgggggcttcgtgcccaacttccaactgtttgagaagggggatgtgaatggagaaaaggagcaaaagttctacacatttctgaagaattcttgcccaccgacatcagaattactgggaacttcagatcggctgttttgggaaccaatgaaagtacacgacattagatggaactttgagaagttcctagtgggccctgacggcattcccatcatgcgatggcatcaccgcacaacggtgtccaatgtcaagatggacatcctgagctacatgcggcgccaggctgccttaggcgtgaaacgaaagtag

SEQ ID NO: 124284 - DNA, 219 bp, Artificial Sequence
  derived and/or modified sequence
atggctagactgctgcaagcctcatgtttgctcagcttgctcctggctggattcgtcagtcaaagccgcggccaggaaaagtctaaaatggattgccacggtggcatttctggtacaatctacgaatatggcgcactcacaattgatggggaggaatatatacctttcaagcagtatgccggtaagtatgtgctgttcgtgaacgtggcatcatactag

SEQ ID NO: 124285 - DNA, 1636 bp, Artificial Sequence
  derived and/or modified sequence
aaaggtggctgggagcgccggacacctcagacggacggtggccagggatcaggcagcggctcaggcgaccctgagtgtgcccccaccccgccatggcccggctgctgcaggcgtcctgcctgctttccctgctcctggccggcttcgtctcgcagagccggggacaagagaagtcgaagatggactgccatggtggcataagtggcaccatttacgagtacggagccctcaccattgatggggaggagtacatccccttcaagcagtatgctggcaaatacgtcctctttgtcaacgtggccagctactgaggcctgacgggccagtacattgaactgaatgcactacaggaagagcttgcaccattcggtctggtcattctgggctttccctgcaaccaatttggaaaacaggaaccaggagagaactcagagatccttcctaccctcaagtatgtccgaccaggtggaggctttgtccctaatttccagctctttgagaaaggggatgtcaatggagagaaagagcagaaattctacactttcctaaagaactcctgtcctcccacctcggagctcctgggtacatctgaccgcctcttctgggaacccatgaaggttcacgacatccgctggaactttgagaagttcctggtggggccagatggtatacccatcatgcgctggcaccaccggaccacggtcagcaacgtcaagatggacatcctgtcctacatgaggcggcaggcagccctgggggtcaagaggaagtaactgaaggccgtctcatcccatgtccaccatgtaggggagggactttgttcaggaagaaatccgtgtctccaaccacactatctacccatcacagacccctttcctatcactcaaggccccagcctggcacaaatggatgcatacagttctgtgtactgccaggcatgtgggtgtgggtgcatgtgggtgtttacacacatgcctacaggtatgcgtgattgtgtgtgtgtgcatgggtgtacagccacgtgtctacctatgtgtctttctgggaatgtgtaccatctgtgtgcctgcagctgtgtagtgctggacagtgacaaccctttctctccagttctccactccaatgataatagttcacttacacctaaacccaaaggaaaaaccagctctaggtccaattgttctgctctaactgatacctcaaccttggggccagcatctcccactgcctccaaatattagtaactatgactgacgtccccagaagtttctgggtctaccacactccccaaccccccactcctacttcctgaagggccctcccaaggctacatccccaccccacagttctccctgagagagatcaacctccctgagatcaaccaaggcagatgtgacagcaagggccacggaccccatggcaggggtggcgtcttcatgagggaggggcccaaagcccttgtgggcggacctcccctgagcctgtctgaggggccagcccttagtgcattcaggctaaggcccctgggcagggatgccacccctgctccttcggaggacgtgccctcacccctcactggtccactggcttgagactcaccccgtctgcccagtaaaagcctttctgcagcagctga

SEQ ID NO: 124286 - DNA, 1478 bp, Artificial Sequence
  derived and/or modified sequence
tcagacggacggtggccagggatcaggcagcggctcaggcgaccctgagtgtgcccccaccccgccatggcccggctgctgcaggcgtcctgcctgctttccctgctcctggccggcttcgtctcgcagagccggggacaagagaagtcgaagatggactgccatggtggcataagtggcaccatttacgagtacggagccctcaccattgatggggaggagtacatccccttcaagcagtatgctggcaaatacgtcctctttgtcaacgtggccagctactgaggcctgacgggccagtacattgaactgaatgcactacaggaagagcttgcaccattcggtctggtcattctgggctttccctgcaaccaatttggaaaacaggaaccaggagagaactcagagatccttcctaccctcaagtatgtccgaccaggtggaggctttgtccctaatttccagctctttgagaaaggggatgtcaatggagagaaagagcagaaattctacactttcctaaagaactcctgtcctcccacctcggagctcctgggtacatctgaccgcctcttctgggaacccatgaaggttcacgacatccgctggaactttgagaagttcctggtggggccagatggtatacccatcatgcgctggcaccaccggaccacggtcagcaacgtcaagatggacatcctgtcctacatgaggcggcaggcagccctgggggtcaagaggaagtaactgaaggccgtctcatcccatgtccaccatgtaggggagggactttgttcaggaagaaatccgtgtctccaaccacactatctacccatcacagacccctttcctatcactcaaggccccagcctggcacaaatggatgcatacagttctgtgtactgccaggcatgtgggtgtgggtgcatgtgggtgtttacacacatgcctacaggtatgcgtgattgtgtgtgtgtgcatgggtgtacagccacgtgtctacctatgtgtctttctgggaatgtgtaccatctgtgtgcctgcagctgtgtagtgctggacagtgacaaccctttctctccagttctccactccaatgataatagttcacttacacctaaacccaaaggaaaaaccagctctaggtccaattgttctgctctaactgatacctcaaccttggggccagcatctcccactgcctccaaatattagtaactatgactgacgtccccagaagtttctgggtctaccacactccccaaccccccactcctacttcctgaagggccctcccaaggctacatccccaccccacagttctccctgagagagatcaacctccctgagatcaaccaaggcagatgtgacagcaagggccacggaccccatgctccttcggaggacgtgccctcacccctcactggtccactggcttgagactcaccccgtctgcccagtaaaagcctttctgcagc

SEQ ID NO: 124287 - DNA, 675 bp, Artificial Sequence
  derived and/or modified sequence
atggcccggctgctgcaggccagctgcctgctgagcctgctgctggccggctttgtgtcccagagccggggccaggagaagagcaagatggactgccacggcggcatcagcggcaccatctatgaatatggagccctgaccattgatggagaggagtacatccccttcaagcagtatgctgggaagtatgtgctgtttgtgaatgtggccagctacctgaccggccagtacatcgagctgaatgccctgcaggaggagctggcccccttcggcctggtgatcctgggcttcccctgcaaccagtttgggaagcaggagcctggagaaaattctgagatcctgcccaccctgaagtatgtgcggcctgggggcggctttgtgcccaacttccagctgtttgagaagggagatgtgaatggagagaaggagcagaagttctacaccttcctgaagaacagctgcccccccaccagcgagctgctgggcaccagtgacaggctcttctgggagcccatgaaggtgcatgacatccgctggaactttgagaagttcctggtgggcccagatggcatccccatcatgcgctggcaccacaggaccaccgtgtccaatgtgaagatggacatcctgagctacatgaggcggcaggccgccctgggcgtgaagaggaagtag

SEQ ID NO: 124288 - DNA, 219 bp, Artificial Sequence
  derived and/or modified sequence
atggcccggctgctgcaggccagctgcctgctgagcctgctgctggccggctttgtgtcccagagccggggccaggagaagagcaagatggactgccacggcggcatcagcggcaccatctatgaatatggagccctgaccattgatggagaggagtacatccccttcaagcagtatgctgggaagtatgtgctgtttgtgaatgtggccagctactag

SEQ ID NO: 124289 - DNA, 681 bp, Artificial Sequence
  derived and/or modified sequence
atggcccggctgctgcaggccagctgcctgctgagcctgctgctggccgggtttgtgagccagagcagaggtcaagagaaaagcaagatggattgtcatggcgggatctctggcaccatttatgagtacggcgccctgaccatcgacggggaggaatatattcctttcaaacagtacgctggaaaatacgtgctgtttgtgaatgtggccagctactgaggactcacgggacagtatatcgaattgaatgctctgcaagaagaactggcaccattcggtctcgtgatccttggctttccttgcaatcaatttggaaagcaggagcctggggaaaattcagaaatcctcccaaccctaaaatatgtccgccctggggggggatttgtgccaaatttccagctgttcgagaagggagatgtgaatggcgagaaagagcagaagttctatactttcctgaaaaactcatgtcccccaacctctgagctgctgggcacctcagaccgattattttgggagcctatgaaggtgcacgatatcaggtggaatttcgagaagttcctcgtgggtcccgatggcattcccattatgagatggcatcacagaaccactgtgtcaaacgtcaaaatggacattctgtcctatatgaggcgccaggccgcactcggtgtaaagcggaaatag

SEQ ID NO: 124290 - DNA, 219 bp, Artificial Sequence
  derived and/or modified sequence
atggcccggctgctgcaggccagctgcctgctgagcctgctgctggcgggctttgtatctcagtcccggggacaggaaaagtcaaagatggattgccatgggggcatttcaggaacgatctatgagtacggcgcactgacgatcgacggagaggaatatatcccttttaaacagtacgctggaaaatacgtgctgttcgtgaatgtggccagctactag

SEQ ID NO: 124291 - DNA, 681 bp, Artificial Sequence
  derived and/or modified sequence
atggcaagactgcttcaggcttcctgcctgctgtccctgctcctggctggcttcgtgagtcagagtagaggccaagagaaaagcaaaatggattgccacgggggtatatctggcaccatatacgagtacggcgctctcactattgatggagaagagtacatccccttcaagcagtacgctggaaaatatgtgctgttcgtcaacgtagccagctactgaggcctgaccggccagtacattgagctgaatgccttgcaggaagagctggccccttttgggttggttattctggggttcccttgtaaccagttcggcaagcaggagccaggggagaattctgagattctgcctacactgaagtacgtgaggccaggaggcggatttgtgcccaactttcagttgtttgaaaagggggacgttaatggcgagaaggaacagaagttctatacattcttgaaaaactcatgccctccaacctcagagttactcgggacgtcagaccgtcttttttgggaaccgatgaaagtccatgatattaggtggaactttgagaagttcttggttgggcctgacggaatccctattatgcgatggcatcaccggaccaccgtctcaaacgtaaaaatggatatcctgtcatatatgaggaggcaagcagccttgggggtgaagaggaaatag

SEQ ID NO: 124292 - DNA, 219 bp, Artificial Sequence
  derived and/or modified sequence
atggccagacttttacaggctagctgtcttttgagtctcctcctcgctggcttcgtgtcgcaatctcgaggccaggaaaaatcaaaaatggactgtcacggcggtatcagcggaaccatctacgagtatggggcactgacaattgatggagaggaatacatacccttcaaacagtacgctggcaaatatgtactcttcgtcaatgtcgcttcatattag

SEQ ID NO: 124293 - protein, 197 aa, Artificial Sequence
  derived and/or modified sequence
MSLGRLCRLLKPALLCGALAAPGLAGTMCASRDDWRCARSMHEFSAKDIDGHMVNLDKYRGFVCIVTNVASQCGKTEVNYTQLVDLHARYAECGLRILAFPCNQFGKQEPGSNEEIKEFAAGYNVKFDMFSKICVNGDDAHPLWKWMKIQPKGKGILGNAIKWNFTKFLIDKNGCVVKRYGPMEEPLVIEKDLPHYF

SEQ ID NO: 124294 - DNA, 594 bp, Artificial Sequence
  derived and/or modified sequence
atgagcctgggacggctctgcaggctgctcaaacccgcccttctgtgtggggccctcgcagcccctgggctcgccggtaccatgtgcgccagtcgcgatgactggcgatgtgcacggagtatgcacgagttcagcgcgaaagacatcgacggccacatggtgaatctggataaataccgggggttcgtgtgcatcgtcacaaacgtcgcgtctcagtgaggtaagacggaggtgaattacactcagttggtggacttgcacgctcgctacgctgagtgcggcttaagaattcttgccttcccctgcaatcagttcggaaagcaggagcctggctccaatgaggagatcaaggagtttgcagccgggtacaatgtcaagtttgacatgttttctaagatttgcgtgaacggcgatgacgcccatcccctgtggaagtggatgaagatacagcccaagggtaagggcattctcgggaacgcaatcaagtggaacttcacgaaatttctcatcgataagaacggctgcgtcgtgaaacggtacggcccaatggaagagcctctagtgatcgaaaaagacctcccacactacttctag

SEQ ID NO: 124295 - DNA, 916 bp, Artificial Sequence
  derived and/or modified sequence
gagcgctctggagggcgtggccgtgggaaaggaggcgcggaaagccgacgcgcgtccattggtcggctggacgaggggaggagccgctggctcccagccccgccgcgatgagcctcggccgcctttgccgcctactgaagccggcgctgctctgtggggctctggccgcgcctggcctggccgggaccatgtgcgcgtcccgggacgactggcgctgtgcgcgctccatgcacgagttttccgccaaggacatcgacgggcacatggttaacctggacaagtaccggggcttcgtgtgcatcgtcaccaacgtggcctcccagtgaggcaagaccgaagtaaactacactcagctcgtcgacctgcacgcccgatacgctgagtgtggtttgcggatcctggccttcccgtgtaaccagttcgggaagcaggagccagggagtaacgaagagatcaaagagttcgccgcgggctacaacgtcaaattcgatatgttcagcaagatctgcgtgaacggggacgacgcccacccgctgtggaagtggatgaagatccaacccaagggcaagggcatcctgggaaatgccatcaagtggaacttcaccaagttcctcatcgacaagaacggctgcgtggtgaagcgctacggacccatggaggagcccctggtgatagagaaggacctgccccactatttctagctccacaagtgtgtggccccgcccgagcccctgcccacgcccttggagccttccaccggcactcatgacggcctgcctgcaaacctgctggtggggcagacccgaaaatccagcgtgcaccccgccggaggaaggtcccatggcctgctgggcttggctcggcgcccccacccctggctaccttgtgggaataaacagacaaattagcctgctgg

SEQ ID NO: 124296 - DNA, 588 bp, Artificial Sequence
  derived and/or modified sequence
atgagcctgggccgcctgtgccgcctgctgaagccagccctgctgtgtggggccctggccgcccctggcctggccggcaccatgtgtgccagcagagatgactggaggtgtgcccgctccatgcatgagttcagcgccaaggacattgatggccacatggtgaacctggacaagtaccggggctttgtgtgcatcgtgaccaacgtggccagccagaagacagaggtgaactacacccagctggtggacctgcacgcccgctatgcagaatgtggcctgcgcatcctggccttcccctgcaaccagtttgggaagcaggagcccggcagcaatgaggagatcaaggagtttgctgctggctacaacgtgaagtttgacatgttcagcaagatctgtgtgaatggagatgatgcccaccccctgtggaagtggatgaagatccagcccaagggcaagggcatcctgggcaatgccatcaagtggaacttcaccaagttcctgattgacaagaatggctgtgtggtgaagagatatggccccatggaggagcccctggtgattgagaaggacctgccccactacttctag

SEQ ID NO: 124297 - DNA, 594 bp, Artificial Sequence
  derived and/or modified sequence
atgagcctgggccggctgtgccggctgctgaagcccgccctgctgtgtggtgctttagctgcgcctggccttgcaggaactatgtgtgcctctcgggacgattggagatgtgcaagatccatgcacgagttctccgccaaggacatcgacggtcatatggtcaacctagacaaataccgagggttcgtctgcattgtcaccaatgtagcgtctcagtgaggtaagaccgaagtgaactatacacagctggtcgatctccatgctcgatacgctgaatgcgggctgaggatcttggcattcccttgcaatcagttcggcaaacaagagccaggaagcaatgaggagatcaaggaatttgcagccggttataacgtgaaattcgacatgttttctaaaatctgtgtcaatggggatgacgcccatccgctgtggaaatggatgaagatccagcctaagggcaagggaattttaggcaacgccataaaatggaattttactaagtttctaatagataagaacggctgcgtggttaagcggtacgggccaatggaagagcccctggtgattgaaaaagaccttccgcactacttttag

SEQ ID NO: 124298 - DNA, 594 bp, Artificial Sequence
  derived and/or modified sequence
atgtccttaggcagactctgcaggctgcttaaaccagccctgttgtgcggcgcattggctgcacctggactggctggcactatgtgtgcctcaagggacgactggagatgcgcacggagtatgcacgaattttcagcaaaggatattgacgggcacatggttaacttggacaaatataggggattcgtttgtatagtcacgaatgtggcctcacagtgaggcaaaaccgaggtgaattacacacaattggtggacttgcacgccagatatgccgagtgcggactgcgcatacttgcattcccatgcaaccagttcggcaagcaagaaccaggaagcaatgaggagattaaggagttcgctgctgggtataatgtcaagtttgacatgttctccaaaatctgtgtgaacggagatgacgcccacccactgtggaaatggatgaaaattcagcctaagggcaaaggcatactaggcaatgccatcaaatggaatttcaccaaattcctaatagataagaacgggtgcgtggtcaagagatacggccctatggaggagccgctcgtcatcgagaaggacctgccacactacttttag

SEQ ID NO: 124299 - DNA, 594 bp, Artificial Sequence
  derived and/or modified sequence
atgagcctgggcagactgtgcagactgctgaagcccgccctgctgtgcggcgccctggccgcccccggcctggccggcaccatgtgcgccagcagagacgactggagatgcgccagaagcatgcacgagttcagcgccaaggacatcgacggccacatggtgaacctggacaagtacagaggcttcgtgtgcatcgtgaccaacgtggccagccagtgaggcaagaccgaggtgaactacacccagctggtggacctgcacgccagatacgccgagtgcggcctgagaatcctggccttcccctgcaaccagttcggcaagcaggagcccggcagcaacgaggagatcaaggagttcgccgccggctacaacgtgaagttcgacatgttcagcaagatctgcgtgaacggcgacgacgcccaccccctgtggaagtggatgaagatccagcccaagggcaagggcatcctgggcaacgccatcaagtggaacttcaccaagttcctgatcgacaagaacggctgcgtggtgaagagatacggccccatggaggagcccctggtgatcgagaaggacctgccccactacttctag

SEQ ID NO: 124300 - protein, 217 aa, Artificial Sequence [sequence omitted]

SEQ ID NO: 124301 - DNA, 654 bp, Artificial Sequence
  derived and/or modified sequence
atggaggccatcgccaagtacgacttcaaggccaccgccgacgacgagctgagcttcaagagaggcgacatcctgaaggtgctgaacgaggagtgcgaccagaactggtacaaggccgagctgaacggcaaggacggcttcatccccaagaactacatcgagatgaagccccacccctggttcttcggcaagatccccagagccaaggccgaggagatgctgagcaagcagagacacgacggcgccttcctgatcagagagagcgagagcgcccccggcgacttcagcctgagcgtgaagttcggcaacgacgtgcagcacttcaaggtgctgagagacggcgccggcaagtacttcctgtgggtggtgaagttcaacagcctgaacgagctggtggactaccacagaagcaccagcgtgagcagaaaccagcagatcttcctgagagacatcgagcaggtgccccagcagcccacctacgtgcaggccctgttcgacttcgacccccaggaggacggcgagctgggcttcagaagaggcgacttcatccacgtgatggacaacagcgaccccaactggtggaagggcgcctgccacggccagaccggcatgttccccagaaactacgtgacccccgtgaacagaaacgtgtag

SEQ ID NO: 124302 - DNA, 654 bp, Artificial Sequence
  derived and/or modified sequence
atggaggccattgccaaatacgacttcaaggcgacagcggatgatgagttgagcttcaagcgaggtgacatcctaaaggtcctcaacgaggagtgcgatcagaactggtataaggctgagctcaacggtaaggatggctttatccctaaaaattacatcgagatgaagccccatccttggtttttcggcaagatccctagagccaaagccgaggaaatgctgtctaaacagaggcacgatggagcttttttgattcgagagtctgagtcagcacccggggattttagcttgagtgtgaagttcggaaatgatgtccagcatttcaaggtgctcagggacggcgccggaaaatactttctgtgggtggttaagtttaatagtctaaatgagctagtggactaccacaggtccacctccgtgagtcgtaaccagcagattttcttgagggatatagagcaagtaccccagcagcccacatatgtgcaggccctcttcgactttgacccacaggaagacggggaactgggctttagaaggggcgattttattcatgtgatggacaatagtgatcccaattggtggaagggggcttgtcacggacaaactggaatgtttcctcgaaactatgtcacccccgttaacaggaatgtttag

SEQ ID NO: 124303 - DNA, 654 bp, Artificial Sequence
  derived and/or modified sequence
atggaagctatcgctaagtatgatttcaaggccaccgctgacgacgaactgagttttaaaagaggggatatcctgaaagtgcttaatgaggaatgcgatcaaaattggtacaaggccgaacttaacggaaaggatggctttattcccaaaaattatatagagatgaagccgcatccctggttttttggaaagatcccaagagccaaggccgaggagatgctgtcaaaacaaaggcacgatggagcctttctgatccgggaatccgagtcagcacctggtgacttcagcctttctgtcaaattcggtaacgacgttcagcactttaaagtgctgagggatggcgccggaaaatactttctgtgggtcgtaaaatttaatagcttgaacgagcttgtagactaccatcggtccacatccgtcagtagaaatcagcaaatattccttcgcgacatcgagcaggtgccacagcagcctacatacgtccaggcactgtttgacttcgaccctcaggaggacggcgaactgggatttagacggggcgatttcatacacgttatggacaacagtgaccccaactggtggaagggggcctgtcatggccaaacagggatgttccctaggaactatgttacccccgtcaatcggaatgtttag

SEQ ID NO: 124304 - DNA, 654 bp, Artificial Sequence
  derived and/or modified sequence
atggaggccattgcaaaatacgatttcaaggccacagccgatgacgaactgtcttttaaacgcggggatatccttaaagtactgaatgaagaatgcgaccagaactggtacaaggcagaactcaacggcaaggacggttttatacctaagaactatatcgagatgaaaccgcatccttggttttttggtaaaataccccgcgccaaggccgaagagatgctgtccaagcagcgccacgacggggcttttctgatccgggagtcagaatcggctcctggagatttcagcctgtctgtgaagttcggcaacgatgttcagcatttcaaggtcctgagggacggtgcaggaaagtatttcctttgggtagtgaagttcaacagtctcaacgaactcgtcgattaccacaggtcaacttccgtttcgcggaaccaacagatttttctgcgggatatcgaacaggtgccgcagcagcccacctacgtgcaggcattatttgatttcgatccccaggaagatggcgaactgggctttagacgaggagacttcattcacgtgatggataattctgaccctaattggtggaaaggggcttgtcacggccagacagggatgtttcccagaaactacgtgactcctgtcaatcgcaatgtgtag

SEQ ID NO: 124305 - DNA, 3248 bp, Artificial Sequence
  derived and/or modified sequence
gaccgggcggcggcagcggcggcggcggctgtggcagagtctgtgcctgtggcggtgacggcggcgggagcaagcgctgccctcgcagagcagccttggggtcgccggccgctcgcagcgttgtggaggggcgggccggacgctgagcggagcagctgcgccacgggtggcattgtgtgtcccagagtgccggagcgagtcccagaagagaggcgaggctaagcccagagcgctgggttgcttcagcagggaagactcccttccccctgcttcaggctgctgagcactgagcagcgctcagaatggaagccatcgccaaatatgacttcaaagctactgcagacgacgagctgagcttcaaaaggggggacatcctcaaggttttgaacgaagaatgtgatcagaactggtacaaggcagagcttaatggaaaagacggcttcattcccaagaactacatagaaatgaaaccacatccgtggttttttggcaaaatccccagagccaaggcagaagaaatgcttagcaaacagcggcacgatggggcctttcttatccgagagagtgagagcgctcctggggacttctccctctctgtcaagtttggaaacgatgtgcagcacttcaaggtgctccgagatggagccgggaagtacttcctctgggtggtgaagttcaattctttgaatgagctggtggattatcacagatctacatctgtctccagaaaccagcagatattcctgcgggacatagaacaggtgccacagcagccgacatacgtccaggccctctttgactttgatccccaggaggatggagagctgggcttccgccggggagattttatccatgtcatggataactcagaccccaactggtggaaaggagcttgccacgggcagaccggcatgtttccccgcaattatgtcacccccgtgaaccggaacgtctaagagtcaagaagcaattatttaaagaaagtgaaaaatgtaaaacacatacaaaagaattaaacccacaagctgcctctgacagcagcctgtgagggagtgcagaacacctggccgggtcaccctgtgaccctctcactttggttggaactttagggggtgggagggggcgttggatttaaaaatgccaaaacttacctataaattaagaagagtttttattacaaattttcactgctgctcctctttcccctcctttgtcttttttttcatccttttttctcttctgtccatcagtgcatgacgtttaaggccacgtatagtcctagctgacgccaataataaaaaacaagaaaccaagtgggctggtattctctctatgcaaaatgtctgttttagttggaatgactgaaagaagaacagctgttcctgtgttcttcgtatatacacacaaaaaggagcgggcagggccgctcgatgcctttgctgtttagcttcctccagaggaggggacttgtaggaatctgccttccagcccagacccccagtgtattttgtccaagttcacagtagagtagggtagaaggaaagcatgtctctgcttccatggcttcctgagaaagcccacctgggctgggcgcggtggctcacgcctgtaatcccagcactttgggaggccaaggtgggcggatcacaaggtcaggagttcgagaccaacctagccaacatggtgaaaccccgtctctactaaaaataagaaattagccgggtgtggcacgcacctgtagtcccagctacttgggagcctgaggcaggagaatcgcttgaacctgggaagtggaggttgagtgagccgggaccgtgccattgtactccagcctgggtgacagagcgagattccgtctcaaaaaaaaaaaaaaaaagcccacctgaaagcctgtctctttccactttgttggcccttccagtgggattatcgagcatgttgttttttcatagtgcctttttccttatttcaagggttgcttctgagtggtgttttttttttttttttaatttgttttgttttaaaataagttaaaggcagtccagagcttttcagccaatttgtctcctactctgtgtaaatatttttccctccgggcaggggagccagggtagagcaaaggagacaaagcaggagtggaaggtgaggcgttctcctgcttgtactaagccaggaggctttaagctccagctttaagggttgtgagccccttgggggttcagggaactgcttgcccagggtgcagtgtgagtgtgatgggccaccggggcaagagggaaggtgaccgcccagctctcccacatcccactggatctggcttacaggggggtcggaagcctgtcctcaccgtctcgggggttgtggcccccgccccctccctatatgcacccctggaaccagcaagtcccagacaaggagagcggaggaggaagtcatgggaacgcagcctccagttgtagcaggtttcactattcctatgctggggtacacagtgagagtactcacttttcacttgtcttgctcttagattgggccatggctttcatcctgtgtcccctgacctgtccaggtgagtgtgagggcagcactgggaagctggagtgctgcttgtgcctcccttcccagtgggctgtgttgactgctgctccccacccctaccgatggtcccaggaagcagggagagttggggaaggcaagattggaaagacaggaagaccaaggcctcggcagaactctctgtcttctctccacttctggtcccctgtggtgatgtgcctgtaatctttttctccacccaaaccccttcccacgacaaaaacaagactgcctccctctcttccgggagctggtgacagccttgggcctttcagtcccaaagcggccgatgggagtctccctccgactccagatatgaacagggcccaggcctggagcgtttgctgtgccaggaggcggcagctcttctgggcagagcctgtccccgccttccctcactcttcctcatcctgcttctcttttcctcgcagatgataaaaggaatctggcattctacacctggaccatttgattgttttattttggaattggtgtatatcatgaagccttgctgaactaagttttgtgtgtatatatttaaaaaaaaaatcagtgtttaaataaagacctatgtacttaatcctttaactctgcggatagcatttggtaggtagtgattaactgtgaataataaatacacaatgaattcttca

SEQ ID NO: 124306 - DNA, 3729 bp, Artificial Sequence
  derived and/or modified sequence
gagtacgggaggctgcgctcggcgcctctctcgtgccttttcctcttggctctacagcgggagtgggccccgggggaaccgggaccggccccggggttcgcgtcggggcggcgaggcttgggacgtggagcgcaatccccggggctccggactctacgtttccccttttggggcgcttccttcctggggaccgtcctcctccggctcttggctctgggcagtccgggggaagaggtcggggttctctggcgaggtcccctgccttcatcgggagggtttgcacggaaggggcccgggaagcccaggcgggccgaacgccgaccgagtcagtctacccgagcctggcggcgggggactggtgtgggctgcagctgtggtgattgatgtgccttcgacctgcacggcaaccacgtcaccatctcctggcgtctttgggcttaattttgtgcgggaatccactttggggtggaacgtttgctgctggagccgggggagatacctttattctgacacttaaaaaaaaaaactatttgaaaaatatttgtcaagaaaaattcagcagtagcaggttggactgcaccgaggaaggattgcggcgagagcgggcgctggtaattttcatttgcagcgcgccctctctatgattggtggcattgtgtgtcccagagtgccggagcgagtcccagaagagaggcgaggctaagcccagagcgctgggttgcttcagcagggaagactcccttccccctgcttcaggctgctgagcactgagcagcgctcagaatggaagccatcgccaaatatgacttcaaagctactgcagacgacgagctgagcttcaaaaggggggacatcctcaaggttttgaacgaagaatgtgatcagaactggtacaaggcagagcttaatggaaaagacggcttcattcccaagaactacatagaaatgaaaccacatccgtggttttttggcaaaatccccagagccaaggcagaagaaatgcttagcaaacagcggcacgatggggcctttcttatccgagagagtgagagcgctcctggggacttctccctctctgtcaagtttggaaacgatgtgcagcacttcaaggtgctccgagatggagccgggaagtacttcctctgggtggtgaagttcaattctttgaatgagctggtggattatcacagatctacatctgtctccagaaaccagcagatattcctgcgggacatagaacaggtgccacagcagccgacatacgtccaggccctctttgactttgatccccaggaggatggagagctgggcttccgccggggagattttatccatgtcatggataactcagaccccaactggtggaaaggagcttgccacgggcagaccggcatgtttccccgcaattatgtcacccccgtgaaccggaacgtctaagagtcaagaagcaattatttaaagaaagtgaaaaatgtaaaacacatacaaaagaattaaacccacaagctgcctctgacagcagcctgtgagggagtgcagaacacctggccgggtcaccctgtgaccctctcactttggttggaactttagggggtgggagggggcgttggatttaaaaatgccaaaacttacctataaattaagaagagtttttattacaaattttcactgctgctcctctttcccctcctttgtcttttttttcatccttttttctcttctgtccatcagtgcatgacgtttaaggccacgtatagtcctagctgacgccaataataaaaaacaagaaaccaagtgggctggtattctctctatgcaaaatgtctgttttagttggaatgactgaaagaagaacagctgttcctgtgttcttcgtatatacacacaaaaaggagcgggcagggccgctcgatgcctttgctgtttagcttcctccagaggaggggacttgtaggaatctgccttccagcccagacccccagtgtattttgtccaagttcacagtagagtagggtagaaggaaagcatgtctctgcttccatggcttcctgagaaagcccacctgggctgggcgcggtggctcacgcctgtaatcccagcactttgggaggccaaggtgggcggatcacaaggtcaggagttcgagaccaacctagccaacatggtgaaaccccgtctctactaaaaataagaaattagccgggtgtggcacgcacctgtagtcccagctacttgggagcctgaggcaggagaatcgcttgaacctgggaagtggaggttgagtgagccgggaccgtgccattgtactccagcctgggtgacagagcgagattccgtctcaaaaaaaaaaaaaaaaagcccacctgaaagcctgtctctttccactttgttggcccttccagtgggattatcgagcatgttgttttttcatagtgcctttttccttatttcaagggttgcttctgagtggtgttttttttttttttttaatttgttttgttttaaaataagttaaaggcagtccagagcttttcagccaatttgtctcctactctgtgtaaatatttttccctccgggcaggggagccagggtagagcaaaggagacaaagcaggagtggaaggtgaggcgttctcctgcttgtactaagccaggaggctttaagctccagctttaagggttgtgagccccttgggggttcagggaactgcttgcccagggtgcagtgtgagtgtgatgggccaccggggcaagagggaaggtgaccgcccagctctcccacatcccactggatctggcttacaggggggtcggaagcctgtcctcaccgtctcgggggttgtggcccccgccccctccctatatgcacccctggaaccagcaagtcccagacaaggagagcggaggaggaagtcatgggaacgcagcctccagttgtagcaggtttcactattcctatgctggggtacacagtgagagtactcacttttcacttgtcttgctcttagattgggccatggctttcatcctgtgtcccctgacctgtccaggtgagtgtgagggcagcactgggaagctggagtgctgcttgtgcctcccttcccagtgggctgtgttgactgctgctccccacccctaccgatggtcccaggaagcagggagagttggggaaggcaagattggaaagacaggaagaccaaggcctcggcagaactctctgtcttctctccacttctggtcccctgtggtgatgtgcctgtaatctttttctccacccaaaccccttcccacgacaaaaacaagactgcctccctctcttccgggagctggtgacagccttgggcctttcagtcccaaagcggccgatgggagtctccctccgactccagatatgaacagggcccaggcctggagcgtttgctgtgccaggaggcggcagctcttctgggcagagcctgtccccgccttccctcactcttcctcatcctgcttctcttttcctcgcagatgataaaaggaatctggcattctacacctggaccatttgattgttttattttggaattggtgtatatcatgaagccttgctgaactaagttttgtgtgtatatatttaaaaaaaaaatcagtgtttaaataaagacctatgtacttaatcctttaactctgcggatagcatttggtaggtagtgattaactgtgaataataaatacacaatgaattcttca

SEQ ID NO: 124307 - DNA, 3182 bp, Artificial Sequence
  derived and/or modified sequence
gagccagggggcgtgggggctgggacagcaggccgattggcagggcggggttgccttcaatcctggccactgctcttaatcgtccctctcctgcttcagggtggcattgtgtgtcccagagtgccggagcgagtcccagaagagaggcgaggctaagcccagagcgctgggttgcttcagcagggaagactcccttccccctgcttcaggctgctgagcactgagcagcgctcagaatggaagccatcgccaaatatgacttcaaagctactgcagacgacgagctgagcttcaaaaggggggacatcctcaaggttttgaacgaagaatgtgatcagaactggtacaaggcagagcttaatggaaaagacggcttcattcccaagaactacatagaaatgaaaccacatccgtggttttttggcaaaatccccagagccaaggcagaagaaatgcttagcaaacagcggcacgatggggcctttcttatccgagagagtgagagcgctcctggggacttctccctctctgtcaagtttggaaacgatgtgcagcacttcaaggtgctccgagatggagccgggaagtacttcctctgggtggtgaagttcaattctttgaatgagctggtggattatcacagatctacatctgtctccagaaaccagcagatattcctgcgggacatagaacaggtgccacagcagccgacatacgtccaggccctctttgactttgatccccaggaggatggagagctgggcttccgccggggagattttatccatgtcatggataactcagaccccaactggtggaaaggagcttgccacgggcagaccggcatgtttccccgcaattatgtcacccccgtgaaccggaacgtctaagagtcaagaagcaattatttaaagaaagtgaaaaatgtaaaacacatacaaaagaattaaacccacaagctgcctctgacagcagcctgtgagggagtgcagaacacctggccgggtcaccctgtgaccctctcactttggttggaactttagggggtgggagggggcgttggatttaaaaatgccaaaacttacctataaattaagaagagtttttattacaaattttcactgctgctcctctttcccctcctttgtcttttttttcatccttttttctcttctgtccatcagtgcatgacgtttaaggccacgtatagtcctagctgacgccaataataaaaaacaagaaaccaagtgggctggtattctctctatgcaaaatgtctgttttagttggaatgactgaaagaagaacagctgttcctgtgttcttcgtatatacacacaaaaaggagcgggcagggccgctcgatgcctttgctgtttagcttcctccagaggaggggacttgtaggaatctgccttccagcccagacccccagtgtattttgtccaagttcacagtagagtagggtagaaggaaagcatgtctctgcttccatggcttcctgagaaagcccacctgggctgggcgcggtggctcacgcctgtaatcccagcactttgggaggccaaggtgggcggatcacaaggtcaggagttcgagaccaacctagccaacatggtgaaaccccgtctctactaaaaataagaaattagccgggtgtggcacgcacctgtagtcccagctacttgggagcctgaggcaggagaatcgcttgaacctgggaagtggaggttgagtgagccgggaccgtgccattgtactccagcctgggtgacagagcgagattccgtctcaaaaaaaaaaaaaaaaagcccacctgaaagcctgtctctttccactttgttggcccttccagtgggattatcgagcatgttgttttttcatagtgcctttttccttatttcaagggttgcttctgagtggtgttttttttttttttttaatttgttttgttttaaaataagttaaaggcagtccagagcttttcagccaatttgtctcctactctgtgtaaatatttttccctccgggcaggggagccagggtagagcaaaggagacaaagcaggagtggaaggtgaggcgttctcctgcttgtactaagccaggaggctttaagctccagctttaagggttgtgagccccttgggggttcagggaactgcttgcccagggtgcagtgtgagtgtgatgggccaccggggcaagagggaaggtgaccgcccagctctcccacatcccactggatctggcttacaggggggtcggaagcctgtcctcaccgtctcgggggttgtggcccccgccccctccctatatgcacccctggaaccagcaagtcccagacaaggagagcggaggaggaagtcatgggaacgcagcctccagttgtagcaggtttcactattcctatgctggggtacacagtgagagtactcacttttcacttgtcttgctcttagattgggccatggctttcatcctgtgtcccctgacctgtccaggtgagtgtgagggcagcactgggaagctggagtgctgcttgtgcctcccttcccagtgggctgtgttgactgctgctccccacccctaccgatggtcccaggaagcagggagagttggggaaggcaagattggaaagacaggaagaccaaggcctcggcagaactctctgtcttctctccacttctggtcccctgtggtgatgtgcctgtaatctttttctccacccaaaccccttcccacgacaaaaacaagactgcctccctctcttccgggagctggtgacagccttgggcctttcagtcccaaagcggccgatgggagtctccctccgactccagatatgaacagggcccaggcctggagcgtttgctgtgccaggaggcggcagctcttctgggcagagcctgtccccgccttccctcactcttcctcatcctgcttctcttttcctcgcagatgataaaaggaatctggcattctacacctggaccatttgattgttttattttggaattggtgtatatcatgaagccttgctgaactaagttttgtgtgtatatatttaaaaaaaaaatcagtgtttaaataaagacctatgtacttaatcctttaactctgcggatagcatttggtaggtagtgattaactgtgaataataaatacacaatgaattcttca

SEQ ID NO: 124308 - DNA, 654 bp, Artificial Sequence
  derived and/or modified sequence
atggaggccatcgccaagtatgacttcaaggccacagcagatgatgagctgtccttcaagagaggagacatcctgaaggtgctgaatgaagaatgtgaccagaactggtacaaggccgagctgaatggcaaggatggcttcatccccaagaactacatcgagatgaagccccacccctggttcttcggcaagatcccccgggccaaggccgaggagatgctgagcaagcagagacatgatggagccttcctgatccgggagagcgagagcgcccctggggacttcagcctgtctgtgaagtttggaaatgatgtgcagcacttcaaggtgctgagagatggagctgggaagtacttcctgtgggtggtgaagttcaacagcctgaatgagctggtggactaccacaggagcacctctgtgtccaggaaccagcagatcttcctgcgggacatcgagcaggtgccccagcagcccacctacgtgcaggccctgtttgattttgacccccaggaggatggagagctgggcttccggcggggggacttcatccacgtgatggacaacagcgaccccaactggtggaagggggcctgccacggccagacaggcatgttccccagaaattatgtgacccctgtgaacagaaatgtgtag

SEQ ID NO: 124309 - DNA, 654 bp, Artificial Sequence
  derived and/or modified sequence
atggaggccatcgccaagtacgacttcaaggccaccgccgacgacgagctgtcgtttaagaggggtgatattctgaaggtgcttaatgaagaatgtgaccagaactggtataaagctgaattgaacggcaaggatggtttcatccccaaaaattatattgagatgaaaccccacccttggttcttcgggaaaattccacgggcaaaggctgaggagatgctgtccaagcagcgacacgatggcgctttcttaatccgcgagtctgaatccgcacccggcgacttctctctgtccgtgaaattcggcaatgacgtgcagcatttcaaagtattgagggacggagccggaaaatatttcctgtgggtggtgaagtttaactcactgaacgagctcgtggactaccaccgcagcaccagtgtgtctaggaaccaacagatctttctcagggacattgaacaggtccctcaacagcccacatacgtccaggcattatttgactttgaccctcaagaagacggggagttgggcttcaggaggggggacttcattcacgtgatggacaatagtgacccaaattggtggaaaggagcttgtcacggacagaccggtatgttccccagaaattacgtgacaccagtgaacagaaatgtctag

SEQ ID NO: 124310 - DNA, 654 bp, Artificial Sequence
  derived and/or modified sequence
atggaggccatcgccaagtacgacttcaaggccaccgccgacgacgaattgtcattcaaacggggcgacatactgaaggtactcaatgaggaatgtgaccagaattggtacaaggcagaactgaacgggaaggatggatttatcccaaagaactacatcgaaatgaaacctcacccctggttctttggaaagatcccacgggcgaaggctgaggagatgctttccaagcaacgccacgatggcgccttcctaatccgagagtccgaatcagcccccggagactttagcctgagcgtaaaattcggaaacgacgtccagcacttcaaagttctgcgtgacggggccggcaaatactttctgtgggtggttaaatttaatagtctcaatgagctggtcgattatcaccgaagtacaagtgtctcaagaaatcagcagatcttcctcagagatatagagcaggtgccacagcaacctacatacgtccaagcactgttcgacttcgaccctcaggaggacggtgagctgggctttcgacgcggagatttcattcatgttatggacaattcagatccaaattggtggaagggagcatgtcacggtcagaccgggatgtttccccgaaattacgtcacccccgtgaaccgaaacgtgtag

SEQ ID NO: 124311 - DNA, 654 bp, Artificial Sequence
  derived and/or modified sequence
atggaggccatcgccaagtacgacttcaaggccaccgccgacgacgagttaagctttaaaagaggcgatatcctcaaagtcttaaacgaagagtgcgatcaaaattggtacaaagcggaactgaatggaaaggacggcttcatcccaaaaaactacattgagatgaagccgcacccatggttcttcggcaagattccccgggcaaaagcggaggaaatgttgagtaaacaaaggcacgacggtgcctttctaatcagggagtccgagtccgcacctggcgactttagtctcagtgtcaagttcggcaacgatgtgcagcacttcaaagtgcttcgagatggggccgggaaatactttctctgggtggttaaatttaacagcctgaatgaactggtggactaccacaggtccacatctgtgtcgcggaaccagcagatttttctgagagacattgaacaggttcctcaacagcccacctatgtccaggccctgttcgactttgatccacaggaggacggcgagttaggattcagaaggggggacttcatacatgttatggataacagcgacccaaactggtggaagggcgcttgtcatggccagactggaatgttcccccggaattatgtcactcccgtaaataggaatgtttag

SEQ ID NO: 124312 - DNA, 654 bp, Artificial Sequence
  derived and/or modified sequence
atggaagccattgccaagtacgattttaaggctactgcagacgatgaattgtcctttaagcggggtgacattctcaaagtgttgaacgaggagtgcgaccagaattggtataaagccgagctgaatggtaaagacggatttattcccaaaaattatattgagatgaaacctcacccttggtttttcggaaaaattcctagggcaaaagccgaagaaatgctctctaaacagcgccatgacggggcattcctaatacgggagtccgaatccgcccctggtgatttcagcctctccgtgaaatttggtaacgacgtgcagcacttcaaggtcctacgagatggagcaggcaagtactttttgtgggtcgtgaagtttaactccctaaacgagctggtggattaccacaggtcgaccagtgtatcccggaatcagcagatcttcctgcgcgatattgaacaggtcccacagcagccaacctatgtgcaggctttgttcgatttcgacccacaggaagacggagagctcggattccggagaggcgatttcattcacgtcatggataattccgaccctaactggtggaaaggtgcatgccatggtcagacaggtatgttccctcgaaactacgtgactccagtgaacaggaatgtgtag

SEQ ID NO: 124313 - DNA, 654 bp, Artificial Sequence
  derived and/or modified sequence
atggaagcaatcgcgaaatacgactttaaggctaccgccgacgatgaattgtcattcaagaggggagatatccttaaagtcctgaatgaggaatgcgatcaaaactggtataaagccgagctgaacggcaaagatggcttcatcccaaagaattacattgaaatgaaaccacacccctggttctttggtaaaatccctagagctaaagctgaagagatgctcagtaagcagcgccacgacggcgctttcctgatccgggagagtgagtcagcgcctggcgatttttcactcagcgtgaaattcggtaatgacgtgcaacatttcaaagtgttgcgtgatggagccggaaagtacttcctgtgggtggtgaagtttaattctctaaacgaactggtggactaccaccggtccacatccgtcagtagaaaccagcagatcttcctaagagacattgagcaggtcccgcagcaaccaacgtatgtccaggccctcttcgacttcgatccccaggaggacggagagctaggctttaggagaggagatttcattcacgttatggacaactcagacccaaattggtggaagggagcctgccacggccaaaccggtatgttccccaggaactatgttacacccgtaaacagaaatgtatag

SEQ ID NO: 124314 - DNA, 654 bp, Artificial Sequence
  derived and/or modified sequence
atggaggccatcgcaaagtatgattttaaggccacagctgatgatgagctctcttttaagcggggtgacatcctcaaggtgctcaacgaagagtgcgatcagaattggtataaagcggaattgaatggaaaggatggcttcattcctaaaaattatatcgagatgaaaccacacccatggttctttgggaaaatcccccgagccaaggccgaagagatgctctctaaacagcgtcatgatggcgcatttctgatccgggaaagcgagtccgcgccaggcgacttctctctgtccgtaaaattcggaaatgacgtacagcatttcaaggttcttcgtgatggcgctggcaagtatttcctttgggttgtaaagttcaattctctgaatgagctggtcgactaccaccgaagcaccagtgtttcccggaaccaacagattttcctccgagacatcgaacaggtccctcagcagccaacctacgtccaggcattatttgatttcgaccctcaggaggatggagagttgggcttccgcaggggagacttcattcacgtcatggacaacagtgatccgaattggtggaaaggtgcatgccatggccagacaggcatgtttccacggaactacgtgactcccgtgaatcggaacgtgtag

SEQ ID NO: 124315 - protein, 107 aa, Artificial Sequence
  derived and/or modified sequence
MARATLSAAPSNPRLLRVALLLLLLVAASRRAAGAPLATELRCQCLQTLQGIHLKNIQSVKVKSPGPHCAQTEVIATLKNGQKACLNPASPMVKKIIEKMLKNGKSN

SEQ ID NO: 124316 - DNA, 324 bp, Artificial Sequence
  derived and/or modified sequence
atggccagagcaaccttatccgctgctccgtctaatccccggctccttcgggtagcccttctgctgttattgctggttgcagcctctcgaagagccgccggtgctccattggctacggaactccgatgtcagtgtctgcagacactccaaggcatccatctgaagaatattcagtctgttaaggtgaaaagtcctggaccccactgcgctcaaaccgaggttattgccacactaaagaatggccagaaagcctgcctgaatcctgccagcccgatggtgaagaaaataatagagaagatgttgaagaacggcaagtccaattag

SEQ ID NO: 124317 - DNA, 324 bp, Artificial Sequence
  derived and/or modified sequence
atggcccgggccaccctgtctgctgcccccagcaacccccggctgctgcgggtggccctgctgctgctgctgctggtggccgccagccggcgggctgctggggcccccctggccacagagctgcgctgccagtgcctgcagaccctgcagggcatccacctgaagaacatccagagcgtgaaggtgaagagccctggcccccactgtgcccagacagaggtgattgccaccctgaagaatggccagaaggcctgcctgaacccagccagccccatggtgaagaagatcatcgagaagatgctgaagaatggcaagagcaactag

SEQ ID NO: 124318 - DNA, 324 bp, Artificial Sequence
  derived and/or modified sequence
atggcccgggccaccctgagcgccgcccccagcaacccccggctgttacgggttgcactgctgctactgttattggtagcagcttcacggagggcggcaggggctccactcgctaccgaactgcggtgccagtgtttacagacactgcaggggatccatctcaagaatatccagtctgtgaaagtcaagagcccagggccacactgcgcacagaccgaggtcatcgccacactcaaaaatggccaaaaggcctgtttgaaccctgcttcgccaatggtaaaaaagatcatcgagaagatgttaaaaaatgggaaatccaattag

SEQ ID NO: 124319 - DNA, 324 bp, Artificial Sequence
  derived and/or modified sequence
atggcacgggcaacattatcagctgcgccttcaaacccgagactgttgcgggtggcgctgctgttgctgcttctagtggccgcttcacgtagagcggcaggtgcgccactggccactgaactccgatgccagtgcctgcaaactctgcagggcattcatctgaaaaacatccaatctgtgaaggtaaaatctcctggaccacattgcgcccagacggaggtaattgccacgctgaagaacggccaaaaggcctgtctgaacccagcctctccaatggtgaagaagatcattgagaaaatgctgaaaaatggcaagtctaactag

SEQ ID NO: 124320 - DNA, 1177 bp, Artificial Sequence
  derived and/or modified sequence
cgggatcgatctggagctccgggaatttccctggcccgggactccgggctttccagccccaaccatgcataaaaggggttcgccgttctcggagagccacagagcccgggccacaggcagctccttgccagctctcctcctcgcacagccgctcgaaccgcctgctgagccccatggcccgcgccacgctctccgccgcccccagcaatccccggctcctgcgggtggcgctgctgctcctgctcctggtggccgccagccggcgcgcagcaggagcgcccctggccactgaactgcgctgccagtgcttgcagaccctgcagggaattcacctcaagaacatccaaagtgtgaaggtgaagtcccccggaccccactgcgcccaaaccgaagtcatagccacactcaagaatgggcagaaagcttgtctcaaccccgcatcgcccatggttaagaaaatcatcgaaaagatgctgaaaaatggcaaatccaactgaccagaaggaaggaggaagcttattggtggctgttcctgaaggaggccctgcccttacaggaacagaagaggaaagagagacacagctgcagaggccacctggattgcgcctaatgtgtttgagcatcacttaggagaagtcttctatttatttatttatttatttatttgtttgttttagaagattctatgttaatattttatgtgtaaaataaggttatgattgaatctacttgcacactctcccattatatttattgtttattttaggtcaaacccaagttagttcaatcctgattcatatttaatttgaagatagaaggtttgcagatattctctagtcatttgttaatatttcttcgtgatgacatatcacatgtcagccactgtgatagaggctgaggaatccaagaaaatggccagtgagatcaatgtgacggcagggaaatgtatgtgtgtctattttgtaactgtaaagatgaatgtcagttgttatttattgaaatgatttcacagtgtgtggtcaacatttctcatgttgaagctttaagaactaaaatgttctaaatatcccttggacattttatgtctttcttgtaaggcatactgccttgtttaatgttaattatgcagtgtttccctctgtgttagagcagagaggtttcgatatttattgatgtt

SEQ ID NO: 124321 - DNA, 324 bp, Artificial Sequence
  derived and/or modified sequence
atggccagagccaccctgagcgccgcccccagcaaccccagactgctgagagtggccctgctgctgctgctgctggtggccgccagcagaagagccgccggcgcccccctggccaccgagctgagatgccagtgcctgcagaccctgcagggcatccacctgaagaacatccagagcgtgaaggtgaagagccccggcccccactgcgcccagaccgaggtgatcgccaccctgaagaacggccagaaggcctgcctgaaccccgccagccccatggtgaagaagatcatcgagaagatgctgaagaacggcaagagcaactag

SEQ ID NO: 124322 - protein, 107 aa, Artificial Sequence
  derived and/or modified sequence
MAHATLSAAPSNPRLLRVALLLLLLVAASRRAAGASVVTELRCQCLQTLQGIHLKNIQSVNVRSPGPHCAQTEVIATLKNGKKACLNPASPMVQKIIEKILNKGSTN

SEQ ID NO: 124323 - DNA, 324 bp, Artificial Sequence
  derived and/or modified sequence
atggctcacgccacactgagtgcggccccctcgaatccccggctgctccgcgtggcgctgctgttgctcttgctggttgcagcctccagacgggctgcaggagcgtctgtggtcacggagctgagatgtcagtgtctgcagacactgcagggaatccatctgaaaaatattcagagtgttaacgtccgatcgcccggtccacattgtgcacagaccgaggtaattgccacactaaaaaacggaaagaaagcttgcttaaacccagcttctcccatggtgcagaagataattgaaaaaattctgaacaagggcagcaccaactag

SEQ ID NO: 124324 - DNA, 324 bp, Artificial Sequence
  derived and/or modified sequence
atggcccacgccaccctgtctgctgcccccagcaacccccggctgctgcgggtggccctgctgctgctgctgctggtggccgccagccggcgggctgctggggcctctgtggtgacagagctgcgctgccagtgcctgcagaccctgcagggcatccacctgaagaacatccagagcgtgaatgtgcgcagccctggcccccactgtgcccagacagaggtgattgccaccctgaagaatggcaagaaggcctgcctgaacccagccagccccatggtgcagaagatcatcgagaagatcctgaacaagggcagcaccaactag

SEQ ID NO: 124325 - DNA, 324 bp, Artificial Sequence
  derived and/or modified sequence
atggcccacgccaccctgagcgccgcccccagcaacccccggctgctacgcgttgctctcctgctgctccttctcgttgccgcctcacgcagagccgctggtgcatccgtagtgacagaacttcgatgtcaatgcttacagactctccagggaatacacctgaaaaatattcagtctgtgaatgtaaggtctccaggtccccactgtgctcagacagaagttattgcaactttgaaaaacggcaaaaaggcatgtctgaatcccgcctcaccaatggttcagaaaatcatagagaagatcctgaacaagggaagcacgaactag

SEQ ID NO: 124326 - DNA, 324 bp, Artificial Sequence
  derived and/or modified sequence
atggcccacgcaaccttgtcggctgctcccagtaacccaaggctactacgggtggcgctgcttttactgctgctcgtggctgcctcgcggagggcggctggcgcttccgtggtgacagagttgcgttgtcaatgcctgcagacactgcagggtatccacctgaagaatatccaaagtgtaaatgtcaggagccctggccctcactgcgcccagactgaggtcatagctacgttgaagaacggaaagaaggcatgccttaacccggcttcccctatggtgcagaagattatcgaaaagatattgaacaagggctctactaactag

SEQ ID NO: 124327 - DNA, 1075 bp, Artificial Sequence
  derived and/or modified sequence
acacagcccgggtcgcaggcacctccccgccagctctcccgcttctcgcacagcttcccgacgcgtctgctgagccccatggcccacgccacgctctccgccgcccccagcaatccccggctcctgcgggtggcgctgctgctcctgctcctggtggccgccagccggcgcgcagcaggagcgtccgtggtcactgaactgcgctgccagtgcttgcagacactgcagggaattcacctcaagaacatccaaagtgtgaatgtaaggtcccccggaccccactgcgcccaaaccgaagtcatagccacactcaagaatgggaagaaagcttgtctcaaccccgcatcccccatggttcagaaaatcatcgaaaagatactgaacaaggggagcaccaactgacaggagagaagtaagaagcttatcagcgtatcattgacacttcctgcagggtggtccctgcccttaccagagctgaaaatgaaaaagagaacagcagctttctagggacagctggaaaggacttaatgtgtttgactatttcttacgagggttctacttatttatgtatttatttttgaaagcttgtattttaatattttacatgctgttatttaaagatgtgagtgtgtttcatcaaacatagctcagtcctgattatttaattggaatatgatgggttttaaatgtgtcattaaactaatatttagtgggagaccataatgtgtcagccaccttgataaatgacagggtggggaactggagggtggggggattgaaatgcaagcaattagtggatcactgttagggtaagggaatgtatgtacacatctattttttatactttttttttaaaaaaagaatgtcagttgttatttattcaaattatctcacattatgtgttcaacatttttatgctgaagtttcccttagacattttatgtcttgcttgtagggcataatgccttgtttaatgtccattctgcagcgtttctctttcccttggaaaagagaatttatcattactgttacatttgtacaaatgacatgataataaaagttttatgaaaaaaaa

SEQ ID NO: 124328 - DNA, 324 bp, Artificial Sequence
  derived and/or modified sequence
atggcccacgccaccctgagcgccgcccccagcaaccccagactgctgagagtggccctgctgctgctgctgctggtggccgccagcagaagagccgccggcgccagcgtggtgaccgagctgagatgccagtgcctgcagaccctgcagggcatccacctgaagaacatccagagcgtgaacgtgagaagccccggcccccactgcgcccagaccgaggtgatcgccaccctgaagaacggcaagaaggcctgcctgaaccccgccagccccatggtgcagaagatcatcgagaagatcctgaacaagggcagcaccaactag

SEQ ID NO: 124329 - protein, 148 aa, Artificial Sequence
  derived and/or modified sequence
MRGRELPLVLLALVLCLAPRGRAVPLPAGGGTVLTKMYPRGNHWAVGHLMGKKSTGESSSVSERGSLKQQLREYIRWEEAARNLLGLIEAKENRNHQPPQPKALGNQQPSWDSEDSSNFKDVGSKGKVGRLSAPGSQREGRNPQLNQQ

SEQ ID NO: 124330 - DNA, 447 bp, Artificial Sequence
  derived and/or modified sequence
atgagaggtagggagcttcctctggtccttctggcactcgtgctgtgtttggcgccaagggggcgggccgttcccctgccagccggcggagggaccgtcctcactaagatgtatccccgcgggaatcattgggcggttgggcacttaatggggaagaagtctactggcgagagtagctcggtgagtgaaaggggctccctgaaacagcagttacgcgagtacatccgctgggaagaagcggcacgcaatctgctagggttaattgaggctaaggaaaacagaaaccaccaacccccacagcccaaagctctaggcaaccagcagccttcctgggacagcgaagatagttctaactttaaggatgtgggcagcaaaggaaaggtaggccgcctcagcgctcctggaagtcagcgcgagggacgcaacccccagctgaaccaacagtag

SEQ ID NO: 124331 - DNA, 848 bp, Artificial Sequence
  derived and/or modified sequence
ccagcggctgcggcggcggagctcctccgaggtccgggtcaccagtctctgctcttcccagcctctccggcgcgctccaagggcttcccgtcgggaccatgcgcggccgtgagctcccgctggtcctgctggcgctggtcctctgcctggcgccccgggggcgagcggtcccgctgcctgcgggcggagggaccgtgctgaccaagatgtacccgcgcggcaaccactgggcggtggggcacttaatggggaaaaagagcacaggggagtcttcttctgtttctgagagagggagcctgaagcagcagctgagagagtacatcaggtgggaagaagctgcaaggaatttgctgggtctcatagaagcaaaggagaacagaaaccaccagccacctcaacccaaggccctgggcaatcagcagccttcgtgggattcagaggatagcagcaacttcaaagatgtaggttcaaaaggcaaagttggtagactctctgctccaggttctcaacgtgaaggaaggaacccccagctgaaccagcaatgataatgatggcctctctcaaaagagaaaaacaaaacccctaagagactgcgttctgcaagcatcagttctacggatcatcaacaagatttccttgtgcaaaatatttgactattctgtatctttcatccttgactaaattcgtgattttcaagcagcatcttctggtttaaacttgtttgctgtgaacaattgtcgaaaagagtcttccaattaatgcttttttatatctaggctacctgttggttagattcaaggccccgagctgttaccattcacaataaaagcttaaacacattgtccaaa

SEQ ID NO: 124332 - DNA, 447 bp, Artificial Sequence
  derived and/or modified sequence
atgaggggccgggagctgcccctggtgctgctggccctggtgctgtgcctggccccccggggccgggctgtgcccctgcctgctgggggcggcaccgtgctgaccaagatgtacccccggggcaaccactgggccgtgggccacctgatgggcaagaagagcactggagagagcagctctgtgtctgagcggggcagcctgaagcagcagctgcgggagtacatccgctgggaggaggccgccaggaacctgctgggcctcatcgaggccaaggagaacagaaaccaccagcccccccagcccaaggccctgggcaaccagcagcccagctgggacagcgaggacagcagcaacttcaaggatgtgggcagcaagggcaaggtgggccgcctgagcgcccctggcagccagcgggagggcaggaacccccagctgaaccagcagtag

SEQ ID NO: 124333 - DNA, 447 bp, Artificial Sequence
  derived and/or modified sequence
atgcggggccgggagctgcccctggtgctgctggccctggtgctgtgtttggctccgagaggtcgtgctgtgccgctccccgccgggggtgggacagttctcactaagatgtacccaagaggcaatcactgggccgtggggcacctcatggggaaaaagagcaccggcgagtcctcctcagtttccgagcgcgggtctcttaaacagcagctccgggagtatattcggtgggaagaggcagcacgtaacctgctgggtctcatcgaggccaaggagaacagaaaccaccagccccctcagcccaaggcactcggcaaccagcaaccatcgtgggacagtgaagatagctctaactttaaagacgttggctcaaaagggaaggtgggtcggctgagcgctcctgggtcacaacgcgagggccggaatccacagctcaaccaacagtag

SEQ ID NO: 124334 - DNA, 447 bp, Artificial Sequence
  derived and/or modified sequence
atgaggggtagggaactgccgttagttctactcgccctcgtcctctgtttggcccctaggggtagggccgtgccgcttcctgcgggagggggtacagtgctgaccaagatgtacccgaggggaaatcattgggctgttggtcacttgatgggaaaaaaatcaactggagaaagtagttcggtttcagagcggggaagtttgaaacagcagctgcgcgagtatatccggtgggaagaggccgctagaaaccttcttgggctgatcgaggccaaggagaataggaatcaccagcctccacagcccaaggcacttgggaaccaacagccaagttgggattctgaagattcaagcaattttaaggacgtgggctctaaggggaaagtggggaggttgagcgctcctggctcacagagagagggacgcaatccacaactgaaccagcaatag

SEQ ID NO: 124335 - DNA, 447 bp, Artificial Sequence
  derived and/or modified sequence
atgagaggcagagagctgcccctggtgctgctggccctggtgctgtgcctggcccccagaggcagagccgtgcccctgcccgccggcggcggcaccgtgctgaccaagatgtaccccagaggcaaccactgggccgtgggccacctgatgggcaagaagagcaccggcgagagcagcagcgtgagcgagagaggcagcctgaagcagcagctgagagagtacatcagatgggaggaggccgccagaaacctgctgggcctgatcgaggccaaggagaacagaaaccaccagcccccccagcccaaggccctgggcaaccagcagcccagctgggacagcgaggacagcagcaacttcaaggacgtgggcagcaagggcaaggtgggcagactgagcgcccccggcagccagagagagggcagaaacccccagctgaaccagcagtag

SEQ ID NO: 124336 - protein, 480 aa, Artificial Sequence
  derived and/or modified sequence
MAGTRWVLGALLRGCGCNCSSCRRTGAACLPFYSAAGSIPSGVSGRRRLLLLLGAAAAAASQTRGLQTGPVPPGRLAGPPAVATSAAAAAAASYSALRASLLPQSLAAAAAVPTRSYSQESKTTYLEDLPPPPEYELAPSKLEEEVDDVFLIRAQGLPWSCTMEDVLNFFSDCRIRNGENGIHFLLNRDGKRRGDALIEMESEQDVQKALEKHRMYMGQRYVEVYEINNEDVDALMKSLQVKSSPVVNDGVVRLRGLPYSCNEKDIVDFFAGLNIVDITFVMDYRGRRKTGEAYVQFEEPEMANQALLKHREEIGNRYIEIFPSRRNEVRTHVGSYKGKKIASFPTAKYITEPEMVFEEHEVNEDIQPMTAFESEKEIELPKEVPEKLPEAADFGTTSSLHFVHMRGLPFQANAQDIINFFAPLKPVRITMEYSSSGKATGEADVHFETHEDAVAAMLKDRSHVHHRYIELFLNSCPKGK

SEQ ID NO: 124337 - protein, 412 aa, Artificial Sequence
  derived and/or modified sequence
MAGTRWVLGALLRGCGCNCSSCRRTGAACLPFYSAAGSIPAAAVPTRSYSQESKTTYLEDLPPPPEYELAPSKLEEEVDDVFLIRAQGLPWSCTMEDVLNFFSDCRIRNGENGIHFLLNRDGKRRGDALIEMESEQDVQKALEKHRMYMGQRYVEVYEINNEDVDALMKSLQVKSSPVVNDGVVRLRGLPYSCNEKDIVDFFAGLNIVDITFVMDYRGRRKTGEAYVQFEEPEMANQALLKHREEIGNRYIEIFPSRRNEVRTHVGSYKGKKIASFPTAKYITEPEMVFEEHEVNEDIQPMTAFESEKEIELPKEVPEKLPEAADFGTTSSLHFVHMRGLPFQANAQDIINFFAPLKPVRITMEYSSSGKATGEADVHFETHEDAVAAMLKDRSHVHHRYIELFLNSCPKGK

SEQ ID NO: 124338 - DNA, 1443 bp, Artificial Sequence
  derived and/or modified sequence
atggcgggcacgcggtgggtgctaggagcgctgctgcgaggttgtggctgcaattgcagctcctgcaggcgaaccggagctgcttgcttgccgttctatagtgccgctgggtctattccatctggcgtctcagggaggaggagattgctcctgctcctcggagcggccgcagcagcggcaagccagacaagggggctgcagaccgggccagtgccacccggcaggctggccgggccacctgcggtggccacatctgctgcagcagctgccgcagctagctacagcgctctccgcgccagtttgctcccacaaagcctcgctgccgctgcagcagtccccacccgctcctacagccaggaatccaaaactacatacctggaggacctgccacccccccctgagtacgaactggccccatctaagctagaggaggaagtggacgacgtgttcctcatccgcgcacaaggccttccatggtcctgtacaatggaggacgtgctgaattttttctccgattgccgtattcggaatggcgagaatgggatccattttctcctgaatagggatggcaaacggaggggggatgcacttattgaaatggaaagcgagcaagacgttcagaaggctttagagaagcatcgaatgtatatgggacagaggtacgttgaggtttacgaaatcaataatgaggacgtggacgccctgatgaagagtctgcaggtgaagagttcccctgtagtgaatgacggggtggtgagactccgaggactgccttattcttgcaacgagaaggatatcgtcgacttctttgccgggctgaatattgtcgacatcacgtttgtgatggactatagaggcaggagaaagacaggcgaggcatacgtgcagttcgaagaacctgaaatggcgaatcaggccctgctgaagcaccgcgaggaaatcgggaacagatatatagaaatctttcccagtcgccgaaacgaggtgaggacacatgtgggtagctacaaaggcaagaagatcgcaagcttcccgacagccaaatacataactgagcctgagatggtctttgaagagcatgaggtgaacgaggacatccagcctatgacagcctttgaatcagagaaagagattgagctgccaaaggaggtcccagaaaagttgcccgaggctgccgactttgggacaaccagctccttgcattttgtgcacatgagaggattacccttccaggcaaatgcccaagatataatcaatttctttgcaccactgaaacctgttcgcatcactatggagtacagcagtagtggaaaagccactggcgaagcagacgtccacttcgaaacacacgaagatgcagtcgcagcgatgctgaaagacaggagtcacgtccatcaccggtacattgagttgtttctgaatagttgtccaaaaggtaagtag

SEQ ID NO: 124339 - DNA, 1239 bp, Artificial Sequence
  derived and/or modified sequence
atggccggaactagatgggtgctgggggcactattgagaggttgtgggtgtaattgcagctcttgcaggcgcaccggcgctgcatgtctgcccttctattccgccgcaggctcaattccggctgcagcagtcccgacaaggtcttactcacaggaatctaaaaccacttatctggaagatctgccaccacctcccgagtatgagctggccccctctaaattagaggaagaagtggacgatgtcttcctgatcagagcccagggactgccctggtcctgcaccatggaagatgtgctgaacttcttcagcgattgccgtatccgaaacggggagaacggcatccatttcctgctcaatagagacggcaaacgacgcggggacgctctcatcgagatggagtctgagcaggatgttcagaaggccctcgagaagcacaggatgtacatgggccagcgctacgtggaggtctatgaaatcaacaacgaggacgtagacgctctcatgaagagcttgcaggtcaaaagctcacccgtcgtgaatgacggagtggtgcggttgcggggtctcccatactcatgtaatgaaaaggacatcgtggacttctttgcggggctcaacatcgtggacatcacatttgtgatggactaccgcggcagacgaaagactggcgaagcttatgttcagttcgaagaacccgagatggcaaatcaggctctgctaaaacaccgggaggaaatcggaaatcgctatatcgaaatttttccctctagaaggaacgaggtgcgtacccacgttggcagttacaaaggtaaaaaaattgcttcattccccaccgcgaagtacattaccgagcctgaaatggtgtttgaggaacatgaagtgaatgaggacattcaacccatgaccgccttcgagtctgaaaaagagatcgagttgcccaaggaggtccctgagaagctgccagaagcagccgatttcgggacaactagttctctgcattttgtacacatgcgtggtttaccattccaagccaacgcccaggatatcataaacttctttgctcctctaaagcccgttagaattactatggagtacagcagtagcggtaaagctaccggggaagcggatgtgcactttgagacccacgaagacgccgtggctgcgatgctgaaggataggtctcatgttcaccaccggtatatcgagttattcctgaactcctgcccaaagggcaagtag

SEQ ID NO: 124340 - DNA, 1089 bp, Artificial Sequence
  derived and/or modified sequence
atggagtctaagaccacatatctggaagacttaccgccaccacccgaatacgaattagctccatctaaacttgaagaggaggtggacgacgtgtttctgatcagagcacaggggctgccatggtcctgcactatggaggatgtgctgaatttcttctctgactgtaggattcgaaacggagagaatggaatccacttcctgcttaatagagatggcaagcggcgcggcgatgcattaatagagatggagtcggaacaggatgttcagaaagccctggaaaaacaccggatgtatatggggcagaggtatgtcgaggtgtacgaaatcaacaatgaggatgtggatgccctgatgaagtccctgcaggtgaagtcatctcccgttgtgaacgacggcgtggtgagactccggggcctaccatacagctgcaatgaaaaggacattgtggatttttttgctggactgaacatcgtggacataactttcgtgatggactatagagggagaagaaaaaccggggaggcatatgtccagttcgaagaaccggagatggctaaccaggctctcctgaagcaccgggaggagataggcaaccgctatatagagatatttcctagcaggaggaacgaggtgcgcacacatgtgggatcatacaagggcaagaagatcgccagctttcccaccgctaaatatatcaccgagccagagatggtgtttgaggaacacgaagtgaacgaggatatacagcccatgaccgcatttgagagcgagaaagagattgaactgccaaaggaggtgccggaaaagctgccagaagctgccgatttcggtacaacttctagcctgcacttcgtacacatgcgcggattgcctttccaagcaaacgcgcaagacatcataaatttcttcgcaccgttgaaacctgtgcggatcactatggagtatagcagctccggcaaggcaaccggggaagccgatgtgcacttcgaaactcacgaggatgccgtggcagctatgctaaaagatagaagtcatgtccatcacaggtatattgagcttttcttaaacagctgccctaaaggaaaatag

SEQ ID NO: 124341 - DNA, 6666 bp, Artificial Sequence
  derived and/or modified sequence
agtgcccgcggcgcatgtgccaggcacaccccacccccaaccggccctggattccacttccgttccaccatcgctgctggagcagctgccttcaggccctgcgccgcctccggagtccatggccggcacgcgctgggtactcggggcgctgctccggggctgcggctgtaactgcagcagctgccggcgcaccggcgccgcctgcctgcccttctactccgccgctggctctatcccgtcgggcgtctcgggccgccgccgcctgctgctgctgctcggggccgccgcggccgctgcctcccagacgcgtggcctccagaccgggcctgtgcctcccgggaggctggcggggcctcccgctgtggccacctctgccgcggccgcggccgccgcgtcctactctgccctccgtgcctctctgctgccgcagtcgctggcggcggcggccgccgtcccgacgcgcagctacagccaggagtccaaaactacttacctggaagaccttccaccaccccctgagtatgaattggccccgtccaagttagaagaggaagtggatgatgtctttctcattcgagctcaaggactgccctggtcatgcactatggaagatgtgcttaactttttttcagactgcagaatccgcaacggtgagaatggaatacattttctcctaaacagagatgggaaacgaaggggtgatgccttaattgaaatggagtcagagcaggatgtgcagaaagccttagagaagcaccgcatgtacatgggccagcggtatgtggaagtatatgagataaacaatgaagatgtggatgccttaatgaagagcttgcaggtcaaatcttcgcctgtggtaaatgatggtgtggttcgtttgagaggacttccttatagttgcaatgagaaagacattgtagacttctttgcaggactgaatatagttgacattacttttgtgatggactatagagggaggcgaaaaacaggggaagcctatgtgcaatttgaagaaccagaaatggccaaccaagccctgttgaaacacagggaagaaattggtaatcgatacatcgagatatttccaagcagaaggaatgaagttcgaacacatgtcggttcttataagggaaagaaaatcgcatcttttcctactgctaagtatataactgagccagaaatggtctttgaagaacatgaagtaaatgaggatattcaacccatgacagcttttgaaagtgagaaggaaatagaattgcctaaggaggtgccagaaaagcttccagaggctgctgattttggaactacgtcttctctgcattttgtccacatgagaggattacctttccaagccaatgcccaagacattataaacttttttgctccactcaagcctgttagaatcaccatggaatacagctccagtgggaaggccactggagaagctgatgtgcactttgagacccatgaggatgctgttgcagcgatgctcaaggatcggtcccacgttcatcataggtatattgaactgttcctgaattcatgtccaaaaggaaaataagactctaggggctccagataataagggtgaagcaagaagcatttcatttgcacatctttcttggacttgggatatacagttccagtttattagcagcaactgctagggaaatgattttggtgttttgggttaattgcttctaagaaaagtttcatagtggactgtttagaagaagaaatgaaagatccagtttgggattatgaaataaaccacaaattaaaatttttgtttaaactgtccaggatctgatttaaaaatatggtctttgttttatatgattaaatggtttgttttcatagatgatatgttactcattgtaaagaccacatatttttattcagcagtgttctttaaacggtttcatttaaaaagtaactttttttttttgcctgtgaattgagtgctctgatgtaaaacttctcatggagtgaaacagtgatttattttaaccaaacattcaccaaagcaaagaacggtttcagacctttgaactggtatggtttggcagaatagttttaaattttgctgtatttgattacttagagataggaatttttaaaaatcaaaacaaaaaataccacagcttagtgtaaatgacaatttggcggttttatgtctttagaaatgttttgcctttctaagccttgtgctaaaggcgtataacggtggtgcctatctacttaagggggcattctagtcttaacttaaaagttgtctaaactgtccctccctggctttttttggtttggggtagacctaagggtgtttgttagtctcaaaactgtgaagtgacatgtcagaacagtccagactggtaagaaaattaatggcttcacttgaatttaaaccagctctagataggaaaaaaatcagtctcctcatttgctttttaaatggagtagtacatcccatattttagaacaagtaggggtgccttgcttaaataaaaatagcatttaatgtataattgtgtgaagggtttatggataaagctgtacttctgtcacaatgtggcagtactttctgctttaatattaaacagcttgttatttaaatattggacaaaatggctggcttcaaaatatagtcattaataaactaactttatgtgcacctgtgtaggagaatcaaaatcctgtatgctttctttgccttgttcctgttctcagggtgacgactgccaccaggagatgcagttctagttcttaaaattaaatttgcccaggtttctgacaggtgatacctggaagagagactatgtcttctcttacttaatacataaccatctttgattaccagctaagatgcgaaatcactgtactgtagtcaataaatgaagacttgtttcaggctgaagattacctaagagtatttattattggagtctgtgagtcaactgaatatattattacctcaagtcctgctatattaatataagtagtaagggttaattttcgtgtgtgtgttctctaaaatcctgtgaacatgacttaaccagcttaacatcatcagtagtactgcctagatggaaatgcgttttcatatatggttgaatatgccaagctatgagaactggtatctgtagttgtacgaactattagaatgtgatctttgttgctctttcacatttggtatctgatttgctgtggaaaagatctgtggggcctactgtgaggaattcatctgcaattgatttaagctaatgagttttatttgcacatctctggaaaaagaatgcaagcaaagcattaaaatgctatatgatggatgggtaaggttgaaaggatatatcttcttggcacgctacaggctgagttttctgtacaaaatgtggccattattgggaaatcattttatgtatttgaatgctcccttttgtttttgttcatgatctaggctagtacgtaagtgattgctaaggtggatgtagttatgggaaaggaagagaagcacataatacagtaaaagtaatcttatttccatgcaagtggaagacggtaccgtctccccacatttgagaagactgttttgcatcactctttgctattgaaggaagcagtgatggtgaatttccttctgtttgggttccttgtgtctataacttcctttgtggtaaagccatcaggaagaatagtgggagtggggcatatggtcagggtgctcatatcctgctttagcctagctgctgcttacggagtgcaagggagaactctgagaagcagtatgtaaataccagggagctgattgctgaatattgtggtctcatctgaatattgtggtctcatctaaatattgacaccaggcaatgaagcagaaatagagtatgtgtccctttatgcgtgggtaacttaagcttctgtcatgtgggaagggggaccgaatcttccctgggaggaaggctccaaattctcactacttctgtgttacttgaagggggaagcataaggaacccagtttgaaggcaacattgtgtgccatgaatctgcttattaatcaacatgccttgttaatgtcctctgccctgaacagcccttactcagttctcatttggaaagttattttttggggttacatcctgtttgtttcagaatttaaaaccctccatggtgggtcacttgaggtcaggagttcaagattagcctggccaacttagtgaaactccggctctactgaaaatgcaaaaattagccaggtgtggcacacgcctgtaatcccagttacttgggaggccaaggcaggagaatcgcttgaacctgggaggcagaggttgtagcgagccaagatcacaccattgcactccagcctgggcaacagagtgagactctgtcaaaatcaaaaaaaccaaaatacaaaaaactccattgttctgagagtttcccctaaattatcggaagacactcacattgaattggtaggacctatagtatagaggagaatggtatgtatgtcagcagtagagttccaatccaaattgcgctatcgcattagaaatacattaccctcccactccccaagttcagcaaattagaagagaatctgaagtttgtaggaagggaataaagctgctataaacatttatgtgcaggtttttgtgtagactcgttttcagctcctttgggtaaataccaaggaaccaggttgctggattgtaagttaagagtatgtttagttttggaagaaactgccaaactgttccaacatgactattttgaattcccattgacaatgaataagagttcctgtagctcctcaccctcattagtatttggtgatgtcactcttgcattttagctaatgggtgaatagtggtctcatcgttttaattcccaatcccatagtgatgtggagcaccttttcatatacttaatctgccatccttatatcatcattggtgaggtgtctggattttctgtccagaattttagttctagtggttttcttatttttagaaaggaagtataggaaggaaggtttaatctgtcttaagcctgattatatgaaaatcaagaataggctaggtgtggtggctgacatctgtaatccccgcactttgtgaggctgaagtgggaggactgcttgagcctgggaagtcaagcctgcagtgagccatgactgttgctgcactccagcctgagtgacagagtgagaccctgtctcagaaaaaaaaaaagcaggctcattttaaagttgtttatattttattttttgaaggaaataaacttgaagagatacaaacggtagtgaagattctccttcccctcctgtaattcagctgtttagtttctattctcgcacagccctgttatcagtttctagtgtaagcttgcagtgacttttactttatttataagcaagtgttagtgggtgttgtcatttcttttaaaaatataaattatactgtacatgctattttgtattttggcttttctcccacctaaacaccctaaagatcattttctgtcagtatataaaatcttggtgatgccaatacccatcccttagattgtacaagcagcattttgccatgctttatcccatagcctgcctcctgcagtctcatctttttttctatatgcatgtccaagtaagttgtagacatttttcacttttaatcctttcagcatacatgtcatgggaatttgtttttgtttttgttttttgtgtttgagacagtcgctctgtcacccaggctggagttatagtgacgtgatcccagctcattacagcctccacctcccagtttcaagcaattctcatgcctcagattcccgagtagctgggattacagatgtgcaccaccacgcctgactaatttttgtatttttagtagagatggggtttcatcatgttggccaggctggtctggaactcctggcctccagtcatttgcctgcctcggcctcccaaagtgctgggattacaggcatcagccaccacacccagccgtcattggagtttttttgagggagatttgcagtaaggtgaataaatgttaagtgtatcatttgatgaggttttttctttttttttttttttttttgagatggagtcttgtatcgcccaggctagagtgcagtggcctggtcttggctcactgcaacctccacctcctgggttcaagggagtctcctgcctcagcctcccgagtagctgggattacaggtgtgagccaccatacccagactcatttgatgagttttgatgtaaaagcatgtaactcaaacccctatgtctggaacatctgtattacatctgaattttttcacctagtcaattcctgcacctctctctcctgtcccttcttccctcccctggcagtcagctactgttaggattttgttcactgtagattaattttgcctattctagaacttcatataacggactcacttatgcagtatgtattctgtaagttccttttactcagcatgtttgtatgttcatcagtgtgtttaagctttgttcctttttatggctgagcagtgttctatgtatgaatgccacattttaacgtttcacctgttaggtgaacaactaactggtgaacaatgggctgtttctagtttggggctatcatgaataaagttggtatgaacatgtacaac

SEQ ID NO: 124342 - DNA, 1794 bp, Artificial Sequence
  derived and/or modified sequence
gcacacagttgcgtgggctggcttgtagggaaggagcctgtccccatcgcgccgttccctctcctgtccccagggaaagacgagctgtcccggtttactgaaggtcacctctgcaactccactcatacagaaggagtccaaaactacttacctggaagaccttccaccaccccctgagtatgaattggccccgtccaagttagaagaggaagtggatgatgtctttctcattcgagctcaaggactgccctggtcatgcactatggaagatgtgcttaactttttttcagactgcagaatccgcaacggtgagaatggaatacattttctcctaaacagagatgggaaacgaaggggtgatgccttaattgaaatggagtcagagcaggatgtgcagaaagccttagagaagcaccgcatgtacatgggccagcggtatgtggaagtatatgagataaacaatgaagatgtggatgccttaatgaagagcttgcaggtcaaatcttcgcctgtggtaaatgatggtgtggttcgtttgagaggacttccttatagttgcaatgagaaagacattgtagacttctttgcaggactgaatatagttgacattacttttgtgatggactatagagggaggcgaaaaacaggggaagcctatgtgcaatttgaagaaccagaaatggccaaccaagccctgttgaaacacagggaagaaattggtaatcgatacatcgagatatttccaagcagaaggaatgaagttcgaacacatgtcggttcttataagggaaagaaaatcgcatcttttcctactgctaagtatataactgagccagaaatggtctttgaagaacatgaagtaaatgaggatattcaacccatgacagcttttgaaagtgagaaggaaatagaattgcctaaggaggtgccagaaaagcttccagaggctgctgattttggaactacgtcttctctgcattttgtccacatgagaggattacctttccaagccaatgcccaagacattataaacttttttgctccactcaagcctgttagaatcaccatggaatacagctccagtgggaaggccactggagaagctgatgtgcactttgagacccatgaggatgctgttgcagcgatgctcaaggatcggtcccacgttcatcataggtatattgaactgttcctgaattcatgtccaaaaggaaaataagactctaggggctccagataataagggtgaagcaagaagcatttcatttgcacatctttcttggacttgggatatacagttccagtttattagcagcaactgctagggaaatgattttggtgttttgggttaattgcttctaagaaaagtttcatagtggactgtttagaagaagaaatgaaagatccagtttgggattatgaaataaaccacaaattaaaatttttgtttaaactgtccaggatctgatttaaaaatatggtctttgttttatatgattaaatggtttgttttcatagatgatatgttactcattgtaaagaccacatatttttattcagcagtgttctttaaacggtttcatttaaaaagtaactttttttttttgcctgtgaattgagtgctctgatgtaaaacttctcatggagtgaaacagtgatttattttaaccaaacattcaccaaagcaaagaacggtttcagacctttgaactggtatggtttggcagaatagttttaaattttgctgtatttgattacttagagataggaatttttaaaaatcaaaacaaaaaa

SEQ ID NO: 124343 - DNA, 2656 bp, Artificial Sequence
  derived and/or modified sequence
acttccgttccaccatcgctgctggagcagctgccttcaggccctgcgccgcctccggagtccatggccggcacgcgctgggtactcggggcgctgctccggggctgcggctgtaactgcagcagctgccggcgcaccggcgccgcctgcctgcccttctactccgccgctggctctatcccggcggccgccgtcccgacgcgcagctacagccaggagtccaaaactacttacctggaagaccttccaccaccccctgagtatgaattggccccgtccaagttagaagaggaagtggatgatgtctttctcattcgagctcaaggactgccctggtcatgcactatggaagatgtgcttaactttttttcagactgcagaatccgcaacggtgagaatggaatacattttctcctaaacagagatgggaaacgaaggggtgatgccttaattgaaatggagtcagagcaggatgtgcagaaagccttagagaagcaccgcatgtacatgggccagcggtatgtggaagtatatgagataaacaatgaagatgtggatgccttaatgaagagcttgcaggtcaaatcttcgcctgtggtaaatgatggtgtggttcgtttgagaggacttccttatagttgcaatgagaaagacattgtagacttctttgcaggactgaatatagttgacattacttttgtgatggactatagagggaggcgaaaaacaggggaagcctatgtgcaatttgaagaaccagaaatggccaaccaagccctgttgaaacacagggaagaaattggtaatcgatacatcgagatatttccaagcagaaggaatgaagttcgaacacatgtcggttcttataagggaaagaaaatcgcatcttttcctactgctaagtatataactgagccagaaatggtctttgaagaacatgaagtaaatgaggatattcaacccatgacagcttttgaaagtgagaaggaaatagaattgcctaaggaggtgccagaaaagcttccagaggctgctgattttggaactacgtcttctctgcattttgtccacatgagaggattacctttccaagccaatgcccaagacattataaacttttttgctccactcaagcctgttagaatcaccatggaatacagctccagtgggaaggccactggagaagctgatgtgcactttgagacccatgaggatgctgttgcagcgatgctcaaggatcggtcccacgttcatcataggtatattgaactgttcctgaattcatgtccaaaaggaaaataagactctaggggctccagataataagggtgaagcaagaagcatttcatttgcacatctttcttggacttgggatatacagttccagtttattagcagcaactgctagggaaatgattttggtgttttgggttaattgcttctaagaaaagtttcatagtggactgtttagaagaagaaatgaaagatccagtttgggattatgaaataaaccacaaattaaaatttttgtttaaactgtccaggatctgatttaaaaatatggtctttgttttatatgattaaatggtttgttttcatagatgatatgttactcattgtaaagaccacatatttttattcagcagtgttctttaaacggtttcatttaaaaagtaactttttttttttgcctgtgaattgagtgctctgatgtaaaacttctcatggagtgaaacagtgatttattttaaccaaacattcaccaaagcaaagaacggtttcagacctttgaactggtatggtttggcagaatagttttaaattttgctgtatttgattacttagagataggaatttttaaaaatcaaaacaaaaaataccacagcttagtgtaaatgacaatttggcggttttatgtctttagaaatgttttgcctttctaagccttgtgctaaaggcgtataacggtggtgcctatctacttaagggggcattctagtcttaacttaaaagttgtctaaactgtccctccctggctttttttggtttggggtagacctaagggtgtttgttagtctcaaaactgtgaagtgacatgtcagaacagtccagactggtaagaaaattaatggcttcacttgaatttaaaccagctctagataggaaaaaaatcagtctcctcatttgctttttaaatggagtagtacatcccatattttagaacaagtaggggtgccttgcttaaataaaaatagcatttaatgtataattgtgtgaagggtttatggataaagctgtacttctgtcacaatgtggcagtactttctgctttaatattaaacagcttgttatttaaatattggacaaaatggctggcttcaaaatatagtcattaataaactaactttatgtgcacctgtgtaggagaatcaaaatcctgtatgctttctttgccttgttcctgttctcagggtgacgactgccaccaggagatgcagttctagttcttaaaattaaatttgcccaggtttctgacaggtgatacctggaagagagactatgtcttctcttacttaatacataaccatctttgattaccagctaagatgcgaaatcactgtactgtagtcaataaatgaagacttgtttcaggctg

SEQ ID NO: 124344 - DNA, 1443 bp, Artificial Sequence
  derived and/or modified sequence
atggccggcacccgctgggtgctgggcgccctgctgcggggctgcggctgcaactgcagcagctgcagaagaactggagctgcctgcctgcccttctacagcgctgctggcagcatccccagcggcgtgtctggaagaagaaggctgctgctgctgctgggcgctgctgctgctgctgccagccagacccggggcctgcagacaggccctgtgcccccaggccgcctggccggccccccagctgtggccaccagcgctgctgctgctgctgctgccagctacagcgccctgcgggccagcctgctgccccagagcctggccgctgctgctgctgtgcccaccaggagctacagccaggagagcaagaccacctacctggaggacctgcccccacctccagaatatgagctggcccccagcaagctggaggaggaggtggatgatgtgttcctgatccgggcccagggcctgccctggagctgcaccatggaggatgtgctgaacttcttcagtgactgccgcatcagaaatggagaaaatggcatccacttcctgctgaacagagatggcaagagaagaggagatgccctgattgagatggagagcgagcaggatgtgcagaaggccctggagaagcacaggatgtacatgggccagagatatgtggaggtgtatgagatcaacaatgaagatgtggatgccctgatgaagagcctgcaggtgaagagcagccctgtggtgaatgatggagtggtgcggctgcggggcctgccctacagctgcaatgagaaggacatcgtggacttctttgctggcctgaacatcgtggacatcacctttgtgatggactaccggggccgcaggaagacaggagaggcctacgtgcagtttgaggagcctgagatggccaaccaggccctgctgaagcaccgggaggagatcggcaaccgctacatcgagatcttccccagcagaagaaatgaggtgaggacccacgtgggcagctacaagggcaagaagatcgccagcttccccacagccaagtacatcacagagcctgagatggtgtttgaggagcacgaggtgaatgaagacatccagcccatgacagcctttgagagcgagaaggagattgagctgcccaaggaggtgcctgagaagctgcctgaggccgctgactttggcaccaccagcagcctgcactttgtgcacatgaggggcctgcccttccaggccaatgcccaggacatcatcaacttctttgcccccctgaagcctgtgcgcatcaccatggagtacagcagcagcggcaaggccaccggggaggctgatgtgcactttgagacccatgaagatgctgtggccgccatgctgaaggacaggagccacgtgcaccaccgctacatcgagctgttcctgaacagctgccccaagggcaagtag

SEQ ID NO: 124345 - DNA, 1239 bp, Artificial Sequence
  derived and/or modified sequence
atggccggcacccgctgggtgctgggcgccctgctgcggggctgcggctgcaactgcagcagctgcagaagaactggagctgcctgcctgcccttctacagcgctgctggcagcatcccagctgctgctgtgcccaccaggagctacagccaggagagcaagaccacctacctggaggacctgcccccacctccagaatatgagctggcccccagcaagctggaggaggaggtggatgatgtgttcctgatccgggcccagggcctgccctggagctgcaccatggaggatgtgctgaacttcttcagtgactgccgcatcagaaatggagaaaatggcatccacttcctgctgaacagagatggcaagagaagaggagatgccctgattgagatggagagcgagcaggatgtgcagaaggccctggagaagcacaggatgtacatgggccagagatatgtggaggtgtatgagatcaacaatgaagatgtggatgccctgatgaagagcctgcaggtgaagagcagccctgtggtgaatgatggagtggtgcggctgcggggcctgccctacagctgcaatgagaaggacatcgtggacttctttgctggcctgaacatcgtggacatcacctttgtgatggactaccggggccgcaggaagacaggagaggcctacgtgcagtttgaggagcctgagatggccaaccaggccctgctgaagcaccgggaggagatcggcaaccgctacatcgagatcttccccagcagaagaaatgaggtgaggacccacgtgggcagctacaagggcaagaagatcgccagcttccccacagccaagtacatcacagagcctgagatggtgtttgaggagcacgaggtgaatgaagacatccagcccatgacagcctttgagagcgagaaggagattgagctgcccaaggaggtgcctgagaagctgcctgaggccgctgactttggcaccaccagcagcctgcactttgtgcacatgaggggcctgcccttccaggccaatgcccaggacatcatcaacttctttgcccccctgaagcctgtgcgcatcaccatggagtacagcagcagcggcaaggccaccggggaggctgatgtgcactttgagacccatgaagatgctgtggccgccatgctgaaggacaggagccacgtgcaccaccgctacatcgagctgttcctgaacagctgccccaagggcaagtag

SEQ ID NO: 124346 - DNA, 1089 bp, Artificial Sequence
  derived and/or modified sequence
atggagagcaagaccacctacctggaggacctgcccccacctccagaatatgagctggcccccagcaagctggaggaggaggtggatgatgtgttcctgatccgggcccagggcctgccctggagctgcaccatggaggatgtgctgaacttcttcagtgactgccgcatcagaaatggagaaaatggcatccacttcctgctgaacagagatggcaagagaagaggagatgccctgattgagatggagagcgagcaggatgtgcagaaggccctggagaagcacaggatgtacatgggccagagatatgtggaggtgtatgagatcaacaatgaagatgtggatgccctgatgaagagcctgcaggtgaagagcagccctgtggtgaatgatggagtggtgcggctgcggggcctgccctacagctgcaatgagaaggacatcgtggacttctttgctggcctgaacatcgtggacatcacctttgtgatggactaccggggccgcaggaagacaggagaggcctacgtgcagtttgaggagcctgagatggccaaccaggccctgctgaagcaccgggaggagatcggcaaccgctacatcgagatcttccccagcagaagaaatgaggtgaggacccacgtgggcagctacaagggcaagaagatcgccagcttccccacagccaagtacatcacagagcctgagatggtgtttgaggagcacgaggtgaatgaagacatccagcccatgacagcctttgagagcgagaaggagattgagctgcccaaggaggtgcctgagaagctgcctgaggccgctgactttggcaccaccagcagcctgcactttgtgcacatgaggggcctgcccttccaggccaatgcccaggacatcatcaacttctttgcccccctgaagcctgtgcgcatcaccatggagtacagcagcagcggcaaggccaccggggaggctgatgtgcactttgagacccatgaagatgctgtggccgccatgctgaaggacaggagccacgtgcaccaccgctacatcgagctgttcctgaacagctgccccaagggcaagtag

SEQ ID NO: 124347 - DNA, 1443 bp, Artificial Sequence
  derived and/or modified sequence
atggccggcacccggtgggtgctgggcgccctgctgcggggctgcggatgcaactgttcatcttgtcgccgcaccggcgcagcttgcctccctttttactccgcagccggatctattccctctggtgtgtccggacggagaagactcttgttgcttctgggggctgcagcagcagcggccagtcagacaagagggctgcagacagggcctgtgccacccggccggctcgctggtccccctgccgtggctacaagtgcggccgccgctgcagccgctagctactctgccctgcgcgcctccctcctcccccagtctcttgccgcggccgctgccgtccccacccgatcctattcgcaggaatctaaaaccacttacctggaagatctcccacctccacctgagtacgaactggctccatctaaactggaggaagaagtggatgatgtgtttctcatacgcgctcaaggtctcccatggagttgcacgatggaagatgttctgaacttcttcagcgactgccgcattcggaatggagaaaatgggatacatttcttactaaatcgtgatgggaaaaggaggggcgacgctttgattgaaatggaatccgagcaggatgtccagaaggctttggagaagcacagaatgtatatgggacagaggtacgtagaggtgtacgagatcaacaatgaagacgttgacgccctcatgaaaagcctgcaggtcaagtcaagccctgtagtcaacgatggcgtggtgaggctgcgagggctgccctatagttgcaacgaaaaggacatcgtagattttttcgcagggttgaatatcgtggacatcaccttcgtcatggattatagggggcgccggaagacaggggaagcctatgtccagtttgaggagccggagatggctaaccaggcgctcctgaagcatcgtgaagagattggcaaccgctacattgaaattttcccgtctcggagaaatgaagttaggactcatgtcggctcttacaagggaaagaagattgcctcctttcctaccgcgaaatacatcaccgaacctgagatggtcttcgaagagcacgaagttaatgaggacatccagccaatgaccgctttcgaatctgagaaggaaatcgagctccccaaagaggttcccgaaaagctaccagaagccgccgatttcggcaccacaagtagcttacactttgtgcacatgaggggcttgcctttccaggccaacgcacaagatattatcaactttttcgccccactcaagcccgtacgcattacgatggaatactcttccagtggaaaggctactggagaggccgatgtgcatttcgagacccatgaggacgccgtggctgctatgctgaaagatcggtcccacgtgcatcacaggtatattgagttgttcctcaattcctgtcccaagggtaaatag

SEQ ID NO: 124348 - DNA, 1239 bp, Artificial Sequence
  derived and/or modified sequence
atggccggcacccggtgggtgctgggcgccctgctgcggggctgcgggtgcaattgttctagttgccggcgcacaggtgcagcctgcttgccgttctatagcgcggccggcagtattccagccgcggcagttcctaccagaagctactctcaggagagcaagaccacatacctggaggatctgcctccccctcctgaatatgagcttgctcctagtaagttagaggaggaggtagacgatgtgttcctgattagggctcagggcctgccctggagctgcacaatggaagacgtcttgaatttttttagtgactgccgaatcaggaatggagaaaacggtattcacttcttacttaatcgggacggcaagaggcgcggggatgcccttattgaaatggaatccgaacaggatgtccagaaagcgcttgagaaacatcgcatgtatatgggacagagatatgtcgaggtgtacgagatcaacaatgaggatgtggacgcacttatgaaaagcctgcaggttaaatcatcccctgtagtgaacgatggtgtggtgcgcttgagaggcttgccatattcctgtaacgaaaaggacatcgtggatttcttcgcaggcctgaacatagtcgatatcactttcgtgatggactacagagggaggcgcaaaacgggagaagcctacgtacaattcgaggagcctgagatggccaatcaggctttgctaaaacacagagaagaaatcgggaatcggtatatcgaaatattcccatctcgccggaatgaagtgcgcacacatgttggcagctataaaggaaagaagattgcctcctttcccacggccaaatatatcaccgaacctgaaatggtgttcgaggagcacgaggtgaatgaggatatacagccaatgaccgcttttgaaagcgaaaaggaaatcgaacttccaaaagaagtccccgaaaaactgcctgaagcagcggattttgggacaactagttccttacactttgtgcatatgagaggactaccttttcaggcgaacgctcaagatatcatcaacttttttgctccactcaagccagttcgaattacaatggagtatagctcctcaggaaaggcaacaggggaggcggacgtgcatttcgagacacatgaagatgccgttgccgccatgcttaaggacaggtcacatgtccaccaccgctacatcgagctgtttctaaatagttgtcccaagggaaagtag

SEQ ID NO: 124349 - DNA, 1089 bp, Artificial Sequence
  derived and/or modified sequence
atggagagcaagaccacctacctggaggacctgccccccccccccgaatacgaactcgcaccaagtaagctagaggaagaggtggatgacgtttttctgatcagagcccagggccttccttggagctgcaccatggaggatgtgcttaattttttctctgactgcagaattcgcaacggggaaaacggtattcatttcttgctgaacagagacgggaagaggaggggggacgctttgatcgaaatggaaagcgaacaggacgttcagaaggctcttgagaagcaccggatgtacatgggacagaggtatgtggaagtgtacgagatcaacaacgaagatgtcgatgctcttatgaaatcactccaggtaaagagcagccccgttgtcaatgatggtgtcgtccgcctccgcggattgccgtactcatgtaatgaaaaagacattgtagacttctttgcaggcctcaatatcgttgacattaccttcgtgatggactaccggggacggcgtaagacaggggaagcctatgtccaattcgaggaacccgagatggccaatcaggcgcttctgaaacaccgggaagaaatcggaaatagatatatcgagatctttccttccagaagaaatgaagttcgcacacacgtgggcagctataagggtaagaagatagcatcattcccaaccgccaagtatattaccgagcccgaaatggtatttgaggaacacgaggtgaatgaggacattcagcccatgacagctttcgaatctgagaaggaaatcgagttaccgaaagaagtgcctgaaaagctgcctgaagccgctgatttcggaaccactagctctttacatttcgtacacatgagaggtctgccttttcaggctaatgcccaagacataattaacttctttgctccacttaaacccgtccggattacaatggaatactcatcttccggaaaggcaacaggagaggccgacgtgcactttgaaacccacgaggatgctgtggccgctatgctgaaggatcgatctcacgtccaccatcgctacatcgagctgtttttgaatagttgtcccaaggggaagtag

SEQ ID NO: 124350 - DNA, 1443 bp, Artificial Sequence
  derived and/or modified sequence
atggccggtacccggtgggtacttggtgctttactcagagggtgtggatgtaactgtagctcctgcagacgaactggagctgcatgtcttcccttctactccgccgctggctctatcccatccggtgtgtctggtcgcaggcgtctccttctgctgctgggcgctgcggcagctgccgcatcacagactagaggattacaaaccggtcctgttccacccggaagactggcaggaccgccagccgttgcaacatccgccgctgctgctgcagccgcaagttattccgctcttagagcaagccttctccctcagtctctcgctgctgctgccgctgtgcccacacgctcttattctcaggaaagtaaaactacctacctggaagacctaccccctcctcctgagtatgagttggctcccagcaagctggaagaagaggttgacgatgtgttcctgatccgcgctcagggtctcccttggtcgtgtaccatggaagatgtgttgaacttcttcagcgattgtcgcatccgtaatggagagaatgggattcattttctcctaaacagagatggcaagcggagaggcgacgcattgattgaaatggagagcgagcaggacgtgcaaaaagctctcgagaagcacagaatgtatatggggcagcgctatgtcgaagtttacgaaattaacaacgaagatgttgacgctctaatgaagtccctgcaggtgaagagctctccggtggtcaatgacggagtggtccggctgcgaggcctgccttacagctgcaatgaaaaagatatcgtggattttttcgcgggactgaacattgtggacattacatttgtgatggactacagaggacggagaaaaaccggcgaggcgtacgtgcagttcgaagagcctgaaatggccaaccaggccctcctgaaacaccgagaggagattggtaaccgatatattgagatcttcccctccagaaggaatgaagtgcgtacccacgtaggatcttacaaggggaagaaaattgcttctttccctaccgctaagtacatcacagagcctgaaatggtgttcgaggaacacgaagtgaatgaggacatacaacccatgaccgccttcgagtccgagaaagagattgagttgcccaaggaggtgccagagaagctgccagaagccgcagactttggcactacctcctcacttcattttgtgcatatgagggggctgccgttccaggcaaacgcccaggacataatcaattttttcgctcctctgaaacctgtaagaattacaatggaatacagcagctctggcaaggcaaccggtgaggcggatgtccactttgagacccacgaggacgccgtggctgctatgcttaaagataggtcgcatgtgcatcataggtacatcgagctctttctcaactcttgtcctaagggcaagtag

SEQ ID NO: 124351 - DNA, 1239 bp, Artificial Sequence
  derived and/or modified sequence
atggccggtacccgctgggtgctaggtgcactgcttcgaggctgtggatgcaactgttcctcatgccggcgtaccggagcagcatgcctgccgttctattccgccgctggctcaatacccgctgcagcggtgccgacccgatcttactcacaagagtcaaagacaacatatctggaagacctacctcctcccccagagtacgaactcgccccatctaaactagaggaagaagtggacgatgtctttctgatccgtgcgcaaggcctaccatggagctgtacgatggaagacgtgctgaatttcttttctgactgtcgcattagaaatggcgaaaatggtattcattttctgttgaacagggatggcaagagacgcggagatgcattgatcgaaatggaatcagaacaggatgtccaaaaggccctggagaaacaccgtatgtatatgggccagcgctatgtagaagtatacgaaataaacaatgaggatgttgatgcgctaatgaaatccctgcaggtcaagagtagcccagtggtgaatgatggcgttgtgagactaagaggattgccctactcctgtaacgagaaagacatcgtggacttttttgcaggccttaatatagtggacattacttttgtaatggactaccgcggaaggcggaagacaggcgaggcatacgtgcagtttgaagagcctgaaatggcaaatcaggctctgctgaaacaccgggaagagatcggcaaccgctatattgagatcttcccttccaggcgaaacgaggtccgcacccatgtgggatcctacaaagggaagaagattgccagttttcctaccgctaaatacattactgagcctgagatggtttttgaagaacacgaggtgaacgaggatattcagccaatgactgcctttgaatccgaaaaagaaattgagctcccaaaggaagtgcctgagaaactgcctgaggccgctgattttggcacaacaagttcactccattttgttcacatgcggggacttccgtttcaggccaatgcacaagatataattaatttctttgctcccctcaagccagtgcgtataactatggagtactcttcttcggggaaggcgaccggcgaggctgacgtccactttgaaacgcacgaggacgctgtggctgccatgctcaaagatagaagccacgtgcaccatcggtatatagaacttttccttaattcctgtccaaagggcaagtag

SEQ ID NO: 124352 - DNA, 1089 bp, Artificial Sequence
  derived and/or modified sequence
atggagtccaaaactacatatctcgaagatctgccaccccctcctgagtatgagctcgctccatccaagctggaggaggaggtggatgacgtgtttttgatcagagcccaaggcctcccctggtcttgcaccatggaggacgtgctgaacttttttagtgactgccgtatacgcaacggtgagaacggaatacacttcttgcttaatagagacgggaaaaggcggggagatgccctgatcgagatggaatccgaacaggatgtccaaaaagcactggaaaaacacagaatgtatatggggcagcggtatgtagaagtctatgagatcaacaatgaggacgtggatgccctgatgaaatccctgcaagtcaagtcctcccctgtagtgaatgacggagtggttagactgcggggattaccatatagctgtaacgagaaggacatcgttgactttttcgctggacttaatattgtggatatcacttttgttatggactataggggtcgaaggaagacgggggaggcttatgtacagtttgaagagcctgagatggccaaccaggcgttacttaaacacagagaggagatcggcaacagatatatagagattttcccctcgagacgcaatgaagttagaacccatgtaggttcatataaaggaaaaaaaatcgcatcatttcctacagccaagtatatcaccgaacctgagatggtgttcgaagagcatgaagtgaatgaggacattcaaccgatgaccgccttcgaatccgaaaaagagatcgaactgcccaaagaggtgcctgagaaattgcctgaggccgcagattttggaacaacttcaagtctgcatttcgtgcacatgcgcggtcttccattccaggccaatgctcaggacattatcaattttttcgcccctctgaagcccgttaggatcactatggagtattcttcttccggcaaggctacaggcgaagcagacgttcacttcgagacgcacgaagatgccgtggctgctatgctgaaagatcggagccacgttcaccatcgctatatcgaattattcttaaactcttgcccgaaaggcaagtag

SEQ ID NO: 124353 - DNA, 1443 bp, Artificial Sequence
  derived and/or modified sequence
atggccggcaccagatgggtgctgggcgccctgctgagaggctgcggctgcaactgcagcagctgcagaagaaccggcgccgcctgcctgcccttctacagcgccgccggcagcatccccagcggcgtgagcggcagaagaagactgctgctgctgctgggcgccgccgccgccgccgccagccagaccagaggcctgcagaccggccccgtgccccccggcagactggccggcccccccgccgtggccaccagcgccgccgccgccgccgccgccagctacagcgccctgagagccagcctgctgccccagagcctggccgccgccgccgccgtgcccaccagaagctacagccaggagagcaagaccacctacctggaggacctgccccccccccccgagtacgagctggcccccagcaagctggaggaggaggtggacgacgtgttcctgatcagagcccagggcctgccctggagctgcaccatggaggacgtgctgaacttcttcagcgactgcagaatcagaaacggcgagaacggcatccacttcctgctgaacagagacggcaagagaagaggcgacgccctgatcgagatggagagcgagcaggacgtgcagaaggccctggagaagcacagaatgtacatgggccagagatacgtggaggtgtacgagatcaacaacgaggacgtggacgccctgatgaagagcctgcaggtgaagagcagccccgtggtgaacgacggcgtggtgagactgagaggcctgccctacagctgcaacgagaaggacatcgtggacttcttcgccggcctgaacatcgtggacatcaccttcgtgatggactacagaggcagaagaaagaccggcgaggcctacgtgcagttcgaggagcccgagatggccaaccaggccctgctgaagcacagagaggagatcggcaacagatacatcgagatcttccccagcagaagaaacgaggtgagaacccacgtgggcagctacaagggcaagaagatcgccagcttccccaccgccaagtacatcaccgagcccgagatggtgttcgaggagcacgaggtgaacgaggacatccagcccatgaccgccttcgagagcgagaaggagatcgagctgcccaaggaggtgcccgagaagctgcccgaggccgccgacttcggcaccaccagcagcctgcacttcgtgcacatgagaggcctgcccttccaggccaacgcccaggacatcatcaacttcttcgcccccctgaagcccgtgagaatcaccatggagtacagcagcagcggcaaggccaccggcgaggccgacgtgcacttcgagacccacgaggacgccgtggccgccatgctgaaggacagaagccacgtgcaccacagatacatcgagctgttcctgaacagctgccccaagggcaagtag

SEQ ID NO: 124354 - DNA, 1239 bp, Artificial Sequence
  derived and/or modified sequence
atggccggcaccagatgggtgctgggcgccctgctgagaggctgcggctgcaactgcagcagctgcagaagaaccggcgccgcctgcctgcccttctacagcgccgccggcagcatccccgccgccgccgtgcccaccagaagctacagccaggagagcaagaccacctacctggaggacctgccccccccccccgagtacgagctggcccccagcaagctggaggaggaggtggacgacgtgttcctgatcagagcccagggcctgccctggagctgcaccatggaggacgtgctgaacttcttcagcgactgcagaatcagaaacggcgagaacggcatccacttcctgctgaacagagacggcaagagaagaggcgacgccctgatcgagatggagagcgagcaggacgtgcagaaggccctggagaagcacagaatgtacatgggccagagatacgtggaggtgtacgagatcaacaacgaggacgtggacgccctgatgaagagcctgcaggtgaagagcagccccgtggtgaacgacggcgtggtgagactgagaggcctgccctacagctgcaacgagaaggacatcgtggacttcttcgccggcctgaacatcgtggacatcaccttcgtgatggactacagaggcagaagaaagaccggcgaggcctacgtgcagttcgaggagcccgagatggccaaccaggccctgctgaagcacagagaggagatcggcaacagatacatcgagatcttccccagcagaagaaacgaggtgagaacccacgtgggcagctacaagggcaagaagatcgccagcttccccaccgccaagtacatcaccgagcccgagatggtgttcgaggagcacgaggtgaacgaggacatccagcccatgaccgccttcgagagcgagaaggagatcgagctgcccaaggaggtgcccgagaagctgcccgaggccgccgacttcggcaccaccagcagcctgcacttcgtgcacatgagaggcctgcccttccaggccaacgcccaggacatcatcaacttcttcgcccccctgaagcccgtgagaatcaccatggagtacagcagcagcggcaaggccaccggcgaggccgacgtgcacttcgagacccacgaggacgccgtggccgccatgctgaaggacagaagccacgtgcaccacagatacatcgagctgttcctgaacagctgccccaagggcaagtag

SEQ ID NO: 124355 - DNA, 1089 bp, Artificial Sequence
  derived and/or modified sequence
atggagagcaagaccacctacctggaggacctgccccccccccccgagtacgagctggcccccagcaagctggaggaggaggtggacgacgtgttcctgatcagagcccagggcctgccctggagctgcaccatggaggacgtgctgaacttcttcagcgactgcagaatcagaaacggcgagaacggcatccacttcctgctgaacagagacggcaagagaagaggcgacgccctgatcgagatggagagcgagcaggacgtgcagaaggccctggagaagcacagaatgtacatgggccagagatacgtggaggtgtacgagatcaacaacgaggacgtggacgccctgatgaagagcctgcaggtgaagagcagccccgtggtgaacgacggcgtggtgagactgagaggcctgccctacagctgcaacgagaaggacatcgtggacttcttcgccggcctgaacatcgtggacatcaccttcgtgatggactacagaggcagaagaaagaccggcgaggcctacgtgcagttcgaggagcccgagatggccaaccaggccctgctgaagcacagagaggagatcggcaacagatacatcgagatcttccccagcagaagaaacgaggtgagaacccacgtgggcagctacaagggcaagaagatcgccagcttccccaccgccaagtacatcaccgagcccgagatggtgttcgaggagcacgaggtgaacgaggacatccagcccatgaccgccttcgagagcgagaaggagatcgagctgcccaaggaggtgcccgagaagctgcccgaggccgccgacttcggcaccaccagcagcctgcacttcgtgcacatgagaggcctgcccttccaggccaacgcccaggacatcatcaacttcttcgcccccctgaagcccgtgagaatcaccatggagtacagcagcagcggcaaggccaccggcgaggccgacgtgcacttcgagacccacgaggacgccgtggccgccatgctgaaggacagaagccacgtgcaccacagatacatcgagctgttcctgaacagctgccccaagggcaagtag

SEQ ID NO: 124356 - protein, 433 aa, Artificial Sequence
  derived and/or modified sequence
MSGRPRTTSFAESCKPVQQPSAFGSMKVSRDKDGSKVTTVVATPGQGPDRPQEVSYTDTKVIGNGSFGVVYQAKLCDSGELVAIKKVLQDKRFKNRELQIMRKLDHCNIVRLRYFFYSSGEKKDEVYLNLVLDYVPETVYRVARHYSRAKQTLPVIYVKLYMYQLFRSLAYIHSFGICHRDIKPQNLLLDPDTAVLKLCDFGSAKQLVRGEPNVSYICSRYYRAPELIFGATDYTSSIDVWSAGCVLAELLLGQPIFPGDSGVDQLVEIIKVLGTPTREQIREMNPNYTEFKFPQIKAHPWTKDSSGTGHFTSGVRVFRPRTPPEAIALCSRLLEYTPTARLTPLEACAHSFFDELRDPNVKLPNGRDTPALFNFTTQELSSNPPLATILIPPHARIQAAASTPTNATAASDANTGDRGQTNNAASASASNST

SEQ ID NO: 124357 - DNA, 1302 bp, Artificial Sequence
  derived and/or modified sequence
atgagcggcagacccagaaccaccagcttcgccgagagctgcaagcccgtgcagcagcccagcgccttcggcagcatgaaggtgagcagagacaaggacggcagcaaggtgaccaccgtggtggccacccccggccagggccccgacagaccccaggaggtgagctacaccgacaccaaggtgatcggcaacggcagcttcggcgtggtgtaccaggccaagctgtgcgacagcggcgagctggtggccatcaagaaggtgctgcaggacaagagattcaagaacagagagctgcagatcatgagaaagctggaccactgcaacatcgtgagactgagatacttcttctacagcagcggcgagaagaaggacgaggtgtacctgaacctggtgctggactacgtgcccgagaccgtgtacagagtggccagacactacagcagagccaagcagaccctgcccgtgatctacgtgaagctgtacatgtaccagctgttcagaagcctggcctacatccacagcttcggcatctgccacagagacatcaagccccagaacctgctgctggaccccgacaccgccgtgctgaagctgtgcgacttcggcagcgccaagcagctggtgagaggcgagcccaacgtgagctacatctgcagcagatactacagagcccccgagctgatcttcggcgccaccgactacaccagcagcatcgacgtgtggagcgccggctgcgtgctggccgagctgctgctgggccagcccatcttccccggcgacagcggcgtggaccagctggtggagatcatcaaggtgctgggcacccccaccagagagcagatcagagagatgaaccccaactacaccgagttcaagttcccccagatcaaggcccacccctggaccaaggacagcagcggcaccggccacttcaccagcggcgtgagagtgttcagacccagaaccccccccgaggccatcgccctgtgcagcagactgctggagtacacccccaccgccagactgacccccctggaggcctgcgcccacagcttcttcgacgagctgagagaccccaacgtgaagctgcccaacggcagagacacccccgccctgttcaacttcaccacccaggagctgagcagcaacccccccctggccaccatcctgatccccccccacgccagaatccaggccgccgccagcacccccaccaacgccaccgccgccagcgacgccaacaccggcgacagaggccagaccaacaacgccgccagcgccagcgccagcaacagcacctag

SEQ ID NO: 124358 - DNA, 1302 bp, Artificial Sequence
  derived and/or modified sequence
atgtccggtcgaccccgaacaacgagcttcgccgagtcatgcaagccagtccagcagccttctgcattcgggtcaatgaaggtctccagagataaagacggaagcaaagttaccaccgtcgtggccaccccaggacagggtcccgataggcctcaggaggtcagctacacagacaccaaggtgatcggcaacggttcctttggggtggtgtaccaggcgaagctgtgtgatagcggcgagctagttgccattaagaaagtcctgcaggataagcgcttcaagaaccgggagttgcaaattatgcggaagctggatcactgtaatatcgttagactcagatattttttctacagtagcggtgagaaaaaagacgaggtttatctgaatctggtgttggattacgtgcctgagaccgtgtatcgtgtggcacgccactactctagagccaaacagacgttaccggttatttatgttaaactttacatgtaccagcttttcagaagcctggcctacattcactcgtttggaatatgccaccgcgacatcaagccccagaacttattgttggatcccgacaccgccgtattaaagttgtgtgatttcggaagcgcgaaacagcttgtgcgcggggaaccaaatgtaagttacatctgctctaggtactatcgggcaccggaactaatatttggagcaactgactacacctcctccatcgatgtatggagcgctggctgcgtgctcgccgagttgttgctgggacagcctatcttccccggagattctggtgtcgatcaactggtcgagataatcaaagtattggggacgccaacacgagaacagatccgcgagatgaatccaaattacactgagttcaaattcccgcagataaaggcccacccttggaccaaagattcatctggcacaggccattttacttccggcgtgagggttttcagacctaggacacctcctgaggccattgccctgtgtagcaggttattggagtacacacccacagccagactgacacccctcgaggcgtgcgcccattccttctttgacgagctcagagatccaaacgtgaagctccccaatgggagagatacgccggccctgtttaattttacaacacaggagttatcatccaatccgcctctcgccaccatactgataccacctcacgcaagaattcaggcagctgcatccaccccaactaacgcaacagccgcaagtgatgccaatacaggcgataggggccagacaaataatgcagccagcgcatctgctagcaatagcacttag

SEQ ID NO: 124359 - DNA, 1636 bp, Artificial Sequence
  derived and/or modified sequence
atcatctatatgttaaatatccgtgccgatctgtcttgaaggagaaatatatcgcttgttttgttttttatagtatacaaaaggagtgaaaagccaagaggacgaagtctttttctttttcttctgtgggagaacttaatgctgcatttatcgttaacctaacaccccaacataaagacaaaaggaagaaaaggaggaaggaaggaaaaggtgattcgcgaagagagtgatcatgtcagggcggcccagaaccacctcctttgcggagagctgcaagccggtgcagcagccttcagcttttggcagcatgaaagttagcagagacaaggacggcagcaaggtgacaacagtggtggcaactcctgggcagggtccagacaggccacaagaagtcagctatacagacactaaagtgattggaaatggatcatttggtgtggtatatcaagccaaactttgtgattcaggagaactggtcgccatcaagaaagtattgcaggacaagagatttaagaatcgagagctccagatcatgagaaagctagatcactgtaacatagtccgattgcgttatttcttctactccagtggtgagaagaaagatgaggtctatcttaatctggtgctggactatgttccggaaacagtatacagagttgccagacactatagtcgagccaaacagacgctccctgtgatttatgtcaagttgtatatgtatcagctgttccgaagtttagcctatatccattcctttggaatctgccatcgggatattaaaccgcagaacctcttgttggatcctgatactgctgtattaaaactctgtgactttggaagtgcaaagcagctggtccgaggagaacccaatgtttcgtatatctgttctcggtactatagggcaccagagttgatctttggagccactgattatacctctagtatagatgtatggtctgctggctgtgtgttggctgagctgttactaggacaaccaatatttccaggggatagtggtgtggatcagttggtagaaataatcaaggtcctgggaactccaacaagggagcaaatcagagaaatgaacccaaactacacagaatttaaattccctcaaattaaggcacatccttggactaaggattcgtcaggaacaggacatttcacctcaggagtgcgggtcttccgaccccgaactccaccggaggcaattgcactgtgtagccgtctgctggagtatacaccaactgcccgactaacaccactggaagcttgtgcacattcattttttgatgaattacgggacccaaatgtcaaactaccaaatgggcgagacacacctgcactcttcaacttcaccactcaagaactgtcaagtaatccacctctggctaccatccttattcctcctcatgctcggattcaagcagctgcttcaacccccacaaatgccacagcagcgtcagatgctaatactggagaccgtggacagaccaataatgctgcttctgcatcagcttccaactccacctgaacagtcccgagcagccagctgcacaggaaaaaccaccagttacttgagtgtcactcagcaacactggtcacgtttggaaagaatattaaaaagagaaaaaaa

SEQ ID NO: 124360 - DNA, 1302 bp, Artificial Sequence
  derived and/or modified sequence
atgagcggccggcccaggaccaccagctttgctgagagctgcaagcctgtgcagcagcccagcgccttcggctccatgaaggtgtcccgggacaaggatggcagcaaggtgaccaccgtggtggccaccccaggccagggccctgaccggccccaggaggtgtcctacacagacaccaaggtgattggaaatggcagctttggagtggtgtaccaggccaagctgtgtgacagcggggagctggtggccatcaagaaggtgctgcaggacaagcgcttcaagaaccgggagctgcagatcatgaggaagctggaccactgcaacatcgtgcggctgcgctacttcttctacagcagtggagagaagaaggatgaggtgtacctgaacctggtgctggactatgtgcctgagaccgtgtacagagtggcccggcactacagccgggccaagcagaccctgcccgtcatctacgtgaagctgtacatgtaccagctgttccgcagcctggcctacatccacagctttggcatctgccaccgggacatcaagccccagaacctgctgctggaccctgacacagctgtgctgaagctgtgtgactttggaagtgccaagcagctggtgcggggggagcccaacgtgtcctacatctgcagccgctactaccgggcccctgagctgatctttggagccacagactacaccagcagcattgatgtgtggagcgctggctgtgtgctggccgagctgctgctgggccagcccatcttccctggggacagcggcgtggaccagctggtggagatcatcaaggtgctgggcacccccacccgggagcagatccgggagatgaaccccaactacacagagttcaagttcccccagatcaaggcccacccctggaccaaggacagcagcggcaccggccacttcaccagcggcgtgcgggtcttccggcccaggaccccacctgaggccatcgccctgtgcagccggctgctggagtacacccccacagcccggctgacccccctggaggcctgtgcccacagcttctttgatgagctgcgggaccccaacgtgaagctgcccaacggccgggacaccccagccctcttcaacttcaccacccaggagctgagcagcaacccccccctggccaccatcctgatccccccccacgcccgcatccaggccgccgccagcacccccaccaatgccacagctgccagtgatgccaacacaggagaccggggccagaccaacaatgctgccagcgccagcgccagcaacagcacctag

SEQ ID NO: 124361 - DNA, 1302 bp, Artificial Sequence
  derived and/or modified sequence
atgagcggccggccccggaccaccagcttcgccgagagctgcaagcccgtgcaacagccgagtgcatttgggagcatgaaggtgagtagggataaagatggcagcaaggtgaccactgtggttgcaacgcccggtcaggggccggaccggccacaggaagtgagctatactgacacaaaggtaatcggcaacgggtcttttggcgtcgtgtatcaggccaaactttgtgattccggggaactggtggctattaagaaggtcctgcaagataagcgtttcaagaatagggagcttcagatcatgaggaaactggatcattgtaacatcgtgcgcctacgatattttttctactcaagcggggaaaagaaggacgaggtctacttaaatttagtgctcgattacgtacctgaaaccgtctaccgtgtggccaggcactactcgcgggctaagcagaccctgcccgttatctacgtcaaattatacatgtaccagctgttccgctctctggcatatatccactcattcggtatttgtcatcgagatattaaaccacagaatttgctccttgatccggacaccgcggttctgaagctgtgcgatttcggctccgctaagcagttggtcaggggcgaacccaatgtgagctacatttgctcccgttattacagggctccagaactcatctttggtgctacggattatacctcttctatcgacgtgtggtctgccggctgcgtgctggccgaactcctcctgggccagcctatcttccctggcgacagcggagttgatcaattggtggaaatcattaaggttctggggacaccaactcgcgagcaaataagagagatgaaccccaactatactgagttcaaattcccccagatcaaggcacacccatggacaaaagatagtagcggcacgggacacttcacctcaggcgttcgggtgttccgcccgagaacaccaccggaagctatcgcactttgcagcagactactggaatacacgcccactgcaagactgactcccctggaagcctgtgctcactcattttttgacgaactgagggaccctaatgtcaaactgccaaatggccgagatacgccagccctgttcaacttcacaactcaggagctcagctctaatccacccctggctactatcctaattccaccccacgcacgaattcaggccgctgcttctaccccaactaatgccaccgccgcaagcgacgccaatactggggacaggggccaaactaataatgccgcctccgcctcagcttctaattccacatag

SEQ ID NO: 124362 - DNA, 1302 bp, Artificial Sequence
  derived and/or modified sequence
atgagcgggcgtccgagaaccacgtcctttgccgagtcctgtaaaccagtgcagcagccatcagcctttggttccatgaaagttagtcgcgacaaagacggctccaaagtgaccactgtcgttgctacacctgggcagggacccgacaggccacaggaggtgtcatataccgataccaaggtgatcgggaacggatcttttggagttgtataccaggctaaactgtgtgatagcggcgaactggttgcaatcaaaaaggtcctccaggataagaggttcaagaaccgggagttacaaatcatgcgaaaactggatcactgtaatatcgtgcgattgcgctatttcttctatagcagtggggaaaagaaggatgaagtgtatttgaacctggtcttggattatgtgccggaaaccgtataccgggttgccaggcactattccagagccaaacaaaccctgcctgtgatatacgtcaagctctatatgtaccagctgtttcgcagcttagcctatatacactccttcggaatttgtcacagagatatcaaaccccaaaatctgttgttggaccccgataccgccgttctgaagctgtgcgatttcggaagcgctaaacagctggtaagaggggaacccaatgtgtcttacatttgtagtcgatactatagagcgccagaattgattttcggcgctaccgactacacttcatcaatcgacgtgtggagtgccggttgtgtgctggctgaattgctcctgggtcagccaatcttcccaggcgatagtggggtggaccaactagtggagatcattaaagtgctgggcacccctaccagggagcaaattagagagatgaaccccaattatacagagtttaagtttccacaaatcaaggcacacccgtggactaaggacagctctggaacaggacattttacctctggcgttagagtgttccggccaaggaccccacctgaagcaatcgcactgtgctcacgacttctagagtacacacctacagccagattgacccccctggaggcctgcgcgcacagttttttcgatgagttgcgggatcctaatgttaagctgccaaatggacgggacacaccagctcttttcaattttaccacacaggagctcagctccaaccctcccctcgccacaatattgatccctccacatgccaggatccaagctgcagcttctacaccaacgaatgcgaccgctgcaagcgacgcaaacactggcgacagaggccaaaccaacaacgctgcttctgcatccgccagcaactcaacgtag

SEQ ID NO: 124363 - protein, 499 aa, Artificial Sequence
  derived and/or modified sequence
MELSEPIVENGETEMSPEESWEHKEEISEAEPGGGSLGDGRPPEESAHEMMEEEEEIPKPKSVVAPPGAPKKEHVNVVFIGHVDAGKSTIGGQIMYLTGMVDKRTLEKYEREAKEKNRETWYLSWALDTNQEERDKGKTVEVGRAYFETEKKHFTILDAPGHKSFVPNMIGGASQADLAVLVISARKGEFETGFEKGGQTREHAMLAKTAGVKHLIVLINKMDDPTVNWSNERYEECKEKLVPFLKKVGFNPKKDIHFMPCSGLTGANLKEQSDFCPWYIGLPFIPYLDNLPNFNRSVDGPIRLPIVDKYKDMGTVVLGKLESGSICKGQQLVMMPNKHNVEVLGILSDDVETDTVAPGENLKIRLKGIEEEEILPGFILCDPNNLCHSGRTFDAQIVIIEHKSIICPGYNAVLHIHTCIEEVEITALICLVDKKSGEKSKTRPRFVKQDQVCIARLRTAGTICLETFKDFPQMGRFTLRDEGKTIAIGKVLKLVPEKD

SEQ ID NO: 124364 - protein, 637 aa, Artificial Sequence
  derived and/or modified sequence
MDPGSGGGGGGGGGGGSSSGSSSSDSAPDCWDQADMEAPGPGPCGGGGSLAAAAEAQRENLSAAFSRQLNVNAKPFVPNVHAAEFVPSFLRGPAAPPPPVGGAANNHGAGSGAGGRAAPVESSQEEQSLCEGSNSAVSMELSEPIVENGETEMSPEESWEHKEEISEAEPGGGSLGDGRPPEESAHEMMEEEEEIPKPKSVVAPPGAPKKEHVNVVFIGHVDAGKSTIGGQIMYLTGMVDKRTLEKYEREAKEKNRETWYLSWALDTNQEERDKGKTVEVGRAYFETEKKHFTILDAPGHKSFVPNMIGGASQADLAVLVISARKGEFETGFEKGGQTREHAMLAKTAGVKHLIVLINKMDDPTVNWSNERYEECKEKLVPFLKKVGFNPKKDIHFMPCSGLTGANLKEQSDFCPWYIGLPFIPYLDNLPNFNRSVDGPIRLPIVDKYKDMGTVVLGKLESGSICKGQQLVMMPNKHNVEVLGILSDDVETDTVAPGENLKIRLKGIEEEEILPGFILCDPNNLCHSGRTFDAQIVIIEHKSIICPGYNAVLHIHTCIEEVEITALICLVDKKSGEKSKTRPRFVKQDQVCIARLRTAGTICLETFKDFPQMGRFTLRDEGKTIAIGKVLKLVPEKD

SEQ ID NO: 124365 - DNA, 7172 bp, Artificial Sequence
  derived and/or modified sequence
tatgagccacactgcagttttaagccggaatatctcacggttttattgtttcttccacgaaatgattacataaaatgaaatcagctttgcaatctgcaccggctttgaaatgaagggcaaaatctggctgggggtgaggagaaagaaggtggagagagaataaggtacggagactgtgaggcagagaacgcaggaaaggtggtgaaaagagagtacaagaattttcgggagctgagtgtatttttcttccccatgttatagatgctgtccgttttcccccagcctgtgtccagcaggccagagtggacccctcctatgggctaaaatactctcggtcttcggcccagcacagagctgcaccaaccagggcctgccgctgcccccccaccaggtgacaggtggggccgccgagcggccaccagacctccgcctcctcgcgttgcctgccgggagccggagccgcttccggttgcgccctgtccctgaacttcgactcccgtcggcccccgggaaaaccgcagcggggtagcgcgggcgctgccggaacttgtagttccacctcccgccgcgctaaatagccggaaacgggggcggccagaacagagaactaccgaggcgaagcacctgtggaatcctctcaagaggaacagtcattgtgtgaaggttcaaattcagctgttagcatggaactttcagaacctattgtagaaaatggagagacagaaatgtctccagaagaatcatgggagcacaaagaagaaataagtgaagcagagccagggggtggttccttgggagatggaaggccgccagaggaaagtgcccatgaaatgatggaggaggaagaggaaatcccaaaacctaagtctgtggttgcaccgccaggtgctcctaagaaagagcatgtaaatgtagtattcattgggcacgtagatgctggcaagtcaaccattggaggacaaataatgtatttgactggaatggttgacaaaaggacgcttgaaaagtatgaaagagaagctaaagagaaaaacagagaaacttggtacttgtcttgggccttagacacaaatcaggaagaacgagacaagggtaaaacagtagaagtgggtcgtgcctattttgaaaccgaaaagaagcatttcacaattctagatgcccctggccacaagagttttgtcccaaatatgattggtggtgcctctcaagctgatttggctgtgctggtaatctcagccaggaaaggagagtttgaaactggatttgaaaaaggaggacagacaagagaacatgcaatgttggcaaagacagcaggtgtaaaacacctaattgtgctaattaataagatggatgatccaacagtaaattggagcaatgagagatatgaagaatgtaaggagaaactagtgccatttttgaaaaaagttggcttcaatcccaaaaaggacattcactttatgccctgctcaggacttactggagcaaatctcaaagagcagtcggatttctgtccttggtacattggattaccgtttattccatatctggataatttgccgaacttcaatagatcagttgatggaccaatcaggctgccaattgtggataagtacaaggatatgggcactgtggtcctgggaaagctggaatcaggatctatttgtaaaggccagcagcttgtgatgatgccaaacaagcacaacgtggaagttcttggaatactttccgatgatgtagagactgataccgtagccccaggtgaaaacctcaaaatcagactgaaaggaattgaagaagaggagattcttccagggtttatactttgtgatcctaataatctttgtcattctggacgcacatttgatgcccagatagtgattatagagcacaaatccatcatctgcccaggctataatgcggtgctgcatattcatacctgtattgaggaggtggaaataacagccttaatctgcttggtagacaaaaaatcaggagaaaaaagtaagacccgaccccgttttgtcaaacaagatcaagtatgcattgctcgcttaaggacagcaggaaccatctgccttgagacctttaaagacttccctcagatgggtcgtttcaccttaagagatgagggtaagaccattgcaattggaaaagttctgaaactggttccagagaaagactaagcattttcttgatgaccctgcacaatactgtgaggaaaattgactgcagaagcctacttcacaccgccttctcttattttctgcccattgataaacctctccccatattttgcaaagaggaaattcacagcaaaagtccacattatgtcagctttctcatattgagagctctgctatgccactgttgaatttttcccaagattcctgtccctagccctcacttcaaactctgcttccttggacagatttggcaatagctttgtaagtgatgtggacataattgcctacaataatgaaaacctacaggaatttttttatttttcattttccccttaggcatatttagtatttttcccccaggcagatcattctgagtgtgcgagtgtgtgtgcacatgttacaaaggcaactaccatgttaataaaatattcaatttgaaatccttttcggtatttgaattgcttttgaataatgttttttatctggatgtaacattgttgcattagctttttaactttcccaagtaattgaatacattttattacttggacttttataaactctttccctacccactataaatgagacattcacagcgttcaagtttgtattaaaggaaaggattagtttgaccccttcttttgatggttaatgcatacatgcagttaaatccctttatgcaaatgtgacactgctttactaggtcttttagttatttatttattttttttttttttgccaatttatattgtaacatgatttcttgaacacagtaagttgttttaaaataaaagaacagcatactgtagtttttataagtaaagcgtaatgaaattgtacccctagagaaaattccattaacttgttaaattagtggaattaacaacaaataaagcatgtttgagacctggcaaaaattcctctggtagtatttataaatagagctgcatgcctctagtatgaaaaccgtatcagttgcaagtgccacttctacaagttactcagtttactctttgtatcagtaactttaaaggttggatgatccttgctggttaaagctaaatctcaacctagcaactaaatgaaaatatttagaatcatcagaatctgaacagactaaaattatcagcgataagcagaatcaagcagggtataagttttatctcaattatttgaaattgactgagttttcttaagtgtaaagctgaaatttgctaaccatgtttttgatgaaccacagtgcagcattgtgtgggttttagattgaatgactctctgctataattatcatgactttgaaatttttcatgagaataaatgaggaatggaggcaatttgtgggtttatccaaagcccccttgatgttgagtgttgccattgatcaaagatagcctcttttagattgtgatttctctctaaataagatactttgtatatttaatgacaagtctcttccctataattttgctcctcagaaaagaaaagcctagacagactgtatttccagtcacagaacataaaacttaatctaatgggtgttttgttttgttttgagacagaggctcactctgtcacctaggctggagtgcagtggctcgatctcagctcactgcagcctccacctcccggattcaagcaatttcctgcctcagcctcttgagtagctgggattacaggagccctccacgaggcccagttaatttttgtatctttagtggagacgaggtttccccctattggtcaggctggtctcaaacttctgacctcaagtgatccactcgcctcagcctctcaaaagtgctgggattacaggcatgaggcgccgcacttggcctagtgttttcttaactgtgaaattcccattcatttcttgaatgaggctacatcttatggacagagcaaagttattgtcctacagattcttaaaactataattatggctattgcatgaaatttaaatagattttattatgtctgcaaatctctgggcttttatttttctggaaaatataggagctttaatcaaaacataatagttctttttgtaattccatgttaataaaaacaaatactagcaattgcttgaattttaatgaatatttaaaagttcaagagccacggaaatcacttccagagataagagttccctttctaaatagaacacatttttaaaaaataagttatgtttgctactaaaacatttacactgttagactattatgtgcatgttgccaagactcttaagtaacttggatatcaactgtgaagggcctacctctaaaaagtaacaggtcatacaaatacaaatgtaactgtaaaaattccactggattcttgcatatttgcaagattagattattcaaaagaaatttcagtgctaaaattaaccagcaacataagttctatgggctttgaaaattgttctcatctttttaaagttgatgcattttcaatcctgcttacacaggctgttcatttggataagtaaataaaatgtctaaggtgaacttggcattatgtggagatgttggaccgttatagagcaatacaaattcctatgctgtcattctgttttctgcaaatgcaaacgtgcttatatggtcaacagtgcaaaaatagggtagttggctgcatatttagggtattacctaagcatttgttctctaacgttgctctactagaatgatttttttcttgcatcttttcacattaatgatgttctttatataactttcatgcgattatttagttttttaaattaataaagtgaatttaagaaatattgaaataaacatctaagtaattgccattttaaacccttgtttcttactgtgggagagggggaaatacagcactcatttcttgtttttaatttgcagaagtaagtgaaaatctatgtaaaatcaaaccaaaagagttggactgagtgtgtattgtcttgagattaagtgacaaatagtaaagtgttactgagtaattaagcccatgtattttttttttgtgagttgaaaatctttgaaatatgtgataaccgaatgtcaaaagttcctaaactctaacagtgcaggttgttcactgtaacgaggtaactcatatttgctggttacataaactacaagtactgctctcacaatatgggactttgaactgtgatgtagttcaacagttgccggcatcctctcagctgatacgctgcgaatattttgggttagacttgcagccagatgcagttttgcaacccaagaaaaaagttgaacctatgatcaaaaactgctcccaagatgaacctggaaaaaaatcagctaagctcccttggcgatctgcaggaacactagtaatgactggaattactccgtgatctttgatgactattacacataacagcactctagcaccttttcttactggcatggacttcctcatggactgctacttcatggatgatagcttcattgctttgggtagggatttaaggtagtcaaggggaaaatacgcagttttattacaggtcttaacatcaggcaactttcaactttaaaaccctttgtgaaaaatgtggttatagcactatagctctgattttaggatggttaaatgttatattcattgttggcttaccttatcaaactgtgccattaatcctttcacagacataggtaaggaagagaacaaccagtggattcaggggacaattatctatctccaaataataggcttttatttcttgcagctaactttttcagtgattctagcagatgccatctagtacatccttgatcttgtttctttcgtgagagatctcgccatggcagcatcttgttaagtaagtgtaattgcacatgcacaaaagacttaactagctttacatttagcagtcagttggttagattaggtttcatagtaaatgaataggaatagaaagaataggaagtgtttttattttccagtagtaattccgtggattccatttgacccagtttactatcagttcagttcaggtagatttggttcaacttttggtggtttttggctctaggatattcttgactttaatatcctagaacttactgagtcttcccttcaataaatacacttctcacatacctctaatcctatgcttccttgaaacaataatgctagctgagttgtttactaaggattattataagggcctgaaggtgtgggagtggagattaattaaaacctttatgttctccaatataagggaaaagcaggttggtactacttctgattaggcagaaaacaccaggattccttaagtgatccttgaaatggttattgttttctgccttgtcacatttgccactgtgccctttaaaacgatgtggaaacctcaggtttgtggacagcacaggtggaatgacatcttgtgcttcctgaggctcccctctaccaggcacattagcttagtgcttcagatgtcagcccaagtccttgttacctccttttcctgctgcccagggaagagtgtgtgtgctggagctggagcgcttgcactcttcaggtgactattctcacctccatttcctccacatgcattaggtgaaactgaggtctaagcctcctgcaaggtctacattttaaggactcacacatcaggctctcagaaatgtacacaggtattagttctgtttgttctaaaggaaatgtgggtatctctcaggccaggacttagtgactagttttcgctagacagcaggttaatacctagatctcatttaaaaaaaaaaaaaaaaaacaggattaaagggaactgatcaggtttgttgagttttttagcctaattccaaagcatggaagagtgctctaggtaggaaagaaagctttttcttacgatttgtagctacctactgtgcctgacttggtgcctgtgtgaggattaagcccttagtctgctcttgcaattattcaaatgacaaattaaatttgcttttgtaataacaataaaagttgtcatcttcccttttg

SEQ ID NO: 124366 - DNA, 7151 bp, Artificial Sequence
  derived and/or modified sequence
gggaggagatccgctcacacacacgaggaggagggttgagctgccgccgccgccgcctctgtcgtcgtcgcgagtgtggagtcgggactggagctgctgccgcggcgacgccggggatctttgtcgctagctcccggcccttctgccccgccgccttccctcagtcagcgttgcccactcctctccggccgggcgcccctgcctccatttcccgctctctgtccaccacacacacggcccccccgatcatggatccgggcagtggcggcggcggcggcggcggcggcggcggcgggagcagcagcggcagcagcagcagcgactcggcgcctgactgctgggaccaggcggacatggaagcccccgggccgggcccttgcggcggcggcggctccctggcggcggcggccgaggcccagcgggagaacctcagcgcggccttcagccggcaactcaacgtcaacgccaagcccttcgtgcccaacgtccacgccgccgagttcgtgccgtccttcctgcggggcccggcagcgccgccacccccagttggcggcgccgccaataaccacggagccggcagcggcgcgggaggccgtgcggcacctgtggaatcctctcaagaggaacagtcattgtgtgaaggttcaaattcagctgttagcatggaactttcagaacctattgtagaaaatggagagacagaaatgtctccagaagaatcatgggagcacaaagaagaaataagtgaagcagagccagggggtggttccttgggagatggaaggccgccagaggaaagtgcccatgaaatgatggaggaggaagaggaaatcccaaaacctaagtctgtggttgcaccgccaggtgctcctaagaaagagcatgtaaatgtagtattcattgggcacgtagatgctggcaagtcaaccattggaggacaaataatgtatttgactggaatggttgacaaaaggacgcttgaaaagtatgaaagagaagctaaagagaaaaacagagaaacttggtacttgtcttgggccttagacacaaatcaggaagaacgagacaagggtaaaacagtagaagtgggtcgtgcctattttgaaaccgaaaagaagcatttcacaattctagatgcccctggccacaagagttttgtcccaaatatgattggtggtgcctctcaagctgatttggctgtgctggtaatctcagccaggaaaggagagtttgaaactggatttgaaaaaggaggacagacaagagaacatgcaatgttggcaaagacagcaggtgtaaaacacctaattgtgctaattaataagatggatgatccaacagtaaattggagcaatgagagatatgaagaatgtaaggagaaactagtgccatttttgaaaaaagttggcttcaatcccaaaaaggacattcactttatgccctgctcaggacttactggagcaaatctcaaagagcagtcggatttctgtccttggtacattggattaccgtttattccatatctggataatttgccgaacttcaatagatcagttgatggaccaatcaggctgccaattgtggataagtacaaggatatgggcactgtggtcctgggaaagctggaatcaggatctatttgtaaaggccagcagcttgtgatgatgccaaacaagcacaacgtggaagttcttggaatactttccgatgatgtagagactgataccgtagccccaggtgaaaacctcaaaatcagactgaaaggaattgaagaagaggagattcttccagggtttatactttgtgatcctaataatctttgtcattctggacgcacatttgatgcccagatagtgattatagagcacaaatccatcatctgcccaggctataatgcggtgctgcatattcatacctgtattgaggaggtggaaataacagccttaatctgcttggtagacaaaaaatcaggagaaaaaagtaagacccgaccccgttttgtcaaacaagatcaagtatgcattgctcgcttaaggacagcaggaaccatctgccttgagacctttaaagacttccctcagatgggtcgtttcaccttaagagatgagggtaagaccattgcaattggaaaagttctgaaactggttccagagaaagactaagcattttcttgatgaccctgcacaatactgtgaggaaaattgactgcagaagcctacttcacaccgccttctcttattttctgcccattgataaacctctccccatattttgcaaagaggaaattcacagcaaaagtccacattatgtcagctttctcatattgagagctctgctatgccactgttgaatttttcccaagattcctgtccctagccctcacttcaaactctgcttccttggacagatttggcaatagctttgtaagtgatgtggacataattgcctacaataatgaaaacctacaggaatttttttatttttcattttccccttaggcatatttagtatttttcccccaggcagatcattctgagtgtgcgagtgtgtgtgcacatgttacaaaggcaactaccatgttaataaaatattcaatttgaaatccttttcggtatttgaattgcttttgaataatgttttttatctggatgtaacattgttgcattagctttttaactttcccaagtaattgaatacattttattacttggacttttataaactctttccctacccactataaatgagacattcacagcgttcaagtttgtattaaaggaaaggattagtttgaccccttcttttgatggttaatgcatacatgcagttaaatccctttatgcaaatgtgacactgctttactaggtcttttagttatttatttattttttttttttttgccaatttatattgtaacatgatttcttgaacacagtaagttgttttaaaataaaagaacagcatactgtagtttttataagtaaagcgtaatgaaattgtacccctagagaaaattccattaacttgttaaattagtggaattaacaacaaataaagcatgtttgagacctggcaaaaattcctctggtagtatttataaatagagctgcatgcctctagtatgaaaaccgtatcagttgcaagtgccacttctacaagttactcagtttactctttgtatcagtaactttaaaggttggatgatccttgctggttaaagctaaatctcaacctagcaactaaatgaaaatatttagaatcatcagaatctgaacagactaaaattatcagcgataagcagaatcaagcagggtataagttttatctcaattatttgaaattgactgagttttcttaagtgtaaagctgaaatttgctaaccatgtttttgatgaaccacagtgcagcattgtgtgggttttagattgaatgactctctgctataattatcatgactttgaaatttttcatgagaataaatgaggaatggaggcaatttgtgggtttatccaaagcccccttgatgttgagtgttgccattgatcaaagatagcctcttttagattgtgatttctctctaaataagatactttgtatatttaatgacaagtctcttccctataattttgctcctcagaaaagaaaagcctagacagactgtatttccagtcacagaacataaaacttaatctaatgggtgttttgttttgttttgagacagaggctcactctgtcacctaggctggagtgcagtggctcgatctcagctcactgcagcctccacctcccggattcaagcaatttcctgcctcagcctcttgagtagctgggattacaggagccctccacgaggcccagttaatttttgtatctttagtggagacgaggtttccccctattggtcaggctggtctcaaacttctgacctcaagtgatccactcgcctcagcctctcaaaagtgctgggattacaggcatgaggcgccgcacttggcctagtgttttcttaactgtgaaattcccattcatttcttgaatgaggctacatcttatggacagagcaaagttattgtcctacagattcttaaaactataattatggctattgcatgaaatttaaatagattttattatgtctgcaaatctctgggcttttatttttctggaaaatataggagctttaatcaaaacataatagttctttttgtaattccatgttaataaaaacaaatactagcaattgcttgaattttaatgaatatttaaaagttcaagagccacggaaatcacttccagagataagagttccctttctaaatagaacacatttttaaaaaataagttatgtttgctactaaaacatttacactgttagactattatgtgcatgttgccaagactcttaagtaacttggatatcaactgtgaagggcctacctctaaaaagtaacaggtcatacaaatacaaatgtaactgtaaaaattccactggattcttgcatatttgcaagattagattattcaaaagaaatttcagtgctaaaattaaccagcaacataagttctatgggctttgaaaattgttctcatctttttaaagttgatgcattttcaatcctgcttacacaggctgttcatttggataagtaaataaaatgtctaaggtgaacttggcattatgtggagatgttggaccgttatagagcaatacaaattcctatgctgtcattctgttttctgcaaatgcaaacgtgcttatatggtcaacagtgcaaaaatagggtagttggctgcatatttagggtattacctaagcatttgttctctaacgttgctctactagaatgatttttttcttgcatcttttcacattaatgatgttctttatataactttcatgcgattatttagttttttaaattaataaagtgaatttaagaaatattgaaataaacatctaagtaattgccattttaaacccttgtttcttactgtgggagagggggaaatacagcactcatttcttgtttttaatttgcagaagtaagtgaaaatctatgtaaaatcaaaccaaaagagttggactgagtgtgtattgtcttgagattaagtgacaaatagtaaagtgttactgagtaattaagcccatgtattttttttttgtgagttgaaaatctttgaaatatgtgataaccgaatgtcaaaagttcctaaactctaacagtgcaggttgttcactgtaacgaggtaactcatatttgctggttacataaactacaagtactgctctcacaatatgggactttgaactgtgatgtagttcaacagttgccggcatcctctcagctgatacgctgcgaatattttgggttagacttgcagccagatgcagttttgcaacccaagaaaaaagttgaacctatgatcaaaaactgctcccaagatgaacctggaaaaaaatcagctaagctcccttggcgatctgcaggaacactagtaatgactggaattactccgtgatctttgatgactattacacataacagcactctagcaccttttcttactggcatggacttcctcatggactgctacttcatggatgatagcttcattgctttgggtagggatttaaggtagtcaaggggaaaatacgcagttttattacaggtcttaacatcaggcaactttcaactttaaaaccctttgtgaaaaatgtggttatagcactatagctctgattttaggatggttaaatgttatattcattgttggcttaccttatcaaactgtgccattaatcctttcacagacataggtaaggaagagaacaaccagtggattcaggggacaattatctatctccaaataataggcttttatttcttgcagctaactttttcagtgattctagcagatgccatctagtacatccttgatcttgtttctttcgtgagagatctcgccatggcagcatcttgttaagtaagtgtaattgcacatgcacaaaagacttaactagctttacatttagcagtcagttggttagattaggtttcatagtaaatgaataggaatagaaagaataggaagtgtttttattttccagtagtaattccgtggattccatttgacccagtttactatcagttcagttcaggtagatttggttcaacttttggtggtttttggctctaggatattcttgactttaatatcctagaacttactgagtcttcccttcaataaatacacttctcacatacctctaatcctatgcttccttgaaacaataatgctagctgagttgtttactaaggattattataagggcctgaaggtgtgggagtggagattaattaaaacctttatgttctccaatataagggaaaagcaggttggtactacttctgattaggcagaaaacaccaggattccttaagtgatccttgaaatggttattgttttctgccttgtcacatttgccactgtgccctttaaaacgatgtggaaacctcaggtttgtggacagcacaggtggaatgacatcttgtgcttcctgaggctcccctctaccaggcacattagcttagtgcttcagatgtcagcccaagtccttgttacctccttttcctgctgcccagggaagagtgtgtgtgctggagctggagcgcttgcactcttcaggtgactattctcacctccatttcctccacatgcattaggtgaaactgaggtctaagcctcctgcaaggtctacattttaaggactcacacatcaggctctcagaaatgtacacaggtattagttctgtttgttctaaaggaaatgtgggtatctctcaggccaggacttagtgactagttttcgctagacagcaggttaatacctagatctcatttaaaaaaaaaaaaaaaaaacaggattaaagggaactgatcaggtttgttgagttttttagcctaattccaaagcatggaagagtgctctaggtaggaaagaaagctttttcttacgatttgtagctacctactgtgcctgacttggtgcctgtgtgaggattaagcccttagtctgctcttgcaattattcaaatgacaaattaaatttgcttttgtaataacaataaaagttgtcatcttcccttttg

SEQ ID NO: 124367 - DNA, 1914 bp, Artificial Sequence
  derived and/or modified sequence
atggatcccgggtcaggtggaggcggcggcggcggtggtggcggaggaagcagctccggatcaagtagctcggattctgcaccagactgctgggaccaggctgacatggaggcccctggaccgggaccctgcggcggtggcggcagtctggccgctgcggcagaagctcagcgggagaatttgagcgctgccttctcgagacagttgaacgttaatgcaaaacccttcgtcccgaacgtacacgcagcagaatttgttcctagcttcctgcgcggaccagcagcgcctccacccccggtgggtggcgcagccaataaccatggtgctgggagtggcgccggcggccgagcagcccctgtggaatctagtcaggaggagcagtcgctatgtgaggggagcaactcagccgttagtatggagctgtcggagccgatcgttgagaacggggaaactgaaatgtcccccgaggagagctgggagcacaaagaggagataagcgaggctgagcctggaggaggaagcttgggtgacgggcgcccccccgaggagagcgcacacgaaatgatggaggaggaagaggagatcccaaaacccaagtcagtggtcgcaccccctggagcccccaagaaggaacatgtgaacgtggtctttatcggccacgtggacgctggaaagtcaaccattgggggccagataatgtacctcactggtatggttgataaacgaactcttgaaaagtatgagcgggaggccaaggagaaaaatcgagagacgtggtacctctcctgggccttggatacaaaccaggaagagagggacaagggcaagacagtcgaagtgggacgggcctatttcgaaactgagaagaagcactttaccattcttgacgcaccgggccataagtcatttgttcctaatatgatcggcggcgcatctcaggcagacttggcagtcctggtgattagcgcacgcaagggggagttcgagaccggttttgaaaaagggggtcagacaagagagcacgccatgctagccaagaccgctggtgtgaagcacttaattgttttgattaacaagatggatgatccaacagttaactggagcaatgagaggtacgaggagtgcaaggaaaaacttgtgccattcctgaaaaaggtcggatttaatccgaaaaaggacattcacttcatgccttgttccggcttgacaggagcaaatctcaaggagcagtctgatttttgtccctggtacatcggcttacctttcattccatatctagacaatctgcctaatttcaacagatccgtggacggtccaatccgactgcccatcgtcgataaatacaaggacatgggaacggtggtgctcggcaaactggaaagcggaagcatctgcaagggccagcaactcgtcatgatgcctaataaacataacgtcgaagtcttagggattcttagcgatgatgtggaaacagacaccgtggcacccggagagaatctgaaaatccggctgaaaggcattgaggaggaggaaatcctccccggcttcatcctttgcgatccaaataatctttgccattcgggaaggacttttgacgcccagattgtgattatagagcacaaatccataatttgtcccggttacaacgcagtgcttcacattcatacctgcatcgaagaggtcgagattactgctctcatatgcttggtggacaagaaatccggagaaaagtcgaagacaaggcccagatttgttaagcaggatcaagtttgcatagcaagactccgcacagcggggaccatatgtctggagaccttcaaagattttccgcagatgggtcgtttcactctccgggacgaaggaaagaccattgccatcggaaaagtattgaaactggtccccgagaaggactag

SEQ ID NO: 124368 - DNA, 1914 bp, Artificial Sequence
  derived and/or modified sequence
atggaccccggcagcggcggcggcggcggcggcggcggcggcggcggcagcagcagcggcagcagcagcagtgacagcgccccagactgctgggaccaggccgacatggaggcccctggccctggcccctgtggcggcggcggcagcctggccgctgctgctgaggcccagcgggagaacctgtctgctgccttcagccggcagctgaatgtgaatgccaagccctttgtgcccaacgtgcacgccgctgagtttgtgcccagcttcctgcggggccctgctgcccctcctcctcctgtgggcggggccgccaacaaccacggggccggcagcggggccggcggccgggccgcccctgtggagagcagccaggaggagcagagcctgtgtgagggcagcaacagcgctgtgtccatggagctgtctgagcccatcgtggagaatggagaaacagagatgagccctgaggagagctgggagcacaaggaggagatcagcgaggccgagcccggcggcggcagcctgggagatggccggcccccagaggagagcgcccacgagatgatggaggaggaggaggagatccccaagcccaagtctgtggtggcccctcctggggcccccaagaaggagcacgtgaatgtggtgttcatcggccacgtggatgctgggaagagcaccatcggcggccagatcatgtacctgaccggcatggtggacaagaggaccctggagaagtatgagcgggaggccaaggagaagaaccgggagacctggtacctgtcctgggccctggacaccaaccaggaggagcgggacaagggcaagacagtggaggtgggccgggcctactttgaaacagagaagaagcacttcaccatcctggatgcccctggccacaagagctttgtgcccaacatgattggaggagccagccaggccgacctggccgtgctggtgatcagcgccaggaaaggagaatttgagaccggctttgagaagggcggccagacccgggagcacgccatgctggccaagacagctggggtgaagcacctgattgtgctgatcaacaagatggatgaccccaccgtgaactggagcaatgaaagatatgaggagtgcaaggagaagctggtgcccttcctgaagaaggtgggcttcaaccccaagaaggacatccacttcatgccctgcagcggcctgactggagccaacctgaaggagcagagcgacttctgcccctggtacatcggcctgcccttcatcccctacctggacaacctgcccaacttcaacagatctgtggatggccccatccggctgcccatcgtggacaagtacaaggacatgggcaccgtggtgctgggcaagctggagagcggcagcatctgcaagggccagcagctggtgatgatgcccaacaagcacaacgtggaggtgctgggcatcctgagtgatgatgtggagacagacacagtggcccctggagagaacctgaagatccggctgaagggcatcgaggaggaggagatcctgcccggcttcatcctgtgtgaccccaacaacctgtgccacagcggccgcacctttgatgcccagatcgtcatcatcgagcacaagagcatcatctgccccggctacaatgctgtgctgcacatccacacctgcatcgaggaggtggagatcacagccctgatctgcctggtggacaagaagagcggggagaagagcaagacccggcccaggtttgtgaagcaggaccaggtgtgcatcgcccggctgaggacagctggcaccatctgcctggagaccttcaaggacttcccccagatgggccgcttcaccctgagagatgagggcaagaccatcgccatcggcaaggtgctgaagctggtgcctgagaaggactag

SEQ ID NO: 124369 - DNA, 1914 bp, Artificial Sequence
  derived and/or modified sequence
atggaccccggcagcggcggcggcggcggcggcggcggcggcggcggaagcagcagcggctctagctcttctgactccgcaccagactgctgggatcaagccgacatggaggcccccgggccagggccatgtggcggtgggggaagtttggcagctgcggccgaagcacaacgcgagaacctcagcgccgctttctcacgacagctgaatgtgaatgccaaacctttcgtgccaaatgtgcacgctgctgagtttgtcccgtcgttcctgagggggccggcagctcctcctcctccagtggggggggccgctaataatcacggtgctggatctggagcaggaggaagagccgcgcctgtcgagagtagccaagaggagcaaagcctttgcgaaggttcaaattctgcagtcagcatggaactgagcgagcccattgtggaaaacggtgaaaccgaaatgtctcccgaggagtcctgggaacataaggaggagatctccgaagcggaaccaggtggcggaagcctaggggacgggcggccaccggaggaatctgcgcacgagatgatggaggaggaggaggaaataccaaaaccgaagagcgtggttgctcctccaggcgcacccaaaaaggaacatgtaaatgtcgtcttcatcgggcatgtggacgccggcaaaagcaccataggtgggcaaataatgtatctcacaggaatggtggacaaacgtactctggagaagtatgagagggaagcaaaagagaaaaatagagaaacctggtacttgtcatgggccctggacaccaaccaagaagagcgggacaaaggcaagaccgtggaggtcggaagagcctactttgagactgagaagaagcatttcactatccttgatgccccaggccacaaatcgttcgtgcctaacatgataggtggcgccagccaagctgacctggctgtacttgtgatcagtgctcggaaaggggagttcgaaaccgggtttgaaaaagggggacaaacaagagaacacgccatgctcgcaaagactgccggagtcaaacatctgattgtgctgattaataagatggatgatcccaccgttaattggtcgaacgaaaggtacgaggaatgcaaggagaagcttgttcctttcttaaaaaaggtaggtttcaacccaaagaaggacatccatttcatgccctgttcaggcttgacgggcgcgaacctcaaggaacagtcggatttctgcccctggtatattggacttccattcattccctatttagataatcttcctaattttaataggtccgtggacggcccaattagactgccaatcgtcgacaagtacaaggacatgggcacagtggtattgggaaagttggaatccggctctatttgcaagggtcagcaactggtgatgatgccaaataaacataatgtcgaggtactgggaatcctgagtgatgacgtcgagaccgacaccgtggcccctggagaaaacctcaagatacgcctgaagggcattgaggaggaggaaattctgcctggcttcatactctgtgacccaaacaatctctgccacagcggacgaacattcgacgctcagatcgtgattatcgagcataagtctattatttgccccgggtacaacgccgtgttgcacattcacacttgcatagaggaggtggaaataaccgcacttatctgcctggtggataaaaagagtggagaaaagagtaaaaccagacctcgttttgtaaagcaggaccaggtatgtatcgcacgtctgagaaccgccgggaccatctgtttggagaccttcaaggattttccacagatggggcgcttcactcttcgcgacgaggggaagacaattgctattgggaaagtccttaaactggtgcctgagaaggattag

SEQ ID NO: 124370 - DNA, 1914 bp, Artificial Sequence
  derived and/or modified sequence
atggatccagggtccggcggtggaggcggaggtggcggaggaggtggttccagtagcggtagttcttctagtgattccgctcctgattgctgggaccaggcagacatggaggcacctggccctggcccttgcgggggtgggggttctctcgcagccgcagccgaagcacagcgcgagaacctctctgcagcctttagtagacaactgaatgttaatgcgaaaccatttgtgcctaacgtgcacgctgccgagttcgtcccgtcctttttaagggggcctgctgcccctccacccccagttgggggtgcagcaaacaaccacggcgctgggagcggtgctggagggcgagctgccccagtggagtccagtcaggaggagcagagcctgtgtgaaggcagcaactctgctgtgtccatggaactgtctgaaccgatcgtggagaatggtgaaacagagatgagcccggaggagtcctgggaacataaggaggagattagcgaggctgagccagggggtggctctctgggggatggtcggccaccagaggaatccgcccacgaaatgatggaagaggaggaggaaatcccaaaacctaagagtgtagtggccccacctggagcgccaaaaaaggaacacgtcaacgtagtgtttataggtcacgtcgacgccggaaagagtacaatcgggggtcagattatgtacttgacagggatggtggataaacgaactctcgagaaatatgaaagagaggcaaaagagaaaaatcgggagacatggtatctgtcgtgggccctcgacactaatcaggaggagcgcgacaagggaaaaactgtcgaggtgggcagggcatattttgagaccgaaaaaaagcacttcacaatcctggatgctccagggcataagtccttcgtcccaaacatgatcggcggtgcatcacaggctgatctggctgtgttggtgatttcagctcgcaagggggaatttgagactggctttgagaagggaggacagactagagagcacgctatgctggccaagaccgctggtgtgaaacaccttattgtgctgataaataagatggacgacccaaccgtaaattggtcaaatgagcggtacgaggaatgcaaagagaaactggttccatttctgaaaaaagtagggtttaacccaaagaaagacatccacttcatgccttgttctgggcttacaggggcaaatctgaaagagcaaagcgatttctgcccatggtatatcggcctgccattcatcccatatttggataatctccctaacttcaatcgttctgtggacggcccaatccgactgccaatagtggataagtacaaagacatggggaccgtggtgctaggcaaactggaatctggtagtatttgtaagggtcagcagctcgtaatgatgcccaacaagcacaatgtggaggtgctgggtatcctttctgatgatgtggaaacagacaccgtggctcccggagaaaacctgaagatccgactgaagggcattgaggaagaggagatattgcctgggttcattctctgcgaccccaacaatctgtgccatagcggcagaactttcgacgcacagattgttatcatcgaacacaaatccataatctgccccggttacaatgccgtgctgcatattcacacatgtatcgaggaggtagagatcacagcattgatctgtttagtagataaaaaatccggagaaaaatccaagaccaggccaaggtttgtgaagcaagaccaggtgtgcatagctcggttacgaacagctggtaccatctgtttggagacattcaaggacttcccccagatgggcaggtttaccttgcgggatgagggcaaaaccatcgccatcggcaaagtgcttaagctggtgcctgagaaagactag

SEQ ID NO: 124371 - DNA, 1914 bp, Artificial Sequence
  derived and/or modified sequence
atggaccccggcagcggcggcggcggcggcggcggcggcggcggcggcagcagcagcggcagcagcagcagcgacagcgcccccgactgctgggaccaggccgacatggaggcccccggccccggcccctgcggcggcggcggcagcctggccgccgccgccgaggcccagagagagaacctgagcgccgccttcagcagacagctgaacgtgaacgccaagcccttcgtgcccaacgtgcacgccgccgagttcgtgcccagcttcctgagaggccccgccgccccccccccccccgtgggcggcgccgccaacaaccacggcgccggcagcggcgccggcggcagagccgcccccgtggagagcagccaggaggagcagagcctgtgcgagggcagcaacagcgccgtgagcatggagctgagcgagcccatcgtggagaacggcgagaccgagatgagccccgaggagagctgggagcacaaggaggagatcagcgaggccgagcccggcggcggcagcctgggcgacggcagaccccccgaggagagcgcccacgagatgatggaggaggaggaggagatccccaagcccaagagcgtggtggccccccccggcgcccccaagaaggagcacgtgaacgtggtgttcatcggccacgtggacgccggcaagagcaccatcggcggccagatcatgtacctgaccggcatggtggacaagagaaccctggagaagtacgagagagaggccaaggagaagaacagagagacctggtacctgagctgggccctggacaccaaccaggaggagagagacaagggcaagaccgtggaggtgggcagagcctacttcgagaccgagaagaagcacttcaccatcctggacgcccccggccacaagagcttcgtgcccaacatgatcggcggcgccagccaggccgacctggccgtgctggtgatcagcgccagaaagggcgagttcgagaccggcttcgagaagggcggccagaccagagagcacgccatgctggccaagaccgccggcgtgaagcacctgatcgtgctgatcaacaagatggacgaccccaccgtgaactggagcaacgagagatacgaggagtgcaaggagaagctggtgcccttcctgaagaaggtgggcttcaaccccaagaaggacatccacttcatgccctgcagcggcctgaccggcgccaacctgaaggagcagagcgacttctgcccctggtacatcggcctgcccttcatcccctacctggacaacctgcccaacttcaacagaagcgtggacggccccatcagactgcccatcgtggacaagtacaaggacatgggcaccgtggtgctgggcaagctggagagcggcagcatctgcaagggccagcagctggtgatgatgcccaacaagcacaacgtggaggtgctgggcatcctgagcgacgacgtggagaccgacaccgtggcccccggcgagaacctgaagatcagactgaagggcatcgaggaggaggagatcctgcccggcttcatcctgtgcgaccccaacaacctgtgccacagcggcagaaccttcgacgcccagatcgtgatcatcgagcacaagagcatcatctgccccggctacaacgccgtgctgcacatccacacctgcatcgaggaggtggagatcaccgccctgatctgcctggtggacaagaagagcggcgagaagagcaagaccagacccagattcgtgaagcaggaccaggtgtgcatcgccagactgagaaccgccggcaccatctgcctggagaccttcaaggacttcccccagatgggcagattcaccctgagagacgagggcaagaccatcgccatcggcaaggtgctgaagctggtgcccgagaaggactag

SEQ ID NO: 124372 - protein, 291 aa, Artificial Sequence
  derived and/or modified sequence
MDPSLLRERELFKKRALSTPVVEKRSASSESSSSSSKKKKTKVEHGGSSGSKQNSDHSNGSFNLKALSGSSGYKFGVLAKIVNYMKTRHQRGDTHPLTLDEILDETQHLDIGLKQKQWLMTEALVNNPKIEVIDGKYAFKPKYNVRDKKALLRLLDQHDQRGLGGILLEDIEEALPNSQKAVKALGDQILFVNRPDKKKILFFNDKSCQFSVDEEFQKLWRSVTVDSMDEEKIEEYLKRQGISSMQESGPKKVAPIQRRKKPASQKKRRFKTHNEHLAGVLKDYSDITSSK

SEQ ID NO: 124373 - protein, 126 aa, Artificial Sequence
  derived and/or modified sequence
MDPSLLRERELFKKRALSTPVVEKRSASSESSSSSSKKKKTKVEHGGSSGSKQNSDHSNGSFNLKALSGSSGYKFGVLAKIVNYMKTRHQRGDTHPLTLDEILDETQHLDIGLKQKQWLMTEALVN

SEQ ID NO: 124374 - protein, 198 aa, Artificial Sequence
  derived and/or modified sequence
MDPSLLRERELFKKRALSTPVVEKRSASSESSSSSSKKKKTKVEHGGSSGSKQNSDHSNGSFNLKALSGSSGYKFGVLAKIVNYMKTRHQRGDTHPLTLDEILDETQHLDIGLKQKQWLMTEALVNNPKIEVIDGKYAFKPKYNVRDKKALLRLLDQHDQRGLGGILLEDIEEALPNSQKAVKALGDQILFVNRPDKK

SEQ ID NO: 124375 - DNA, 1560 bp, Artificial Sequence
  derived and/or modified sequence
cccgatcgggaagtggcgggcggagtcccgggtccagtcgccgcctcagctaccgccgctgccgccgccgccgccgccaccgccagtggtgagaccccgacctggcgggtcagcgctgggcgtgcgtgcgggcaggcgggggcgctgacgagaagcaggaagagggtgcagtgccggcgtgggcggccggccgaggcggaggcgcaggaagggggcggcgagtcgtgcgaggctgcccttctcactcagcattatggatccaagcctgttgagagaaagggagctgttcaaaaaacgagctctttctactcctgtagtagaaaaacgttcagcatcttctgagtcatcatcatcatcgtcaaagaagaagaaaacaaaggtagaacatggaggatcgtcaggctctaaacaaaattctgatcatagcaatggatcatttaacttgaaagctttgtcaggaagctctggatataagtttggtgttcttgctaagattgtgaattacatgaagacacggcatcagcgaggagatacgcatcctctaaccttagatgaaattttggatgaaacacaacatttagatattggactcaagcagaaacaatggctaatgactgaggctttagtcaacaatcccaaaattgaagtaatagatgggaagtatgctttcaagcccaagtacaacgtgagagataagaaggccctacttaggctcttagatcagcatgaccagcgaggattaggaggaattcttttagaagacatagaagaagcactgcccaattcccagaaagctgtcaaggctttgggggaccagatactatttgtaaatcgtcccgataagaagaaaatacttttcttcaatgataagagctgtcagttttctgtggatgaagaatttcagaaactgtggaggagtgtcactgtagattccatggacgaggagaaaattgaagaatatctgaagcgacagggtatttcttccatgcaggaatctggaccaaagaaagtggcccctattcagagaaggaaaaagcctgcttcacagaaaaagcgacgctttaagactcataacgaacacttggctggagtgctgaaggattactctgacattacttccagcaaatagggaacagttttgccctggaacagagttacagatacacaatcaagagtgttcttgctgatgctcggggtctgaagactgtcttcctatctgcttcttgcggctgaggagaggagcagttcagtttacaaaacaagtgcaaattaccaaactcaaagcttatttgagtagaatgggctcatgggcaatgtgatgttccctgttaaccttctgttactccctgggagaaaggcgctgagcgtggcatgcaggtgtctttgctgtgtttttctccacttctaaatggttcctggttcctttcttcctcgtttgttactttagagcaagtttgcccatagtcttgaatgcaatatttgtttattccaaaagaacatatttataataaaatcactgtagaaggatttttaagaaaaaaaaaaaaaaaaaaaaaaaaa

SEQ ID NO: 124376 - DNA, 876 bp, Artificial Sequence
  derived and/or modified sequence
atggacccatctcttttgagggagcgagagctgttcaagaaacgggcgctctcaacacctgtcgtggagaagaggtcagcctcctctgagagtagtagttcttccagcaaaaaaaaaaagacaaaggtcgagcatgggggcagtagcggctctaaacagaactcagaccacagtaacgggagtttcaacctgaaggctctcagcggtagctccggatacaaattcggcgttctggcgaaaattgtgaactatatgaaaacacggcatcagcgaggagatacacacccgctgactctagatgagatcctggatgaaacccagcatttggatattggcttgaagcaaaagcagtggctgatgactgaagccctagttaacaatcccaaaatcgaggtgattgatggaaaatacgcgtttaaacctaaatacaatgttagggacaagaaagcactcctgcggctgctggatcaacatgaccaacgtggtttggggggaattctcctggaagatatcgaggaagcactgccgaatagtcagaaggcggtgaaggccctcggagaccagatcttgtttgtcaatcgccccgacaagaaaaaaattctgttctttaacgacaagtcgtgccagttcagcgtcgatgaggagttccagaaactgtggcgctctgttaccgtggattccatggacgaggaaaaaatcgaggagtatttgaaacgccagggcatctcctctatgcaggagtctggaccaaagaaggtagcacccatacagcgccggaaaaagcccgcatctcagaagaagcggagattcaagacacacaatgagcacttggctggcgtgttgaaggattactcggatatcacatcctccaagtag

SEQ ID NO: 124377 - DNA, 1762 bp, Artificial Sequence
  derived and/or modified sequence
gcggtggctgccgggactgagctcctagcacccgatcgggaagtggcgggcggagtcccgggtccagtcgccgcctcagctaccgccgctgccgccgccgccgccgccaccgccagtggtgagaccccgacctggcgggtcagcgctgggcgtgcgtgcgggcaggcgggggcgctgacgagaagcaggaagagggtgcagtgccggcgtgggcggccggccgaggcggaggcgcaggaagggggcggcgagtcgtgcgaggctgcccttctcactcagcattatggatccaagcctgttgagagaaagggagctgttcaaaaaacgagctctttctactcctgtagtagaaaaacgttcagcatcttctgagtcatcatcatcatcgtcaaagaagaagaaaacaaaggtagaacatggaggatcgtcaggctctaaacaaaattctgatcatagcaatggatcatttaacttgaaagctttgtcaggaagctctggatataagtttggtgttcttgctaagattgtgaattacatgaagacacggcatcagcgaggagatacgcatcctctaaccttagatgaaattttggatgaaacacaacatttagatattggactcaagcagaaacaatggctaatgactgaggctttagtcaacaatcccaaaattgaagtaatagatgggaagtatgctttcaagcccaagtacaacgtgagagataagaaggccctacttaggctcttagatcagcatgaccagcgaggattaggaggaattcttttagaagacatagaagaagcactgcccaattcccagaaagctgtcaaggctttgggggaccagatactatttgtaaatcgtcccgataagaagaaaatacttttcttcaatgataagagctgtcagttttctgtggatgaagaatttcagaaactgtggaggagtgtcactgtagattccatggacgaggagaaaattgaagaatatctgaagcgacagggtatttcttccatgcaggaatctggaccaaagaaagtggcccctattcagagaaggaaaaagcctgcttcacagaaaaagcgacgctttaagactcataacgaacacttggctggagtgctgaaggattactctgacattacttccagcaaatagggaacagttttgccctggaacagagttacagatacacaatcaagagtgttcttgctgatgctcggggtctgaagactgtcttcctatctgcttcttgcggctgaggagaggagcagttcagtttacaaaacaagtgcaaattaccaaactcaaagcttatttgagtagaatgggctcatgggcaatgtgatgttccctgttaaccttctgttactccctgggagaaaggcgctgagcgtggcatgcaggtgtctttgctgtgtttttctccacttctaaatggttcctggttcctttcttcctcgtttgttactttagagcaagtttgcccatagtcttgaatgcaatatttgtttattccaaaagaacatatttataataaaatcactgtagaaggatttttaagatgttagtgaattctgtttcttttcattctcggaaatggcaggaagcagctccagtctctgatttccatgggtcacgtgctggggatgtgatgaagcctgcagtctgcactgtgttgctgagcacatggatttcaccactggaacacaggtgtgctgcttgttagcaagcagagcaataaagatgtgctggatgtca

SEQ ID NO: 124378 - DNA, 876 bp, Artificial Sequence
  derived and/or modified sequence
atggaccccagcctgctgcgggagcgggagctgttcaagaagagggccctgagcacccctgtggtggagaagaggtctgccagcagcgagagcagcagcagcagcagcaagaagaagaagaccaaggtggagcacggcggcagcagcggcagcaagcagaacagcgaccacagcaatggcagcttcaacctgaaggccctgagcggcagcagcggctacaagtttggagtgctggccaagatcgtgaactacatgaagaccaggcaccagagaggagacacccaccccctgaccctggatgagatcctggatgagacccagcacctggacatcggcctgaagcagaagcagtggctgatgacagaggccctggtgaacaaccccaagattgaggtgattgatggcaagtatgccttcaagcccaagtacaacgtgcgggacaagaaggccctgctgcggctgctggaccagcacgaccagaggggcctgggcggcatcctgctggaggacatcgaggaggccctgcccaacagccagaaggctgtgaaggccctgggggaccagatcctgtttgtgaacagaccagacaagaagaagatcctcttcttcaatgacaagagctgccagttctctgtggatgaggagttccagaagctgtggaggtctgtgacagtggacagcatggatgaggagaagattgaggagtacctgaagaggcagggcatcagctccatgcaggagagcggccccaagaaggtggcccccatccagaggaggaagaagccagccagccagaagaagaggcgcttcaagacccacaatgagcacctggccggcgtgctgaaggactacagcgacatcaccagcagcaagtag

SEQ ID NO: 124379 - DNA, 876 bp, Artificial Sequence
  derived and/or modified sequence
atggaccccagcctgctgcgggagcgggagctgttcaagaagcgggctttgtccacccctgtggtggagaaacgaagtgccagcagcgagtcttcaagttctagcagtaaaaaaaaaaaaacaaaggttgaacatggcggttcatccgggtctaaacagaattcagatcatagcaatggctcgtttaacctgaaggctctgtctggcagcagcggctataagtttggtgtcctggcgaaaattgtgaactacatgaagactaggcatcagcgtggggatacccatcccctgaccctcgatgagattctcgacgaaacccaacatcttgacatcggactcaagcaaaagcaatggttgatgaccgaagccctcgtaaataatccaaagatcgaggttatcgatgggaagtatgcatttaagcccaagtacaatgtgagagacaagaaggccctgctgcgcctgttggaccagcacgatcagagaggccttggcggaatactcctggaagatatcgaagaagccctgcccaacagtcagaaggctgttaaagctttgggcgaccaaattcttttcgtgaatagacccgacaaaaagaagatcctttttttcaacgacaaaagctgtcagtttagcgtagacgaggaatttcagaaactgtggcgctcagtgaccgtggatagtatggatgaggagaaaattgaagagtatctcaaaaggcaggggatcagctcaatgcaggaatcaggccctaagaaggtggctccgattcagcgtcggaaaaagcctgcttcccagaaaaagcgtcgatttaagacccataacgagcacctggccggggtgttgaaggactattcagacattactagttccaaatag

SEQ ID NO: 124380 - DNA, 876 bp, Artificial Sequence
  derived and/or modified sequence
atggatccttctctcctccgtgaacgcgagttgttcaagaaacgagctctcagcactcctgtggtcgagaagcgctccgcaagctccgagagttcaagctcctcatctaagaagaaaaaaactaaggtggagcacgggggatcaagtggatctaaacagaactccgaccattccaacgggagcttcaaccttaaggcattgtcgggcagtagtggatacaagtttggagtcctggccaagatcgtaaattatatgaagactcgccatcagcggggtgatacccacccacttaccctggatgaaattcttgacgaaacacagcatctggatatcggactgaaacaaaaacagtggttaatgaccgaggctctggtcaataaccctaaaatcgaagtgattgacggcaagtacgcctttaagccaaagtacaacgtcagagacaagaaggccctgctgcgcctgctggaccaacatgaccaacggggactgggcggtattctgctagaagatattgaagaggcactgcctaattcgcagaaagctgtgaaggccctgggcgaccaaattctctttgtgaatagacccgataaaaagaaaattttgtttttcaatgacaaaagttgtcagtttagcgtagacgaagagttccaaaagctgtggagatcagtcaccgtcgattccatggacgaggaaaagattgaggaatatttgaaacggcaaggaatctcttcaatgcaagagtctggtccgaaaaaagtggcccctatccagaggcgcaagaagcccgcaagtcagaaaaagaggcgcttcaaaactcataatgagcacttggctggcgtcctgaaggattatagtgatatcacctcctctaaatag

SEQ ID NO: 124381 - DNA, 876 bp, Artificial Sequence
  derived and/or modified sequence
atggaccccagcctgctgagagagagagagctgttcaagaagagagccctgagcacccccgtggtggagaagagaagcgccagcagcgagagcagcagcagcagcagcaagaagaagaagaccaaggtggagcacggcggcagcagcggcagcaagcagaacagcgaccacagcaacggcagcttcaacctgaaggccctgagcggcagcagcggctacaagttcggcgtgctggccaagatcgtgaactacatgaagaccagacaccagagaggcgacacccaccccctgaccctggacgagatcctggacgagacccagcacctggacatcggcctgaagcagaagcagtggctgatgaccgaggccctggtgaacaaccccaagatcgaggtgatcgacggcaagtacgccttcaagcccaagtacaacgtgagagacaagaaggccctgctgagactgctggaccagcacgaccagagaggcctgggcggcatcctgctggaggacatcgaggaggccctgcccaacagccagaaggccgtgaaggccctgggcgaccagatcctgttcgtgaacagacccgacaagaagaagatcctgttcttcaacgacaagagctgccagttcagcgtggacgaggagttccagaagctgtggagaagcgtgaccgtggacagcatggacgaggagaagatcgaggagtacctgaagagacagggcatcagcagcatgcaggagagcggccccaagaaggtggcccccatccagagaagaaagaagcccgccagccagaagaagagaagattcaagacccacaacgagcacctggccggcgtgctgaaggactacagcgacatcaccagcagcaagtag

SEQ ID NO: 124382 - protein, 517 aa, Artificial Sequence
  derived and/or modified sequence
MAALGPSSQNVTEYVVRVPKNTTKKYNIMAFNAADKVNFATWNQARLERDLSNKKIYQEEEMPESGAGSEFNRKLREEARRKKYGIVLKEFRPEDQPWLLRVNGKSGRKFKGIKKGGVTENTSYYIFTQCPDGAFEAFPVHNWYNFTPLARHRTLTAEEAEEEWERRNKVLNHFSIMQQRRLKDQDQDEDEEEKEKRGRRKASELRIHDLEDDLEMSSDASDASGEEGGRVPKAKKKAPLAKGGRKKKKKKGSDDEAFEDSDDGDFEGQEVDYMSDGSSSSQEEPESKAKAPQQEEGPKGVDEQSDSSEESEEEKPPEEDKEEEEEKKAPTPQEKKRRKDSSEESDSSEESDIDSEASSALFMAKKKTPPKRERKPSGGSSRGNSRPGTPSAEGGSTSSTLRAAASKLEQGKRVSEMPAAKRLRLDTGPQSLSGKSTPQPPSGKTTPNSGDVQVTEDAVRRYLTRKPMTTKDLLKKFQTKKTGLSSEQTVNVLAQILKRLNPERKMINDKMHFSLKE

SEQ ID NO: 124383 - protein, 432 aa, Artificial Sequence
  derived and/or modified sequence
MAFNAADKVNFATWNQARLERDLSNKKIYQEEEMPESGAGSEFNRKLREEARRKKYGIVLKEFRPEDQPWLLRVNGKSGRKRNKVLNHFSIMQQRRLKDQDQDEDEEEKEKRGRRKASELRIHDLEDDLEMSSDASDASGEEGGRVPKAKKKAPLAKGGRKKKKKKGSDDEAFEDSDDGDFEGQEVDYMSDGSSSSQEEPESKAKAPQQEEGPKGVDEQSDSSEESEEEKPPEEDKEEEEEKKAPTPQEKKRRKDSSEESDSSEESDIDSEASSALFMAKKKTPPKRERKPSGGSSRGNSRPGTPSAEGGSTSSTLRAAASKLEQGKRVSEMPAAKRLRLDTGPQSLSGKSTPQPPSGKTTPNSGDVQVTEDAVRRYLTRKPMTTKDLLKKFQTKKTGLSSEQTVNVLAQILKRLNPERKMINDKMHFSLKE

SEQ ID NO: 124384 - protein, 127 aa, Artificial Sequence
  derived and/or modified sequence
MAALGPSSQNVTEYVVRVPKNTTKKYNIMAFNAADKVNFATWNQARLERDLSNKKIYQEEEMPESGAGSEFNRKLREEARRKKYGIVLKEFRPEDQPWLLRVNGKSGRKFKGIKKGGVTENTSYYIF

SEQ ID NO: 124385 - DNA, 2551 bp, Artificial Sequence
  derived and/or modified sequence
actgcgcactgaggtggccacagtcgctaagaaggttgccatcgcgacgcggctgctcgagggtttcgcttccgggttaggcggccgcagaagcgtagaccgagtagcttgagcgcctcttccggttaccttttcccagcgccagaggcgcctagggttggggtcctcgctcaggcacagagacccgacaccgagcggcggcttccccgggatcgagggacgcgcacgccagaggagacgaaaggaacccgggtcggaccagatcggaaccactgaccattgcccatggcggccctaggccctagcagccagaatgtcactgaatacgtcgttcgagttcctaagaatacaaccaaaaaatataacatcatggcttttaatgcagccgacaaagtcaactttgctacgtggaatcaggctcggctggagcgggacttgagcaacaagaaaatctaccaagaggaggagatgcccgaatcgggcgcgggcagtgagttcaaccgcaagcttcgggaggaggctcggaggaagaagtacggcatcgtcctcaaggagttccggcccgaggaccagccctggctgctccgggtcaacggcaaatcaggcaggaagttcaagggcatcaagaagggaggcgtaacagagaacacgtcctactacatcttcacccagtgccccgacggggccttcgaggccttccccgtgcacaactggtacaatttcacaccgctggcccggcatcgcacgctcactgccgaggaggccgaggaggagtgggagaggaggaacaaggtgctgaaccacttcagcatcatgcagcagcggcggctcaaggatcaggaccaggacgaggatgaggaggagaaggagaaacgtggccgcaggaaggcgagcgagctgcgcatccacgacctggaggacgacctggagatgtcgtccgatgccagtgatgccagtggtgaggaggggggcagagtccccaaggccaagaagaaggcgccgctggccaagggcggcaggaaaaagaagaagaagaagggttcagacgacgaggccttcgaggacagcgatgatggggacttcgagggccaagaggtggactacatgtcagacggctccagtagctcccaagaagagcctgagagcaaggccaaggcgccgcagcaggaggaggggcccaagggtgtcgatgagcagagcgacagtagtgaggagagtgaggaggagaagccgcctgaggaggacaaggaggaggaggaggagaagaaggcacccaccccgcaggagaagaagcgcaggaaagacagcagcgaggagtcggacagctcagaggagagcgacattgacagcgaggcctcctcagccctcttcatggcgaagaagaagacgccacccaagagagagcggaagccgtcgggagggagctcaaggggcaacagccgcccaggcacgcccagcgcagagggtggcagcacctcctccaccctgcgggcggctgccagcaaactcgagcaagggaagcgggtgagcgagatgcctgcagccaagcggttgcggctggacacgggaccccagagcctgtctgggaagtcgacaccccagccaccatcaggcaagacaacacccaacagcggcgacgtgcaggtgactgaggatgccgtgcgccgctacctgacacggaagcccatgaccactaaggacctgctgaaaaagttccagaccaagaagacagggctgagcagcgagcagacagtgaacgtgttggcccagatcctcaagcgactcaaccccgagcgcaagatgatcaacgacaaaatgcacttctccctcaaggagtgaggcttggtccaatacatggctctgccccccagaacttaaggctctcactgccccttcgccatcctagagtgaggctctgtccaatacatggctctgccctccagaacttcaggctctcagtgacccttcgacatcctgcttgctccctgactcccagggccccgtagttagcaattctggaaaagttaagccatctcctcctctggcccttccttctggaatcttcagatgcctgttaggccttcttattgtcctcctcctcctggctcggcctccctcacactgaccaagggcctgtgctgcccactgggtaacttctacagttctcccttccacttccctaagtctctcttcagctgtgacttatccaccacatagcccagtaagtcttcagttttggctgggcatgatggtgagcgcctgcagtcccagctacttgggaggctaagcccagttcaaggctgcagtgaactatgatggtgccactgcattccagcctgggtgacagaatgaaatcctggcacaaaaaaaaaaaaaaagtagccaggcatggtggcgggagcctgttgtcccagctgttccgtaggctgaggcacgagattcacttgaacctgggaggtggaggttgctgtgagctgacaccacgccactgcactccagcctgggtgacagtgagactctgtctcaataaataaaaaataataataaattg

SEQ ID NO: 124386 - DNA, 1554 bp, Artificial Sequence
  derived and/or modified sequence
atggccgccctggggccttccagccaaaacgtgacagagtacgtggtacgagtgcctaagaatacaaccaagaagtacaatatcatggccttcaacgcggctgacaaggtgaatttcgccacatggaatcaagcgaggcttgaaagggatctgagcaacaagaaaatctatcaagaagaagaaatgccggagagcggcgccggatcggagtttaacaggaaactgcgggaagaggccagacgcaaaaagtatggaatagtgctcaaagaatttaggcccgaggatcaaccctggctgctcagggtcaatgggaagtcgggccgaaagtttaagggcattaagaagggcggcgtcaccgaaaacactagctattacatctttactcagtgccctgatggggccttcgaagctttccccgtgcacaactggtacaacttcacgcctttggcgagacatcggaccctgaccgcagaggaagcagaagaggaatgggagagaagaaataaagtcctgaaccatttctccattatgcagcagcggcgcctgaaagatcaagaccaggatgaagacgaggaagaaaaggaaaagcggggacggaggaaagctagtgaactgagaatccatgatctcgaagacgatctggaaatgtcttctgatgctagcgatgcatcaggagaagaaggaggacgggtacctaaagccaaaaagaaggcccctttggccaaaggcggacgaaaaaagaagaagaagaaggggtcagacgacgaggcatttgaagacagcgacgatggcgatttcgaaggtcaagaggtagactacatgtccgatggctcatctagcagccaggaggaacctgaatctaaagccaaggctccgcagcaggaagagggccctaaaggcgtggatgagcagtctgatagtagcgaggagagtgaagaggagaagcctccagaagaagacaaggaagaggaagaagagaagaaagcccccacacctcaagagaaaaaaagacgtaaagattcctcagaagaatccgacagcagtgaagagtcagacatcgactccgaagcaagctcagcactgttcatggccaaaaagaagaccccacctaagcgggagcgtaaaccctccggcgggtcatctcgggggaatagcaggccggggactccctcggcggaaggcggttccaccagtagcaccctgcgggctgccgcctctaagctagagcagggcaaacgggtttcagaaatgccagcagccaagcggctccggctggatactggaccccagtcattatcggggaaatccacacctcagcccccctctggaaaaactaccccaaattctggagatgttcaagtaactgaggacgcggttagaaggtatctgactcgtaaacccatgacgacgaaggacctgctaaagaaattccaaactaagaaaacgggcctgtcaagcgagcagactgtgaatgtactggcacagattttgaagcggttgaatccagaaagaaagatgattaatgacaaaatgcatttcagtctgaaagagtag

SEQ ID NO: 124387 - DNA, 1299 bp, Artificial Sequence
  derived and/or modified sequence
atggccttcaatgccgcagacaaagtaaacttcgctacttggaatcaggccagactcgaaagagacctttcaaataaaaaaatataccaggaggaggagatgccggaatctggcgctggcagtgaatttaatagaaagctgagggaggaggcccggcggaagaaatatggcattgtcctgaaggagtttagacctgaggaccagccatggctgcttcgggtgaatggtaagtctggacgcaagcgaaacaaggtgctgaatcacttctcaattatgcagcagaggagactcaaagaccaggaccaggatgaagatgaagaagaaaaagaaaagcgcggacggagaaaagcgagcgaactacgcatacacgaccttgaagacgacttggaaatgtcctctgacgccagcgatgctagtggggaagagggcggacgggttccaaaggcgaaaaagaaagccccactagctaaagggggacgaaagaaaaaaaagaagaaaggttctgacgatgaagcgttcgaggacagcgacgacggtgatttcgaaggtcaagaggtggattacatgagcgatggctcatctagcagtcaggaggagcccgagagcaaggccaaggcaccacagcaggaggagggaccaaaaggcgtggacgagcagtctgattcttctgaagaaagcgaggaggagaagcccccagaagaggacaaggaggaggaggaagagaaaaaggcccccactccgcaagagaagaagagacggaaggattcttccgaagaaagtgacagttccgaggaatccgacattgatagcgaggcaagctctgcactgtttatggctaagaagaagacaccacctaagagagagcgaaagccgtctggcgggtcctcaaggggaaactcacggcccggaactccaagcgccgagggggggtccaccagctccactctgcgagcagcagcctctaagcttgagcaagggaaaagagtgtcagagatgcccgccgctaaaaggctccgccttgatacggggcctcagtccctatcgggcaaaagcacgcctcagccaccttcaggaaagacaacacctaacagtggggatgtgcaggtcacagaggacgcagtgcgacggtacttgaccaggaaacctatgaccaccaaagaccttctaaagaaattccagaccaaaaagaccgggctcagctcagaacagactgttaacgttctggcccagatactgaagaggctgaacccagagagaaagatgattaatgataagatgcatttttcattgaaggaatag

SEQ ID NO: 124388 - DNA, 384 bp, Artificial Sequence
  derived and/or modified sequence
atggcagccctaggtccttcatctcagaatgtgactgagtacgtggttagagtacccaaaaacactacaaaaaagtacaacatcatggccttcaacgccgccgataaagtcaacttcgcaacatggaatcaggcgcggctcgagcgcgatctaagcaataagaaaatctatcaggaagaagagatgcctgaaagtggagctggctcagagttcaacaggaaactgagagaagaagcaaggcggaagaaatacggaattgtcttgaaggagttccgtcctgaggatcaaccctggctgctacgggtgaatggcaagtcaggcaggaagttcaaagggattaagaaggggggggttactgagaacaccagctactatatcttctag

SEQ ID NO: 124389 - DNA, 2731 bp, Artificial Sequence
  derived and/or modified sequence
gggtgctgacgtcacgagagagggcggtcccccatttgatgaagttaaccgcgttatatacaagagcgccagcgacagaggcccgttagtttatctcagactcggcctaggtttgctgagtctaaaaagggaccgcggtggaccttttgaggtgaccatagccgccgaggagcataagtgactgcgcactgaggtggccacagtcgctaagaaggttgccatcgcgacgcggctgctcgagggtttcgcttccgggttaggcggccgcagaagcgtagaccgagtagcttgagcgcctcttccggttaccttttcccagcgccagaggcgcctagggttggggtcctcgctcaggcacagagacccgacaccgagcggcggcttccccgggatcgagggacgcgcacgccagaggagacgaaaggaacccgggtcggaccagatcggaaccactgaccattgcccatggcggccctaggccctagcagccagaatgtcactgaatacgtcgttcgagttcctaagaatacaaccaaaaaatataacatcatggcttttaatgcagccgacaaagtcaactttgctacgtggaatcaggctcggctggagcgggacttgagcaacaagaaaatctaccaagaggaggagatgcccgaatcgggcgcgggcagtgagttcaaccgcaagcttcgggaggaggctcggaggaagaagtacggcatcgtcctcaaggagttccggcccgaggaccagccctggctgctccgggtcaacggcaaatcaggcaggaagttcaagggcatcaagaagggaggcgtaacagagaacacgtcctactacatcttcacccagtgccccgacggggccttcgaggccttccccgtgcacaactggtacaatttcacaccgctggcccggcatcgcacgctcactgccgaggaggccgaggaggagtgggagaggaggaacaaggtgctgaaccacttcagcatcatgcagcagcggcggctcaaggatcaggaccaggacgaggatgaggaggagaaggagaaacgtggccgcaggaaggcgagcgagctgcgcatccacgacctggaggacgacctggagatgtcgtccgatgccagtgatgccagtggtgaggaggggggcagagtccccaaggccaagaagaaggcgccgctggccaagggcggcaggaaaaagaagaagaagaagggttcagacgacgaggccttcgaggacagcgatgatggggacttcgagggccaagaggtggactacatgtcagacggctccagtagctcccaagaagagcctgagagcaaggccaaggcgccgcagcaggaggaggggcccaagggtgtcgatgagcagagcgacagtagtgaggagagtgaggaggagaagccgcctgaggaggacaaggaggaggaggaggagaagaaggcacccaccccgcaggagaagaagcgcaggaaagacagcagcgaggagtcggacagctcagaggagagcgacattgacagcgaggcctcctcagccctcttcatggcgaagaagaagacgccacccaagagagagcggaagccgtcgggagggagctcaaggggcaacagccgcccaggcacgcccagcgcagagggtggcagcacctcctccaccctgcgggcggctgccagcaaactcgagcaagggaagcgggtgagcgagatgcctgcagccaagcggttgcggctggacacgggaccccagagcctgtctgggaagtcgacaccccagccaccatcaggcaagacaacacccaacagcggcgacgtgcaggtgactgaggatgccgtgcgccgctacctgacacggaagcccatgaccactaaggacctgctgaaaaagttccagaccaagaagacagggctgagcagcgagcagacagtgaacgtgttggcccagatcctcaagcgactcaaccccgagcgcaagatgatcaacgacaaaatgcacttctccctcaaggagtgaggcttggtccaatacatggctctgccccccagaacttaaggctctcactgccccttcgccatcctagagtgaggctctgtccaatacatggctctgccctccagaacttcaggctctcagtgacccttcgacatcctgcttgctccctgactcccagggccccgtagttagcaattctggaaaagttaagccatctcctcctctggcccttccttctggaatcttcagatgcctgttaggccttcttattgtcctcctcctcctggctcggcctccctcacactgaccaagggcctgtgctgcccactgggtaacttctacagttctcccttccacttccctaagtctctcttcagctgtgacttatccaccacatagcccagtaagtcttcagttttggctgggcatgatggtgagcgcctgcagtcccagctacttgggaggctaagcccagttcaaggctgcagtgaactatgatggtgccactgcattccagcctgggtgacagaatgaaatcctggcacaaaaaaaaaaaaaaagtagccaggcatggtggcgggagcctgttgtcccagctgttccgtaggctgaggcacgagattcacttgaacctgggaggtggaggttgctgtgagctgacaccacgccactgcactccagcctgggtgacagtgagactctgtctcaataaataaaaaataataataaattg

SEQ ID NO: 124390 - DNA, 1705 bp, Artificial Sequence
  derived and/or modified sequence
atcatggcttttaatgcagccgacaaagtcaactttgctacgtggaatcaggctcggctggagcgggacttgagcaacaagaaaatctaccaagaggaggagatgcccgaatcgggcgcgggcagtgagttcaaccgcaagcttcgggaggaggctcggaggaagaagtacggcatcgtcctcaaggagttccggcccgaggaccagccctggctgctccgggtcaacggcaaatcaggcaggaagaggaacaaggtgctgaaccacttcagcatcatgcagcagcggcggctcaaggatcaggaccaggacgaggatgaggaggagaaggagaaacgtggccgcaggaaggcgagcgagctgcgcatccacgacctggaggacgacctggagatgtcgtccgatgccagtgatgccagtggtgaggaggggggcagagtccccaaggccaagaagaaggcgccgctggccaagggcggcaggaaaaagaagaagaagaagggttcagacgacgaggccttcgaggacagcgatgatggggacttcgagggccaagaggtggactacatgtcagacggctccagtagctcccaagaagagcctgagagcaaggccaaggcgccgcagcaggaggaggggcccaagggtgtcgatgagcagagcgacagtagtgaggagagtgaggaggagaagccgcctgaggaggacaaggaggaggaggaggagaagaaggcacccaccccgcaggagaagaagcgcaggaaagacagcagcgaggagtcggacagctcagaggagagcgacattgacagcgaggcctcctcagccctcttcatggcgaagaagaagacgccacccaagagagagcggaagccgtcgggagggagctcaaggggcaacagccgcccaggcacgcccagcgcagagggtggcagcacctcctccaccctgcgggcggctgccagcaaactcgagcaagggaagcgggtgagcgagatgcctgcagccaagcggttgcggctggacacgggaccccagagcctgtctgggaagtcgacaccccagccaccatcaggcaagacaacacccaacagcggcgacgtgcaggtgactgaggatgccgtgcgccgctacctgacacggaagcccatgaccactaaggacctgctgaaaaagttccagaccaagaagacagggctgagcagcgagcagacagtgaacgtgttggcccagatcctcaagcgactcaaccccgagcgcaagatgatcaacgacaaaatgcacttctccctcaaggagtgaggcttggtccaatacatggctctgccccccagaacttaaggctctcactgccccttcgccatcctagagtgaggctctgtccaatacatggctctgccctccagaacttcaggctctcagtgacccttcgacatcctgcttgctccctgactcccagggccccgtagttagcaattctggaaaagttaagccatctcctcctctggcccttccttctggaatcttcagatgcctgttaggccttcttattgtcctcctcctcctggctcggcctccctcacactgaccaagggcctgtgctgcccactgggtaacttctacagttctcccttccacttccctaagtctctcttcagctgtgacttatccaccacatagcccagtaagtcttcagttttggctg

SEQ ID NO: 124391 - DNA, 568 bp, Artificial Sequence
  derived and/or modified sequence
tactgccatgattcgggggatgtgtgcatgcctggaacgggcgccagaggcgcctagggttggggtcctcgctcaggcacagagacccgacaccgagcggcggcttccccgggatcgagggacgcgcacgccagaggagacgaaaggaacccgggtcggaccagatcggaaccactgaccattgcccatggcggccctaggccctagcagccagaatgtcactgaatacgtcgttcgagttcctaagaatacaaccaaaaaatataacatcatggcttttaatgcagccgacaaagtcaactttgctacgtggaatcaggctcggctggagcgggacttgagcaacaagaaaatctaccaagaggaggagatgcccgaatcgggcgcgggcagtgagttcaaccgcaagcttcgggaggaggctcggaggaagaagtacggcatcgtcctcaaggagttccggcccgaggaccagccctggctgctccgggtcaacggcaaatcaggcaggaagttcaagggcatcaagaagggaggcgtaacagagaacacgtcctactacatcttc

SEQ ID NO: 124392 - DNA, 1554 bp, Artificial Sequence
  derived and/or modified sequence
atggccgccctgggccccagcagccagaatgtgacagaatatgtggtgcgggtgcccaagaacaccaccaagaagtacaacatcatggccttcaatgctgctgacaaggtgaactttgccacctggaaccaggcccggctggagcgggacctgagcaacaagaagatctaccaggaggaggagatgcctgagagcggggccggcagcgagttcaacaggaagctgcgggaggaggcccggaggaagaagtatggcatcgtgctgaaggagttccggcctgaggaccagccctggctgctgcgggtgaatggcaagagcggcaggaagttcaagggcatcaagaagggcggcgtgacagagaacaccagctactacatcttcacccagtgcccagatggagcctttgaggccttccctgtgcacaactggtacaacttcacccccctggcccggcacaggaccctgacagctgaggaggccgaggaggagtgggagaggaggaacaaggtgctgaaccacttcagcatcatgcagcagaggcggctgaaggaccaggaccaggatgaagatgaggaggagaaggagaagagaggaagaaggaaggccagcgagctgcgcatccatgacctggaggatgacctggagatgagcagtgatgccagtgatgccagcggggaggagggcggccgggtgcccaaggccaagaagaaggcccccctggccaagggcggcaggaagaagaagaagaagaagggcagtgatgatgaggcctttgaagattctgatgatggagactttgagggccaggaggtggactacatgtctgatggcagcagcagcagccaggaggagcctgagagcaaggccaaggccccccagcaggaggagggccccaagggcgtggatgagcagagcgacagcagcgaggagagcgaggaggagaagcccccagaggaggacaaggaggaggaggaggagaagaaggcccccaccccccaggagaagaagaggaggaaggacagcagcgaggagagtgacagcagcgaggagagtgacattgattctgaggccagcagcgccctcttcatggccaagaagaagaccccacccaagcgggagaggaagcccagcggcggcagcagccggggcaacagcaggcctggcaccccatctgctgagggcggcagcaccagcagcaccctgcgggccgccgccagcaagctggagcagggcaagagggtgtctgagatgcctgctgccaagaggctgcggctggacaccggcccccagagcctgagcggcaagagcaccccccagccccccagcggcaagaccacccccaacagcggagatgtgcaggtgacagaagatgctgtgcggcgctacctgaccaggaagcccatgaccaccaaggacctgctgaagaagttccagaccaagaagacaggcctgagcagcgagcagacagtgaatgtgctggcccagatcctgaagaggctgaaccctgagaggaagatgatcaatgacaagatgcacttcagcctgaaggagtag

SEQ ID NO: 124393 - DNA, 1299 bp, Artificial Sequence
  derived and/or modified sequence
atggccttcaatgctgctgacaaggtgaactttgccacctggaaccaggcccggctggagcgggacctgagcaacaagaagatctaccaggaggaggagatgcctgagagcggggccggcagcgagttcaacaggaagctgcgggaggaggcccggaggaagaagtatggcatcgtgctgaaggagttccggcctgaggaccagccctggctgctgcgggtgaatggcaagagcggcaggaagaggaacaaggtgctgaaccacttcagcatcatgcagcagaggcggctgaaggaccaggaccaggatgaagatgaggaggagaaggagaagaggggccgcaggaaggccagcgagctgcgcatccatgacctggaggatgacctggagatgagcagtgatgccagtgatgccagcggggaggagggcggccgggtgcccaaggccaagaagaaggcccccctggccaagggcggcaggaagaagaagaagaagaagggcagtgatgatgaggcctttgaggacagtgatgatggagactttgagggccaggaggtggactacatgtctgatggcagcagcagcagccaggaggagcctgagagcaaggccaaggccccccagcaggaggagggccccaagggcgtggatgagcagagcgacagcagcgaggagagcgaggaggagaagcccccagaggaggacaaggaggaggaggaggagaagaaggcccccaccccccaggagaagaagaggaggaaggacagcagcgaggagagtgacagcagcgaggagagtgacatcgacagcgaggccagcagcgccctcttcatggccaagaagaagaccccacccaagcgggagaggaagcccagcggcggcagcagccggggcaacagccggcccggcacccccagcgctgagggcggcagcaccagcagcaccctgcgggctgctgccagcaagctggagcagggcaagagggtgtctgagatgcctgctgccaagaggctgcggctggacaccggcccccagagcctgagcggcaagagcaccccccagcccccatctgggaagaccacccccaacagcggagatgtgcaggtgacagaagatgctgtgcggcgctacctgaccaggaagcccatgaccaccaaggacctgctgaagaagttccagaccaagaagacaggcctgagcagcgagcagacagtgaatgtgctggcccagatcctgaagaggctgaaccctgagaggaagatgatcaatgacaagatgcacttcagcctgaaggagtag

SEQ ID NO: 124394 - DNA, 384 bp, Artificial Sequence
  derived and/or modified sequence
atggccgccctgggccccagcagccagaatgtgacagaatatgtggtgcgggtgcccaagaacaccaccaagaagtacaacatcatggccttcaatgctgctgacaaggtgaactttgccacctggaaccaggcccggctggagcgggacctgagcaacaagaagatctaccaggaggaggagatgcctgagagcggggccggcagcgagttcaacaggaagctgcgggaggaggcccggaggaagaagtatggcatcgtgctgaaggagttccggcctgaggaccagccctggctgctgcgggtgaatggcaagagcggcaggaagttcaagggcatcaagaagggcggcgtgacagagaacaccagctactacatcttctag

SEQ ID NO: 124395 - DNA, 1554 bp, Artificial Sequence
  derived and/or modified sequence
atggccgccctgggccccagcagccagaacgtgaccgagtacgtggtaagagtcccgaagaatacaacgaagaagtacaacatcatggcttttaacgcagctgataaggtaaattttgcaacttggaaccaggcccgacttgaacgcgacctatcaaataaaaaaatttatcaggaagaggagatgcccgagtcgggcgccggctcggagtttaaccgcaaactgagagaagaggcccgccggaagaagtacggtatagttctgaaggaattccggccagaggatcagccttggctcctgagggtgaacggaaagagcggcaggaaatttaaaggcatcaagaaagggggggtgaccgagaatacttcatattacatattcacccaatgccctgatggcgctttcgaggcattccctgtgcacaattggtataactttacacccttagcaaggcacagaacactcaccgcggaggaagccgaagaggagtgggaaagacgaaacaaagtgctgaaccacttttcgattatgcagcagagacggctcaaggaccaggatcaggacgaagatgaagaagagaaggagaagcgggggaggaggaaagcctccgagctgcggatacacgacctcgaggacgatcttgaaatgtccagtgatgcaagcgacgcctctggagaagaaggtggtcgagtcccaaaagccaaaaagaaggctccattggccaagggtggtcgcaagaaaaaaaaaaagaagggttcagatgatgaggccttcgaagactccgacgacggtgactttgagggacaagaggtggactatatgtcagatgggtcctccagcagtcaggaggaacccgagagcaaggcgaaagcgccgcagcaggaagagggaccgaagggggtggacgaacagagcgatagcagcgaagagtcagaggaagaaaagcctcctgaagaggataaagaggaggaggaggagaagaaagccccaactcctcaagagaagaagagaaggaaagactcctccgaagagtctgatagttctgaagagagcgatattgatagcgaagcgtcctcagccctctttatggcaaaaaaaaagacgccgccaaaaagagagcgtaagccatctggaggatcgtctcgagggaactcccgcccgggcactccaagcgcagagggcgggtcaacctcatctacattacgggcggccgccagtaaattagagcagggtaagagggtgagcgaaatgcccgcggcaaagaggctgcgcttggacaccggaccacagagtctttccggcaagtctactccccagcctccttctgggaaaaccacaccaaacagcggtgatgtgcaggtcaccgaggacgctgtccgaaggtatcttactcgtaaacctatgaccactaaggacctactgaagaaatttcagacaaagaagactggtctctcctccgagcagactgttaacgttcttgcccaaattcttaaacgtttgaacccggagcggaagatgatcaatgataagatgcacttttcactaaaagagtag

SEQ ID NO: 124396 - DNA, 1299 bp, Artificial Sequence
  derived and/or modified sequence
atggccttcaacgccgccgacaaggtgaacttcgccacctggaaccaagcccgactggaaagggacctctctaacaaaaagatttatcaggaggaggagatgcctgagtctggggctggctctgagtttaaccgaaaactgagggaagaggcgcggcgaaaaaagtatggcatcgtcctcaaggagttccggcctgaagatcagccatggctgctgagagtgaatggaaaatctgggcgtaaacgtaataaggtcctgaatcacttttctatcatgcagcagaggagattgaaggaccaggatcaggacgaagatgaggaggaaaaggagaagagagggcggcgcaaagcttccgagctccgcattcacgatctggaagatgacctggaaatgagttccgacgcttctgacgcctccggcgaggagggaggtagagtccctaaagcaaaaaagaaggctcctctagctaaaggcggacgaaaaaaaaaaaagaagaaaggctccgacgatgaggcattcgaagacagtgatgacggagacttcgaagggcaggaggtcgattacatgagtgacggcagttcatcatcacaggaagaaccggagtccaaggccaaggctccacagcaggaggaaggtccaaagggtgtcgacgagcagagcgacagttcagaggagagtgaagaggagaagcctccagaagaggacaaggaggaagaggaagaaaaaaaagcccctaccccacaagaaaaaaagagacggaaagattccagcgaagagagtgactcttccgaagaaagtgacattgactctgaagcctcttccgctctgtttatggctaagaaaaagacaccgccaaagcgcgagcgaaagcccagcggaggctcaagtcgaggtaactctagaccagggacaccgtccgccgagggaggtagcacgagcagcacactgagggcagccgcctcaaaactggaacagggcaaaagggtgtctgagatgcctgccgcgaagcggctgcggctggacaccgggcctcagagcctttcaggcaagtctactccacagccaccaagcgggaaaactacccccaattccggtgatgtgcaggtcactgaggacgctgtccggcgatacctgacccgaaagcctatgaccacgaaggacctgctgaaaaagttccagaccaaaaaaacagggctgagctctgagcagactgtcaatgtgttggcgcaaattctgaagagactcaatcctgagcgtaagatgattaatgacaagatgcatttctctctgaaagagtag

SEQ ID NO: 124397 - DNA, 384 bp, Artificial Sequence
  derived and/or modified sequence
atggccgccctgggccccagcagccagaacgtgaccgagtacgtggtgagggtgccgaagaatactacaaagaaatacaacatcatggcattcaatgccgcggataaggtgaattttgccacatggaaccaggcacgcttagagagagatctgtccaataaaaagatctaccaggaggaggagatgccagaatctggcgcaggctccgagtttaatcggaagttaagagaggaggctcggcggaagaagtacggcatcgtcttaaaagagtttaggcccgaagatcagccctggttgctccgggtgaacggcaaatctggtaggaagttcaaggggataaaaaaaggcggtgttacggagaatacctcttactacatcttttag

SEQ ID NO: 124398 - DNA, 1554 bp, Artificial Sequence
  derived and/or modified sequence
atggccgcactcggaccatcatctcaaaatgtaaccgaatacgtagtcagagtgcctaagaacaccacgaagaagtacaacattatggcgttcaatgcagctgacaaggtcaacttcgctacgtggaaccaagctcgtctcgaacgcgatctttccaataagaaaatctaccaggaggaggagatgccagagtccggcgcaggctccgaatttaaccgtaagttgcgtgaggaagccagacgtaagaaatacggcatcgtgttaaaggagtttcgacctgaggatcagccctggctcttacgagtgaatggcaagtcaggaaggaagttcaaggggattaagaagggcggagttaccgaaaatacttcgtactacatcttcacccaatgcccagacggagccttcgaggcatttcctgttcacaattggtacaacttcacccccttagccaggcatcgaactctcaccgcagaggaagctgaggaggaatgggaacgtcgcaataaggtcttaaaccactttagtattatgcagcagcgcaggctgaaggaccaggatcaggatgaggacgaggaagaaaaggaaaaaagagggcgaaggaaagcctccgaactgaggatacacgacttggaggacgatcttgagatgtccagcgacgcaagtgacgctagcggcgaggaaggcggaagggtgccgaaagccaagaagaaggcaccactggcaaaaggcggtaggaagaaaaagaagaagaaggggagtgatgatgaagcgtttgaggattccgatgacggcgattttgaaggacaagaagtggactatatgtccgacgggagttcctcatcacaggaagaacctgagagtaaggctaaggcccctcagcaagaagaaggacccaaaggcgtggacgagcagtctgatagcagcgaagaatcagaagaggaaaagcctcctgaagaggacaaagaagaagaagaggagaaaaaggctcctactccacaggagaagaagagaaggaaggactcgtcagaagagtcggattcttccgaagaatcggacatcgattccgaggcatcatcagcactctttatggccaagaagaaaactcccccaaagcgagaacgcaagcccagtggaggatctagtagggggaacagcaggcctgggaccccaagtgctgaaggagggagtacgtccagtactctgagagctgctgcttcgaagctggagcaggggaaaagagtgtcggagatgcccgctgcgaagaggttgcggcttgacacgggtccccagagtctgagcggcaaatctacccctcagccccctagcggcaagaccacacccaatagcggggatgtccaggttactgaagacgccgtgcgtaggtatctgaccaggaaaccgatgacaacgaaagatttgctcaaaaagttccaaaccaagaagactgggctctcttccgagcaaacagttaatgtactggctcaaattctcaagaggctgaatccagaacgtaagatgatcaacgacaaaatgcacttcagtttaaaagagtag

SEQ ID NO: 124399 - DNA, 1299 bp, Artificial Sequence
  derived and/or modified sequence
atggctttcaacgctgctgacaaagttaactttgccacctggaaccaggcaaggctggaacgcgacctgtccaataagaagatttaccaagaggaggagatgcccgaatctggagcaggatccgaatttaataggaaactgcgcgaggaggcaagacggaagaagtatggaatcgttctcaaggaatttagacccgaggaccagccctggctgctgagagtcaatgggaaaagcggcaggaagagaaataaggttctgaaccatttctctatcatgcagcagcggaggctcaaagatcaggaccaagatgaggacgaggaagaaaaggagaaaaggggacgacgcaaggccagcgagcttcgtattcacgacctcgaggatgacctggagatgagtagcgacgcctcagatgctagcggtgaagagggaggtagagtgccaaaggccaagaagaaggccccattagcaaaaggcggacgaaaaaaaaaaaagaaaaagggatctgacgatgaagccttcgaagactccgacgacggggacttcgaaggccaggaagtcgactacatgtctgatggaagtagctcctcacaggaggagccggaaagcaaagccaaggcccctcagcaggaggaaggacccaagggggtcgatgaacagagcgattctagcgaagagtcagaggaagagaaacctccagaggaagataaggaagaggaagaggagaagaaggcccctactccccaggaaaaaaaaagacgaaaggacagttccgaagagtccgattcatccgaggagtctgacatagactctgaggcctccagcgctttgttcatggctaaaaagaaaacccctcctaaacgggagaggaaaccctccggtggatcaagtcgaggaaactcccggcctgggaccccatctgccgagggcggaagtacctcaagcactctgagagcagccgcttcgaagctcgaacagggcaagcgtgtttcagaaatgcctgccgctaaacggctgagactggatacgggacctcagtccctttcagggaagtccacaccacagcccccatctggaaagacgacccctaattctggtgatgtgcaggtgaccgaggatgccgtgcgacgctacctcactcggaagcccatgaccacaaaggacctgctgaagaagtttcaaaccaaaaaaacggggctgagttccgaacaaacagtaaatgtgcttgcccaaattctaaaacgtctgaatccagagaggaaaatgattaacgataaaatgcacttcagcctgaaggagtag

SEQ ID NO: 124400 - DNA, 384 bp, Artificial Sequence
  derived and/or modified sequence
atggcagctctcggacccagcagccagaacgtaacagagtacgtggtgagagtacccaagaacaccacaaagaaatacaatatcatggctttcaatgctgctgataaagtcaatttcgccacttggaatcaagcaagattggagagagatttatcaaacaagaagatataccaggaggaggagatgccagagagcggagctgggtccgaatttaataggaagttgagagaggaagctcgtaggaagaaatacggaattgttttgaaagagtttaggccagaggaccaaccgtggttgctgcgggtgaatggcaagtctgggcgaaagttcaagggcatcaaaaaaggaggggtgacagaaaatacctcctactacatcttttag

SEQ ID NO: 124401 - DNA, 1554 bp, Artificial Sequence
  derived and/or modified sequence
atggccgccctgggccccagcagccagaacgtgaccgagtacgtggtgagagtgcccaagaacaccaccaagaagtacaacatcatggccttcaacgccgccgacaaggtgaacttcgccacctggaaccaggccagactggagagagacctgagcaacaagaagatctaccaggaggaggagatgcccgagagcggcgccggcagcgagttcaacagaaagctgagagaggaggccagaagaaagaagtacggcatcgtgctgaaggagttcagacccgaggaccagccctggctgctgagagtgaacggcaagagcggcagaaagttcaagggcatcaagaagggcggcgtgaccgagaacaccagctactacatcttcacccagtgccccgacggcgccttcgaggccttccccgtgcacaactggtacaacttcacccccctggccagacacagaaccctgaccgccgaggaggccgaggaggagtgggagagaagaaacaaggtgctgaaccacttcagcatcatgcagcagagaagactgaaggaccaggaccaggacgaggacgaggaggagaaggagaagagaggcagaagaaaggccagcgagctgagaatccacgacctggaggacgacctggagatgagcagcgacgccagcgacgccagcggcgaggagggcggcagagtgcccaaggccaagaagaaggcccccctggccaagggcggcagaaagaagaagaagaagaagggcagcgacgacgaggccttcgaggacagcgacgacggcgacttcgagggccaggaggtggactacatgagcgacggcagcagcagcagccaggaggagcccgagagcaaggccaaggccccccagcaggaggagggccccaagggcgtggacgagcagagcgacagcagcgaggagagcgaggaggagaagccccccgaggaggacaaggaggaggaggaggagaagaaggcccccaccccccaggagaagaagagaagaaaggacagcagcgaggagagcgacagcagcgaggagagcgacatcgacagcgaggccagcagcgccctgttcatggccaagaagaagaccccccccaagagagagagaaagcccagcggcggcagcagcagaggcaacagcagacccggcacccccagcgccgagggcggcagcaccagcagcaccctgagagccgccgccagcaagctggagcagggcaagagagtgagcgagatgcccgccgccaagagactgagactggacaccggcccccagagcctgagcggcaagagcaccccccagccccccagcggcaagaccacccccaacagcggcgacgtgcaggtgaccgaggacgccgtgagaagatacctgaccagaaagcccatgaccaccaaggacctgctgaagaagttccagaccaagaagaccggcctgagcagcgagcagaccgtgaacgtgctggcccagatcctgaagagactgaaccccgagagaaagatgatcaacgacaagatgcacttcagcctgaaggagtag

SEQ ID NO: 124402 - DNA, 1299 bp, Artificial Sequence
  derived and/or modified sequence
atggccttcaacgccgccgacaaggtgaacttcgccacctggaaccaggccagactggagagagacctgagcaacaagaagatctaccaggaggaggagatgcccgagagcggcgccggcagcgagttcaacagaaagctgagagaggaggccagaagaaagaagtacggcatcgtgctgaaggagttcagacccgaggaccagccctggctgctgagagtgaacggcaagagcggcagaaagagaaacaaggtgctgaaccacttcagcatcatgcagcagagaagactgaaggaccaggaccaggacgaggacgaggaggagaaggagaagagaggcagaagaaaggccagcgagctgagaatccacgacctggaggacgacctggagatgagcagcgacgccagcgacgccagcggcgaggagggcggcagagtgcccaaggccaagaagaaggcccccctggccaagggcggcagaaagaagaagaagaagaagggcagcgacgacgaggccttcgaggacagcgacgacggcgacttcgagggccaggaggtggactacatgagcgacggcagcagcagcagccaggaggagcccgagagcaaggccaaggccccccagcaggaggagggccccaagggcgtggacgagcagagcgacagcagcgaggagagcgaggaggagaagccccccgaggaggacaaggaggaggaggaggagaagaaggcccccaccccccaggagaagaagagaagaaaggacagcagcgaggagagcgacagcagcgaggagagcgacatcgacagcgaggccagcagcgccctgttcatggccaagaagaagaccccccccaagagagagagaaagcccagcggcggcagcagcagaggcaacagcagacccggcacccccagcgccgagggcggcagcaccagcagcaccctgagagccgccgccagcaagctggagcagggcaagagagtgagcgagatgcccgccgccaagagactgagactggacaccggcccccagagcctgagcggcaagagcaccccccagccccccagcggcaagaccacccccaacagcggcgacgtgcaggtgaccgaggacgccgtgagaagatacctgaccagaaagcccatgaccaccaaggacctgctgaagaagttccagaccaagaagaccggcctgagcagcgagcagaccgtgaacgtgctggcccagatcctgaagagactgaaccccgagagaaagatgatcaacgacaagatgcacttcagcctgaaggagtag

SEQ ID NO: 124403 - DNA, 384 bp, Artificial Sequence
  derived and/or modified sequence
atggccgccctgggccccagcagccagaacgtgaccgagtacgtggtgagagtgcccaagaacaccaccaagaagtacaacatcatggccttcaacgccgccgacaaggtgaacttcgccacctggaaccaggccagactggagagagacctgagcaacaagaagatctaccaggaggaggagatgcccgagagcggcgccggcagcgagttcaacagaaagctgagagaggaggccagaagaaagaagtacggcatcgtgctgaaggagttcagacccgaggaccagccctggctgctgagagtgaacggcaagagcggcagaaagttcaagggcatcaagaagggcggcgtgaccgagaacaccagctactacatcttctag

SEQ ID NO: 124404 - protein, 178 aa, Artificial Sequence
  derived and/or modified sequence
QYICSFEDCKKTFKKHQQLKIHQCQHTNEPLFKCTQEGCGKHFASPSKLKRHAKAHEGYVCQKGCSFVAKTWTELLKHVRETHKEESRPFVCEHAGCGKTFAMKQSLTRHAVVHDPDKKKMKLKVKKSREKRSLASHLSGYIPPKRKQGQGLSLCQNGESPNCVEDKMLSTVAVLTLG

SEQ ID NO: 124405 - protein, 365 aa, Artificial Sequence
  derived and/or modified sequence
LDPPAVVAESVSSLTIADAFIAAGESSAPTPPRPALPRRFICSFPDCSANYSKAWKLDAHLCKHTGERPFVCDYEGCGKAFIRDYHLSRHILTHTGEKPFVCAANGCDQKFNTKSNLKKHFERKHENQQKQYICSFEDCKKTFKKHQQLKIHQCQHTNEPLFKCTQEGCGKHFASPSKLKRHAKAHEGYVCQKGCSFVAKTWTELLKHVRETHKEEILCEVCRKTFKRKDYLKQHMKTHAPERDVCRCPREGCGRTYTTVFNLQSHILSFHEESRPFVCEHAGCGKTFAMKQSLTRHAVVHDPDKKKMKLKVKKSREKRSLASHLSGYIPPKRKQGQGLSLCQNGESPNCVEDKMLSTVAVLTLG

SEQ ID NO: 124406 - DNA, 1404 bp, Artificial Sequence
  derived and/or modified sequence
atgcgcgatctcccggagcatgcgcagcagcggcgccgacgcggggcggtgcctggtgaccgcgcgcgctcccggaagtgtgccggcgtcgcgcgaaggttcagcagggagccgtgggccgggcgcgccggttcccggcacgtgtctcggcacgtggcagcgcgcctggccctgggcttggaggcgccggcgccctggatccgccggccgtggtcgccgagtcggtgtcgtccttgaccatcgccgacgcgttcattgcagccggcgagagctcagctccgaccccgccgcgccccgcgcttcccaggaggttcatctgctccttccctgactgcagcgccaattacagcaaagcctggaagcttgacgcgcacctgtgcaagcacacgggggagagaccatttgtttgtgactatgaagggtgtggcaaggccttcatcagggactaccatctgagccgccacattctgactcacacaggagaaaagccgtttgtttgtgcagccaatggctgtgatcaaaaattcaacacaaaatcaaacttgaagaaacattttgaacgcaaacatgaaaatcaacaaaaacaatatatatgcagttttgaagactgtaagaagacctttaagaaacatcagcagctgaaaatccatcagtgccagcataccaatgaacctctattcaagtgtacccaggaaggatgtgggaaacactttgcatcacccagcaagctgaaacgacatgccaaggcccacgagggctatgtatgtcaaaaaggatgttcctttgtggcaaaaacatggacggaacttctgaaacatgtgagagaaacccataaagaggaaatactatgtgaagtatgccggaaaacatttaaacgcaaagattaccttaagcaacacatgaaaactcatgccccagaaagggatgtatgtcgctgtccaagagaaggctgtggaagaacctatacaactgtgtttaatctccaaagccatatcctctccttccatgaggaaagccgcccttttgtgtgtgaacatgctggctgtggcaaaacatttgcaatgaaacaaagtctcactaggcatgctgttgtacatgatcctgacaagaagaaaatgaagctcaaagtcaaaaaatctcgtgaaaaacggagtttggcctctcatctcagtggatatatccctcccaaaaggaaacaagggcaaggcttatctttgtgtcaaaacggagagtcacccaactgtgtggaagacaagatgctctcgacagttgcagtacttacccttggctaagaactgcactgctttgtttaaaggactgcagaccaaggagcgagctttctctcagagcatgcttttctttattaaaattactgatgcagaacatttgattccttatcatttc

SEQ ID NO: 124407 - DNA, 537 bp, Artificial Sequence
  derived and/or modified sequence
cagtacatctgcagcttcgaggactgcaagaagaccttcaagaagcaccagcagctgaagatccaccagtgccagcacaccaacgagcccctgttcaagtgcacccaggagggctgcggcaagcacttcgccagccccagcaagctgaagagacacgccaaggcccacgagggctacgtgtgccagaagggctgcagcttcgtggccaagacctggaccgagctgctgaagcacgtgagagagacccacaaggaggagagcagacccttcgtgtgcgagcacgccggctgcggcaagaccttcgccatgaagcagagcctgaccagacacgccgtggtgcacgaccccgacaagaagaagatgaagctgaaggtgaagaagagcagagagaagagaagcctggccagccacctgagcggctacatcccccccaagagaaagcagggccagggcctgagcctgtgccagaacggcgagagccccaactgcgtggaggacaagatgctgagcaccgtggccgtgctgaccctgggctag

SEQ ID NO: 124408 - DNA, 1098 bp, Artificial Sequence
  derived and/or modified sequence
ctggacccccccgccgtggtggccgagagcgtgagcagcctgaccatcgccgacgccttcatcgccgccggcgagagcagcgcccccaccccccccagacccgccctgcccagaagattcatctgcagcttccccgactgcagcgccaactacagcaaggcctggaagctggacgcccacctgtgcaagcacaccggcgagagacccttcgtgtgcgactacgagggctgcggcaaggccttcatcagagactaccacctgagcagacacatcctgacccacaccggcgagaagcccttcgtgtgcgccgccaacggctgcgaccagaagttcaacaccaagagcaacctgaagaagcacttcgagagaaagcacgagaaccagcagaagcagtacatctgcagcttcgaggactgcaagaagaccttcaagaagcaccagcagctgaagatccaccagtgccagcacaccaacgagcccctgttcaagtgcacccaggagggctgcggcaagcacttcgccagccccagcaagctgaagagacacgccaaggcccacgagggctacgtgtgccagaagggctgcagcttcgtggccaagacctggaccgagctgctgaagcacgtgagagagacccacaaggaggagatcctgtgcgaggtgtgcagaaagaccttcaagagaaaggactacctgaagcagcacatgaagacccacgcccccgagagagacgtgtgcagatgccccagagagggctgcggcagaacctacaccaccgtgttcaacctgcagagccacatcctgagcttccacgaggagagcagacccttcgtgtgcgagcacgccggctgcggcaagaccttcgccatgaagcagagcctgaccagacacgccgtggtgcacgaccccgacaagaagaagatgaagctgaaggtgaagaagagcagagagaagagaagcctggccagccacctgagcggctacatcccccccaagagaaagcagggccagggcctgagcctgtgccagaacggcgagagccccaactgcgtggaggacaagatgctgagcaccgtggccgtgctgaccctgggctag

SEQ ID NO: 124409 - DNA, 537 bp, Artificial Sequence
  derived and/or modified sequence
cagtatatctgtagcttcgaggactgcaagaaaacctttaagaagcaccaacagctgaaaatccaccagtgccagcacaccaatgaaccattatttaagtgtacccaggaaggttgtggtaaacactttgcctcccccagtaagctcaagagacatgctaaagcccatgaaggatacgtctgccagaaaggatgttctttcgtggcaaaaacgtggaccgagctgctcaaacacgtacgagaaacccataaggaggagtcaaggccgtttgtgtgtgagcacgcggggtgtggtaaaacattcgccatgaaacagtcactgacaaggcacgctgtggtccacgaccccgataaaaagaagatgaagttgaaggttaagaagagcagggaaaagaggagcctggcatctcacttatcaggatatattcctccaaaacgaaagcaagggcaaggattatcactatgccagaacggcgaatcgcctaactgcgtggaggacaagatgttgtctacagtcgctgttctcaccctggggtag

SEQ ID NO: 124410 - DNA, 1098 bp, Artificial Sequence
  derived and/or modified sequence
ctggacccccccgccgtcgtcgctgagagcgtctcaagtttaacaattgcagatgcctttatcgccgccggcgagagctccgccccaacgccccccagacctgcccttccccgtcgatttatttgttcatttccggactgctcagccaactatagcaaggcttggaaactggacgctcatctctgtaagcacaccggagaaaggccattcgtgtgtgactatgaggggtgcgggaaagcatttattcgcgattaccatctgtcgcggcatattctgacgcataccggcgagaagccatttgtctgcgctgcgaatgggtgtgaccagaagtttaacacaaagagtaacctgaaaaaacactttgaacgaaagcacgaaaatcagcagaaacagtatatttgctcttttgaagattgcaaaaagacgttcaaaaagcaccagcagctgaaaatccatcagtgccagcataccaacgagcccctcttcaaatgtacacaggaggggtgtggcaaacatttcgcgtcaccctcaaaacttaaacgccacgctaaagcccatgagggatacgtttgccaaaagggctgttcttttgtagctaaaacctggaccgaactgctcaaacacgttagagagacccataaagaggagattttgtgcgaggtttgtaggaaaacattcaagagaaaggactacctcaagcagcacatgaaaacccatgccccagagcgggacgtttgccgatgcccacgggaggggtgcggccggacctacaccacagttttcaatctgcagtcgcatatcctctcatttcacgaggagtccaggccatttgtgtgtgaacatgcaggctgcggcaaaacgttcgccatgaaacagtcacttacgaggcatgccgtggtgcatgaccctgataagaaaaaaatgaagttgaaagtgaagaaaagcagagagaaacgttctttggctagtcacctttctggatatatcccaccaaagaggaagcagggtcagggcctcagcttatgtcaaaacggggagagccccaactgcgtagaggataagatgctctctactgttgccgtgctgacattggggtag

SEQ ID NO: 124411 - DNA, 537 bp, Artificial Sequence
  derived and/or modified sequence
cagtacatctgcagctttgaggactgcaagaagaccttcaagaagcaccagcagctgaagatccaccagtgccagcacaccaatgagcccctcttcaagtgcacccaggagggctgcggcaagcactttgccagccccagcaagctgaagagacatgccaaggcccacgagggctacgtgtgccagaagggctgcagctttgtggccaagacctggacagagctgctgaagcacgtgcgggagacccacaaggaggagagccggccctttgtgtgtgagcacgccggctgcggcaagacctttgccatgaagcagagcctgaccaggcatgctgtggtgcatgaccctgacaagaagaagatgaagctgaaggtgaagaagagccgggagaagaggagcctggccagccacctgagcggctacatcccccccaagaggaagcagggccagggcctgagcctgtgccagaatggagagagccccaactgtgtggaggacaagatgctgagcacagtggccgtgctgaccctgggctag

SEQ ID NO: 124412 - DNA, 1098 bp, Artificial Sequence
  derived and/or modified sequence
ctggaccccccagctgtggtggccgagagcgtgagcagcctgaccatcgcagatgccttcatcgctgctggggagagcagcgcccccaccccacccaggcctgccctgccccggcgcttcatctgcagcttcccagactgcagcgccaactacagcaaggcctggaagctggatgcccacctgtgcaagcacactggagagcggccctttgtgtgtgactatgagggctgcggcaaggccttcatccgggactaccacctgagccgccacatcctgacccacactggagagaagccctttgtgtgtgccgccaacggctgtgaccagaagttcaacaccaagagcaacctgaagaagcactttgagaggaagcatgagaaccagcagaagcagtacatctgcagctttgaggactgcaagaagaccttcaagaagcaccagcagctgaagatccaccagtgccagcacaccaatgagcccctcttcaagtgcacccaggagggctgcggcaagcactttgccagccccagcaagctgaagagacatgccaaggcccacgagggctacgtgtgccagaagggctgcagctttgtggccaagacctggacagagctgctgaagcacgtgcgggagacccacaaggaggagatcctgtgtgaggtgtgcaggaagaccttcaagaggaaggactacctgaagcagcacatgaagacccacgcccctgagagagatgtgtgccgctgcccccgggagggctgcggccgcacctacaccaccgtcttcaacctgcagagccacatcctgtccttccacgaggagagccggccctttgtgtgtgaacatgctggctgtgggaagacctttgccatgaagcagagcctgaccaggcatgctgtggtgcatgaccctgacaagaagaagatgaagctgaaggtgaagaagagccgggagaagaggagcctggccagccacctgagcggctacatcccccccaagaggaagcagggccagggcctgagcctgtgccagaatggagagagccccaactgtgtggaggacaagatgctgagcacagtggccgtgctgaccctgggctag

SEQ ID NO: 124413 - DNA, 628 bp, Artificial Sequence
  derived and/or modified sequence
caatatatatgcagttttgaagactgtaagaagacctttaagaaacatcagcagctgaaaatccatcagtgccagcataccaatgaacctctattcaagtgtacccaggaaggatgtgggaaacactttgcatcacccagcaagctgaaacgacatgccaaggcccacgagggctatgtatgtcaaaaaggatgttcctttgtggcaaaaacatggacggaacttctgaaacatgtgagagaaacccataaagaggaaagccgcccttttgtgtgtgaacatgctggctgtggcaaaacatttgcaatgaaacaaagtctcactaggcatgctgttgtacatgatcctgacaagaagaaaatgaagctcaaagtcaaaaaatctcgtgaaaaacggagtttggcctctcatctcagtggatatatccctcccaaaaggaaacaagggcaaggcttatctttgtgtcaaaacggagagtcacccaactgtgtggaagacaagatgctctcgacagttgcagtacttacccttggctaagaactgcactgctttgtttaaaggactgcagaccaaggagcgagctttctctcagagcatgcttttctttattaaaattactgatgcagaa

SEQ ID NO: 124414 - DNA, 1383 bp, Artificial Sequence
  derived and/or modified sequence
atgcgcgatctcccggagcatgcgcagcagcggcgccgacgcggggcggtgcctggtgaccgcgcgcgctcccggaagtgtgccggcgtcgcgcgaaggttcagcagggagccgtgggccgggcgcgccggttcccggcacgtgtctcggcacgtggcagcgcgcctggccctgggcttggaggcgccggcgccctggatccgccggccgtggtcgccgagtcggtgtcgtccttgaccatcgccgacgcgttcattgcagccggcgagagctcagctccgaccccgccgcgccccgcgcttcccaggaggttcatctgctccttccctgactgcagcgccaattacagcaaagcctggaagcttgacgcgcacctgtgcaagcacacgggggagagaccatttgtttgtgactatgaagggtgtggcaaggccttcatcagggactaccatctgagccgccacattctgactcacacaggagaaaagccgtttgtttgtgcagccaatggctgtgatcaaaaattcaacacaaaatcaaacttgaagaaacattttgaacgcaaacatgaaaatcaacaaaaacaatatatatgcagttttgaagactgtaagaagacctttaagaaacatcagcagctgaaaatccatcagtgccagcataccaatgaacctctattcaagtgtacccaggaaggatgtgggaaacactttgcatcacccagcaagctgaaacgacatgccaaggcccacgagggctatgtatgtcaaaaaggatgttcctttgtggcaaaaacatggacggaacttctgaaacatgtgagagaaacccataaagaggaaatactatgtgaagtatgccggaaaacatttaaacgcaaagattaccttaagcaacacatgaaaactcatgccccagaaagggatgtatgtcgctgtccaagagaaggctgtggaagaacctatacaactgtgtttaatctccaaagccatatcctctccttccatgaggaaagccgcccttttgtgtgtgaacatgctggctgtggcaaaacatttgcaatgaaacaaagtctcactaggcatgctgttgtacatgatcctgacaagaagaaaatgaagctcaaagtcaaaaaatctcgtgaaaaacggagtttggcctctcatctcagtggatatatccctcccaaaaggaaacaagggcaaggcttatctttgtgtcaaaacggagagtcacccaactgtgtggaagacaagatgctctcgacagttgcagtacttacccttggctaagaactgcactgctttgtttaaaggactgcagaccaaggagcgagctttctctcagagcatgcttttctttattaaaattactgatgcagaa

SEQ ID NO: 124415 - DNA, 537 bp, Artificial Sequence
  derived and/or modified sequence
cagtacatctgcagcttcgaggactgcaagaagaccttcaagaagcatcagcaactaaagatccatcaatgtcagcacaccaatgagccactcttcaaatgtacccaagagggatgcggaaaacatttcgcctccccttctaagctgaaacgccatgccaaagcacatgaaggctacgtatgtcaaaagggctgcagctttgtggcgaagacatggaccgagctgctgaagcatgttagggaaacccacaaagaggaatcccgcccattcgtctgtgagcacgcggggtgtggtaagactttcgcaatgaaacagagcctgacccgtcacgctgtggttcatgatccagacaaaaagaagatgaagctcaaagttaaaaaatctcgggagaaacgatcgctggcttctcacctgagcggctatattcctcccaagaggaagcaaggacagggcctttcactctgtcagaacggcgaaagtcccaactgcgttgaggataagatgctcagcaccgtcgcagttctgactctgggctag

SEQ ID NO: 124416 - DNA, 1098 bp, Artificial Sequence
  derived and/or modified sequence
ctggacccccccgccgtggtggccgagagcgtgagcagcctgaccattgctgacgctttcatagctgcaggtgaatccagtgcccctacgccccctcgtccagccttgccaagaaggttcatctgcagcttcccagattgctccgccaactactccaaggcttggaagctcgacgcgcacctttgcaaacacactggggaaaggccatttgtttgcgactacgaggggtgtgggaaggccttcattagggactatcatctgagtaggcatatcctcacacacactggggagaagccctttgtgtgtgccgctaacggctgtgaccaaaagttcaacactaagagtaatctgaagaagcacttcgaaagaaaacacgaaaatcagcaaaaacagtacatttgttccttcgaagactgcaagaaaacgtttaagaaacatcagcagctgaagatccaccaatgccagcatacgaacgaacccctgtttaagtgcactcaggagggctgcggcaagcactttgcttccccctcaaagctgaagagacacgcaaaggctcatgaaggatatgtctgtcagaagggttgttcttttgtggccaagacctggaccgaattactcaaacacgtaagagagactcataaggaggaaattctgtgtgaagtttgcaggaaaacatttaaacgcaaagactatttaaagcagcatatgaagactcacgctcccgagcgcgacgtgtgcaggtgtccccgcgagggctgcggacgcacgtacactactgtcttcaatctgcagtcacacatcttgtcgttccacgaggagtccagaccctttgtctgtgagcatgcgggatgtggaaagacattcgctatgaagcaaagtttgactaggcatgcagtggtccacgatcccgacaaaaagaagatgaaactcaaggtgaaaaagagccgcgagaaacggagcctagcaagccatctgtctgggtatataccacccaagagaaagcagggccagggcctctcgttatgccaaaatggggagagccctaattgcgttgaagataaaatgctgtccactgtagccgttctcaccctcggttag

SEQ ID NO: 124417 - DNA, 537 bp, Artificial Sequence
  derived and/or modified sequence
cagtatatatgctcatttgaggattgcaaaaaaaccttcaaaaagcaccaacagctcaagattcaccagtgccaacacaccaacgagccattgttcaagtgcacgcaggaaggttgtggaaaacatttcgcatcaccttccaagctgaagagacatgcaaaagcccatgagggatacgtctgccagaaggggtgttcctttgtcgccaaaacttggactgagctgctcaagcacgtcagggaaacccacaaggaggaatcaagaccattcgtgtgcgaacatgctggatgcggtaaaaccttcgccatgaaacagagcctgacaaggcatgcagtggtgcacgatcctgataagaaaaagatgaagctgaaagtgaagaaatcccgggagaaacgttctttagcctcacacctaagcggatacattcctcccaaaagaaaacaaggccaagggctgtcgctttgccagaatggagagtcccccaactgcgtcgaagacaagatgctatctactgtggcagtgttgacactggggtag

SEQ ID NO: 124418 - DNA, 1098 bp, Artificial Sequence
  derived and/or modified sequence
ctggatcctcccgctgttgtagccgaatcagtgtcctcattaacaatagccgacgctttcattgccgcaggagagtcatctgcacctactccacccagacccgctctacctaggcggtttatatgttcctttccagattgctccgctaattactccaaagcatggaaactggatgcccacttatgtaagcatacaggtgagcggcctttcgtgtgcgattacgaagggtgtggcaaagccttcatacgggattaccatctcagtaggcacattctgacacatacaggcgagaagccatttgtgtgcgccgctaatggctgcgatcagaagtttaatacgaagagcaacttgaaaaaacacttcgaaaggaagcacgaaaaccagcagaagcagtacatctgttcttttgaggactgcaagaaaactttcaaaaaacaccagcaattaaaaatccaccaatgtcagcataccaacgagcccctctttaagtgcacacaggaagggtgcgggaagcacttcgcatcgcccagcaaacttaagaggcatgcgaaagctcacgagggctatgtatgccaaaagggctgttcctttgtggcaaaaacatggactgagctgctaaaacacgttcgcgaaacccacaaagaagaaattctgtgtgaggtatgtcggaagacctttaaacgcaaagattatcttaaacagcacatgaagacacacgcccctgagagggatgtttgtaggtgtcctagggaggggtgcggcaggacctacactaccgtgtttaatctgcagtcacatattttgtcctttcacgaggaaagtcggccattcgtctgtgagcacgctgggtgtgggaaaacatttgcgatgaagcagtctctgacacggcatgccgtggtccacgaccccgataaaaagaaaatgaagttgaaagttaaaaaatcacgcgaaaagagaagcctcgctagccacctcagtgggtacatcccaccaaagcgaaaacaagggcagggactgtctttatgccaaaacggggagagccccaattgtgtggaggacaagatgctgtccaccgttgctgtgctgactctgggctag

SEQ ID NO: 124419 - protein, 200 aa, Artificial Sequence
  derived and/or modified sequence
MGQEFSWEEAEAAGEIDVAELQEWYKKFVMECPSGTLFMHEFKRFFKVTDDEEASQYVEGMFRAFDKNGDNTIDFLEYVAALNLVLRGTLEHKLKWTFKIYDKDGNGCIDRLELLNIVEGIYQLKKACRRELQTEQGQLLTPEEVVDRIFLLVDENGDGQLSLNEFVEGARRDKWVMKMLQMDMNPSSWLAQQRRKSAMF

SEQ ID NO: 124420 - protein, 172 aa, Artificial Sequence
  derived and/or modified sequence
MGQEFSWEEAEAAGEIDVAELQEWYKKFVMECPSGTLFMHEFKRFFKVTDDEEASQYVEGMFRAFDKNGDNTIDFLEYVAALNLVLRGTLEHKLKWTFKIYDKDGNGCIDRLELLNIVECRRELQTEQGQLLTPEEVVDRIFLLVDENGDGQLSLNEFVEGARRDNLLMPTL

SEQ ID NO: 124421 - DNA, 519 bp, Artificial Sequence
  derived and/or modified sequence
atggggcaggagtttagttgggaggaagcagaagcagccggcgagatcgatgtcgcagaactccaggagtggtataaaaagtttgtgatggagtgcccttcaggcactctgttcatgcatgaattcaaacgctttttcaaggtgacagacgatgaggaggcctcgcagtacgtggaaggaatgtttcgtgcattcgataaaaatggagacaacaccattgactttctggagtacgtcgctgctctaaaccttgtcctccggggcacccttgagcacaaactgaagtggaccttcaagatatacgacaaggacggcaacggttgtatagatcggctggagttgctgaacatcgtggaatgtcggcgggagctacagacagaacaaggacagctgctcacgccggaagaagtggtggatcgcatctttttactcgtggatgagaacggggacggccagctgagcctgaatgaatttgtggaaggtgctcgcagggataacctgcttatgcccactctctag

SEQ ID NO: 124422 - DNA, 603 bp, Artificial Sequence
  derived and/or modified sequence
atgggacaggagttctcctgggaggaagccgaggctgctggggaaatcgacgttgcagaactccaggagtggtataaaaagttcgttatggaatgtccttctggaacgctcttcatgcatgagttcaaacgcttcttcaaagtgacagacgatgaagaagcttcccaatatgtcgaggggatgtttcgggcatttgacaaaaatggtgacaataccatcgattttctggagtatgttgcggctctcaacctggtcttaagagggactcttgagcacaaactgaagtggactttcaagatctacgacaaggacggcaacgggtgcatcgaccgtctggagctgctaaacattgtggagggcatttatcagctgaagaaggcatgccggcgggagctgcaaacagaacaaggccagctattgacacctgaggaagtggtggaccgcatctttcttctggtggatgaaaatggagacggccagctatccctgaacgaattcgtcgaaggggccaggcgggataagtgggtgatgaagatgttacagatggacatgaacccaagcagctggcttgcccagcaaagacggaagtctgctatgttctag

SEQ ID NO: 124423 - DNA, 1113 bp, Artificial Sequence
  derived and/or modified sequence
ggaaagggaggaagagggccctagttggagagatccatcagcagaagccagggaggagatacagacccttgctccctgatgctcctcagggctagcatggggcaggagtttagctgggaggaggcggaggcagctggcgagatagatgtggcggagctccaggagtggtacaagaagtttgtgatggagtgccccagcggcacactctttatgcatgagtttaagcgcttcttcaaggtcacagacgatgaggaggcctcccagtatgtagagggcatgttccgagccttcgacaagaatggggacaacaccatcgacttcctggagtacgtggcagctctgaatctcgtgctgaggggcaccctggagcacaagctgaagtggacattcaagatctatgataaggatggcaatggctgcatcgaccgcctggagctactcaacattgtggagggaatttaccagctgaagaaagcctgccggcgagagctacaaactgagcaaggccagctgctcacacccgaggaggtcgtggacaggatcttcctcctggtggatgagaatggagatggccagctgtctctgaacgagtttgttgaaggtgcccgtcgggacaagtgggtgatgaagatgctgcagatggacatgaatcccagcagctggctcgctcagcagagacggaaaagtgccatgttctgaggagtctggggcccctccacgactccaggctcacccaggtttccagggtagtaggagggtccctggctcagcctgctcatgcccactcttcccctggtgttgacttcctggcaccccctgtgcagggctgagtggggatggggaagggctgctgggtttgaagtggccaacagggcatagtccattttggaggagtccctgggatggtgaagggaattcagttacttttcctgttcagccgctcctgggaggactgtgccttggctgggtggttgtggggctcccacagtttctgggtgttctcagttggaagcaagagccaactgaggggtgagggtcccacagaccaaatcagaaatgagaacacaaagactggtaggaggcaggggtgggagggtgttgagactgaagaaa

SEQ ID NO: 124424 - DNA, 652 bp, Artificial Sequence
  derived and/or modified sequence
agtcacccaggagatgatggagaggctgatcaggcctcctggaaagggaggaagagggccctagttggagagatccatcagcagaagccagggaggagatacagacccttgctccctgatgctcctcagggctagcatggggcaggagtttagctgggaggaggcggaggcagctggcgagatagatgtggcggagctccaggagtggtacaagaagtttgtgatggagtgccccagcggcacactctttatgcatgagtttaagcgcttcttcaaggtcacagacgatgaggaggcctcccagtatgtagagggcatgttccgagccttcgacaagaatggggacaacaccatcgacttcctggagtacgtggcagctctgaatctcgtgctgaggggcaccctggagcacaagctgaagtggacattcaagatctatgataaggatggcaatggctgcatcgaccgcctggagctactcaacattgtggagtgccggcgagagctacaaactgagcaaggccagctgctcacacccgaggaggtcgtggacaggatcttcctcctggtggatgagaatggagatggccagctgtctctgaacgagtttgttgaaggtgcccgtcgggacaacctgctcatgcccactctt

SEQ ID NO: 124425 - DNA, 519 bp, Artificial Sequence
  derived and/or modified sequence
atgggccaggagttctcctgggaggaggccgaggccgccggggagattgatgtggccgagctgcaggagtggtacaagaagtttgtgatggagtgccccagcggcaccctcttcatgcatgagttcaagcgcttcttcaaggtgacagatgatgaggaggccagccagtatgtggagggcatgttccgggcctttgacaagaatggagacaacaccatcgacttcctggagtatgtggccgccctgaacctggtgctgcggggcaccctggagcacaagctgaagtggaccttcaagatctatgacaaggatggaaatggctgcatcgaccggctggagctgctgaacatcgtggagtgcagaagagagctgcagacagagcagggccagctgctgaccccagaggaggtggtggaccgcatcttcctgctggtggatgaaaatggagatggccagctgagcctgaatgaatttgtggagggcgcccggcgggacaacctgctgatgcccaccctgtag

SEQ ID NO: 124426 - DNA, 603 bp, Artificial Sequence
  derived and/or modified sequence
atgggccaggagttctcctgggaggaggccgaggccgccggggagattgatgtggccgagctgcaggagtggtacaagaagtttgtgatggagtgccccagcggcaccctcttcatgcatgagttcaagcgcttcttcaaggtgacagatgatgaggaggccagccagtatgtggagggcatgttccgggcctttgacaagaatggagacaacaccatcgacttcctggagtatgtggccgccctgaacctggtgctgcggggcaccctggagcacaagctgaagtggaccttcaagatctatgacaaggatggaaatggctgcatcgaccggctggagctgctgaacatcgtggagggcatctaccagctgaagaaggcctgcagaagagagctgcagacagagcagggccagctgctgaccccagaggaggtggtggaccgcatcttcctgctggtggatgaaaatggagatggccagctgagcctgaatgaatttgtggagggcgcccggcgggacaagtgggtgatgaagatgctgcagatggacatgaaccccagctcctggctggcccagcagaggaggaagagcgccatgttttag

SEQ ID NO: 124427 - DNA, 519 bp, Artificial Sequence
  derived and/or modified sequence
atgggccaggagttcagctgggaggaggccgaggccgccggcgagatcgacgttgccgagctgcaggaatggtacaaaaagtttgttatggaatgcccatccggaacactgttcatgcacgaatttaagcgcttttttaaggttaccgacgatgaggaggcatcccagtacgtggaagggatgtttcgggctttcgataagaacggtgacaataccatcgactttctggaatacgtcgcagctttaaacctggtgctgaggggtaccctggagcacaaactcaaatggacttttaaaatatacgataaggacgggaacggctgtatagataggttagaattgctcaatatagtggaatgtagaagagagctgcagaccgagcaaggacaattgttgacacccgaggaggtggtcgacaggatattcctgctggtcgatgaaaacggcgacggccagctctctctgaatgagtttgtcgaaggagccagacgggataacttactgatgcccaccctttag

SEQ ID NO: 124428 - DNA, 603 bp, Artificial Sequence
  derived and/or modified sequence
atgggccaggagttcagctgggaggaggccgaggccgccggcgagatcgatgtagccgagttgcaggagtggtacaagaaattcgttatggagtgccccagtggcaccttgtttatgcacgagttcaagagattctttaaggtgaccgacgatgaggaagcatcacagtacgtggaaggaatgtttcgcgcattcgataagaatggggataataccattgactttctggagtacgttgccgcgcttaatctggtgctgcggggaactttagagcataagttaaagtggacttttaaaatttatgacaaagatggcaacggttgcatagatcgcctcgaacttttaaacatcgtcgagggtatctaccagctgaagaaggcatgcaggagagaactgcagacggagcagggccaattattgaccccagaggaggtggtagataggatcttcctactggtggacgagaacggcgatgggcagctctccctgaacgaatttgtggagggtgccagaagggacaaatgggttatgaagatgctgcagatggacatgaatccttcttcctggttagcccagcagaggcgcaaatctgccatgttttag

SEQ ID NO: 124429 - DNA, 519 bp, Artificial Sequence
  derived and/or modified sequence
atgggccaggaattctcgtgggaagaggcggaagctgccggtgaaattgacgttgctgagttacaagagtggtacaaaaaattcgttatggagtgcccctccggcacgttgtttatgcatgagtttaagcgattcttcaaagttaccgatgatgaggaagcctcccagtatgtggagggcatgttcagagctttcgacaaaaacggcgacaacaccattgactttctcgagtacgttgccgctcttaacctcgtgctcagagggacccttgagcacaagctcaagtggacctttaagatctacgacaaggacggcaacgggtgtatagacagactagagctactcaatatcgtggaatgtcggagagagctgcaaaccgagcagggacagttactcacacccgaggaggtggtggacaggatttttctattagtcgacgaaaacggtgacgggcagctgtctctcaatgagtttgtagagggtgccagaagagataatttgttaatgcccaccctgtag

SEQ ID NO: 124430 - DNA, 603 bp, Artificial Sequence
  derived and/or modified sequence
atgggtcaagagttctcatgggaggaagctgaagcagccggagaaatcgatgtcgcagaactgcaggaatggtacaaaaagtttgtcatggagtgcccatctggcacactgttcatgcacgaatttaaacgtttctttaaggtgaccgacgatgaggaagctagccaatatgtagaggggatgttcagagcatttgacaagaacggggataacaccatcgactttctggagtacgtcgcagccctcaatcttgtgctcagggggaccctggagcacaagctgaaatggacatttaagatttacgataaggacggaaatggttgtatcgaccgactggagctgcttaacattgtcgagggaatttaccagctgaagaaagcctgcaggcgggagctgcagactgaacaggggcagctgctgaccccagaagaagtggttgatcggatattcttactggtggatgaaaacggagatggccaactctccctcaacgaatttgtggagggtgccagacgcgataagtgggtgatgaagatgctccagatggatatgaacccttccagctggctcgctcaacagcgacgaaaatcggccatgttttag

SEQ ID NO: 124431 - DNA, 519 bp, Artificial Sequence
  derived and/or modified sequence
atgggccaggagttcagctgggaggaggccgaggccgccggcgagatcgacgtggccgagctgcaggagtggtacaagaagttcgtgatggagtgccccagcggcaccctgttcatgcacgagttcaagagattcttcaaggtgaccgacgacgaggaggccagccagtacgtggagggcatgttcagagccttcgacaagaacggcgacaacaccatcgacttcctggagtacgtggccgccctgaacctggtgctgagaggcaccctggagcacaagctgaagtggaccttcaagatctacgacaaggacggcaacggctgcatcgacagactggagctgctgaacatcgtggagtgcagaagagagctgcagaccgagcagggccagctgctgacccccgaggaggtggtggacagaatcttcctgctggtggacgagaacggcgacggccagctgagcctgaacgagttcgtggagggcgccagaagagacaacctgctgatgcccaccctgtag

SEQ ID NO: 124432 - DNA, 603 bp, Artificial Sequence
  derived and/or modified sequence
atgggccaggagttcagctgggaggaggccgaggccgccggcgagatcgacgtggccgagctgcaggagtggtacaagaagttcgtgatggagtgccccagcggcaccctgttcatgcacgagttcaagagattcttcaaggtgaccgacgacgaggaggccagccagtacgtggagggcatgttcagagccttcgacaagaacggcgacaacaccatcgacttcctggagtacgtggccgccctgaacctggtgctgagaggcaccctggagcacaagctgaagtggaccttcaagatctacgacaaggacggcaacggctgcatcgacagactggagctgctgaacatcgtggagggcatctaccagctgaagaaggcctgcagaagagagctgcagaccgagcagggccagctgctgacccccgaggaggtggtggacagaatcttcctgctggtggacgagaacggcgacggccagctgagcctgaacgagttcgtggagggcgccagaagagacaagtgggtgatgaagatgctgcagatggacatgaaccccagcagctggctggcccagcagagaagaaagagcgccatgttctag

SEQ ID NO: 124433 - protein, 150 aa, Artificial Sequence
  derived and/or modified sequence
MYGKIIFVLLLSEIVSISALSTTEVAMHTSTSSSVTKSYISSQTNDTHKRDTYAATPRAHEVSEISVRTVYPPEEETGERVQLAHHFSEPEITLIIFGVMAGVIGTILLISYGIRRLIKKSPSDVKPLPSPDTDVPLSSVEIENPETSDQ

SEQ ID NO: 124434 - protein, 118 aa, Artificial Sequence
  derived and/or modified sequence
MYGKIIFVLLLSEIVSISALSTTEVAMHTSTSSSVTKSYISSQTNGERVQLAHHFSEPEITLIIFGVMAGVIGTILLISYGIRRLIKKSPSDVKPLPSPDTDVPLSSVEIENPETSDQ

SEQ ID NO: 124435 - protein, 124 aa, Artificial Sequence
  derived and/or modified sequence
MHTSTSSSVTKSYISSQTNDTHKRDTYAATPRAHEVSEISVRTVYPPEEETGERVQLAHHFSEPEITLIIFGVMAGVIGTILLISYGIRRLIKKSPSDVKPLPSPDTDVPLSSVEIENPETSDQ

SEQ ID NO: 124436 - DNA, 453 bp, Artificial Sequence
  derived and/or modified sequence
atgtacggtaagataatctttgtgttgctccttagtgaaatcgttagcatctcagctctgtccacaaccgaagtggctatgcacacctccacatcttcttccgtcaccaaatcctacatttcttcacagactaacgacactcataagcgggatacatatgcggccacccccagggcccacgaagtgtccgaaatttccgtccggacagtttacccaccagaagaggaaacaggagagagagtgcagctggcccaccacttttcggaacctgagatcacactgattatctttggggtcatggctggcgtgatcgggaccattctgctgatctcatacggtatccgtcgcctgataaaaaaaagcccttctgacgtgaaacctcttccatcccccgataccgacgtccctttgtcttcagtcgagatcgagaaccccgagacaagtgaccagtag

SEQ ID NO: 124437 - DNA, 357 bp, Artificial Sequence
  derived and/or modified sequence
atgtatggtaagatcatctttgtcttattgctgtctgagatagtgagtatatccgccctgtcaaccacggaggttgccatgcacacaagcacctctagcagcgtgacaaaaagttacatttcatcacagacaaatggcgagcgggtgcagctcgcccaccatttttctgagccagagattactcttattatttttggggtcatggcaggagtcatcggtactattctgctgatcagctacggcattcggcggctgattaaaaagagcccctcagatgtcaaacccctgccttctccagacactgatgtccctttgtcctcagttgagattgagaaccccgagacatctgaccagtag

SEQ ID NO: 124438 - DNA, 375 bp, Artificial Sequence
  derived and/or modified sequence
atgcacacttctaccagctcctctgtcactaagtcttatatctcttcacagactaatgatacccataagcgggatacatacgccgcaacccccagagcacacgaggtgtccgagattagtgtgcgaaccgtttaccctccggaggaggagactggagagcgggtgcaattggctcatcacttcagtgagcctgaaatcactctgatcatttttggcgtcatggccggggttatcgggacaatcctgctcattagttacggcattcgtagattgataaaaaagtctccctctgacgtcaagcctctgcccagtccggatacggatgtacctctctcgtcagtcgaaatagagaatcccgaaacatcagaccagtag

SEQ ID NO: 124439 - DNA, 2659 bp, Artificial Sequence
  derived and/or modified sequence
gcaggaaggtgggcctggaagataacagctagcaggctaaggtcagacactgacacttgcagttgtctttggtagtttttttgcactaacttcaggaaccagctcatgatctcaggatgtatggaaaaataatctttgtattactattgtcagaaattgtgagcatatcagcattaagtaccactgaggtggcaatgcacacttcaacttcttcttcagtcacaaagagttacatctcatcacagacaaatgatacgcacaaacgggacacatatgcagccactcctagagctcatgaagtttcagaaatttctgttagaactgtttaccctccagaagaggaaaccggagaaagggtacaacttgcccatcatttctctgaaccagagataacactcattatttttggggtgatggctggtgttattggaacgatcctcttaatttcttacggtattcgccgactgataaagaaaagcccatctgatgtaaaacctctcccctcacctgacacagacgtgcctttaagttctgttgaaatagaaaatccagagacaagtgatcaatgagaatctgttcaccaaaccaaatgtggaaagaacacaaagaagacataagacttcagtcaagtgaaaaattaacatgtggactggacactccaataaattatatacctgcctaagttgtacaatttcagaatgcaattttcattataatgagttccagtgactcaatgatggggaaaaaaatctctgctcattaatatttcaagataaagaacaaatgtttccttgaatgcttgcttttgtgtgttagcataatttttagaattgtttgagaattctgatccaaaactttagttgaattcatctacgtttgtttaatattaacttaacctattctattgtattataatgatgattctgtcaaatgaaaggcttgaaatacctagatgaagtttagattttcttcctattgtaaacttttgagtctggtttcattgttttaaataaattaaggggacactaaagtcctatcattcatttccttcattgctgaacaggcaagatataatattacatgaatgattactatattttgttcacactaataaagcttatgctcagaaatgccatacacacacacacacacacacacaaacacacacatttatcatttaatgcataaatcaacacaaaaggttttcccattaatatgaaatattacatatatataagtgccatatttaaaataatttgtctaacagtagaactgtgtcggagcactcactgaagcttgcattccactgaaagagttatttgtgtaagtagagtatccggagaaggaaaagaacttacgacctttctttataacagaaactcaactctaaattcaacaagatgtgcaaaccggacatgcaggtgaatattttaataggttactataaggttctcaattaaattctttaatctgtccagtcccagtttctcttattaataaaactttggaaattgctttaaaccatttaaaggaaatttctagatatagaaactaaggactgtgactatacagctgtcactcatttgtagtaaaacttaaaaagcaaaaacaaaaaacaaaaaagaccttcctgtgatactttatttccgaactaataaaaatctatatgactttttattattgtgtgataaccaagtaaatgttttctattttgcatattttcaggcatggtaacagaaatttaccttttaataaattaaaaaatctaaattttaacctacttgtatgttcggagagtgtttttgtactatattgactacttaaaatagagaatgagactaagaagggaacatttctgttgatacatgttttttaaaagtaattttaagagcattattaggttaattaatccaattaatgacccaaatgccaaggtaattttaaatttacatttttaataaaagcaacatgttgaaacaagagagggtgagattaacctttttgctaaagtaatttacaagtcaaagacaggaagagatcagagtgaatgtgccttcttaaccagagctacagaatttagtgaataattaaagtacaaactgctttgacctccttgaacttttccaagcaatttctctgtacttctatatatgaatgtcttagccaattttctgctactataacagaatacgacagactgggtaatttaaaaagaaaagaaatttattttcttcctagttctggaggctgggaaggcgaagggcatggcactgacatctgccttgtaactgatgagaaccttcttactgcatgataacaaagcagcaaggcaagcaaaagcgtaagatgaagagagaggaaatgaagccaaacacatcctttcatcagaagcccattccctctataaggcgttattacatttatgagaatggagtcctcatgacctaatcgtgaccttaaaggcccctcccaacactgttacaatggcaattaaatttcaacaaaggttccagaggtgacattcgaatcagcaatgaaattttcatagttaaatttggtattcgtgggggaagaaatgaccatttcccttgtatttttataattaaatcagcaaaatattgtaataaagaaatctttcctgtgaagataccatgacccc

SEQ ID NO: 124440 - DNA, 357 bp, Artificial Sequence
  derived and/or modified sequence
atgtatggaaaaataatctttgtattactattgtcagaaattgtgagcatatcagcattaagtaccactgaggtggcaatgcacacttcaacttcttcttcagtcacaaagagttacatctcatcacagacaaatggagaaagggtacaacttgcccatcatttctctgaaccagagataacactcattatttttggggtgatggctggtgttattggaacgatcctcttaatttcttacggtattcgccgactgataaagaaaagcccatctgatgtaaaacctctcccctcacctgacacagacgtgcctttaagttctgttgaaatagaaaatccagagacaagtgatcaatga

SEQ ID NO: 124441 - DNA, 622 bp, Artificial Sequence
  derived and/or modified sequence
tttgcactaacttcaggaaccagctcatgatctcaggatgtatggaaaaataatctttgtattactattgtcaggagacggagccaaccctgaaaattctgggaaaagaggacagaaggcagagggaagagcaagagcaaaaattctgaaacagcagaaattgtgagcatatcagcattaagtaccactgaggtggcaatgcacacttcaacttcttcttcagtcacaaagagttacatctcatcacagacaaatgatacgcacaaacgggacacatatgcagccactcctagagctcatgaagtttcagaaatttctgttagaactgtttaccctccagaagaggaaaccggagaaagggtacaacttgcccatcatttctctgaaccagagataacactcattatttttggggtgatggctggtgttattggaacgatcctcttaatttcttacggtattcgccgactgataaagaaaagcccatctgatgtaaaacctctcccctcacctgacacagacgtgcctttaagttctgttgaaatagaaaatccagagacaagtgatcaatgagaatctgttcaccaaaccaaatgtggaaagaacacaaagaagacataag

SEQ ID NO: 124442 - DNA, 453 bp, Artificial Sequence
  derived and/or modified sequence
atgtatggcaagatcatctttgtgctgctgctgtctgagatcgtgtccatcagcgccctgagcaccacagaggtggccatgcacaccagcaccagcagctctgtgaccaagagctacatcagcagccagaccaatgacacccacaagagggacacctacgccgccaccccccgggcccacgaggtgtctgagatctctgtgaggacagtgtacccacctgaggaggagactggagagcgggtgcagctggcccaccacttcagcgagcctgagatcaccctcatcatctttggagtgatggccggggtcatcggcaccatcctgctgatctcctatggcatcagaagactcatcaagaagagccccagtgatgtgaagcccctgcccagcccagacacagatgtgcccctgagctctgtggagattgaaaatcctgagaccagtgaccagtag

SEQ ID NO: 124443 - DNA, 357 bp, Artificial Sequence
  derived and/or modified sequence
atgtatggcaagatcatctttgtgctgctgctgtctgagatcgtgtccatcagcgccctgagcaccacagaggtggccatgcacaccagcaccagcagctctgtgaccaagagctacatcagcagccagaccaatggagagcgggtgcagctggcccaccacttcagcgagcctgagatcaccctcatcatctttggagtgatggccggggtcatcggcaccatcctgctgatctcctatggcatcagaagactcatcaagaagagccccagtgatgtgaagcccctgcccagcccagacacagatgtgcccctgagctctgtggagattgaaaatcctgagaccagtgaccagtag

SEQ ID NO: 124444 - DNA, 375 bp, Artificial Sequence
  derived and/or modified sequence
atgcacaccagcaccagcagctctgtgaccaagagctacatcagcagccagaccaatgacacccacaagagggacacctacgccgccaccccccgggcccacgaggtgtctgagatctctgtgaggacagtgtacccacctgaggaggagactggagagcgggtgcagctggcccaccacttcagcgagcctgagatcaccctcatcatctttggagtgatggccggggtcatcggcaccatcctgctgatctcctatggcatcagaagactcatcaagaagagccccagtgatgtgaagcccctgcccagcccagacacagatgtgcccctgagctctgtggagattgaaaatcctgagaccagtgaccagtag

SEQ ID NO: 124445 - DNA, 453 bp, Artificial Sequence
  derived and/or modified sequence
atgtacggcaagatcatcttcgtgctgctgctgagcgagatcgtgtctatcagcgcgttgagtactacagaagtggctatgcacacttcgacatcttcttcggttaccaaaagctatatttccagtcagaccaatgatacacacaagagggatacctacgcagcaacaccacgggcgcatgaggtaagtgaaatctccgtaaggacggtgtacccacccgaggaggaaaccggggagagagttcagcttgcacaccacttctccgagcccgagattaccctgataattttcggcgttatggctggggtgataggaactatcctactgatctcttacgggattcggcgccttatcaagaaaagcccttctgacgttaaaccactgcctagtcccgataccgacgttcccctatcctcggtcgaaattgaaaatcccgaaacgtccgaccagtag

SEQ ID NO: 124446 - DNA, 357 bp, Artificial Sequence
  derived and/or modified sequence
atgtacggcaagatcatcttcgtgctgctgctgagcgagatcgtgagcatcagcgccttaagtacaacagaggttgccatgcacacatcaacgtcatcatcagttactaaatcttacatttcctcgcagacaaacggtgaacgggtgcagctggctcaccacttttctgagccagagatcacactgataatctttggagtgatggccggcgtgatcgggaccattctgctgatcagttatgggatccgccgtttaatcaaaaaatcgccaagcgatgttaagcctctgccttcacctgacactgacgtacctctgagctctgtggagatagagaaccctgagactagtgaccagtag

SEQ ID NO: 124447 - DNA, 375 bp, Artificial Sequence
  derived and/or modified sequence
atgcacaccagcaccagcagcagcgtgaccaagagctacatcagctcacagaccaatgacacacataaaagggacacttacgcggcgactcccagagcccacgaagtgtctgagattagtgtaagaacagtgtacccccccgaagaggagacgggcgagcgggtccagttggcgcatcatttctccgagcccgaaataacattgatcatttttggggtgatggctggcgtcattgggactatcttgctgatttcttatggcatcaggcgactgatcaagaaatccccttctgacgtaaagcctcttcccagtcccgataccgacgtgcctttaagttccgtggaaatcgaaaatcccgagacctctgatcaatag

SEQ ID NO: 124448 - DNA, 453 bp, Artificial Sequence
  derived and/or modified sequence
atgtacgggaagatcatctttgtactgttgctgagcgagattgtgagcatctctgccctaagcacaaccgaggtggcaatgcatacaagcacctcttcgtcagtgactaaaagctatatcagcagtcagaccaacgatacccataaacgcgatacatatgccgctacccccagggcacatgaggtatcggagatctcagtgaggaccgtgtaccctcctgaagaggaaacgggcgaaagagtacagctcgcgcaccacttcagcgagcctgagatcacactcattatctttggggtcatggccggtgtgataggcaccattcttctaataagttacggtatacgacggttaatcaaaaagagtccaagcgatgttaagccattgccaagtcccgacaccgatgtccctttaagtagcgtagagatcgagaacccagagacttctgaccagtag

SEQ ID NO: 124449 - DNA, 357 bp, Artificial Sequence
  derived and/or modified sequence
atgtatgggaaaattatctttgttctgttgctctctgagatcgtttcaatctcagccttgtctacaacagaggtggcaatgcacacgtccacttcaagttcagtaacaaaaagctacatctcttcccagactaacggcgaaagggtgcaacttgcccatcatttctctgaacccgagatcaccttgattattttcggagtgatggccggtgtcatcgggacgatcctgttaatcagttatgggattcgacggctgattaaaaagtctccatccgatgtgaaacctctcccatcccccgatacggacgtgccactgagcagcgtggagattgagaaccctgagacctctgaccagtag

SEQ ID NO: 124450 - DNA, 375 bp, Artificial Sequence
  derived and/or modified sequence
atgcacacgtctacgagttcaagcgttaccaagagctatatctcatctcaaacgaacgacacacacaagcgtgatacatatgccgctacacccagagctcatgaggtgagcgagatttcggtgcggactgtgtatccccctgaagaagaaacaggcgagagagtgcagctggcccaccattttagcgagcccgaaattacattaatcatctttggagtgatggccggagttatcggtactattctgctgatttcctacggaattagacgtctcatcaaaaagtcacctagtgacgtgaagcccctgccctccccggatacggatgtgccactttcctctgtagaaatcgagaatcccgaaacttccgaccagtag

SEQ ID NO: 124451 - DNA, 453 bp, Artificial Sequence
  derived and/or modified sequence
atgtacggcaagatcatcttcgtgctgctgctgagcgagatcgtgagcatcagcgccctgagcaccaccgaggtggccatgcacaccagcaccagcagcagcgtgaccaagagctacatcagcagccagaccaacgacacccacaagagagacacctacgccgccacccccagagcccacgaggtgagcgagatcagcgtgagaaccgtgtacccccccgaggaggagaccggcgagagagtgcagctggcccaccacttcagcgagcccgagatcaccctgatcatcttcggcgtgatggccggcgtgatcggcaccatcctgctgatcagctacggcatcagaagactgatcaagaagagccccagcgacgtgaagcccctgcccagccccgacaccgacgtgcccctgagcagcgtggagatcgagaaccccgagaccagcgaccagtag

SEQ ID NO: 124452 - DNA, 357 bp, Artificial Sequence
  derived and/or modified sequence
atgtacggcaagatcatcttcgtgctgctgctgagcgagatcgtgagcatcagcgccctgagcaccaccgaggtggccatgcacaccagcaccagcagcagcgtgaccaagagctacatcagcagccagaccaacggcgagagagtgcagctggcccaccacttcagcgagcccgagatcaccctgatcatcttcggcgtgatggccggcgtgatcggcaccatcctgctgatcagctacggcatcagaagactgatcaagaagagccccagcgacgtgaagcccctgcccagccccgacaccgacgtgcccctgagcagcgtggagatcgagaaccccgagaccagcgaccagtag

SEQ ID NO: 124453 - DNA, 375 bp, Artificial Sequence
  derived and/or modified sequence
atgcacaccagcaccagcagcagcgtgaccaagagctacatcagcagccagaccaacgacacccacaagagagacacctacgccgccacccccagagcccacgaggtgagcgagatcagcgtgagaaccgtgtacccccccgaggaggagaccggcgagagagtgcagctggcccaccacttcagcgagcccgagatcaccctgatcatcttcggcgtgatggccggcgtgatcggcaccatcctgctgatcagctacggcatcagaagactgatcaagaagagccccagcgacgtgaagcccctgcccagccccgacaccgacgtgcccctgagcagcgtggagatcgagaaccccgagaccagcgaccagtag

SEQ ID NO: 124454 - protein, 91 aa, Artificial Sequence
  derived and/or modified sequence
MYGKIIFVLLLSEIVSISALSTTEVAMHTSTSSSVTKSYISSQTNGETGQLVHRFTVPAPVVIILIILCVMAGIIGTILLISYSIRRLIKA

SEQ ID NO: 124455 - protein, 58 aa, Artificial Sequence
  derived and/or modified sequence
MYGKIIFVLLLSGETGQLVHRFTVPAPVVIILIILCVMAGIIGTILLISYSIRRLIKA

SEQ ID NO: 124456 - DNA, 189 bp, Artificial Sequence
  derived and/or modified sequence
atgtatgggaaaatcatcttcgtgctgctcctcagtgagatcgtatccatatccgctctttctaccacagaggtggccatgcacacgagcacctcttcctcggtaaccaaaagttacatttcttcccagacaaacggcgaaagggtgcagctggctcaccattttagcgagcctgatttccataactag

SEQ ID NO: 124457 - DNA, 276 bp, Artificial Sequence
  derived and/or modified sequence
atgtatgggaaaataatttttgtgttactgctgtccgagatagtgtccatcagcgctttaagtactactgaggttgcaatgcacacatcaacctccagttcagtgacaaagtcttacatatcctcacagaccaatggagaaactggccaactcgtccatcgctttacagtacccgcccctgtggtcatcatccttataatcctgtgcgtcatggctggtatcataggcacaattcttcttatatcatactcgatccggcggctcattaaagcttag

SEQ ID NO: 124458 - DNA, 276 bp, Artificial Sequence
  derived and/or modified sequence
atgtacgggaagattattttcgtgctcctgctgtctgagatcgtgtccattagtgcgctgagcacgacggaagtggctatgcacactagcacatcaagcagtgtcacgaaatcatacatatcgtctcagacgaacggagagactggacaactcgtacacagattcacagtgcccgcgcctgttgtcatcattctgataatcctgtgcgtcatggccggaatcatcggcactattcttctgatctcctacagcatccgtagactgataaaggcatag

SEQ ID NO: 124459 - DNA, 177 bp, Artificial Sequence
  derived and/or modified sequence
atgtacggtaagattatcttcgtgctgctgttgtccggcgaaaccggtcaactggtccatcggttcaccgtccccgctcctgtcgttataatcctgatcatactctgcgtcatggcaggaattattgggacgatactgctgatttcgtatagcatccgtaggctgattaaggcctag

SEQ ID NO: 124460 - DNA, 168 bp, Artificial Sequence
  derived and/or modified sequence
atgtacgggaagataatattcgtgctgctgttgagcgggattgtgagtatctccgctagtagcacgaccggcgtggcgatgcatacaagcacttccagttccgtcaccaaaagctacatttcttcccagaccaacggggagcgcggccagttggttcatcgcttctag

SEQ ID NO: 124461 - DNA, 244 bp, Artificial Sequence
  derived and/or modified sequence
gcagttgtctttggtagtttttttgcactaacttcaggaaccagctcatgatctcaggatgtatggaaaaataatctttgtattactattgtcagaaattgtgagcatatcagcattaagtaccactgaggtggcaatgcacacttcaacttcttcttcagtcacaaagagttacatctcatcacagacaaatggagaaagggtacaacttgcccatcatttctctgaaccagactttcataat

SEQ ID NO: 124462 - DNA, 527 bp, Artificial Sequence
  derived and/or modified sequence
agttgtctttggtagtttttttgcactaacttcaggaaccagctcatgatctcaggatgtatggaaaaataatctttgtattactattgtcagaaattgtgagcatatcagcattaagtaccactgaggtggcaatgcacacttcaacctcttcttcagtcacaaagagttacatctcatcacagacaaatggagaaacgggacaacttgtccatcgtttcactgtaccagctcctgtagtgataatactcattattttgtgtgtgatggctggtattattggaacgatcctcttaatttcttacagtattcgccgactgataaaggcatgaggatgtggcctgcatgctgcctgatcttgcctagaaccggctgcacctgctgttctcttgtttatgcaaactggctgcacctgctattcctttgcttatgcccctacccctggctatcctaattccctgttctcctgcctcactattactgtattctctacttctaaataaaaataaaacaaaatacaaaccgtt

SEQ ID NO: 124463 - DNA, 521 bp, Artificial Sequence
  derived and/or modified sequence
gtctttggtagtttttttgcactaacttcaggaaccagctcatgatctcaggatgtatggaaaaataatctttgtattactattgtcagaaattgtgagcatatcagcattaagtaccactgaggtggcaatgcacacttcaacctcttcttcagtcacaaagagttacatctcatcacagacaaatggagaaacgggacaacttgtccatcgtttcactgtaccagctcctgtagtgataatactcattattttgtgtgtgatggctggtattattggaacgatcctcttaatttcttacagtattcgccgactgataaaggcatgaggatgtggcctgcatgctgcctgatcttgcctagaaccggctgcacctgctgttctcttgtttatgcaaactggctgcacctgctattcctttgcttatgcccctacccctggctatcctaattccctgttctcctgcctcactattactgtattctctacttctaaataaaaataaaacaaaatacaaaccg

SEQ ID NO: 124464 - DNA, 360 bp, Artificial Sequence
  derived and/or modified sequence
tttgcactaacttcaggaaccagctcatgatctcaggatgtatggaaaaataatctttgtattactattgtcaggagaaacgggacaacttgtccatcgtttcactgtaccagctcctgtagtgataatactcattattttgtgtgtgatggctggtattattggaacgatcctcttaatttcttacagtattcgccgactgataaaggcatgaggatgtggcctgcatgctgcctgatcttgcctagaaccggctgcacctgctgttctcttgtttatgcaaactggctgcacctgctattcctttgcttatgcccctacccctggctatcctaattccctgttctcctgcctcactat

SEQ ID NO: 124465 - DNA, 221 bp, Artificial Sequence
  derived and/or modified sequence
agttgtctttggtagtttttttgcactaacttcaggagccagctcgtgatctcaggatgtatggaaaaataatctttgtattactattgtcaggaattgtgagcatatcagcatcaagtaccactggtgtggcaatgcacacttcaacctcttcttcagtcacaaagagttacatctcatcacagacaaatggagaaaggggacaacttgtccatcgtttc

SEQ ID NO: 124466 - DNA, 189 bp, Artificial Sequence
  derived and/or modified sequence
atgtatggcaagatcatctttgtgctgctgctgtctgagatcgtgtccatcagcgccctgagcaccacagaggtggccatgcacaccagcaccagcagctctgtgaccaagagctacatcagcagccagaccaatggagagcgggtgcagctggcccaccacttcagcgagccagacttccacaactag

SEQ ID NO: 124467 - DNA, 276 bp, Artificial Sequence
  derived and/or modified sequence
atgtatggcaagatcatctttgtgctgctgctgtctgagatcgtgtccatcagcgccctgagcaccacagaggtggccatgcacaccagcaccagcagctctgtgaccaagagctacatcagcagccagaccaatggagagaccggccagctggtgcaccgcttcaccgtgcctgcccctgtggtgatcatcctgatcatcctgtgtgtgatggccggcatcatcggcaccatcctgctgatctcctacagcatccggcggctcatcaaggcctag

SEQ ID NO: 124468 - DNA, 177 bp, Artificial Sequence
  derived and/or modified sequence
atgtatggcaagatcatctttgtgctgctgctgagcggggagaccggccagctggtgcaccgcttcaccgtgcctgcccctgtggtgatcatcctgatcatcctgtgtgtgatggccggcatcatcggcaccatcctgctgatctcctacagcatcagaagactcatcaaggcctag

SEQ ID NO: 124469 - DNA, 168 bp, Artificial Sequence
  derived and/or modified sequence
atgtatggcaagatcatctttgtgctgctgctgagcggcatcgtgtccatcagcgccagcagcaccactggagtggccatgcacaccagcaccagcagctctgtgaccaagagctacatcagcagccagaccaatggagagcggggccagctggtgcaccgcttctag

SEQ ID NO: 124470 - DNA, 189 bp, Artificial Sequence
  derived and/or modified sequence
atgtacggcaagatcatcttcgtgctgctgctgagcgagatcgtgtcaatcagtgctttatccacaacagaggtggcaatgcatactagtacatcctcttccgtcacaaaatcctacatctctagtcagaccaacggagaacgggtacagcttgcgcaccacttcagtgaaccagacttccacaattag

SEQ ID NO: 124471 - DNA, 276 bp, Artificial Sequence
  derived and/or modified sequence
atgtacggcaagatcatcttcgtgctgctgctgagcgagatcgtgtccatttctgctctctcaaccaccgaggtcgccatgcacacatccacctcctcctccgttaccaagtcctacattagcagtcagacgaacggcgagacaggccagttagtacatcggttcacagtaccggcgcccgtggtaatcatccttattatcctctgcgtaatggccggaatcattgggaccatcctgttgatcagctattccatccgcaggcttatcaaggcgtag

SEQ ID NO: 124472 - DNA, 276 bp, Artificial Sequence
  derived and/or modified sequence
atgtacggcaagatcatcttcgtgctgctgctgagcgagatcgtgagcatcagcgctctctccacaaccgaggttgctatgcatacatctacaagttccagtgtgacgaaatcctacataagttctcagaccaatggtgaaaccggacagctggtacaccgtttcaccgttccagcaccagtagtgatcatcctgattatcctgtgtgttatggcaggcatcattgggacgatactgttgatctcatatagcatccgacgactgatcaaagcctag

SEQ ID NO: 124473 - DNA, 177 bp, Artificial Sequence
  derived and/or modified sequence
atgtacggcaagatcatcttcgtgctgctgctgagcggcgagaccggacagcttgtgcatcggtttaccgtgccagcccccgtcgtcattatactgattatactgtgtgtaatggctggaataatcggtacaattcttctcatctcctattccatcagacggctcattaaagcctag

SEQ ID NO: 124474 - DNA, 168 bp, Artificial Sequence
  derived and/or modified sequence
atgtacggcaagatcatcttcgtgctgctgctgagcggcatcgtgtccatatccgccagctcaacaacaggagtagccatgcacacatctaccagtagttcggtcaccaagtcatatatcagctcccagaccaacggggagcgggggcaactggttcaccgcttctag

SEQ ID NO: 124475 - DNA, 189 bp, Artificial Sequence
  derived and/or modified sequence
atgtatggaaaaattatctttgtgcttcttttgtctgagatagtgagcatctctgcgctgtcaaccaccgaggtagccatgcacaccagcacgtcaagctcagtaaccaaaagttatataagttcacagactaatggagaacgagtccagttagcgcaccacttttccgagccggatttccataattag

SEQ ID NO: 124476 - DNA, 276 bp, Artificial Sequence
  derived and/or modified sequence
atgtacggaaaaatcatttttgtgttgctgcttagtgagatagtgtctatcagcgctctatcaacaaccgaagtagctatgcacacatctacctcaagcagtgtgaccaagtcctacatctcctctcagaccaatggagagaccggacaactggtgcataggttcaccgtccctgccccagtggtgataatattgattatcctttgtgtgatggcaggcatcattggaacaatcctgttaatttcttacagtattcggagactgatcaaggcttag

SEQ ID NO: 124477 - DNA, 276 bp, Artificial Sequence
  derived and/or modified sequence
atgtatggaaagataatatttgttttactattaagcgaaattgtatcaataagcgccttaagcaccaccgaggtggccatgcacaccagcacaagcagctctgttactaagtcctatatttcgtcccagacgaatggtgagacgggtcaactcgtgcaccgttttaccgtgcccgcaccagtggtaatcatcctgataatcctgtgcgtgatggcgggaatcatcggcactatcctccttattagctacagtattaggcgccttatcaaagcttag

SEQ ID NO: 124478 - DNA, 177 bp, Artificial Sequence
  derived and/or modified sequence
atgtacggtaagattatctttgttctgttattgtccggcgagacgggtcagcttgttcaccgattcaccgttcccgctcccgtagtgattatattaattattctgtgcgtgatggccggaattatcgggactattctcctgatttcttactcaatcaggaggctgatcaaggcttag

SEQ ID NO: 124479 - DNA, 168 bp, Artificial Sequence
  derived and/or modified sequence
atgtacggcaaaattatcttcgtgctgttgttatcgggcatagtctctatttccgcgtcgtcaaccactggcgtggcgatgcacacatccacatcaagcagcgtgacaaagtcttacatcagctcccagaccaacggagagcgcggtcagttggtccacagattttag

SEQ ID NO: 124480 - DNA, 189 bp, Artificial Sequence
  derived and/or modified sequence
atgtacggcaagatcatcttcgtgctgctgctgagcgagatcgtgagcatcagcgccctgagcaccaccgaggtggccatgcacaccagcaccagcagcagcgtgaccaagagctacatcagcagccagaccaacggcgagagagtgcagctggcccaccacttcagcgagcccgacttccacaactag

SEQ ID NO: 124481 - DNA, 276 bp, Artificial Sequence
  derived and/or modified sequence
atgtacggcaagatcatcttcgtgctgctgctgagcgagatcgtgagcatcagcgccctgagcaccaccgaggtggccatgcacaccagcaccagcagcagcgtgaccaagagctacatcagcagccagaccaacggcgagaccggccagctggtgcacagattcaccgtgcccgcccccgtggtgatcatcctgatcatcctgtgcgtgatggccggcatcatcggcaccatcctgctgatcagctacagcatcagaagactgatcaaggcctag

SEQ ID NO: 124482 - DNA, 177 bp, Artificial Sequence
  derived and/or modified sequence
atgtacggcaagatcatcttcgtgctgctgctgagcggcgagaccggccagctggtgcacagattcaccgtgcccgcccccgtggtgatcatcctgatcatcctgtgcgtgatggccggcatcatcggcaccatcctgctgatcagctacagcatcagaagactgatcaaggcctag

SEQ ID NO: 124483 - DNA, 168 bp, Artificial Sequence
  derived and/or modified sequence
atgtacggcaagatcatcttcgtgctgctgctgagcggcatcgtgagcatcagcgccagcagcaccaccggcgtggccatgcacaccagcaccagcagcagcgtgaccaagagctacatcagcagccagaccaacggcgagagaggccagctggtgcacagattctag

SEQ ID NO: 124484 - protein, 128 aa, Artificial Sequence
  derived and/or modified sequence
MWSTRSPNSTAWPLSLEPDPGMASASTTMHTTTIAEPDPGMSGWPDGRMETSTPTIMDIVVIAGVIAAVAIVLVSLLFVMLRYMYRHKGTYHTNEAKGTEFAESADAALQGDPALQDAGDSSRKEYFI

SEQ ID NO: 124485 - DNA, 387 bp, Artificial Sequence
  derived and/or modified sequence
atgtggtcgacaagaagcccaaacagcacagcatggcctttgtcactggagcctgatcctggcatggcttccgcatctactaccatgcatacaacgacaatcgccgagcctgaccctggtatgtcagggtggcctgatggacggatggagacgagcacccccacgataatggatatagtggtgattgctggggtgattgctgctgtcgcgatagtccttgtgtcactgctattcgttatgctcaggtacatgtatcgtcataaaggcacatatcacaccaatgaggcaaaagggactgaattcgccgagtcagcagacgccgctcttcaaggtgaccccgctctgcaggacgctggagactcctctcggaaggagtactttatatag

SEQ ID NO: 124486 - DNA, 1246 bp, Artificial Sequence
  derived and/or modified sequence
agtggcagatggaaagagaaacggttagaaaagcgtggttcttgcgcaggaaagttggagcaaagaagagttcagaagtgggcgggtgtgtgtttaaaaaaaaaaaagggggtggaaaccccaccagccaagtctgcagaaaaaaaataaatgaagtctgcctatctccgggccagagcccctcccctcggcccgcgcgggaggagtgtgacccaggtgccgcttcctctcgccgccgagggtcaggagcccgggagcgcgaccctcccccggcccggcctggcccggcctggccagtccccgcggtctctgcccgggctgacgcccaggaatgtggtcgacgagaagccccaacagcacggcgtggcctctcagcctcgagcctgatccggggatggcctctgcctccaccacaatgcatactaccaccattgcagagcctgatccagggatgtctggatggccggatggcagaatggagacctccacccccaccataatggacattgtcgtcattgcaggtgtgattgctgctgtggccatcgtcctagtctccctcctcttcgtcatgctgcgctacatgtaccggcacaagggcacgtaccacaccaatgaggccaagggcacggagtttgctgagagtgcagatgcagccctgcagggagaccctgccctccaagatgctggtgatagcagcagaaaggagtactttatttgagggacaacagacttcacttccctgaatgcctcccccatctccatcaggaaaaatacaccccatcgcccagcacccctgctgataccaccagacagagagagagagcacttgattcttcccgagatagccacctggaaacactaggtgcctgcccagggaggaacggaggaggactcgcgctacaagaggccactcccagggacccagggaggcgatggccaccccagaggccaccttttgctccacggaggtgggagaaaatctgggcacatggggccccctgggcagtgcaggacaacatcagctcactggcaggaaagtccttgttgagggtgagggggtgctggggtacccgggggctggggaagcaaggaaataagtcatctgtatgctgactggggataatggcatcaaatgtcagtccttgacatttggggggaacagcaggtgccagagctaaaaggtacctttgtctgccattgatccagctcagaacgattggaaataaatttgaaatgtaaccgagca

SEQ ID NO: 124487 - DNA, 1072 bp, Artificial Sequence
  derived and/or modified sequence
ggccagagcccctcccctcggcccgcgcgggaggagtgtgacccaggtgccgcttcctctcgccgccgagggtcaggagcccgggagcgcgaccctcccccggcccggcctggcccggcctggccagtccccgcggtctctgcccgggctgacgcccaggaatgtggtcgacgagaagccccaacagcacggcgtggcctctcagcctcgagcctgatccggggatggcctctgcctccaccacaatgcatactaccaccattgcagagcctgatccagggatgtctggatggccggatggcagaatggagacctccacccccaccataatggacattgtcgtcattgcaggtgtgattgctgctgtggccatcgtcctagtctccctcctcttcgtcatgctgcgctacatgtaccggcacaagggcacgtaccacaccaatgaggccaagggcacggagtttgctgagagtgcagatgcagccctgcagggagaccctgccctccaagatgctggtgatagcagcagaaaggagtactttatttgagggacaacagacttcacttccctgaatgcctcccccatctccatcaggaaaaatacaccccatcgcccagcacccctgctgataccaccagacagagagagagagcacttgattcttcccgagatagccacctggaaacactaggtgcctgcccagggaggaacggaggaggactcgcgctacaagaggccactcccagggacccagggaggcgatggccaccccagaggccaccttttgctccacggaggtgggagaaaatctgggcacatggggccccctgggcagtgcaggacaacatcagctcactggcaggaaagtccttgttgagggtgagggggtgctggggtacccgggggctggggaagcaaggaaataagtcatctgtatgctgactggggataatggcatcaaatgtcagtccttgacatttggggggaacagcaggtgccagagctaaaaggtacctttgtctgccattgatccagctcagaacgattggaaataaatttgaaatgtaaccg

SEQ ID NO: 124488 - DNA, 387 bp, Artificial Sequence
  derived and/or modified sequence
atgtggagcaccaggagccccaacagcacagcctggcccctgagcctggagccagaccccggcatggccagcgccagcaccaccatgcacaccaccaccatcgccgagccagaccccggcatgagcggctggccagatggccgcatggagaccagcacccccaccatcatggacatcgtggtgattgctggggtgattgctgctgtggccatcgtgctggtgtccctgctgtttgtgatgctgcgctacatgtaccgccacaagggcacctaccacaccaatgaggccaagggcacagaatttgctgagagcgcagatgctgccctgcagggcgaccctgccctgcaggatgctggggacagcagcaggaaggagtacttcatctag

SEQ ID NO: 124489 - DNA, 387 bp, Artificial Sequence
  derived and/or modified sequence
atgtggagcacccggagccccaacagcaccgcctggcccctgagcctggaaccagatccgggcatggcctctgcatcgactacaatgcataccacaacaatcgctgaacctgaccccggcatgtctgggtggcccgatgggcgaatggagacctcgacaccaacaataatggatatagtcgtgattgccggggttattgctgccgttgcgatagtgctggtgtccctactctttgttatgttgcgatacatgtatcgacacaagggaacttaccatacaaacgaagcaaagggcaccgaatttgccgagtccgccgacgccgctctgcagggtgacccggcactgcaggacgcaggtgactccagtaggaaggaatatttcatttag

SEQ ID NO: 124490 - DNA, 387 bp, Artificial Sequence
  derived and/or modified sequence
atgtggtccacccgcagccccaatagcacagcatggcctctcagtttagaacctgacccagggatggctagtgcaagcactaccatgcatacgacgacgatcgcagagccagaccccggaatgtctgggtggccagatgggcgaatggagacatctactcccaccattatggacatcgtggtcatcgctggtgtcattgcggcagtggcaatcgttttggtatcgctcctgtttgtgatgctgcgatacatgtatagacataagggaacttatcacactaacgaggccaagggaaccgagtttgcagagagtgcagatgccgcactacagggcgatccggcattgcaggatgctggagattccagcaggaaagagtacttcatttag

SEQ ID NO: 124491 - DNA, 387 bp, Artificial Sequence
  derived and/or modified sequence
atgtggagcaccagaagccccaacagcaccgcctggcccctgagcctggagcccgaccccggcatggccagcgccagcaccaccatgcacaccaccaccatcgccgagcccgaccccggcatgagcggctggcccgacggcagaatggagaccagcacccccaccatcatggacatcgtggtgatcgccggcgtgatcgccgccgtggccatcgtgctggtgagcctgctgttcgtgatgctgagatacatgtacagacacaagggcacctaccacaccaacgaggccaagggcaccgagttcgccgagagcgccgacgccgccctgcagggcgaccccgccctgcaggacgccggcgacagcagcagaaaggagtacttcatctag

SEQ ID NO: 124492 - protein, 78 aa, Artificial Sequence
  derived and/or modified sequence
MYGKIIFVLLLSGIVSISASSTTGVAMHTSTSSSVTKSYISSQTNGITLINWWAMARVIFEVMLVVVGMIILISYCIR

SEQ ID NO: 124493 - protein, 59 aa, Artificial Sequence
  derived and/or modified sequence
MYGKIIFVLLLSGIVSISASSTTGVAMHTSTSSSVTKSYISSQTNGCVIGNIICSDKSK

SEQ ID NO: 124494 - DNA, 237 bp, Artificial Sequence
  derived and/or modified sequence
atgtacgggaaaatcattttcgtgctcctgttgtccggcatagtgtctatcagcgcctcttctacaacgggtgtggctatgcatacgagcaccagtagttcagtcaccaagtcttatatcagcagtcagaccaacggcattacgctgatcaactggtgggcgatggctagagtgatctttgaggtgatgcttgttgtggtgggcatgatcatcttaatctcatactgtattaggtag

SEQ ID NO: 124495 - DNA, 237 bp, Artificial Sequence
  derived and/or modified sequence
atgtatgggaaaattatatttgtgctgttgttgagtgggattgtgagtatctctgcctcttcaacaaccggcgtggccatgcacacatccacttcttctagtgtaaccaagagctacatctcatctcagacaaatggcataacacttatcaactggtgggctatggcaagagtcatcttcgaggtaatgctagttgttgtgggtatgatcatcctcatctcctattgtatcaggtag

SEQ ID NO: 124496 - DNA, 180 bp, Artificial Sequence
  derived and/or modified sequence
atgtacgggaagatcatattcgtgctcctccttagtggtatcgtaagcatttcagcctcatcaaccactggtgtggccatgcacacgagtacgagctccagtgtcactaagtcttatatttcaagtcagacgaacggctgcgtgatcggtaacataatttgtagcgacaaaagtaagtag

SEQ ID NO: 124497 - DNA, 1684 bp, Artificial Sequence
  derived and/or modified sequence
gtctttggtagtttttttgcactaacttcaggagccagctcgtgatctcaggatgtatggaaaaataatctttgtattactattgtcaggaattgtgagcatatcagcatcaagtaccactggtgtggcaatgcacacttcaacctcttcttcagtcacaaagagttacatctcatcacagacaaatgggataacactcattaattggtgggcgatggctcgtgttatttttgaggtgatgcttgttgttgttggaatgatcatcttaatttcttactgtattcgatgactgataaaggttttcatgcctctgggattgagattagaggaagaaagcaaagaaaggacatttttttacttcactgttcatggtgtaattgtgtgcctgacggctgtagctactaacttggcttacgttgactggctactaagggactctaggagtcagaaactaaatgctgagtctctcaaaggcgtagagagaatttcagagggccttaccatgacatgaggattaaactccagttctgcccgattctcatcacgaaatccttatcccatgcctcattgtgtttggtgtccccttgcctaggggacagtcctcctgggtaagatcagcaagataactcttcagtcacattccatttgatactttgaatactctgaggtccttacccaccaaatggatggaattcagctgctcaatcactgcctttctcagaactcggttgtccaaccacaattccctttcccttaggatagggctatattggcaaaatgccgcccgaacagactgctgacagtaaaccaaatattagtttctctcaccttcttgaaggcatttacagtctttgtaagcttttctcctagattttccctttcctgttcctgcttagattctaagaatgaagtgcatccttctccttttcttcattaggtgaagtgggatttacccattaccatatattcaccaccaggtcactgacgagagactccagtgaatcgctttccctctgcattcctctccttgtacagactagagggtcacattgtgtaaagcctaacatagccctgcaaagagatctggccccagcagtgaacacaaactcagtaattctctttagagtgaggtggtaatcagtgcctcttggtttcagccgtggtcctagtggctacttatggaagaataggaatagttccacaacatcctgtaacattggcttacctgtatattatatgccacccgtaaccataaaaacaccaggatttaggttccttgaaggtaatgactatgggtccctctctgtggaagaatactgaatagaagagagaaatcactcaatatgtggaatgactgatatggtttggctgtgttcccactcaaatctcatcttgaattgtagttccaataatccccacatgtcatgggaggaacccagtgggaggtacttgaatcattgcggtggtttcccctgtgctattctcatgatagtgagtaaattctcacataatctgatagttttataaaggagcttcccccttcactcagctctcattcttctccttcctgccactatgtaagaaagatgtgtttgtttcccctttggtcatgattgtaagtatcctgagaccttcccagccatgcaaaactgtagatcaataaaacctctttcctttataaatt

SEQ ID NO: 124498 - DNA, 499 bp, Artificial Sequence
  derived and/or modified sequence
agttgtctttggtagtttttttgcactaacttcaggagccagctcgtgatctcaggatgtatggaaaaataatctttgtattactattgtcaggaattgtgagcatatcagcatcaagtaccactggtgtggcaatgcacacttcaacctcttcttcagtcacaaagagttacatctcatcacagacaaatgggataacactcattaattggtgggcgatggctcgtgttatttttgaggtgatgcttgttgttgttggaatgatcatcttaatttcttactgtattcgatgactgataaaggcatgaggatgtggcctgcatgctgcctgatcttgcctagaaccagctgcacctgctgttctcttgcttatgcaaactggctgcacctgctattcctttgcttatgccccaacccttggctatcctaactccctgttctcctgcctattactgtattctctacttctaaataaaaataaaacaaaatacaaattatt

SEQ ID NO: 124499 - DNA, 1624 bp, Artificial Sequence
  derived and/or modified sequence
cgtgatctcaggatgtatggaaaaataatctttgtattactattgtcaggaattgtgagcatatcagcatcaagtaccactggtgtggcaatgcacacttcaacctcttcttcagtcacaaagagttacatctcatcacagacaaatggttgtgttattggtaacataatttgctctgacaaaagcaaataaaggaaattttagacctttattattcaactggataaaactgaaggttcagaagtgattgcaaatattgccaaccaggttttcatgcctctgggattgagattagaggaagaaagcaaagaaaggacatttttttacttcactgttcatggtgtaattgtgtgcctgacggctgtagctactaacttggcttacgttgactggctactaagggactctaggagtcagaaactaaatgctgagtctctcaaaggcgtagagagaatttcagagggccttaccatgacatgaggattaaactccagttctgcccgattctcatcacgaaatccttatcccatgcctcattgtgtttggtgtccccttgcctaggggacagtcctcctgggtaagatcagcaagataactcttcagtcacattccatttgatactttgaatactctgaggtccttacccaccaaatggatggaattcagctgctcaatcactgcctttctcagaactcggttgtccaaccacaattccctttcccttaggatagggctatattggcaaaatgccgcccgaacagactgctgacagtaaaccaaatattagtttctctcaccttcttgaaggcatttacagtctttgtaagcttttctcctagattttccctttcctgttcctgcttagattctaagaatgaagtgcatccttctccttttcttcattaggtgaagtgggatttacccattaccatatattcaccaccaggtcactgacgagagactccagtgaatcgctttccctctgcattcctctccttgtacagactagagggtcacattgtgtaaagcctaacatagccctgcaaagagatctggccccagcagtgaacacaaactcagtaattctctttagagtgaggtggtaatcagtgcctcttggtttcagccgtggtcctagtggctacttatggaagaataggaatagttccacaacatcctgtaacattggcttacctgtatattatatgccacccgtaaccataaaaacaccaggatttaggttccttgaaggtaatgactatgggtccctctctgtggaagaatactgaatagaagagagaaatcactcaatatgtggaatgactgatatggtttggctgtgttcccactcaaatctcatcttgaattgtagttccaataatccccacatgtcatgggaggaacccagtgggaggtacttgaatcattgcggtggtttcccctgtgctattctcatgatagtgagtaaattctcacataatctgatagttttataaaggagcttcccccttcactcagctctcattcttctccttcctgccactatgtaagaaagatgtgtttgtttcccctttggtcatgattgtaagtatcctgagaccttcccagccatgcaaaactgtag

SEQ ID NO: 124500 - DNA, 237 bp, Artificial Sequence
  derived and/or modified sequence
atgtatggcaagatcatctttgtgctgctgctgagcggcatcgtgtccatcagcgccagcagcaccactggagtggccatgcacaccagcaccagcagctctgtgaccaagagctacatcagcagccagaccaacggcatcaccctcatcaactggtgggccatggcccgggtcatctttgaggtgatgctggtggtggtgggcatgatcatcctgatctcctactgcatcagatag

SEQ ID NO: 124501 - DNA, 180 bp, Artificial Sequence
  derived and/or modified sequence
atgtatggcaagatcatctttgtgctgctgctgagcggcatcgtgtccatcagcgccagcagcaccactggagtggccatgcacaccagcaccagcagctctgtgaccaagagctacatcagcagccagaccaacggctgtgtgattggcaacatcatctgcagcgacaagagcaagtag

SEQ ID NO: 124502 - DNA, 237 bp, Artificial Sequence
  derived and/or modified sequence
atgtacggcaagatcatcttcgtgctgctgctgagcggcatcgtgtccatttctgcctcctctacaaccggagtggcaatgcatacttccacaagtagctccgtcaccaagtcctacatctcttcccagacgaatgggataacactgatcaattggtgggccatggcacgtgttatctttgaagtcatgctggtggttgtcggtatgattatactcattagttattgcatcagatag

SEQ ID NO: 124503 - DNA, 237 bp, Artificial Sequence
  derived and/or modified sequence
atgtacggcaagatcatcttcgtgctgctgctgagcggcatcgtgagcatatcggcctcgtcaacaacgggcgttgccatgcatactagcacctcatcaagtgtgacaaaaagctacatctcctctcagacaaatgggattacgttgattaattggtgggcgatggcaagggtaatttttgaggtcatgttagtggtagttggcatgattatcctgatctcctactgcatcaggtag

SEQ ID NO: 124504 - DNA, 180 bp, Artificial Sequence
  derived and/or modified sequence
atgtacggcaagatcatcttcgtgctgctgctgagcggcatcgtgtccattagtgcttcaagcaccactggcgttgcgatgcatacctccacaagcagttccgtcaccaaatcctacatatcctcacaaaccaacgggtgcgtgatcggtaacattatttgctcagataagtcaaagtag

SEQ ID NO: 124505 - DNA, 237 bp, Artificial Sequence
  derived and/or modified sequence
atgtacggcaagattattttcgtgctgctgctctcaggaatagtctcaataagcgcaagctcaacaaccggtgtggcgatgcatacaagcacttcttcatccgttactaagtcttatatctcctcacaaactaacggcatcacccttattaattggtgggctatggccagagtgattttcgaagtgatgttagtagttgtcggtatgatcatcctgatcagttactgtattaggtag

SEQ ID NO: 124506 - DNA, 237 bp, Artificial Sequence
  derived and/or modified sequence
atgtacggaaagatcatctttgtcctcttgctgtcaggaatagtatctatcagcgcctcctccactactggagtggcaatgcacaccagtacctcgagttcagtgaccaaatcatatattagctcccagaccaatggaattacactgataaactggtgggccatggccagggtgatattcgaggtgatgctcgtagtcgtggggatgataattttgatatcatattgcattaggtag

SEQ ID NO: 124507 - DNA, 180 bp, Artificial Sequence
  derived and/or modified sequence
atgtatgggaaaattatttttgtgctattactctccgggattgtttccatttccgcctcttcaaccaccggagttgccatgcacacctccacttcttctagcgtcaccaaatcttatatttcttctcagacgaacggatgtgtgattgggaatattatctgtagcgacaaatctaagtag

SEQ ID NO: 124508 - DNA, 237 bp, Artificial Sequence
  derived and/or modified sequence
atgtacggcaagatcatcttcgtgctgctgctgagcggcatcgtgagcatcagcgccagcagcaccaccggcgtggccatgcacaccagcaccagcagcagcgtgaccaagagctacatcagcagccagaccaacggcatcaccctgatcaactggtgggccatggccagagtgatcttcgaggtgatgctggtggtggtgggcatgatcatcctgatcagctactgcatcagatag

SEQ ID NO: 124509 - DNA, 180 bp, Artificial Sequence
  derived and/or modified sequence
atgtacggcaagatcatcttcgtgctgctgctgagcggcatcgtgagcatcagcgccagcagcaccaccggcgtggccatgcacaccagcaccagcagcagcgtgaccaagagctacatcagcagccagaccaacggctgcgtgatcggcaacatcatctgcagcgacaagagcaagtag

SEQ ID NO: 124510 - protein, 737 aa, Artificial Sequence
  derived and/or modified sequence
MPLNRTLSMSSLPGLEDWEDEFDLENAVLFEVAWEVANKVGGIYTVLQTKAKVTGDEWGDNYFLVGPYTEQGVRTQVELLEAPTPALKRTLDSMNSKGCKVYFGRWLIEGGPLVVLLDVGASAWALERWKGELWDTCNIGVPWYDREANDAVLFGFLTTWFLGEFLAQSEEKPHVVAHFHEWLAGVGLCLCRARRLPVATIFTTHATLLGRYLCAGAVDFYNNLENFNVDKEAGERQIYHRYCMERAAAHCAHVFTTVSQITAIEAQHLLKRKPDIVTPNGLNVKKFSAMHEFQNLHAQSKARIQEFVRGHFYGHLDFNLDKTLYFFIAGRYEFSNKGADVFLEALARLNYLLRVNGSEQTVVAFFIMPARTNNFNVETLKGQAVRKQLWDTANTVKEKFGRKLYESLLVGSLPDMNKMLDKEDFTMMKRAIFATQRQSFPPVCTHNMLDDSSDPILTTIRRIGLFNSSADRVKVIFHPEFLSSTSPLLPVDYEEFVRGCHLGVFPSYYEPWGYTPAECTVMGIPSISTNLSGFGCFMEEHIADPSAYGIYILDRRFRSLDDSCSQLTSFLYSFCQQSRRQRIIQRNRTERLSDLLDWKYLGRYYMSARHMALSKAFPEHFTYEPNEADAAQGYRYPRPASVPPSPSLSRHSSPHQSEDEEDPRNGPLEEDGERYDEDEEAAKDRRNIRAPEWPRRASCTSSTSGSKRNSVDTATSSSLSTPSEPLSPTSSLGEERN

SEQ ID NO: 124511 - protein, 235 aa, Artificial Sequence
  derived and/or modified sequence
MNSTWRTQCSSKWPGRWLTRVYFGRWLIEGGPLVVLLDVGASAWALERWKGELWDTCNIGVPWYDREANDAVLFGFLTTWFLGEFLAQSEEKPHVVAHFHEWLAGVGLCLCRARRLPVATIFTTHATLLGRYLCAGAVDFYNNLENFNVDKEAGERQIYHRYCMERAAAHCAHVFTTVSQITAIEAQHLLKRKPGIWTSTWTRPYTSLSPAAMSSPTRVLTSSWRHWLGSTICSE

SEQ ID NO: 124512 - protein, 657 aa, Artificial Sequence
  derived and/or modified sequence
MNSTWRTQCSSKWPGRWLTRVYFGRWLIEGGPLVVLLDVGASAWALERWKGELWDTCNIGVPWYDREANDAVLFGFLTTWFLGEFLAQSEEKPHVVAHFHEWLAGVGLCLCRARRLPVATIFTTHATLLGRYLCAGAVDFYNNLENFNVDKEAGERQIYHRYCMERAAAHCAHVFTTVSQITAIEAQHLLKRKPDIVTPNGLNVKKFSAMHEFQNLHAQSKARIQEFVRGHFYGHLDFNLDKTLYFFIAGRYEFSNKGADVFLEALARLNYLLRVNGSEQTVVAFFIMPARTNNFNVETLKGQAVRKQLWDTANTVKEKFGRKLYESLLVGSLPDMNKMLDKEDFTMMKRAIFATQRQSFPPVCTHNMLDDSSDPILTTIRRIGLFNSSADRVKVIFHPEFLSSTSPLLPVDYEEFVRGCHLGVFPSYYEPWGYTPAECTVMGIPSISTNLSGFGCFMEEHIADPSAYGIYILDRRFRSLDDSCSQLTSFLYSFCQQSRRQRIIQRNRTERLSDLLDWKYLGRYYMSARHMALSKAFPEHFTYEPNEADAAQGYRYPRPASVPPSPSLSRHSSPHQSEDEEDPRNGPLEEDGERYDEDEEAAKDRRNIRAPEWPRRASCTSSTSGSKRNSVDTATSSSLSTPSEPLSPTSSLGEERN

SEQ ID NO: 124513 - DNA, 2214 bp, Artificial Sequence
  derived and/or modified sequence
atgcctttaaatagaacactgtctatgtcttccctgcctgggctcgaagactgggaagacgagtttgacctagaaaacgctgtgttattcgaggtggcttgggaagtagctaacaaagttggcggaatatacacagtgttgcaaactaaggccaaggtgacaggagatgagtggggagataactacttccttgtcggcccttatacggaacagggtgtgcgcactcaggtcgagctactcgaggctccgaccccagctctcaaaaggaccctggacagcatgaattccaaagggtgtaaggtgtattttggaagatggctgattgaggggggacccttggtcgttctcctagatgttggcgcatccgcctgggctttagagcggtggaagggcgagctgtgggacacttgtaatattggggtgccttggtatgatcgcgaagccaacgatgccgttttattcggcttccttacaacatggttcctgggtgaattcctggctcagagcgaagagaaaccccatgtggttgctcacttccatgagtggctagcgggcgttggtttgtgtctctgccgcgccaggcggctgccggtagcaaccatcttcaccacgcatgcaaccctgttaggacgttacctgtgtgccggggcagtcgacttctataacaacttagagaattttaatgttgataaagaggcaggcgaacggcagatatatcataggtattgtatggagcgcgccgcggcccactgtgcccacgtgtttaccactgtaagccagataacggccatagaggcccagcacttactgaaacgtaaaccggacatcgtaacaccaaatgggcttaacgtgaagaaattttcagctatgcatgaatttcagaacctgcatgcacaaagtaaggcacgaatccaggagtttgtgaggggccacttttacggacacctggattttaaccttgacaaaaccctgtatttcttcatcgccggacggtatgagttcagcaacaagggtgctgatgttttcctggaagccctcgctcgcctgaattatctcctgcgagtgaatggaagcgagcagacagtggtggcttttttcattatgcccgcgcgcacaaataacttcaatgtggagaccctcaaaggacaagcggtgagaaaacaactatgggatacagcaaatactgtgaaggagaaattcggtcggaagctgtatgagtctctgctggtaggaagcctgccagacatgaacaagatgttggacaaggaagactttaccatgatgaagagagccatcttcgcaacccagcgtcaaagctttccgcctgtttgcacccataatatgctcgacgattcatcagacccaattttgacaactatcagaagaattggcttgttcaatagttctgccgaccgcgtcaaagtcatattccacccagaattcttgagctctacctcaccgttgttgcctgtagactacgaggagttcgtccgtggctgccacctaggtgtgtttccatcttactatgagccgtggggctacactccggccgagtgcacggttatgggaatacccagtatttcaacaaatttgtccggtttcggctgtttcatggaggagcacatcgccgatccaagcgcgtatgggatatacatcctggacaggcggttccgctccctcgatgatagttgttcgcaacttacctctttcctctactctttttgtcagcagagtagacgccaacgcatcatccagcggaaccggaccgaaagattgtctgatctgctagactggaagtatctcggcagatactacatgagcgcgcggcacatggccctgtctaaagccttccccgaacactttacatatgaaccaaacgaggccgacgcggctcagggctacagatatcctcggcctgcgtctgtgccccccagcccctcactgtcccggcattcttccccgcatcagtctgaagacgaggaggatcctagaaacgggcctctggaggaggatggcgaaagatacgatgaggatgaggaggcagctaaagaccggagaaacattcgagccccagaatggcctagacgagcatcctgcacttcaagtaccagcgggtcaaagcggaacagcgtggatacggccacctccagttctctttccaccccttctgagccgctgagcccaacaagctctcttggagaggagcgaaattag

SEQ ID NO: 124514 - DNA, 708 bp, Artificial Sequence
  derived and/or modified sequence
atgaactccacttggagaacccagtgttcctccaagtggccaggcagatggctgactcgagtgtactttggtagatggctgatcgagggaggccccctcgtggtccttctggacgtcggtgcaagcgcttgggctctcgagcgctggaagggagaactgtgggacacgtgtaacattggagtcccttggtatgacagagaagctaacgacgccgtcttgtttgggtttctgactacttggttcctgggcgaatttctagctcagtctgaggagaagccccacgtggtcgctcattttcacgagtggctagccggagtggggttgtgtctgtgtagggctcgacgtctgcccgtggcgactatatttactacccatgctacccttctggggagatatctgtgcgcaggcgctgtcgacttctacaataacttggagaacttcaacgtcgataaggaggccggggagagacagatctatcacaggtactgcatggagagggctgctgcccactgcgctcacgtattcaccacagtgtcccagatcacagctatagaagctcagcatctcctgaaaaggaaaccggggatctggaccagtacttggactaggccgtatacttcactgagtcccgccgccatgagttcgccaactagggtgctgacctcctcctggaggcactggctgggaagcactatctgctctgagtag

SEQ ID NO: 124515 - DNA, 1974 bp, Artificial Sequence
  derived and/or modified sequence
atgaattccacctggcggacacaatgcagctccaaatggccgggcaggtggttaacacgcgtttacttcggtcgttggctgatcgaagggggccccttggtggtattactggacgttggtgcgagcgcatgggcactggagcggtggaaaggtgagctgtgggatacttgcaacatcggggtcccatggtatgaccgtgaagccaatgacgccgtgctgttcggattcttgactacctggttcctgggcgagttccttgcacagagcgaggaaaagcctcacgtcgtggcccacttccatgagtggctcgctggagttgggttgtgcctttgtagggcccgccgactacctgtggcaacaatcttcactacgcatgccaccctactaggacgatatctctgtgccggagctgtggatttttataataatttagaaaattttaatgtggataaagaggcaggagagcgacaaatataccaccgatactgcatggaacgcgctgccgcccattgtgcccatgtttttactactgtgtcccagattactgctattgaagcccaacacctgctgaagcgcaaacccgacattgttactccaaacgggctaaatgtgaaaaaattctctgctatgcacgagttccagaacctacatgcacagagcaaggccagaattcaggaattcgtccggggccatttctatggtcacctcgacttcaacctcgacaagacactgtatttcttcatagcaggaaggtatgaattctccaataaaggcgccgatgtattccttgaagctcttgcccgccttaattacttactgcgggtgaatgggagcgaacagactgtggtggctttcttcatcatgccagctaggaccaacaacttcaatgtcgaaaccctgaagggtcaggccgtgagaaagcaactttgggacacagcaaacacagtgaaggagaaatttggcaggaagttgtatgaatcgctgctggtgggttctttgccagacatgaataaaatgctcgacaaggaggattttactatgatgaaacgggccatcttcgctactcagaggcaatcctttccacctgtgtgcacccataatatgctagacgactcttcagaccccattctaacaactatcaggaggataggactgtttaattcctctgcagatagagtgaaggtcatctttcaccccgagtttctttcttcaacatccccgctgctacccgtagattatgaggagtttgtgcgcggctgccacctgggagtcttcccctcctattatgaaccttgggggtacaccccagctgagtgcactgtcatgggaataccaagcatcagcaccaacctgagtggtttcggatgtttcatggaggagcatattgccgatccaagcgcttacgggatttacatcttagatcgtcgatttcggagcctggacgactcctgcagccagcttacttcgttcttatacagcttctgccagcagtctcggagacagcgaattattcaacggaaccgcacagagcgcctctctgatctgctggattggaagtaccttggacgatactatatgagtgcacgacacatggcactcagtaaggcttttcccgagcacttcacctatgagcctaacgaggctgacgccgctcagggataccgttaccccaggcctgccagtgtacctccttccccatctctttctagacactcctcaccacatcagagcgaagatgaagaggaccctaggaatggacccctggaggaagatggtgagcgttacgacgaagacgaggaggccgctaaagatcgccgcaatatcagagcccctgagtggcccagaagagcctcttgcacatccagcacaagtggatctaaacggaactctgttgacactgcaacctccagttctttgagtaccccctcggagccgctgagtcctacatcctcccttggagaggagcgaaactag

SEQ ID NO: 124516 - DNA, 3574 bp, Artificial Sequence
  derived and/or modified sequence
agtgacgctgcggcctccttctgcctaggtcccaacgcttcggggcaggggtgcggtcttgcaataggaagccgagcgtcttgcaagcttcccgtcgggcaccagctactcggccccgcaccctacctggtgcattccctagacacctccggggtccctacctggagatccccggagccccccttcctgcgccagccatgcctttaaaccgcactttgtccatgtcctcactgccaggactggaggactgggaggatgaattcgacctggagaacgcagtgctcttcgaagtggcctgggaggtggctaacaaggtgggtggcatctacacggtgctgcagacgaaggcgaaggtgacaggggacgaatggggcgacaactacttcctggtggggccgtacacggagcagggcgtgaggacccaggtggaactgctggaggcccccaccccggccctgaagaggacactggattccatgaacagcaagggctgcaaggtgtatttcgggcgctggctgatcgagggaggccctctggtggtgctcctggacgtgggtgcctcagcttgggccctggagcgctggaagggagagctctgggatacctgcaacatcggagtgccgtggtacgaccgcgaggccaacgacgctgtcctctttggctttctgaccacctggttcctgggtgagttcctggcacagagtgaggagaagccacatgtggttgctcacttccatgagtggttggcaggcgttggactctgcctgtgtcgtgcccggcgactgcctgtagcaaccatcttcaccacccatgccacgctgctggggcgctacctgtgtgccggtgccgtggacttctacaacaacctggagaacttcaacgtggacaaggaagcaggggagaggcagatctaccaccgatactgcatggaaagggcggcagcccactgcgctcacgtcttcactactgtgtcccagatcaccgccatcgaggcacagcacttgctcaagaggaaaccagatattgtgacccccaatgggctgaatgtgaagaagttttctgccatgcatgagttccagaacctccatgctcagagcaaggctcgaatccaggagtttgtgcggggccatttttatgggcatctggacttcaacttggacaagaccttatacttctttatcgccggccgctatgagttctccaacaagggtgctgacgtcttcctggaggcattggctcggctcaactatctgctcagagtgaacggcagcgagcagacagtggttgccttcttcatcatgccagcgcggaccaacaatttcaacgtggaaaccctcaaaggccaagctgtgcgcaaacagctttgggacacggccaacacggtgaaggaaaagttcgggaggaagctttatgaatccttactggttgggagccttcccgacatgaacaagatgctggataaggaagacttcactatgatgaagagagccatctttgcaacgcagcggcagtctttcccccctgtgtgcacccacaatatgctggatgactcctcagaccccatcctgaccaccatccgccgaatcggcctcttcaatagcagtgccgacagggtgaaggtgattttccacccggagttcctctcctccacaagccccctgctccctgtggactatgaggagtttgtccgtggctgtcaccttggagtcttcccctcctactatgagccttggggctacacaccggctgagtgcacggttatgggaatccccagtatctccaccaatctctccggcttcggctgcttcatggaggaacacatcgcagacccctcagcttacggtatctacattcttgaccggcggttccgcagcctggatgattcctgctcgcagctcacctccttcctctacagtttctgtcagcagagccggcggcagcgtatcatccagcggaaccgcacggagcgcctctccgaccttctggactggaaatacctaggccggtactatatgtctgcgcgccacatggcgctgtccaaggcctttccagagcacttcacctacgagcccaacgaggcggatgcggcccaggggtaccgctacccacggccagcctcggtgccaccgtcgccctcgctgtcacgacactccagcccgcaccagagtgaggacgaggaggatccccggaacgggccgctggaggaagacggcgagcgctacgatgaggacgaggaggccgccaaggaccggcgcaacatccgtgcaccagagtggccgcgccgagcgtcctgcacctcctccaccagcggcagcaagcgcaactctgtggacacggccacctccagctcactcagcaccccgagcgagcccctcagccccaccagctccctgggcgaggagcgtaactaagtccgccccaccacactccccgcctgtcctgcctctctgctccagagagaggatgcagaggggtgctgctcctaaacccccgctccagatctgcactgggtgtggccccgcagtgcccccacccagtccgccaaacactccaccccctccagctccagtttccaagttcctgcactccagaatccacaaagccgtgcctttctctggctccagaatatgcataatcagcgccctggagtcccctgggcctggaccgcttcccagaggccaggaatctgccattactctgcggtggtgccagaggttttaggaaacctggcatggtgctttcaggtctggggcttttagagccccccgtgtggcttacaaattctacagcatacagagcaggccacgctcaggcccggcatgcgggccaccaagttctggaaaccacgtggtgtccctgcgaatggggcgatcaagtccagagccggggcactttcagagtttgaaggtaactgagagcagatggtcctccatttcaactccagaagtggggctctgggagggatgttctagccctccctggcatgtcagagccaggctctgcctggaggatccctccatccggctcctgtcatcccctacactttggccaagcaagaggtggtagaaccacttggctgctcattccttctggaggacacacagtctcagtccagatgccttcctgtctttctggccctttctggaccagatcctactcttcctttctaaatctgagatctccctccagggaatccgcctgcagaggacagagctggctgtcttcccccacccctaacctggcttattcccaactgctctgcccactgtgaaaccactaggttctaggtcctggcttctagatctggaaccttaccacgttactgcatactgatccctttcccatgatccagaactgaggtcactgggttctagaacccccacatttacctcgaggctcttccatccccaaactgtgccctgccttcagctttggtgaaagggagggcccctcatgtgtgctgtgctgtgtctgcaccgcttggtttgcagttgagaggggagggcaggaggggtgtgattggagtgtgtccggagatgagatgaaaaaaatacatctatatttaagaatccca

SEQ ID NO: 124517 - DNA, 1276 bp, Artificial Sequence
  derived and/or modified sequence
agtgacgctgcggcctccttctgcctaggtcccaacgcttcggggcaggggtgcggtcttgcaataggaagccgagcgtcttgcaagcttcccgtcgggcaccagctactcggccccgcaccctacctggtgcattccctagacacctccggggtccctacctggagatccccggagccccccttcctgcgccagccatgcctttaaaccgcactttgtccatgtcctcactgccaggactggaggactgggaggatgaattcgacctggagaacgcagtgctcttcgaagtggcctgggaggtggctaacaagggtgtatttcgggcgctggctgatcgagggaggccctctggtggtgctcctggacgtgggtgcctcagcttgggccctggagcgctggaagggagagctctgggatacctgcaacatcggagtgccgtggtacgaccgcgaggccaacgacgctgtcctctttggctttctgaccacctggttcctgggtgagttcctggcacagagtgaggagaagccacatgtggttgctcacttccatgagtggttggcaggcgttggactctgcctgtgtcgtgcccggcgactgcctgtagcaaccatcttcaccacccatgccacgctgctggggcgctacctgtgtgccggtgccgtggacttctacaacaacctggagaacttcaacgtggacaaggaagcaggggagaggcagatctaccaccgatactgcatggaaagggcggcagcccactgcgctcacgtcttcactactgtgtcccagatcaccgccatcgaggcacagcacttgctcaagaggaaaccaggcatctggacttcaacttggacaagaccttatacttctttatcgccggccgctatgagttctccaacaagggtgctgacgtcttcctggaggcattggctcggctcaactatctgctcagagtgaacggcagcgagcagacagtggttgccttcttcatcatgccagcgcggaccaacaatttcaacgtggaaaccctcaaaggccaagctgtgcgcaaacagctttgggacacggccaacacggtgaaggaaaagttcgggaggaagctttatgaatccttactggttgggagccttcccgacatgaacaagatgctggataaggaagacttcactatgatgaagagagccatctttgcaacgcagcggcagtctttcccccctgtgtgcacccacaatatgctggatgactcctcagaccccatcctgaccaccat

SEQ ID NO: 124518 - DNA, 2561 bp, Artificial Sequence
  derived and/or modified sequence
agtgacgctgcggcctccttctgcctaggtcccaacgcttcggggcaggggtgcggtcttgcaataggaagccgagcgtcttgcaagcttcccgtcgggcaccagctactcggccccgcaccctacctggtgcattccctagacacctccggggtccctacctggagatccccggagccccccttcctgcgccagccatgcctttaaaccgcactttgtccatgtcctcactgccaggactggaggactgggaggatgaattcgacctggagaacgcagtgctcttcgaagtggcctgggaggtggctaacaagggtgtatttcgggcgctggctgatcgagggaggccctctggtggtgctcctggacgtgggtgcctcagcttgggccctggagcgctggaagggagagctctgggatacctgcaacatcggagtgccgtggtacgaccgcgaggccaacgacgctgtcctctttggctttctgaccacctggttcctgggtgagttcctggcacagagtgaggagaagccacatgtggttgctcacttccatgagtggttggcaggcgttggactctgcctgtgtcgtgcccggcgactgcctgtagcaaccatcttcaccacccatgccacgctgctggggcgctacctgtgtgccggtgccgtggacttctacaacaacctggagaacttcaacgtggacaaggaagcaggggagaggcagatctaccaccgatactgcatggaaagggcggcagcccactgcgctcacgtcttcactactgtgtcccagatcaccgccatcgaggcacagcacttgctcaagaggaaaccagatattgtgacccccaatgggctgaatgtgaagaagttttctgccatgcatgagttccagaacctccatgctcagagcaaggctcgaatccaggagtttgtgcggggccatttttatgggcatctggacttcaacttggacaagaccttatacttctttatcgccggccgctatgagttctccaacaagggtgctgacgtcttcctggaggcattggctcggctcaactatctgctcagagtgaacggcagcgagcagacagtggttgccttcttcatcatgccagcgcggaccaacaatttcaacgtggaaaccctcaaaggccaagctgtgcgcaaacagctttgggacacggccaacacggtgaaggaaaagttcgggaggaagctttatgaatccttactggttgggagccttcccgacatgaacaagatgctggataaggaagacttcactatgatgaagagagccatctttgcaacgcagcggcagtctttcccccctgtgtgcacccacaatatgctggatgactcctcagaccccatcctgaccaccatccgccgaatcggcctcttcaatagcagtgccgacagggtgaaggtgattttccacccggagttcctctcctccacaagccccctgctccctgtggactatgaggagtttgtccgtggctgtcaccttggagtcttcccctcctactatgagccttggggctacacaccggctgagtgcacggttatgggaatccccagtatctccaccaatctctccggcttcggctgcttcatggaggaacacatcgcagacccctcagcttacggtatctacattcttgaccggcggttccgcagcctggatgattcctgctcgcagctcacctccttcctctacagtttctgtcagcagagccggcggcagcgtatcatccagcggaaccgcacggagcgcctctccgaccttctggactggaaatacctaggccggtactatatgtctgcgcgccacatggcgctgtccaaggcctttccagagcacttcacctacgagcccaacgaggcggatgcggcccaggggtaccgctacccacggccagcctcggtgccaccgtcgccctcgctgtcacgacactccagcccgcaccagagtgaggacgaggaggatccccggaacgggccgctggaggaagacggcgagcgctacgatgaggacgaggaggccgccaaggaccggcgcaacatccgtgcaccagagtggccgcgccgagcgtcctgcacctcctccaccagcggcagcaagcgcaactctgtggacacggccacctccagctcactcagcaccccgagcgagcccctcagccccaccagctccctgggcgaggagcgtaactaagtccgccccaccacactccccgcctgtcctgcctctctgctccagagagaggatgcagaggggtgctgctcctaaacccccgctccagatctgcactgggtgtggccccgcagtgcccccacccagtccgccaaacactccaccccctccagctccagtttccaagttcctgcactccagaatccacaaagccgtgcctttctctggctccagaatatgcataatcagcgccctggagtcccctgggcctggaccgcttcccagaggccaggaatctgccattactctgcggtggtgccagaggttttaggaaacctggcatggtgctttca

SEQ ID NO: 124519 - DNA, 2214 bp, Artificial Sequence
  derived and/or modified sequence
atgcccctgaacagaaccctgtccatgagcagcctgcccggcctggaggactgggaggatgaatttgacctggagaatgctgtgctgtttgaggtggcctgggaggtggccaacaaggtgggcggcatctacacagtgctgcagaccaaggccaaggtgactggagatgagtggggagacaactacttcctggtgggcccctacacagagcagggcgtgaggacccaggtggagctgctggaggcccccaccccagccctgaagaggaccctggacagcatgaacagcaagggctgcaaggtgtacttcggccgctggctgattgagggcggccccctggtggtgctgctggatgtgggcgccagcgcctgggccctggagcgctggaagggggagctgtgggacacctgcaacattggagtgccctggtatgaccgggaggccaatgatgctgtgctgtttggcttcctgaccacctggttcctgggggagttcctggcccagagcgaggagaagccccacgtggtggcccacttccacgagtggctggccggcgtgggcctgtgcctgtgccgggcccggcggctgcctgtggccaccatcttcaccacccacgccaccctgctgggccgctacctgtgtgccggggctgtggacttctacaacaacctggagaacttcaacgtggacaaggaggccggggagcggcagatctaccaccgctactgcatggagagagctgctgcccactgtgcccacgtgttcaccaccgtgtcccagatcacagccatcgaggcccagcacctgctgaagaggaagccagacatcgtgacccccaacggcctgaatgtgaagaagttcagcgccatgcatgagttccagaacctgcacgcccagagcaaggcccgcatccaggagtttgtgcggggccacttctacggccacctggacttcaacctggacaagaccctgtacttcttcatcgccggccgctatgagttcagcaacaagggagcagatgtgttcctggaggccctggcccggctgaactacctgctgcgggtgaatggcagcgagcagacagtggtggccttcttcatcatgcctgcccggaccaacaacttcaacgtggagaccctgaagggccaggccgtgaggaagcagctgtgggacacagccaacacagtgaaggagaagtttggaaggaagctgtatgagagcctgctggtgggcagcctgcctgacatgaacaagatgctggacaaggaggacttcaccatgatgaagagggccatctttgccacccagaggcagagcttcccccctgtgtgcacccacaacatgctggatgacagcagtgaccccatcctgaccaccatcagaagaattggcctcttcaacagcagcgctgacagagtgaaggtgatcttccaccctgagttcctgagcagcaccagccccctgctgcctgtggactatgaggagtttgtgcggggctgccacctgggcgtcttccccagctactatgagccctggggctacaccccagctgagtgcaccgtgatgggcatccccagcatcagcaccaacctgagcggcttcggctgcttcatggaggagcacatcgctgaccccagcgcctacggcatctacatcctggaccggcgcttccgcagcctggatgacagctgcagccagctgaccagcttcctgtacagcttctgccagcagagccggcggcagaggatcatccagaggaacagaacagagcggctgagtgacctgctggactggaagtacctgggccgctactacatgtctgcccggcacatggccctgagcaaggccttccctgagcacttcacctatgagcccaatgaagcagatgctgcccagggctaccgctaccccaggcctgcctctgtgccccccagccccagcctgagccgccacagcagcccccaccagagtgaagatgaggaggaccccagaaatggccccctggaggaggatggagagagatatgatgaagatgaggaggccgccaaggacagaagaaacatccgggcccctgagtggccccggcgggccagctgcaccagcagcaccagcggcagcaagaggaacagcgtggacacagccaccagcagcagcctgagcaccccatctgagcccctgagccccaccagcagcctgggggaggagaggaactag

SEQ ID NO: 124520 - DNA, 708 bp, Artificial Sequence
  derived and/or modified sequence
atgaacagcacctggaggacccagtgcagcagcaagtggccaggccgctggctgaccagggtgtacttcggccgctggctgattgagggcggccccctggtggtgctgctggatgtgggcgccagcgcctgggccctggagcgctggaagggggagctgtgggacacctgcaacattggagtgccctggtatgaccgggaggccaatgatgctgtgctgtttggcttcctgaccacctggttcctgggggagttcctggcccagagcgaggagaagccccacgtggtggcccacttccacgagtggctggccggcgtgggcctgtgcctgtgccgggcccggcggctgcctgtggccaccatcttcaccacccacgccaccctgctgggccgctacctgtgtgccggggctgtggacttctacaacaacctggagaacttcaacgtggacaaggaggccggggagcggcagatctaccaccgctactgcatggagagagctgctgcccactgtgcccacgtgttcaccaccgtgtcccagatcacagccatcgaggcccagcacctgctgaagaggaagccaggcatctggaccagcacctggacccggccctacaccagcctgagccctgctgccatgagcagccccaccagggtgctgaccagctcctggaggcactggctgggcagcaccatctgcagcgagtag

SEQ ID NO: 124521 - DNA, 1974 bp, Artificial Sequence
  derived and/or modified sequence
atgaacagcacctggaggacccagtgcagcagcaagtggccaggccgctggctgaccagggtgtacttcggccgctggctgattgagggcggccccctggtggtgctgctggatgtgggcgccagcgcctgggccctggagcgctggaagggggagctgtgggacacctgcaacattggagtgccctggtatgaccgggaggccaatgatgctgtgctgtttggcttcctgaccacctggttcctgggggagttcctggcccagagcgaggagaagccccacgtggtggcccacttccacgagtggctggccggcgtgggcctgtgcctgtgccgggcccggcggctgcctgtggccaccatcttcaccacccacgccaccctgctgggccgctacctgtgtgccggggctgtggacttctacaacaacctggagaacttcaacgtggacaaggaggccggggagcggcagatctaccaccgctactgcatggagagagctgctgcccactgtgcccacgtgttcaccaccgtgtcccagatcacagccatcgaggcccagcacctgctgaagaggaagccagacatcgtgacccccaacggcctgaatgtgaagaagttcagcgccatgcatgagttccagaacctgcacgcccagagcaaggcccgcatccaggagtttgtgcggggccacttctacggccacctggacttcaacctggacaagaccctgtacttcttcatcgccggccgctatgagttcagcaacaagggagcagatgtgttcctggaggccctggcccggctgaactacctgctgcgggtgaatggcagcgagcagacagtggtggccttcttcatcatgcctgcccggaccaacaacttcaacgtggagaccctgaagggccaggccgtgaggaagcagctgtgggacacagccaacacagtgaaggagaagtttggaaggaagctgtatgagagcctgctggtgggcagcctgcctgacatgaacaagatgctggacaaggaggacttcaccatgatgaagagggccatctttgccacccagaggcagagcttcccccctgtgtgcacccacaacatgctggatgacagcagtgaccccatcctgaccaccatcagaagaattggcctcttcaacagcagcgctgacagagtgaaggtgatcttccaccctgagttcctgagcagcaccagccccctgctgcctgtggactatgaggagtttgtgcggggctgccacctgggcgtcttccccagctactatgagccctggggctacaccccagctgagtgcaccgtgatgggcatccccagcatcagcaccaacctgagcggcttcggctgcttcatggaggagcacatcgctgaccccagcgcctacggcatctacatcctggaccggcgcttccgcagcctggatgacagctgcagccagctgaccagcttcctgtacagcttctgccagcagagccggcggcagaggatcatccagaggaacagaacagagcggctgagtgacctgctggactggaagtacctgggccgctactacatgtctgcccggcacatggccctgagcaaggccttccctgagcacttcacctatgagcccaatgaagcagatgctgcccagggctaccgctaccccaggcctgcctctgtgccccccagccccagcctgagccgccacagcagcccccaccagagtgaagatgaggaggaccccagaaatggccccctggaggaggatggagagagatatgatgaagatgaggaggccgccaaggacagaagaaacatccgggcccctgagtggccccggcgggccagctgcaccagcagcaccagcggcagcaagaggaacagcgtggacacagccaccagcagcagcctgagcaccccatctgagcccctgagccccaccagcagcctgggggaggagaggaactag

SEQ ID NO: 124522 - DNA, 2214 bp, Artificial Sequence
  derived and/or modified sequence
atgcccctgaaccggaccctgagcatgagcagcctgcccggcctggaagactgggaggacgaatttgatctagaaaatgccgttctgttcgaagtagcatgggaagtcgcaaacaaggtgggaggaatctatactgtcttacagacaaaagctaaagtaaccggcgacgaatggggagacaactacttcctggtggggccatacacagagcagggcgtgcgcacccaggttgagctgctcgaagcaccaacgccggccttaaaaagaactcttgatagcatgaattcaaagggatgcaaggtgtattttggcaggtggctgattgagggagggccgctggttgtcctgctcgatgttggagcctccgcctgggcccttgaacggtggaaaggggaactgtgggatacttgcaatatcggcgtcccatggtatgatcgcgaggcaaacgatgcggtgctgttcgggttcctgacgacctggttcttaggggagttccttgcccagagcgaagaaaagccacacgttgttgcccactttcacgaatggttggctggtgttgggctgtgtctctgcagagccaggcgacttcccgtggcaaccatcttcaccacacatgccacgctgttgggaaggtatctatgtgcgggcgctgtggacttttacaacaacttggaaaatttcaatgtggacaaagaagccggcgaacgccaaatctatcaccgatactgcatggagagagctgcagcccattgcgcgcatgtgttcaccaccgtctcacagatcacggctattgaagcccaacacctgcttaagcggaagcccgatatcgtcacaccaaacggattgaatgttaagaagttctcggctatgcatgagttccagaacctgcatgcccaatctaaggcccgaatccaggagtttgtccgaggtcacttttacggacatctggactttaatctggataagacattatattttttcatcgcgggccgttacgaattttcaaacaaaggggcagatgtgttccttgaagctcttgcacgactaaattatctgctcagagtaaacggtagtgaacagacggttgtcgcattcttcatcatgcctgctagaacgaataactttaacgtcgagacgctcaaaggacaggccgttcgcaagcagctgtgggatactgccaatacagtgaaagagaaattcggaagaaagctctacgaaagcctgctagtcgggtccctgcccgatatgaataagatgttggacaaggaggatttcacgatgatgaagagagcaatcttcgccacacagcgccagagctttccacccgtctgtactcacaacatgctggacgacagttcagaccctattctgactaccattaggagaatcggcctgtttaattcctctgcggaccgagtgaaggttatctttcatcccgagttcctgagcagtacgtccccactcttgccagtggattacgaggagttcgtgagagggtgccacctgggggtttttccttcctactacgagccatggggctacacccctgccgagtgtacggtgatggggatcccctctatcagcaccaacctgtcaggattcggatgttttatggaggaacatatagccgatccttccgcatacgggatttacatcctcgataggagattccgcagcttggatgatagctgcagtcagctcacgagctttctttactcgttttgccagcagagcagacggcaaaggattatccagcgtaacaggaccgaaaggctgagcgacctgctagattggaagtacctggggaggtactatatgagtgcccggcatatggctttgtctaaagcgttcccagagcacttcacatatgagcccaacgaggccgatgcggctcagggataccgctatccacgcccagccagcgtgcctccgagcccatccttgtcccggcatagtagcccacaccagagcgaggatgaagaagacccaagaaatgggcccctggaagaggatggtgagcgctatgacgaggacgaggaagcagcaaaggacagaagaaatatcagggcacccgagtggcctaggagagcttcatgcacttcctctacgagcggaagtaagagaaattcggtggacaccgccacatcatccagcctgtcgacgccttctgagcccttatcccctacctcctcactgggcgaggaacgaaactag

SEQ ID NO: 124523 - DNA, 708 bp, Artificial Sequence
  derived and/or modified sequence
atgaacagcacctggcggacccagtgcagcagcaagtggcccggcagatggttgacaagagtttactttggtagatggcttattgagggaggaccgctggtggtcttactcgacgttggggccagtgcctgggcgcttgaacggtggaaaggcgagttatgggacacttgcaacataggggtcccatggtacgaccgcgaagctaacgatgcagtcctgtttggttttctcaccacatggttcctcggagagttcttggctcaaagcgaggagaaaccgcatgtggtggcccatttccatgaatggctagctggtgtaggtctgtgtctgtgcagagctcgtcggttgcccgtagccaccatttttactacacatgccactctcctgggacgatacttgtgcgcaggggctgttgatttttataacaacctagagaattttaatgtggataaggaagccggggaacgccagatctaccatcgttactgcatggagcgtgctgctgcgcattgtgcgcacgtttttacgaccgtctcgcagataacagcgatcgaggctcaacacttgttgaagcgcaagcccgggatctggacctctacatggacccgcccctatacatcgctgtctccagcggctatgtcatctcccactcgagtcctcaccagctcctggagacactggctaggctctacaatctgttctgagtag

SEQ ID NO: 124524 - DNA, 1974 bp, Artificial Sequence
  derived and/or modified sequence
atgaacagcacctggcggacccagtgcagcagcaagtggcccggccggtggctgactagagtgtacttcggacgatggttgatcgagggaggccctctagtcgttctgctggatgtcggagccagcgcgtgggctttagaacggtggaaaggtgaactgtgggatacatgcaacatcggagtaccctggtacgatcgcgaggcaaatgacgccgtgctcttcggcttcctgactacctggttcctgggagagtttttggctcaatctgaagagaaaccacacgtagtggctcacttccatgaatggttggcaggcgttgggctatgtttgtgccgggcccgtcggttgccagttgctacgatctttactacacatgccacgttgctggggcgatacctctgtgccggggcagtagacttttataataatctggagaactttaacgtcgacaaagaagcaggcgagaggcaaatttatcatcggtactgtatggagagggccgctgcgcattgcgctcacgtcttcacaaccgtgtcacagattactgcaattgaggctcagcaccttctcaaaagaaagcctgatatcgtgacaccaaacggcctgaacgttaagaagttctcagctatgcacgaatttcagaacttacacgctcagtcgaaagctcggatccaggaattcgtgcgaggacacttttatggccatctagactttaacctagataaaacactgtacttcttcatcgccggcaggtacgagtttagcaataaaggagcagacgtgtttcttgaagcactggctcggctgaactacctgcttcgcgtcaatggctctgaacagacggtggtcgcattcttcattatgccagcccgcaccaataatttcaacgtcgaaactctcaaagggcaggccgtccgcaagcaactgtgggataccgctaataccgtgaaagaaaaattcggccggaagctctacgaatcccttctggtgggtagtttgcctgacatgaataagatgctcgataaggaggattttaccatgatgaaacgcgctatatttgcgacacaacgtcagtccttcccacccgtgtgcacccataacatgcttgacgactccagcgatcccatactgactactattcgccggatcgggttgttcaactccagcgccgacagagtgaaagtaattttccaccctgaattcctgtccagtaccagcccattgttgcctgtggactacgaggagtttgtccgcgggtgccacctcggtgtgttcccaagctactatgaaccttggggttatactcctgcggagtgtacggtcatgggaatcccgagcatcagcacgaatctgagtggatttggctgttttatggaggagcacatcgccgatccttccgcatatgggatttatatcctggatcgccgattccggtcgctcgatgacagctgcagtcaactaacctcttttctctatagcttctgccaacagtcacggaggcagcgtattatccagcgcaatcgcaccgaaagactgtccgatctcttggactggaaatacctaggaagatactatatgtcagctagacacatggcactgtcaaaggccttccccgaacactttacttacgagcccaatgaagcagacgctgcccagggttacaggtatcccaggcccgctagtgtacccccaagccctagcctgagtcgtcatagctctcctcatcagtccgaggatgaggaggatccacgtaacgggccgctggaagaagatggcgagcgatatgacgaggatgaggaagctgctaaggataggcgaaatattcgcgcaccggaatggccgcgaagagcctcatgcacctcctctacctctgggtctaaacgcaattcggtggatacagcgacaagctcgtcactgtctactccctctgaaccactgtctccaacatcttctttaggcgaggagagaaactag

SEQ ID NO: 124525 - DNA, 2214 bp, Artificial Sequence
  derived and/or modified sequence
atgccattaaatcgtactctatcaatgagtagcttacctggcttagaagattgggaagatgagtttgatctggagaatgccgtgctgtttgaagtggcatgggaggtcgccaataaagtagggggaatttacactgtgcttcaaacaaaggccaaagtcaccggcgacgaatggggggacaattatttcctcgtgggaccatacactgagcagggagttcggacccaggtcgagctactggaagcacccacgcccgctcttaagagaaccttggacagcatgaactccaagggatgcaaggtatattttggacggtggctaattgagggtgggccactcgtcgtgttgctcgacgttggggctagcgcttgggcgttggagaggtggaaaggcgaactgtgggacacctgtaatatcggggttccctggtacgaccgagaagccaatgatgcggttctgtttggttttttaacaacttggttcctcggtgagttcctggcccaaagcgaagaaaaaccacacgtggtcgctcactttcatgaatggttggcaggcgtaggcctctgtctttgtagagctcgaaggctgccggtcgctactatctttacaacacacgcgactctgctcggaaggtacttgtgtgccggagctgtggatttctacaacaatctcgagaacttcaacgtcgacaaggaggccggtgagaggcagatctaccacagatattgtatggagagggctgcagcacattgcgcacacgtcttcactacagtttctcagatcacagccatcgaagcacagcacttgttgaagaggaagccagacatcgtcacaccaaacggccttaatgtgaagaagttctccgccatgcacgaattccagaacctccatgcccagagtaaagctcggatccaggaatttgtgcgtggccacttctacggtcacctggacttcaatctcgacaagacactgtacttctttatcgccggacgatacgaatttagcaataaaggtgctgatgtcttcttggaggctctcgctagactgaactacctcttacgcgtcaacgggtcagaacagactgtcgtcgcctttttcataatgccagctcggactaacaattttaacgtggagactctgaagggtcaggcagttcgcaagcagctctgggacaccgctaatactgtaaaagagaagttcggccgtaaactgtacgaaagccttctcgtgggttcgttacccgatatgaacaagatgttagataaggaggactttaccatgatgaagcgagctatcttcgctactcaacgccaatcattccctcctgtctgtacacacaacatgctggatgactcaagtgacccaatactgaccacaattcgaaggatcggactctttaatagctccgccgatagggtgaaagttatctttcatcctgaattcctatcaagcacttcaccgctgttacctgtggactacgaagagttcgtacgaggctgtcacctcggagtgtttccctcttactacgagccctgggggtacacacccgctgaatgtacagtgatgggcatcccgtccatcagtacgaacttgagcggctttggatgttttatggaagagcacatagccgatccatcagcctacggcatatacattctcgatcgtagattccgatctttggatgattcatgcagccaactcactagttttctctatagcttttgtcagcagtcccgacggcaacgcataatccagcgcaataggacagagcggctgagcgatttgctggattggaaatacttagggagatactatatgtctgcacggcacatggcactgagtaaagctttcccggaacattttacatacgagccgaacgaggctgacgcggcacaggggtaccggtaccctagaccagcctccgtccccccttctccttctctgagcaggcatagctcacctcaccagagcgaagatgaggaggatccacggaacggaccgctggaggaggatggcgaaagatacgacgaggacgaggaagctgctaaggaccgacgcaacattagggctccggagtggccacgccgagcctcttgtacaagcagcacaagcggttccaaacggaactccgtcgatacagcaacctccagtagcctctctacccctagcgaacccctgagccctacgtccagccttggagaagaaaggaattag

SEQ ID NO: 124526 - DNA, 708 bp, Artificial Sequence
  derived and/or modified sequence
atgaatagtacctggcggacgcagtgttcctccaagtggcctggcaggtggctcactagagtgtatttcggtagatggctgattgaaggaggcccattggtggtacttctggatgtcggcgcatctgcatgggcattagagaggtggaaaggcgaactgtgggatacctgcaacattggagtaccctggtacgatagagaggctaatgatgctgtcctgttcggttttttaaccacttggttcttaggagaatttctggcccagtcagaggaaaagccccacgtggtagctcactttcacgaatggcttgcaggagtggggctgtgtctgtgccgcgctagacgactgcccgtggccacgattttcactacgcacgccactctgctgggtcggtacctatgtgcaggtgccgtagatttctacaataacctggagaattttaatgtcgataaagaggccggagagcgccagatctaccatcgctactgtatggaaagagctgccgcacactgcgcccatgtctttaccactgtctcccaaatcaccgccattgaggcacaacacctgctgaaacggaaacctggtatctggaccagtacttggacaagaccatatacgagtcttagccctgcagccatgtcttctccaacccgggtacttacatcttcctggagacattggctcggatccacgatctgcagtgaatag

SEQ ID NO: 124527 - DNA, 1974 bp, Artificial Sequence
  derived and/or modified sequence
atgaactcaacgtggcggacgcagtgctcatctaaatggcctggtaggtggcttacgcgggtgtacttcgggcgatggctcatcgagggcggacccttggtagtgctcctggatgtcggggcttccgcttgggccttagagaggtggaaaggcgagctctgggacacatgcaacatcggcgtcccatggtatgaccgggaggccaacgatgccgtcctattcgggttcctcactacctggtttcttggggagttcctggctcagtctgaggaaaagcctcacgttgtcgcccactttcatgagtggctggcaggagtcggcctctgtctctgccgggcaaggcgtctgcccgtcgccaccatatttactacacacgccaccttattaggcaggtacctttgtgcaggcgctgtggatttttataataatttggaaaacttcaacgtggacaaagaagctggcgagcggcaaatttaccatagatactgcatggaaagggccgctgcccattgcgctcatgtgtttaccaccgtgtcccagattactgctattgaggcccaacacctcctgaagaggaagccagatattgtcacacccaacggcctcaatgttaagaagttctccgccatgcacgagttccagaatctgcatgctcaaagtaaagcacggatccaggagttcgtgcgcggtcatttctacggccatctggattttaatttagataagacgctctattttttcatagcaggcagatacgagttcagtaataaaggcgctgacgtgttcctagaggctttggcaaggctgaactatttgctgagagttaatggctcagagcagacagtagtagctttcttcattatgcctgctcgaaccaataacttcaacgtcgagactcttaaaggccaggctgtgcggaagcaattgtgggacacagcaaacaccgtgaaggagaaatttggaagaaagctttacgagagcctcttagttggatccctccctgatatgaacaagatgctggataaagaagatttcaccatgatgaaaagagccatcttcgccacacagcggcagtcattccccccagtgtgcacacataatatgctggacgactcaagtgatccaatcctgaccaccattcgacgcattgggctttttaactcgagcgcggatagggtcaaagtcattttccatcctgagtttctgagttcaacatctcctcttttacccgttgactatgaggaattcgtgcggggttgccatctgggcgtattcccgagctattacgagccatggggatatacaccggctgaatgcacagtgatgggtatccccagcatcagcacaaacctgtcaggcttcggttgttttatggaagaacacatcgctgacccctccgcgtacggaatctatatcctggatcggcgttttcggtccttggacgattcatgctcacagctcacctcatttctctactcattctgccagcagtcaagacgacaacgaattatccaacgtaatcgaacggagcgactgtctgacctgttggattggaagtacctaggacgctactacatgagcgctcggcacatggctctgtctaaagcttttcccgaacacttcacctacgagcccaatgaggcagatgcagcccagggctatcgctaccccagacctgcaagcgtgccacccagcccttcactttcaagacattcatctccacaccagtctgaggatgaggaggatccgcgaaatgggcctctggaagaagacggggagaggtacgatgaggatgaggaggccgcaaaggaccggcgtaacatccgtgctccagaatggcccaggagggccagttgcacctctagtactagcggaagtaagcgaaattctgtggacaccgctacgagctcctcactgtcaaccccatctgaacctctttccccaacttcaagtctcggagaggagcgaaattag

SEQ ID NO: 124528 - DNA, 2214 bp, Artificial Sequence
  derived and/or modified sequence
atgcccctgaacagaaccctgagcatgagcagcctgcccggcctggaggactgggaggacgagttcgacctggagaacgccgtgctgttcgaggtggcctgggaggtggccaacaaggtgggcggcatctacaccgtgctgcagaccaaggccaaggtgaccggcgacgagtggggcgacaactacttcctggtgggcccctacaccgagcagggcgtgagaacccaggtggagctgctggaggcccccacccccgccctgaagagaaccctggacagcatgaacagcaagggctgcaaggtgtacttcggcagatggctgatcgagggcggccccctggtggtgctgctggacgtgggcgccagcgcctgggccctggagagatggaagggcgagctgtgggacacctgcaacatcggcgtgccctggtacgacagagaggccaacgacgccgtgctgttcggcttcctgaccacctggttcctgggcgagttcctggcccagagcgaggagaagccccacgtggtggcccacttccacgagtggctggccggcgtgggcctgtgcctgtgcagagccagaagactgcccgtggccaccatcttcaccacccacgccaccctgctgggcagatacctgtgcgccggcgccgtggacttctacaacaacctggagaacttcaacgtggacaaggaggccggcgagagacagatctaccacagatactgcatggagagagccgccgcccactgcgcccacgtgttcaccaccgtgagccagatcaccgccatcgaggcccagcacctgctgaagagaaagcccgacatcgtgacccccaacggcctgaacgtgaagaagttcagcgccatgcacgagttccagaacctgcacgcccagagcaaggccagaatccaggagttcgtgagaggccacttctacggccacctggacttcaacctggacaagaccctgtacttcttcatcgccggcagatacgagttcagcaacaagggcgccgacgtgttcctggaggccctggccagactgaactacctgctgagagtgaacggcagcgagcagaccgtggtggccttcttcatcatgcccgccagaaccaacaacttcaacgtggagaccctgaagggccaggccgtgagaaagcagctgtgggacaccgccaacaccgtgaaggagaagttcggcagaaagctgtacgagagcctgctggtgggcagcctgcccgacatgaacaagatgctggacaaggaggacttcaccatgatgaagagagccatcttcgccacccagagacagagcttcccccccgtgtgcacccacaacatgctggacgacagcagcgaccccatcctgaccaccatcagaagaatcggcctgttcaacagcagcgccgacagagtgaaggtgatcttccaccccgagttcctgagcagcaccagccccctgctgcccgtggactacgaggagttcgtgagaggctgccacctgggcgtgttccccagctactacgagccctggggctacacccccgccgagtgcaccgtgatgggcatccccagcatcagcaccaacctgagcggcttcggctgcttcatggaggagcacatcgccgaccccagcgcctacggcatctacatcctggacagaagattcagaagcctggacgacagctgcagccagctgaccagcttcctgtacagcttctgccagcagagcagaagacagagaatcatccagagaaacagaaccgagagactgagcgacctgctggactggaagtacctgggcagatactacatgagcgccagacacatggccctgagcaaggccttccccgagcacttcacctacgagcccaacgaggccgacgccgcccagggctacagataccccagacccgccagcgtgccccccagccccagcctgagcagacacagcagcccccaccagagcgaggacgaggaggaccccagaaacggccccctggaggaggacggcgagagatacgacgaggacgaggaggccgccaaggacagaagaaacatcagagcccccgagtggcccagaagagccagctgcaccagcagcaccagcggcagcaagagaaacagcgtggacaccgccaccagcagcagcctgagcacccccagcgagcccctgagccccaccagcagcctgggcgaggagagaaactag

SEQ ID NO: 124529 - DNA, 708 bp, Artificial Sequence
  derived and/or modified sequence
atgaacagcacctggagaacccagtgcagcagcaagtggcccggcagatggctgaccagagtgtacttcggcagatggctgatcgagggcggccccctggtggtgctgctggacgtgggcgccagcgcctgggccctggagagatggaagggcgagctgtgggacacctgcaacatcggcgtgccctggtacgacagagaggccaacgacgccgtgctgttcggcttcctgaccacctggttcctgggcgagttcctggcccagagcgaggagaagccccacgtggtggcccacttccacgagtggctggccggcgtgggcctgtgcctgtgcagagccagaagactgcccgtggccaccatcttcaccacccacgccaccctgctgggcagatacctgtgcgccggcgccgtggacttctacaacaacctggagaacttcaacgtggacaaggaggccggcgagagacagatctaccacagatactgcatggagagagccgccgcccactgcgcccacgtgttcaccaccgtgagccagatcaccgccatcgaggcccagcacctgctgaagagaaagcccggcatctggaccagcacctggaccagaccctacaccagcctgagccccgccgccatgagcagccccaccagagtgctgaccagcagctggagacactggctgggcagcaccatctgcagcgagtag

SEQ ID NO: 124530 - DNA, 1974 bp, Artificial Sequence
  derived and/or modified sequence
atgaacagcacctggagaacccagtgcagcagcaagtggcccggcagatggctgaccagagtgtacttcggcagatggctgatcgagggcggccccctggtggtgctgctggacgtgggcgccagcgcctgggccctggagagatggaagggcgagctgtgggacacctgcaacatcggcgtgccctggtacgacagagaggccaacgacgccgtgctgttcggcttcctgaccacctggttcctgggcgagttcctggcccagagcgaggagaagccccacgtggtggcccacttccacgagtggctggccggcgtgggcctgtgcctgtgcagagccagaagactgcccgtggccaccatcttcaccacccacgccaccctgctgggcagatacctgtgcgccggcgccgtggacttctacaacaacctggagaacttcaacgtggacaaggaggccggcgagagacagatctaccacagatactgcatggagagagccgccgcccactgcgcccacgtgttcaccaccgtgagccagatcaccgccatcgaggcccagcacctgctgaagagaaagcccgacatcgtgacccccaacggcctgaacgtgaagaagttcagcgccatgcacgagttccagaacctgcacgcccagagcaaggccagaatccaggagttcgtgagaggccacttctacggccacctggacttcaacctggacaagaccctgtacttcttcatcgccggcagatacgagttcagcaacaagggcgccgacgtgttcctggaggccctggccagactgaactacctgctgagagtgaacggcagcgagcagaccgtggtggccttcttcatcatgcccgccagaaccaacaacttcaacgtggagaccctgaagggccaggccgtgagaaagcagctgtgggacaccgccaacaccgtgaaggagaagttcggcagaaagctgtacgagagcctgctggtgggcagcctgcccgacatgaacaagatgctggacaaggaggacttcaccatgatgaagagagccatcttcgccacccagagacagagcttcccccccgtgtgcacccacaacatgctggacgacagcagcgaccccatcctgaccaccatcagaagaatcggcctgttcaacagcagcgccgacagagtgaaggtgatcttccaccccgagttcctgagcagcaccagccccctgctgcccgtggactacgaggagttcgtgagaggctgccacctgggcgtgttccccagctactacgagccctggggctacacccccgccgagtgcaccgtgatgggcatccccagcatcagcaccaacctgagcggcttcggctgcttcatggaggagcacatcgccgaccccagcgcctacggcatctacatcctggacagaagattcagaagcctggacgacagctgcagccagctgaccagcttcctgtacagcttctgccagcagagcagaagacagagaatcatccagagaaacagaaccgagagactgagcgacctgctggactggaagtacctgggcagatactacatgagcgccagacacatggccctgagcaaggccttccccgagcacttcacctacgagcccaacgaggccgacgccgcccagggctacagataccccagacccgccagcgtgccccccagccccagcctgagcagacacagcagcccccaccagagcgaggacgaggaggaccccagaaacggccccctggaggaggacggcgagagatacgacgaggacgaggaggccgccaaggacagaagaaacatcagagcccccgagtggcccagaagagccagctgcaccagcagcaccagcggcagcaagagaaacagcgtggacaccgccaccagcagcagcctgagcacccccagcgagcccctgagccccaccagcagcctgggcgaggagagaaactag

SEQ ID NO: 124531 - protein, 264 aa, Artificial Sequence
  derived and/or modified sequence
MTKFSSFSLFFLIVGAYMTHVCFNMEIIGGKEVSPHSRPFMASIQYGGHHVCGGVLIDPQWVLTAAHCQYRFTKGQSPTVVLGAHSLSKNEASKQTLEIKKFIPFSRVTSDPQSNDIMLVKLQTAAKLNKHVKMLHIRSKTSLRSGTKCKVTGWGATDPDSLRPSDTLREVTVTVLSRKLCNSQSYYNGDPFITKDMVCAGDAKGQKDSCKGDSGGPLICKGVFHAIVSGGHECGVATKPGIYTLLTKKYQTWIKSNLVPPHTN

SEQ ID NO: 124532 - DNA, 1509 bp, Artificial Sequence
  derived and/or modified sequence
ttcagaatcttcttccttcatcacaggatcaacacatttcatctgggcttcttaaatctaaatctttaaaatgactaagttttcttccttttctctgtttttcctaatagttggggcttatatgactcatgtgtgtttcaatatggaaattattggagggaaagaagtgtcacctcattccaggccatttatggcctccatccagtatggcggacatcacgtttgtggaggtgttctgattgatccacagtgggtgctgacagcagcccactgccaatatcggtttaccaaaggccagtctcccactgtggttttaggcgcacactctctctcaaagaatgaggcctccaaacaaacactggagatcaaaaaatttataccattctcaagagttacatcagatcctcaatcaaatgatatcatgctggttaagcttcaaacagccgcaaaactcaataaacatgtcaagatgctccacataagatccaaaacctctcttagatctggaaccaaatgcaaggttactggctggggagccaccgatccagattcattaagaccttctgacaccctgcgagaagtcactgttactgtcctaagtcgaaaactttgcaacagccaaagttactacaacggcgacccttttatcaccaaagacatggtctgtgcaggagatgccaaaggccagaaggattcctgtaagggtgactcagggggccccttgatctgtaaaggtgtcttccacgctatagtctctggaggtcatgaatgtggtgttgccacaaagcctggaatctacaccctgttaaccaagaaataccagacttggatcaaaagcaaccttgtcccgcctcatacaaattaagttacaaataattttattggatgcacttgcttcttttttcctaatatgctcgcaggttagagttgggtgtaagtaaagcagagcacatatggggtccatttttgcacttgtaagtcattttattaaggaatcaagttctttttcacttgtatcactgatgtatttctaccatgctggttttattctaaataaaatttagaagactctctgtttgtcttttatcacatgaagtaatatctgcccccattgcacccacactcgccaaagggcaataaggtcactgaataaaacagtaatggtaccaccttcaactaggtgtaacttctgctggatcatcctaagttgttgggttgttttcttttcattgttgtgataacattgaacatgagataggcccttgcaacaaatgtttaagggtatgatacattattgttaactataggcatgatcttgcagtgcagatctctagaactgcttcatctcatataaatgaaactttatgccagttgaatagcagctctctatttccccaccacccccatcctctggcaaccccattctactctaagcttctatgagtttgtattttttaaatataaatcataaatataaatatcctaattcaagcaagcagcttatacaaa

SEQ ID NO: 124533 - DNA, 795 bp, Artificial Sequence
  derived and/or modified sequence
atgacaaagttcagttctttctcattgtttttcttgattgtgggagcctatatgacgcatgtgtgcttcaatatggagatcataggcggcaaggaagtgtcccctcactctcgccccttcatggcttccatccagtatgggggccaccatgtgtgcggaggagtgctcattgacccccagtgggtgttgactgccgcacactgccagtacagattcacgaaagggcagagtcccacagtggtactcggcgcccactccctgtcaaagaacgaagcttcaaagcagacgctggagatcaaaaagttcattccgtttagcagagtaacttctgatcctcagtccaacgacataatgttggtgaaactgcagactgcagccaagttgaacaagcacgtgaagatgctacatatccgttccaaaacttctctgcgttctggcaccaaatgtaaggtgaccggctggggggccaccgaccccgatagcctccggccctctgatacactgcgagaagttacagtgacggtcctgtcgcgcaagttgtgcaattctcagtcctattacaacggcgaccctttcattaccaaggacatggtgtgcgcaggggatgctaaggggcagaaggatagctgtaaaggtgactccggtggaccactcatttgcaaaggtgtgtttcacgctattgtgtccggtggtcacgagtgcggggtggcaaccaaacctggcatatatacattactgactaaaaagtatcaaacctggatcaaatcaaatctggtgcccccccacacgaactag

SEQ ID NO: 124534 - DNA, 795 bp, Artificial Sequence
  derived and/or modified sequence
atgaccaagttcagcagcttcagcctcttcttcctgattgtgggcgcctacatgacccacgtgtgcttcaacatggagatcatcggcggcaaggaggtgagcccccacagccggcccttcatggccagcatccagtatggaggccaccacgtgtgtggcggcgtgctgattgacccccagtgggtgctgacagctgcccactgccagtaccgcttcaccaagggccagagccccaccgtggtgctgggcgcccacagcctgagcaagaatgaggccagcaagcagaccctggagatcaagaagttcatccccttcagccgggtgaccagtgacccccagagcaatgacatcatgctggtgaagctgcagacagctgccaagctgaacaagcacgtgaagatgctgcacatccgcagcaagaccagcctgcggagcggcaccaagtgcaaggtgacaggctggggcgccacagatcctgacagcctgcggcccagcgacaccctgcgggaggtgacagtgacagtgctgagcaggaagctgtgcaacagccagagctactacaacggggaccccttcatcaccaaggacatggtgtgtgctggagatgccaagggccagaaggacagctgcaagggggacagcggcggccccctcatctgcaagggcgtcttccacgccatcgtgtctgggggccatgaatgtggggtggccaccaagccaggcatctacaccctgctgaccaagaagtaccagacctggatcaagagcaacctggtgcccccccacaccaactag

SEQ ID NO: 124535 - DNA, 795 bp, Artificial Sequence
  derived and/or modified sequence
atgaccaagttcagcagcttcagcctgttcttcctgatcgtgggcgcatacatgacacacgtgtgctttaatatggaaattattgggggtaaggaagtatctcctcacagtagaccattcatggctagcatccaatatggaggtcaccatgtctgcggcggggtgctgatcgatccccaatgggtccttactgcagctcactgtcaatacagatttactaagggtcagtctcctaccgtggtgctgggagcccattcccttagcaagaatgaagcctctaagcagacgctggagatcaagaaatttatacccttcagccgcgtgacatcagaccctcagagcaacgacattatgttagtaaaactccaaacggcagcaaagcttaacaagcacgtcaaaatgctgcacattagatctaagacctccctccgaagtgggactaaatgcaaggtaacaggatggggggctaccgaccctgatagcctgcgtcccagtgacacactgcgggaggtcacagttaccgtccttagccggaagctgtgcaatagtcagtcttactataatggcgacccctttattacaaaggatatggtctgtgcaggggatgctaaggggcagaaggacagctgcaagggtgacagcggcggtccactgatatgtaaaggggtcttccacgccatcgtgtctggcggacacgagtgcggagttgccacaaaacccgggatatacacattacttacgaaaaagtaccaaacatggattaagtcaaatctggtgcccccacacacaaattag

SEQ ID NO: 124536 - DNA, 795 bp, Artificial Sequence
  derived and/or modified sequence
atgacaaaattttccagctttagcctatttttcttgattgtgggcgcatacatgacacacgtgtgcttcaacatggagatcatcggaggtaaggaggtcagtccccactctcgaccttttatggcttctattcaatatgggggtcaccatgtgtgcggaggcgtgctgattgatccccagtgggtgctgactgcggctcactgtcaatatcgcttcacaaaagggcagagccctaccgtcgtcttaggggcacattccctgagcaaaaacgaagcgtccaagcaaactctcgagatcaaaaaattcatccctttctcccgggttacatccgacccgcagtccaacgacattatgctggtaaagctgcagactgccgcaaagttgaacaagcacgtgaaaatgctacacattcggtccaagacatcactgcgcagcggcaccaaatgcaaagtgacaggatggggcgctacagatcctgattccctccgcccttccgacacgttgcgcgaagtcactgtgacagtactatcgaggaagttatgcaactcccagagttattataatggggatcctttcataaccaaagatatggtgtgtgcaggcgatgccaagggacagaaggattcctgtaagggcgactcaggaggccctttgatttgcaagggggtgttccacgcgattgtctctggcggacatgaatgcggcgtcgctaccaagcctgggatctacactctcctgacaaaaaaatatcaaacctggattaagagcaacttggtgccaccccacacaaattag

SEQ ID NO: 124537 - DNA, 795 bp, Artificial Sequence
  derived and/or modified sequence
atgacaaagttttcttccttctctctctttttccttattgtgggggcctatatgacgcatgtatgctttaatatggagatcataggaggaaaagaagtttcaccacattcccgcccctttatggcatctatccaatacggaggccaccacgtgtgcgggggagtgctcatcgatccacaatgggtcctgaccgccgctcactgccagtatagattcaccaaaggccagagcccaactgtggttctaggggcccattccctttcaaaaaatgaggcctcgaagcagaccctcgagatcaagaaatttatccccttctcccgggtgaccagcgatccacaatctaatgacataatgctcgtaaagttacagacagccgccaaacttaataagcacgtgaaaatgctccatatccgatctaaaacaagtctgaggtcaggaacgaagtgcaaggtcaccggttggggagcgacagaccccgattcccttcgtcctagcgataccctccgggaagtcactgtgaccgtcctatctagaaaactgtgtaattcccagtcgtactacaacggagacccatttatcaccaaagacatggtgtgtgctggcgacgccaaaggccagaaggatagttgcaagggggacagcggcggcccccttatctgcaaaggcgtttttcatgcgatagtgtcaggcggccacgaatgcggcgtggcaaccaagccaggcatttacactttacttactaaaaaatatcagacatggattaagagtaatctagtgcctcctcacactaactag

SEQ ID NO: 124538 - DNA, 795 bp, Artificial Sequence
  derived and/or modified sequence
atgacaaagttctcgtccttttctttgttcttcctgatcgttggggcctatatgacgcacgtttgctttaacatggaaatcattggcgggaaagaggtgagcccccattccagaccttttatggctagcatacaatacgggggtcatcatgtatgtggtggagttcttatcgatccacagtgggtgctgaccgctgcacattgtcagtacaggtttactaagggacagagccctaccgtggtccttggtgcacactcccttagcaaaaacgaagcatcgaagcaaactctcgaaattaagaaatttatccccttctcccgggtgaccagcgatccacaatctaatgacataatgctcgtaaagttacagacagccgccaaacttaataagcacgtgaaaatgctccatatccgatctaaaacaagtctgaggtcaggaacgaagtgcaaggtcaccggttggggagcgacagaccccgattcccttcgtcctagcgataccctccgggaagtcactgtgaccgtcctatctagaaaactgtgtaattcccagtcgtactacaacggagacccatttatcaccaaagacatggtgtgtgctggagacgctaagggacagaaagatagctgtaagggagactctggggggccgctgatttgtaaaggcgttttccatgccattgtttctggcggacatgagtgcggcgtcgccacaaagcccgggatatacacattactgaccaaaaagtatcagacctggatcaaatcgaatttggtgcccccccatacaaattag

SEQ ID NO: 124539 - DNA, 795 bp, Artificial Sequence
  derived and/or modified sequence
atgaccaagttcagcagcttcagcctgttcttcctgatcgtgggcgcctacatgacccacgtgtgcttcaacatggagatcatcggcggcaaggaggtgagcccccacagcagacccttcatggccagcatccagtacggcggccaccacgtgtgcggcggcgtgctgatcgacccccagtgggtgctgaccgccgcccactgccagtacagattcaccaagggccagagccccaccgtggtgctgggcgcccacagcctgagcaagaacgaggccagcaagcagaccctggagatcaagaagttcatccccttcagcagagtgaccagcgacccccagagcaacgacatcatgctggtgaagctgcagaccgccgccaagctgaacaagcacgtgaagatgctgcacatcagaagcaagaccagcctgagaagcggcaccaagtgcaaggtgaccggctggggcgccaccgaccccgacagcctgagacccagcgacaccctgagagaggtgaccgtgaccgtgctgagcagaaagctgtgcaacagccagagctactacaacggcgaccccttcatcaccaaggacatggtgtgcgccggcgacgccaagggccagaaggacagctgcaagggcgacagcggcggccccctgatctgcaagggcgtgttccacgccatcgtgagcggcggccacgagtgcggcgtggccaccaagcccggcatctacaccctgctgaccaagaagtaccagacctggatcaagagcaacctggtgcccccccacaccaactag

SEQ ID NO: 124540 - protein, 143 aa, Artificial Sequence
  derived and/or modified sequence
MSGRGKTGGKARAKAKSRSSRAGLQFPVGRVHRLLRKGHYAERVGAGAPVYLAAVLEYLTAEILELAGNAARDNKKTRIIPRHLQLAIRNDEELNKLLGGVTIAQGGVLPNIQAVLLPKKTSATVGPKAPSGGKKATQASQEY

SEQ ID NO: 124541 - DNA, 432 bp, Artificial Sequence
  derived and/or modified sequence
atgagcggcagaggcaagaccggcggcaaggccagagccaaggccaagagcagaagcagcagagccggcctgcagttccccgtgggcagagtgcacagactgctgagaaagggccactacgccgagagagtgggcgccggcgcccccgtgtacctggccgccgtgctggagtacctgaccgccgagatcctggagctggccggcaacgccgccagagacaacaagaagaccagaatcatccccagacacctgcagctggccatcagaaacgacgaggagctgaacaagctgctgggcggcgtgaccatcgcccagggcggcgtgctgcccaacatccaggccgtgctgctgcccaagaagaccagcgccaccgtgggccccaaggcccccagcggcggcaagaaggccacccaggccagccaggagtactag

SEQ ID NO: 124542 - DNA, 432 bp, Artificial Sequence
  derived and/or modified sequence
atgagcggtcgtgggaagacaggcgggaaggcccgcgctaaggccaagagccgatcctcacgggctggcctccaatttcctgtggggagggtgcataggctcctgagaaaagggcactatgctgaaagagtgggcgccggcgccccagtgtacttggcagccgtgctcgagtacctaacagccgagatcctcgagctggcaggcaatgctgccagagataacaagaaaactagaattataccaaggcacctgcaactggcgattcggaacgacgaagagctgaataagctgctgggcggtgtcaccattgcccaaggcggtgtgctgcccaacattcaggctgtgctgctgccgaagaagacttccgccacagtgggccccaaagctccgtctggaggaaagaaggccacgcaagcaagccaggagtattag

SEQ ID NO: 124543 - DNA, 432 bp, Artificial Sequence
  derived and/or modified sequence
atgtccgggaggggcaaaactggcggaaaggctagggcaaaagccaagtcccgcagctcaagagccggccttcaatttcctgtcggaagagtgcacagattgctaagaaaggggcactacgccgagcgagtgggagccggcgctcctgtgtatctagccgctgtgttggagtacctgacagctgagatcctcgaattggccggcaatgctgcccgagataacaaaaaaactcggattatcccgcgacatcttcagttggccatacgcaacgacgaggagctcaacaagcttttaggaggggtgacaatcgcacaggggggggtcttgcccaatatccaggcagtcttactacccaagaaaacatctgctacagtaggaccaaaggctccctccgggggaaaaaaggccacacaggcatcacaggagtactag

SEQ ID NO: 124544 - DNA, 1373 bp, Artificial Sequence
  derived and/or modified sequence
cgggcgtctgttctagtgtttgagccgtcgtgcttcaccggtctacctcgctagcatgtcgggccgcggcaagactggcggcaaggcccgcgccaaggccaagtcgcgctcgtcgcgcgccggcctccagttcccagtgggccgtgtacaccggctgctgcggaagggccactacgccgagcgcgttggcgccggcgcgccagtgtacctggcggcagtgctggagtacctcaccgctgagatcctggagctggcgggcaatgcggcccgcgacaacaagaagacgcgaatcatcccccgccacctgcagctggccatccgcaacgacgaggagctcaacaagctgctgggcggcgtgacgatcgcccagggaggcgtcctgcccaacatccaggccgtgctgctgcccaagaagaccagcgccaccgtggggccgaaggcgccctcgggcggcaagaaggccacccaggcctcccaggagtactaagagggcccgcgccgcggccggccgccaggcctccccatgccaccacaaaggcccttttaagggccaccaccgccctcatggaaagagctgagccgcttcagactgcggggcaagcgggccgcggctcccttcccctcccctcccctcgcccgccttcgccgcccggcctcgagtccccgcccgcccccgctcccgtcccgcaccgcctgccgcgtcggcctcgggccctgccctgtccgccgtccgccctccggtagggttcgggccttccggatgcggcttgggcgctcttcggggacctccgtggcgcggaagacccgagcctgccggggggaggccggcggcgccgcacctgcccgcctcggcgttcgtgactcagccgccccatcccgagtcgctaaggggctgcggggaggccgcagcaccttctggaagacttggccttccgctctgacgcagggccgaggtgggcagtccaggccgagaggccggcggccctgaaggtctgcgctggggccgggacgaagcacttggtaacaggcacatcttcctcccgagtgactgcctcctaggaggacatttaggggagggcagaggcctgcagtttggcttcacggctggctatgtggacagcaagagtcgttttcgcggaagccgactggcagccaggcctgtcgggccccccgacgccgccccatttcccttccagcaaactcaactcggcaatccaagcacctagataccagcacaagtcggttaatccctgtctggactgagcctccgttggcttctgaactggaattctgcagctaacccttccacgactagaaccttaggcattggggagttttagatggactaattttattaaaggattgtttttttt

SEQ ID NO: 124545 - DNA, 1614 bp, Artificial Sequence
  derived and/or modified sequence
acagcagttacactgcggcgggcgtctgttctagtgtttgagccgtcgtgcttcaccggtctacctcgctagcatgtcgggccgcggcaagactggcggcaaggcccgcgccaaggccaagtcgcgctcgtcgcgcgccggcctccagttcccagtgggccgtgtacaccggctgctgcggaagggccactacgccgagcgcgttggcgccggcgcgccagtgtacctggcggcagtgctggagtacctcaccgctgagatcctggagctggcgggcaatgcggcccgcgacaacaagaagacgcgaatcatcccccgccacctgcagctggccatccgcaacgacgaggagctcaacaagctgctgggcggcgtgacgatcgcccagggaggcgtcctgcccaacatccaggccgtgctgctgcccaagaagaccagcgccaccgtggggccgaaggcgccctcgggcggcaagaaggccacccaggcctcccaggagtactaagagggcccgcgccgcggccggccgccaggcctccccatgccaccacaaaggcccttttaagggccaccaccgccctcatggaaagagctgagccgcttcagactgcggggcaagcgggccgcggctcccttcccctcccctcccctcgcccgccttcgccgcccggcctcgagtccccgcccgcccccgctcccgtcccgcaccgcctgccgcgtcggcctcgggccctgccctgtccgccgtccgccctccggtagggttcgggccttccggatgcggcttgggcgctcttcggggacctccgtggcgcggaagacccgagcctgccggggggaggccggcggcgccgcacctgcccgcctcggcgttcgtgactcagccgccccatcccgagtcgctaaggggctgcggggaggccgcagcaccttctggaagacttggccttccgctctgacgcagggccgaggtgggcagtccaggccgagaggccggcggccctgaaggtgagtgaggccctcggcagctgcagccggggtgtctggtacccccccggcgtggtgcttagcccaggactttcagacgcggccgctggccgggaggctttggtgggagagacgcgatcgccgatttcggtctggcgccccttctgcggccgggacccaggcctttcacatcagctctccctccatcttcattcataggtctgcgctggggccgggacgaagcacttggtaacaggcacatcttcctcccgagtgactgcctcctaggaggacatttaggggagggcagaggcctgcagtttggcttcacggctggctatgtggacagcaagagtcgttttcgcggaagccgactggcagccaggcctgtcgggccccccgacgccgccccatttcccttccagcaaactcaactcggcaatccaagcacctagataccagcacaagtcggttaatccctgtctggactgagcctccgttggcttctgaactggaattctgcagctaacccttccacgactagaaccttaggcattggggagttttagatggactaattttattaaaggattgttttttttttaaatggagcgtttgttttcattt

SEQ ID NO: 124546 - DNA, 432 bp, Artificial Sequence
  derived and/or modified sequence
atgagcggccggggcaagacaggaggcaaggcccgggccaaggccaagagccgcagcagccgggccggcctgcagtttcctgtgggccgggtgcaccggctgctgaggaagggccactatgcagagcgggtgggcgctggggcccctgtgtacctggccgctgtgctggagtacctgacagctgagatcctggagctggccggaaatgctgcccgggacaacaagaagacccgcatcatccccaggcacctgcagctggccatcagaaatgatgaggagctgaacaagctgctgggcggcgtgaccatcgcccagggcggcgtgctgcccaacatccaggccgtgctgctgcccaagaagaccagcgccaccgtgggccccaaggcccccagcggcggcaagaaggccacccaggccagccaggagtactag

SEQ ID NO: 124547 - DNA, 432 bp, Artificial Sequence
  derived and/or modified sequence
atgagcggccggggcaagaccggcggcaaggcccgggccaaggccaaatcaagaagcagccgggccggactgcagttccctgtggggcgggtgcacagattgcttaggaagggccactatgcagagagggtgggcgcaggagccccggtttacctcgccgcagttcttgagtatttgaccgccgagattttagagctggcaggtaatgccgctcgggataataaaaaaacccgaatcattccaaggcatctccagctagccatccggaatgacgaagaactgaataaactgctgggaggcgtcacaatcgctcaggggggagttcttcctaatatccaggctgtgctcctgcccaagaagacatctgctacagttggcccaaaggccccgagcggaggcaaaaaggctacccaggcttcccaagagtattag

SEQ ID NO: 124548 - DNA, 432 bp, Artificial Sequence
  derived and/or modified sequence
atgagcggccggggcaagaccggcggcaaggcccgggccaaggccaagtcgcgaagcagccgggccggcctgcagtttccggtcggacgagttcacagactcttacggaaaggacattatgctgagagggtgggggccggagcacctgtgtatcttgctgctgtcctcgagtatctcacagctgagatcctggaacttgccggaaatgccgcccgtgataataagaaaacccgaatcataccacgccatttacagcttgctatcagaaatgatgaggaattgaacaagctcctcggaggcgtgaccatcgcgcagggcggagtcttaccaaatatccaagccgtgctgttgccgaaaaagacttcggccactgtagggccgaaagccccttccggcggtaagaaagcaacacaagctagccaggaatactag

SEQ ID NO: 124549 - DNA, 432 bp, Artificial Sequence
  derived and/or modified sequence
atgagcggccgaggaaagactggtgggaaagccagagccaaagccaaatcgcgttctagtagagccggtctccagtttccagtgggaagggtacacagactgttacggaagggccactatgctgagagggttggtgctggagctcctgtatacttagctgctgtgttagagtaccttactgcagagatcctggagctggcgggtaacgccgcacgagataataaaaaaacccggattattcccagacacctgcagttagcaatccggaacgatgaagaattaaataagcttcttggcggagtgaccattgcgcaggggggtgttctgcccaatatccaagctgtgctactgccaaaaaaaaccagtgcgacagtgggtccaaaggccccaagtgggggtaaaaaggccactcaggccagtcaagagtattag

SEQ ID NO: 124550 - DNA, 432 bp, Artificial Sequence
  derived and/or modified sequence
atgagtggtagaggaaaaaccggcggaaaggccagggctaaagcgaagtcacgcagcagtagagcaggactccagttccctgtgggtagggttcacagattactgaggaagggccattacgccgagcgggtgggggctggcgcaccagtttacctggctgccgttctcgagtaccttaccgctgagatcctcgaactggcaggaaatgcagctagggacaacaaaaagacacgcatcatccctaggcacctacagctagccattcgcaatgacgaagagctgaacaagctgctgggtggtgtaactatcgctcaaggcggtgttctgcccaacattcaggccgtcctactacctaaaaagacgtctgcaaccgttggtcccaaagcacccagcgggggaaagaaagcaacacaggctagccaggagtattag

SEQ ID NO: 124551 - protein, 128 aa, Artificial Sequence
  derived and/or modified sequence
MAGGKAGKDSGKAKTKAVSRSQRAGLQFPVGRIHRHLKSRTTSHGRVGATAAVYSAAILEYLTAEVLELAGNASKDLKVKRITPRHLQLAIRGDEELDSLIKATIAGGGVIPHIHKSLIGKKGQQKTV

SEQ ID NO: 124552 - DNA, 387 bp, Artificial Sequence
  derived and/or modified sequence
atggcaggggggaaagccgggaaggacagtggaaaggctaaaaccaaggccgtgtctaggagccaacgggccggcctgcagttcccggtgggacgcatccatcgccatttgaaatctagaacaaccagccatggccgggttggtgccacggcagcagtgtatagcgccgctattctggaatacttgaccgcggaggtgctggaactggctggaaatgcttcaaaagacttgaaggtgaaaagaattacaccacggcacctgcagttggccatacgtggagatgaggaactggattctctgattaaggctaccatagccggagggggagtgatcccccatattcacaagtcgctgattgggaagaaaggccagcagaagactgtctag

SEQ ID NO: 124553 - DNA, 387 bp, Artificial Sequence
  derived and/or modified sequence
atggccggcggcaaggccggcaaggacagcggcaaggccaagaccaaggctgtgagccgcagccagagagctggcctgcagtttcctgtgggccgcatccaccgccacctgaagagcaggaccaccagccacggccgggtgggcgccacagctgctgtgtacagcgctgccatcctggagtacctgacagctgaggtgctggagctggccggaaatgccagcaaggacctgaaggtgaagaggatcacccccaggcacctgcagctggccatcagaggagatgaggagctggacagcctcatcaaggccaccatcgccggcggcggcgtcatcccccacatccacaagagcctgattggcaagaagggccagcagaagacagtgtag

SEQ ID NO: 124554 - DNA, 387 bp, Artificial Sequence
  derived and/or modified sequence
atggccggcggcaaggccggcaaggacagcggcaaggccaagaccaaagctgtcagtcggagccaacgcgccgggctacagtttcccgtgggtcggattcaccgccatcttaaatccaggactacgtctcatgggagggtgggggccaccgcagcagtgtatagtgcagccatacttgagtacttgacggctgaagtgcttgagctagccgggaatgccagtaaggatttgaaggttaagcgtataacaccacgccacctccagctggctatcagaggtgacgaagagctggattcactgataaaggcaactattgccggcgggggagtgattcctcatattcacaagtcacttatcgggaagaaggggcagcaaaagacggtgtag

SEQ ID NO: 124555 - DNA, 387 bp, Artificial Sequence
  derived and/or modified sequence
atggccggaggtaaggccggtaaagattctggcaaggccaagaccaaagctgtcagcaggtcacaaagagccggactgcagttcccagtagggagaatacatcgtcacctgaagagcagaacaacatcccacggcagagttggtgccaccgccgcagtgtattctgccgcaatcctggagtacctgaccgccgaagtcctcgagttggcagggaacgcttccaaggacttgaaggtgaagcgcataacaccacgccacttgcagctggccattcgaggcgacgaagagctcgattctctgattaaggccacaattgccggaggtggtgtgatccctcatatacacaaaagtctgattgggaaaaagggtcagcagaagacggtctag

SEQ ID NO: 124556 - DNA, 387 bp, Artificial Sequence
  derived and/or modified sequence
atggccggcggcaaggccggcaaggacagcggcaaggccaagaccaaggccgtgagcagaagccagagagccggcctgcagttccccgtgggcagaatccacagacacctgaagagcagaaccaccagccacggcagagtgggcgccaccgccgccgtgtacagcgccgccatcctggagtacctgaccgccgaggtgctggagctggccggcaacgccagcaaggacctgaaggtgaagagaatcacccccagacacctgcagctggccatcagaggcgacgaggagctggacagcctgatcaaggccaccatcgccggcggcggcgtgatcccccacatccacaagagcctgatcggcaagaagggccagcagaagaccgtgtag

SEQ ID NO: 124557 - DNA, 979 bp, Artificial Sequence
  derived and/or modified sequence
ctcaaggacgcgtcccgagggcgggtggcagccattggtgggatgagcaatccgagttcccggatgagggaacattctgcagtataaagggagcagggaaggcgggagacagcgcagtttgaatcgcggtgcgacgaaggagtaggtggtgggatctcaccgtgggtccgattagccttttctctgccttgcttgcttgagcttcagcggaattcgaaatggctggcggtaaggctggaaaggactccggaaaggccaagacaaaggcggtttcccgctcgcagagagccggcttgcagttcccagtgggccgtattcatcgacacctaaaatctaggacgaccagtcatggacgtgtgggcgcgactgccgctgtgtacagcgcagccatcctggagtacctcaccgcagaggtacttgaactggcaggaaatgcatcaaaagacttaaaggtaaagcgtattacccctcgtcacttgcaacttgctattcgtggagatgaagaattggattctctcatcaaggctacaattgctggtggtggtgtcattccacacatccacaaatctctgattgggaagaaaggacaacagaagactgtctaaaggatgcctggattccttgttatctcaggactctaaatactctaacagctgtccagtgttggtgattccagtggactgtatctctgtgaaaaacacaattttgcctttttgtaattctatttgagcaagttggaagtttaattagctttccaaccaaccaaatttctgcattcgagtcttaaccatatttaagtgttactgtggcttcaaagaagctattgattctgaagtagtgggttttgattgagttgactgtttttaaaaaactgtttggattttaattgtgatgcagaagttatagtaacaaacatttggttttgtacagacattatttccactctggtggataagttcaataaaggtcatatcccaaa

SEQ ID NO: 124558 - protein, 657 aa, Artificial Sequence
  derived and/or modified sequence
MPRYTVHVRGEWLAVPCQDAQLTVGWLGREAVRRYIKNKPDNGGFTSVDDAHFLVRRCKGLGLLDNEDRLEVALENNEFVEVVIEGDAMSPDFIPSQPEGVYLYSKYREPEKYIELDGDRLTTEDLVNLGKGRYKIKLTPTAEKRVQKSREVIDSIIKEKTVVYGITTGFGKFARTVIPINKLQELQVNLVRSHSSGVGKPLSPERCRMLLALRINVLAKGYSGISLETLKQVIEMFNASCLPYVPEKGTVGASGDLAPLSHLALGLVGEGKMWSPKSGWADAKYVLEAHGLKPVILKPKEGLALINGTQMITSLGCEAVERASAIARQADIVAALTLEVLKGTTKAFDTDIHALRPHRGQIEVAFRFRSLLDSDHHPSEIAESHRFCDRVQDAYTLRCCPQVHGVVNDTIAFVKNIITTELNSATDNPMVFANRGETVSGGNFHGEYPAKALDYLAIGIHELAAISERRIERLCNPSLSELPAFLVAEGGLNSGFMIAHCTAAALVSENKALCHPSSVDSLSTSAATEDHVSMGGWAARKALRVIEHVEQVLAIELLAACQGIEFLRPLKTTTPLEKVYDLVRSVVRPWIKDRFMAPDIEAAHRLLLEQKVWEVAAPYIEKYRMEHIPESRPLSPTAFSLQFLHKKSTKIPESEDL

SEQ ID NO: 124559 - DNA, 1974 bp, Artificial Sequence
  derived and/or modified sequence
atgcccagatacaccgtgcacgtgagaggcgagtggctggccgtgccctgccaggacgcccagctgaccgtgggctggctgggcagagaggccgtgagaagatacatcaagaacaagcccgacaacggcggcttcaccagcgtggacgacgcccacttcctggtgagaagatgcaagggcctgggcctgctggacaacgaggacagactggaggtggccctggagaacaacgagttcgtggaggtggtgatcgagggcgacgccatgagccccgacttcatccccagccagcccgagggcgtgtacctgtacagcaagtacagagagcccgagaagtacatcgagctggacggcgacagactgaccaccgaggacctggtgaacctgggcaagggcagatacaagatcaagctgacccccaccgccgagaagagagtgcagaagagcagagaggtgatcgacagcatcatcaaggagaagaccgtggtgtacggcatcaccaccggcttcggcaagttcgccagaaccgtgatccccatcaacaagctgcaggagctgcaggtgaacctggtgagaagccacagcagcggcgtgggcaagcccctgagccccgagagatgcagaatgctgctggccctgagaatcaacgtgctggccaagggctacagcggcatcagcctggagaccctgaagcaggtgatcgagatgttcaacgccagctgcctgccctacgtgcccgagaagggcaccgtgggcgccagcggcgacctggcccccctgagccacctggccctgggcctggtgggcgagggcaagatgtggagccccaagagcggctgggccgacgccaagtacgtgctggaggcccacggcctgaagcccgtgatcctgaagcccaaggagggcctggccctgatcaacggcacccagatgatcaccagcctgggctgcgaggccgtggagagagccagcgccatcgccagacaggccgacatcgtggccgccctgaccctggaggtgctgaagggcaccaccaaggccttcgacaccgacatccacgccctgagaccccacagaggccagatcgaggtggccttcagattcagaagcctgctggacagcgaccaccaccccagcgagatcgccgagagccacagattctgcgacagagtgcaggacgcctacaccctgagatgctgcccccaggtgcacggcgtggtgaacgacaccatcgccttcgtgaagaacatcatcaccaccgagctgaacagcgccaccgacaaccccatggtgttcgccaacagaggcgagaccgtgagcggcggcaacttccacggcgagtaccccgccaaggccctggactacctggccatcggcatccacgagctggccgccatcagcgagagaagaatcgagagactgtgcaaccccagcctgagcgagctgcccgccttcctggtggccgagggcggcctgaacagcggcttcatgatcgcccactgcaccgccgccgccctggtgagcgagaacaaggccctgtgccaccccagcagcgtggacagcctgagcaccagcgccgccaccgaggaccacgtgagcatgggcggctgggccgccagaaaggccctgagagtgatcgagcacgtggagcaggtgctggccatcgagctgctggccgcctgccagggcatcgagttcctgagacccctgaagaccaccacccccctggagaaggtgtacgacctggtgagaagcgtggtgagaccctggatcaaggacagattcatggcccccgacatcgaggccgcccacagactgctgctggagcagaaggtgtgggaggtggccgccccctacatcgagaagtacagaatggagcacatccccgagagcagacccctgagccccaccgccttcagcctgcagttcctgcacaagaagagcaccaagatccccgagagcgaggacctgtag

SEQ ID NO: 124560 - DNA, 1974 bp, Artificial Sequence
  derived and/or modified sequence
atgcctcgttacactgtccacgtcaggggggagtggctggccgttccttgtcaggacgcccagctaaccgtgggctggctggggagagaagcagtacgcaggtacatcaaaaataagcccgacaacggaggatttacaagcgtggacgacgcccattttctggttcgccgttgcaagggactcgggctgctcgataacgaggacaggttggaagtggccttggagaataatgagtttgtggaggtagtgatcgagggggacgctatgtcaccggactttatccctagccagcccgaaggcgtctacctctactctaagtatcgtgagcccgagaagtacatcgaactagatggagatcgcctgacgaccgaagacctggttaacctcgggaagggcagatataagatcaagctcaccccaactgctgagaaacgggtgcagaaatccagagaggtaatcgattccattattaaggaaaagacggtggtttatggaataaccaccgggtttggcaagtttgcgaggacagtgattcccatcaacaaattgcaagagctgcaggtgaatctagtcagatctcatagtagtggcgtgggcaagcccttgagtcccgaaagatgcagaatgcttctggcgctgcgcattaatgtactggcaaagggatattctggcattagcttggagaccctgaaacaggtgatagaaatgttcaatgcttcctgtctgccatacgtgcctgaaaaaggtacagtgggggccagtggtgatttagctcctctatcacatctcgcattgggactcgtgggcgagggcaagatgtggagtcccaaaagcggctgggctgacgccaagtatgtcctggaagcgcacggccttaaacctgttattctaaagcccaaagaaggcttagcgctcattaatggaactcagatgatcacttctctgggctgcgaggctgtagagagagctagtgccatcgcaagacaggccgacatagtcgccgctctgacactggaagtgctcaaaggtacaacaaaagcatttgacactgatatacatgccttgagaccacaccgcggccagattgaggttgcattccgcttcaggtctctcctggacagtgaccaccatccctcagaaatcgccgagtcacaccgcttctgcgatcgtgtgcaagatgcctacacacttcgatgctgtcctcaggtccatggggtcgtgaatgacactatcgccttcgtgaaaaacatcataactacagaattaaacagtgcaaccgacaaccccatggtgttcgccaacagaggggagacagtctcaggtggcaactttcacggagagtacccggccaaagccctggactatcttgcaatcggaattcatgaactggccgctatctcagaacgccggatcgaacggctatgtaacccttccctctctgaactgccagccttcctggtggctgagggcgggttgaattcaggcttcatgatagcacactgcacggctgctgcgctcgtgtccgagaacaaggctttgtgccacccctccagcgtggactccttgtctacttcagcagcaacagaggaccacgtaagcatgggagggtgggcggccagaaaagcactgagagtcattgaacacgtcgagcaggttttagctatcgagctgcttgcagcctgtcaaggcattgagtttctgcgaccactgaagactacaacgcctttggaaaaggtctatgatcttgtcagatccgtagtgcgcccctggatcaaggaccggttcatggctcccgatattgaagccgcccatagactgctcctcgagcagaaggtgtgggaagtggcagccccttacattgagaaatataggatggagcatattccagagagcaggcccctgagccccaccgcattctctcttcagtttctgcataaaaagagcacaaagatccctgaaagcgaagatctgtag

SEQ ID NO: 124561 - DNA, 3913 bp, Artificial Sequence
  derived and/or modified sequence
gttttacagttgagtaatctcagataaagacaggaacatggtgtttataagctgcccttaatggcagagaacacagacagaaacgagggaagagagagaaattggggaccctgaagaaagggggccagcagcaggtaggtgccatcagggacaagaacagcacctcccagggtgggagaccccaggcctttctggcagcaggtctggatggaaagtggacaggaggctcacccgtctgcatcccctgctcctgcccctgctcggctacaaaaaccaaagggacagcagctgaccacaccccggtagccactcctgcataaagctctcccctcctgtgaccagctgaggacctcaggctgcagcggagccatgcccagatacacggtgcacgtacgtggggaatggctggcagtgccctgccaggacgcgcagctcactgtgggctggctgggccgggaggccgtgaggcgctatatcaagaataagcccgacaatggtggcttcacctccgtggatgacgcgcacttccttgtgcgccggtgcaagggcctgggcctgctggacaacgaggaccggctcgaggtggccctagagaacaacgagttcgtggaagtggttatagagggtgatgccatgtctcctgacttcattccatctcaaccagaaggagtttatctatacagcaagtaccgggagcctgaaaagtacatcgagttagatggagaccgtctgaccacggaggatctggtcaacttgggaaagggacgctacaaaataaagctcaccccaacagctgagaagagggtgcagaaatccagggaggtcatagatagcatcataaaagagaaaacagttgtttacggtattactacaggttttgggaaatttgccagaactgtaattcctatcaataagctacaggagcttcaggtcaacttagtacgctcacattcttcaggtgttgggaaaccactaagtcctgagaggtgtcggatgctcttggctttaaggatcaatgtcttagccaaaggatacagtggcatttccctggagaccctcaaacaagtcatagaaatgtttaatgcctcctgcctgccctatgtcccagagaaaggaaccgttggtgccagtggagaccttgccccactctctcatcttgctcttgggctagttggagaagggaagatgtggtctccgaagagtggctgggctgatgctaaatacgtgctagaagcccatggattgaaaccagttattttaaaaccaaaagagggcctggcactcatcaatgggacgcagatgatcacatccctgggctgtgaagctgtagagcgagccagtgctattgcacggcaggctgacattgtggcagccctgacccttgaggtgctgaagggcaccaccaaagcctttgacactgacattcatgctcttcgacctcaccgtgggcaaattgaagttgcttttcggtttcggtcactcttggactcagatcaccacccatcagaaatagcagagagtcacaggttctgtgatcgcgtccaggatgcatacaccttgcgctgctgtccacaggtccatggtgtggtgaatgatacaatagcatttgtgaagaacatcattaccacagaactgaacagcgcaacagataatcctatggtctttgccaataggggagagacagtttctggaggaaacttccatggtgaatacccagccaaagccctagactacttggccattggcatccatgaacttgctgcaatcagtgagagaagaatcgagcggctctgcaatccctccctcagtgagctgcctgccttcctggtggctgaaggtggtctgaactctgggttcatgatagctcactgcacggcagcagcccttgtttctgagaacaaggctctgtgccatccctcgtctgttgactccctctccaccagcgcagccacggaggaccacgtctccatgggaggatgggcagcaaggaaagccctcagggtcatcgagcatgtggagcaagtgctggccatcgagctccttgcagcctgccagggcatagagtttctacgtcccctgaaaacaaccactccgctggagaaggtctatgacctggtgcgctctgttgtaaggccctggataaaagatcgcttcatggccccggacatcgaggcagcccacaggctgctcctggagcagaaggtttgggaagtagctgctccatacattgaaaaatacagaatggagcatattccagaatcaagacctctttctccaacagccttttcactgcaatttctgcacaagaaatccaccaaaatcccggagtctgaggacctttaatgggctttgtcatgaagtagcagatgagagggcagtcagtttagcacaaagcaatactaggctgaaggagagacctgagaactttcctaggtagatcaatccattgtatcattcagttcttctaaagcctacgttggttaggctgatggcagtattatagttgctaaattcagcactgtgttcctgttgtcgtggttcaagacccaccaggtattttcagattataaaacttttctttctttcttaacagtttcaacaggccactcactcttaagggtgagaagaataaccacaattgtatgtgcctgttttttactcttagcattagatgaattcaaatttggaaacagattgatagcaattttttctaaaaacattagacttttgttaacctttttttttttttttaaatttgcttcaacaagctctccaccagttgactttctttggctaattttactttgcatgatatgccttaatatgccttcataaataaccattttaagtcataatttgtccttaagctgcttttttcttctattaattggatcatagtaaagagtagtcaatagggtcttcagctattaattgtagaggtgattaaaaccaacaaggagtttcatgtgcaaaggagataaggaatgaatataaagattgctatttgggtggctcttattaaactgtgtattttgtacttatcactacacgtatcccccaaatgcttacatgggagtttgaggttagtattttcacttccttggtgttagtactctattcacattcttattgtaaccttcctcatttcacagataaggaatctttggggattaaccaacctcctttctgtaatggtaatcattaaaataagtcctattgataaaggtcagatggagccctagagtgtattactgcatctatttttttccccgagaagataaaggaccttcagggatggcttaagtgtatctgtccagatgaaggatgggtcacatgacctcttggcttcccaagtctaagctctgtgactttgcaccagtgtgtgcatatatgtgcaaggcccttcaagtggtctgaaaccgtggctctaaaaaccacagctggtggagaggaggacagacacacttgccaccttgcctacctaattgccatctaaaatgggccgaacagtggatttcacaatagagttttcaccctttagatttacaacctgtcaggtggaaactgaagtgaaaactgctgcacacagcaattcagggagcaaaaaatgtgctgaggagactgtttacctaaaggttgttcttggtgctattccttgtcaaaatgtgaacacacacaaatgaggtttgtgcattgtcatccgtgggctgccattgagccagtaacccccagtggtctcatggtgctcttcgctccagtttggggaatgctggattctttcagcccctgcagccctccaggtcaaaatgacactttgtcactgagttttctacacagctctattagtaactgacagcacacgccttcaagggaacttcaagggaaacatggaataaactaagtctcaattgcc

SEQ ID NO: 124562 - DNA, 2804 bp, Artificial Sequence
  derived and/or modified sequence
agacagaaacgagggaagagagagaaattggggaccctgaagaaagggggccagcagcaggtaggtgccatcagggacaagaacagcacctcccagggtgggagaccccaggcctttctggcagcaggtctggatggaaagtggacaggaggctcacccgtctgcatcccctgctcctgcccctgctcggctacaaaaaccaaagggacagcagctgaccacaccccggtagccactcctgcataaagctctcccctcctgtgaccagctgaggacctcaggctgcagcggagccatgcccagatacacggtgcacgtacgtggggaatggctggcagtgccctgccaggacgcgcagctcactgtgggctggctgggccgggaggccgtgaggcgctatatcaagaataagcccgacaatggtggcttcacctccgtggatgacgcgcacttccttgtgcgccggtgcaagggcctgggcctgctggacaacgaggaccggctcgaggtggccctagagaacaacgagttcgtggaagtggttatagagggtgatgccatgtctcctgacttcattccatctcaaccagaaggagtttatctatacagcaagtaccgggagcctgaaaagtacatcgagttagatggagaccgtctgaccacggaggatctggtcaacttgggaaagggacgctacaaaataaagctcaccccaacagctgagaagagggtgcagaaatccagggaggtcatagatagcatcataaaagagaaaacagggagcttcaggtcaacttagtacgctcacattcttcaggtgttgggaaaccactaagtcctgagaggtgtcggatgctcttggctttaaggatcaatgtcttagccaaaggatacagtggcatttccctggagaccctcaaacaagtcatagaaatgtttaatgcctcctgcctgccctatgtcccagagaaaggaaccgttggtgccagtggagaccttgccccactctctcatcttgctcttgggctagttggagaagggaagatgtggtctccgaagagtggctgggctgatgctaaatacgtgctagaagcccatggattgaaaccagttattttaaaaccaaaagagggcctggcactcatcaatgggacgcagatgatcacatccctgggctgtgaagctgtagagcgagccagtgctattgcacggcaggctgacattgtggcagccctgacccttgaggtgctgaagggcaccaccaaagcctttgacactgacattcatgctcttcgacctcaccgtgggcaaattgaagttgcttttcggtttcggtcactcttggactcagatcaccacccatcagaaatagcagagagtcacaggttctgtgatcgcgtccaggatgcatacaccttgcgctgctgtccacaggtccatggtgtggtgaatgatacaatagcatttgtgaagaacatcattaccacagaactgaacagcgcaacagataatcctatggtctttgccaataggggagagacagtttctggaggaaacttccatggtgaatacccagccaaagccctagactacttggccattggcatccatgaacttgctgcaatcagtgagagaagaatcgagcggctctgcaatccctccctcagtgagctgcctgccttcctggtggctgaaggtggtctgaactctgggttcatgatagctcactgcacggcagcagcccttgtttctgagaacaaggctctgtgccatccctcgtctgttgactccctctccaccagcgcagccacggaggaccacgtctccatgggaggatgggcagcaaggaaagccctcagggtcatcgagcatgtggagcaagtgctggccatcgagctccttgcagcctgccagggcatagagtttctacgtcccctgaaaacaaccactccgctggagaaggtctatgacctggtgcgctctgttgtaaggccctggataaaagatcgcttcatggccccggacatcgaggcagcccacaggctgctcctggagcagaaggtttgggaagtagctgctccatacattgaaaaatacagaatggagcatattccagaatcaagacctctttctccaacagccttttcactgcaatttctgcacaagaaatccaccaaaatcccggagtctgaggacctttaatgggctttgtcatgaagtagcagatgagagggcagtcagtttagcacaaagcaatactaggctgaaggagagacctgagaactttcctaggtagatcaatccattgtatcattcagttcttctaaagcctacgttggttaggctgatggcagtattatagttgctaaattcagcactgtgttcctgttgtcgtggttcaagacccaccaggtattttcagattataaaacttttctttctttcttaacagtttcaacaggccactcactcttaagggtgagaagaataaccacaattgtatgtgcctgttttttactcttagcattagatgaattcaaatttggaaacagattgatagcaattttttctaaaaacattagacttttgttaacctttttttttttttttaaatttgcttcaacaagctctccaccagttgactttctttggctaattttactttgcatgatatgccttaatatgccttcataaataaccattttaagtcataatttgtccttaagctgcttttttcttctattaattggatcatagtaaagagtagtcaatagggtcttcagctattaattgtagaggtgatt

SEQ ID NO: 124563 - DNA, 1974 bp, Artificial Sequence
  derived and/or modified sequence
atgccccgctacacagtgcacgtgcggggggagtggctggccgtgccctgccaggatgcccagctgactgtgggctggctgggccgggaggccgtgcggcgctacatcaagaacaagccagacaatggaggcttcacctctgtggatgatgcccacttcctggtgcggcgctgcaagggcctgggcctgctggacaatgaagatcggctggaggtggccctggagaacaatgaatttgtggaggtggtgattgaaggagatgccatgagcccagacttcatccccagccagcctgagggcgtgtacctgtacagcaagtaccgggagcctgagaagtacatcgagctggatggagaccggctgaccacagaggacctggtgaacctgggcaagggccgctacaagatcaagctgacccccacagctgagaagagggtgcagaagagccgggaggtgattgacagcatcatcaaggagaagacagtggtgtatggcatcaccaccggctttgggaagtttgccaggacagtcatccccatcaacaagctgcaggagctgcaggtgaacctggtgcgcagccacagcagcggcgtgggcaagcccctgagccctgagcgctgcaggatgctgctggccctgcgcatcaacgtgctggccaagggctacagcggcatcagcctggagaccctgaagcaggtgattgagatgtttaatgccagctgcctgccctacgtgcctgagaagggcaccgtgggcgccagcggggacctggcccccctgagccacctggccctgggcctggtgggggagggcaagatgtggagccccaagagcggctgggcagatgccaagtatgtgctggaggcccacggcctgaagcctgtgatcctgaagcccaaggagggcctggccctgatcaatggcacccagatgatcaccagcctgggctgtgaggccgtggagcgggccagcgccatcgcccggcaggccgacatcgtggccgccctgaccctggaggtgctgaagggcaccaccaaggcctttgacacagacatccacgccctgcggccccaccggggccagatcgaggtggccttccgcttccgcagcctgctggacagcgaccaccaccccagcgagattgctgagagccaccgcttctgtgacagagtgcaggatgcctacaccctgcgctgctgcccccaggtgcacggcgtggtgaatgacaccatcgcctttgtgaagaacatcatcaccacagagctgaacagcgccacagacaaccccatggtgtttgccaacagaggagagaccgtgtctgggggcaacttccatggagagtacccagccaaggccctggactacctggccatcggcatccacgagctggccgccatcagcgagaggagaattgagcggctgtgcaaccccagcctgtctgagctgcctgccttcctggtggccgagggcggcctgaacagcggcttcatgattgcccactgcacagctgctgccctggtgtctgagaacaaggccctgtgccaccccagctctgtggacagcctgagcaccagcgctgccacagaagatcatgtgtccatgggcggctgggccgccaggaaggccctgcgggtcatcgagcacgtggagcaggtgctggccatcgagctgctggccgcctgccagggcatcgagttcctgcggcccctgaagaccaccacccccctggagaaggtgtatgacctggtgcgctctgtggtgcggccctggatcaaggaccgcttcatggccccagacatcgaggccgcccaccggctgctgctggagcagaaggtgtgggaggtggccgccccctacatcgagaagtacaggatggagcacatccctgagagccggcccctgagccccacagccttcagcctgcagttcctgcacaagaagagcaccaagatccctgagagcgaggacctgtag

SEQ ID NO: 124564 - DNA, 1974 bp, Artificial Sequence
  derived and/or modified sequence
atgccccggtacaccgtgcacgtgcggggcgagtggctggccgtgccttgccaggatgcacagttgaccgtcggttggttggggagagaagctgtgcggaggtatattaaaaacaagcccgacaatggcggctttactagcgtcgatgacgcccacttccttgtaaggagatgtaaagggctgggcctgcttgacaacgaagataggctggaggtggcattagaaaacaatgaattcgtggaggttgtcatcgaaggagacgccatgagcccagattttattcccagtcaacccgaaggggtgtatctttatagcaaatatcgtgagccggagaaatatattgagctggatggagaccgactgacaacagaggatctggtgaatttgggcaaaggcaggtataaaattaaactgacgccaactgcagagaagagggtgcagaaatccagggaagtaatagatagcattatcaaggaaaagacagtggtgtacggaatcaccaccggatttggcaagtttgcccgcaccgtgattcctatcaacaagctacaagagctacaggtgaatctcgtcaggagccactcgtccggagtgggaaagcccctcagccccgaacggtgtcgaatgttactcgcacttaggatcaatgtgctggccaaaggttacagcggaatcagcctggaaactctgaaacaggtgattgaaatgtttaatgcgtcatgcctcccatatgtgcctgaaaagggtaccgtaggagcgagtggagatttagctccactcagtcaccttgccctgggcctggtgggagagggaaaaatgtggagccccaaatcaggatgggctgatgctaagtacgtacttgaggcgcacggtctgaagccggtgatcctgaagccaaaggagggtttggccctgatcaacgggactcagatgatcacctcactcggatgcgaagcggttgaacgggcctctgcaatagcaagacaggcagacattgttgcggccctgacccttgaggtgctgaagggaaccactaaagcttttgatacggacatacatgccctaaggccacaccgcgggcaaattgaagtagccttcaggttcaggagtttgctcgatagcgatcatcatccatccgagatcgcagaaagccacaggttctgtgaccgtgtacaggatgcctacacactgcgctgctgcccccaggtgcacggggtcgtgaacgacaccatcgccttcgtcaagaacatcattactaccgaactgaattccgccacggacaaccccatggtgttcgctaatagaggcgagactgtgtctggcggaaacttccatggtgaataccctgcaaaggccctggattacctggccataggcatccacgagctggctgcaatctcagaaagaaggatcgaacggctgtgcaacccctctttgtctgagcttccggctttcctggtggcagagggtggactcaacagcggctttatgatcgctcattgcacagctgcagccctcgtaagtgagaacaaggcactttgtcaccccagttctgtcgactccctatcaactagtgcagcaaccgaagatcacgtctccatgggcggctgggccgccaggaaagccctgagagtgatcgagcacgtggagcaagtgctggccattgagcttctcgctgcatgtcagggcattgagtttctgaggccactcaaaacaacaactcctttggaaaaagtgtacgacctggtacgttccgtcgtacggccgtggatcaaagaccgctttatggccccagacattgaggcagcgcacaggcttctgctcgaacagaaagtctgggaagtggcagccccctacatcgagaagtatcgtatggaacacatccccgagtcacgtccactttcccctaccgcgttcagtctgcagttcctgcataagaagtccactaagatccccgaatcagaagacctttag

SEQ ID NO: 124565 - DNA, 1974 bp, Artificial Sequence
  derived and/or modified sequence
atgccccgttacactgtccacgtgcggggagagtggctggctgtgccctgccaggacgcacagctcaccgtgggctggctgggcagagaggcagtgcggagatacatcaagaataaacctgacaatgggggttttaccagtgtcgacgacgctcacttcttggtgcgaaggtgcaagggattagggcttcttgacaacgaagatcgcctagaggtggctttggaaaataatgagttcgttgaagttgtgatcgaaggggacgccatgtctccagattttattccttcacagccggagggcgtgtatctctactccaaatatagagagcccgaaaaatatatagagcttgacggcgaccggctgacaacagaggacctggtgaacctgggaaaaggacggtacaagataaaattgacccccaccgcggaaaagcgagtgcaaaaatcaagggaagttatagacagcattattaaagagaaaacagtcgtatatggtatcactacaggctttggcaaattcgctcggacggtcattcctatcaacaaactgcaagagctgcaagtgaacttagtgcggtcccattcctcgggcgttgggaagcctctttctcctgaacggtgccggatgctgctagcactgaggatcaatgttctagccaagggctattcagggattagcctggagacgctaaagcaggtgatagagatgtttaacgccagctgcttgccctacgtgcccgagaaggggaccgttggggcttccggagatttggcccctttgagtcatctggctctcgggctcgtcggagaaggcaagatgtggtccccaaaatcggggtgggcggatgcgaagtacgttcttgaagcccacgggctgaagcccgtgatcctgaagcctaaggaggggctagcgctgattaacgggactcagatgattacttcactggggtgtgaggccgtagaacgcgcatccgcaatcgctcgacaagcagatattgtcgccgctctcaccttagaagtgttgaagggaaccaccaaagctttcgacacagacatccacgctctgagaccgcacaggggacaaatagaagtggcctttagatttaggtcactgttggatagcgaccatcatccctctgaaatagccgagtcacacaggttctgtgatagagtccaagacgcctacactttgaggtgctgccctcaggtgcacggcgttgtgaatgatacaatcgcattcgtaaaaaacatcatcacaacagagttgaactccgctacggataatcctatggtctttgctaaccgaggcgagacagtatccggcggaaacttccatggcgagtatcctgcaaaggctctggattacctggctataggcattcacgagctggctgccatatccgaacgcaggatagaacgcctttgcaacccatcattatccgaactgccagccttcttagtggccgagggtgggctaaactccggatttatgatagctcattgtacggccgcagccctggtgtcggaaaataaggctctatgccacccgagttcagtggatagcttaagcaccagtgctgccaccgaagaccatgtctcaatgggaggctgggccgctcggaaggctctccgcgtgattgagcatgtggagcaagtgctggccatagagctgcttgcagcctgccagggaatcgagttcctcagacccctcaagacaacaacgccgttggagaaagtgtacgacctcgttaggtccgtggtgcggccttggatcaaagatcgttttatggcaccggatatcgaggcagctcacagactgctgctcgaacagaaggtgtgggaggtcgctgctccatatattgaaaagtatcgtatggagcatatcccagagagtagacccctgagccctacagccttcagtctccaatttttgcacaagaaatccacaaagatccctgagagcgaggacttgtag

SEQ ID NO: 124566 - protein, 509 aa, Artificial Sequence
  derived and/or modified sequence
MAERAALEELVKLQGERVRGLKQQKASAELIEEEVAKLLKLKAQLGPDESKQKFVLKTPKGTRDYSPRQMAVREKVFDVIIRCFKRHGAEVIDTPVFELKETLMGKYGEDSKLIYDLKDQGGELLSLRYDLTVPFARYLAMNKLTNIKRYHIAKVYRRDNPAMTRGRYREFYQCDFDIAGNFDPMIPDAECLKIMCEILSSLQIGDFLVKVNDRRILDGMFAICGVSDSKFRTICSSVDKLDKVSWEEVKNEMVGEKGLAPEVADRIGDYVQQHGGVSLVEQLLQDPKLSQNKQALEGLGDLKLLFEYLTLFGIDDKISFDLSLARGLDYYTGVIYEAVLLQTPAQAGEEPLGVGSVAAGGRYDGLVGMFDPKGRKVPCVGLSIGVERIFSIVEQRLEALEEKIRTTETQVLVASAQKKLLEERLKLVSELWDAGIKAELLYKKNPKLLNQLQYCEEAGIPLVAIIGEQELKDGVIKLRSVTSREEVDVRREDLVEEIKRRTGQPLCIC

SEQ ID NO: 124567 - protein, 440 aa, Artificial Sequence
  derived and/or modified sequence
MAVREKVFDVIIRCFKRHGAEVIDTPVFELKETLMGKYGEDSKLIYDLKDQGGELLSLRYDLTVPFARYLAMNKLTNIKRYHIAKVYRRDNPAMTRGRYREFYQCDFDIAGNFDPMIPDAECLKIMCEILSSLQIGDFLVKVNDRRILDGMFAICGVSDSKFRTICSSVDKLDKVSWEEVKNEMVGEKGLAPEVADRIGDYVQQHGGVSLVEQLLQDPKLSQNKQALEGLGDLKLLFEYLTLFGIDDKISFDLSLARGLDYYTGVIYEAVLLQTPAQAGEEPLGVGSVAAGGRYDGLVGMFDPKGRKVPCVGLSIGVERIFSIVEQRLEALEEKIRTTETQVLVASAQKKLLEERLKLVSELWDAGIKAELLYKKNPKLLNQLQYCEEAGIPLVAIIGEQELKDGVIKLRSVTSREEVDVRREDLVEEIKRRTGQPLCIC

SEQ ID NO: 124568 - DNA, 1530 bp, Artificial Sequence
  derived and/or modified sequence
atggcagaacgagccgcgttagaagagttagtgaaactccagggagaacgcgttcggggtctcaaacagcagaaggctagcgcggaactgattgaggaggaagtggcgaaactgctcaagctgaaagcccagctgggacctgacgagagcaaacagaaattcgtgctcaaaacaccaaagggaacccgcgattatagtccgaggcagatggccgtgcgcgaaaaagtgtttgatgtgatcattcgttgctttaaacgccatggggctgaggtaatcgacacaccagtctttgagctgaaagaaacacttatgggcaagtatggagaagatagcaagctcatctatgacctgaaggaccaaggcggcgagctgctttctctcagatatgacctgaccgtgcctttcgcccgatatctagctatgaataagctcaccaacataaagcggtaccacatcgctaaagtgtatcggagggacaaccctgctatgacccgaggcaggtacagggagttttaccagtgcgacttcgatatagccggcaattttgacccaatgattcctgacgccgagtgtctcaagatcatgtgtgaaatcctgagttccctgcaaatcggtgactttttggtcaaagtcaacgacaggcgcattcttgatgggatgttcgccatttgtggcgttagcgactctaaattccgaacgatctgttcaagtgttgacaagctggataaggtatcttgggaagaagtgaaaaacgagatggtcggcgaaaaaggactcgccccggaggtcgccgaccgaattggcgattatgtccagcagcacgggggagtgtcccttgtggagcaactacttcaggacccaaagcttagtcagaataaacaggctctagagggactcggtgacctaaaattgctctttgagtatcttacacttttcggaatagacgataagatttcctttgacctgagcttggccaggggactcgactactacacgggggtaatctatgaggctgttctgctacagacccccgcccaggctggagaagagcccctcggggtgggctccgtggcggccgggggacgatatgacggtctggttggcatgttcgaccccaagggacgaaaagtgccttgtgtggggctttccattggcgtggagcggatcttctcaatcgtcgaacagcggctcgaggcactggaagaaaaaatcaggacaaccgaaacgcaggtcctcgtagcctcagcgcagaagaagttgctggaggagaggttgaagctggtgtcagaactgtgggacgctggaatcaaggctgagctgctttataaaaaaaatcctaaacttctgaaccagctgcagtattgcgaggaagctgggattcctctggtggccattatcggtgagcaggagctgaaggatggggttatcaaattacgctcagttacatcccgagaagaggtagacgtccgaagagaggatttggtcgaagaaattaagcgacggacagggcagccactgtgcatctgctag

SEQ ID NO: 124569 - DNA, 1810 bp, Artificial Sequence
  derived and/or modified sequence
cagcaggcggctcaagtggacagccgggatggcagagcgtgcggcgctggaggagctggtgaaacttcagggagagcgcgtgcgaggcctcaagcagcagaaggccagcgccgagctgatcgaggaggaggtggcgaaactcctgaaactgaaggcacagctgggtcctgatgaaagcaaacagaaatttgtgctcaaaacccccaagggcacaagagactatagtccccggcagatggcagttcgcgagaaggtgtttgacgtaatcatccgttgcttcaagcgccacggtgcagaagtcattgatacacctgtatttgaactaaaggaaacactgatgggaaagtatggggaagactccaagcttatctatgacctgaaggaccagggcggggagctcctgtcccttcgctatgacctcactgttccttttgctcggtatttggcaatgaataaactgaccaacattaaacgctaccacatagcaaaggtatatcggcgggataacccagccatgacccgtggccgataccgggaattctaccagtgtgattttgacattgctgggaactttgatcccatgatccctgatgcagagtgcctgaagatcatgtgcgagatcctgagttcacttcagataggcgacttcctggtcaaggtgtcctgggaagaggtgaagaatgagatggtgggagagaagggccttgcacctgaggtggctgaccgcattggggactatgtccagcaacatggtggggtatccctggtggaacagctgctccaggatcctaaactatcccaaaacaagcaggccttggagggcctgggagacctgaagttgctctttgagtacctgaccctatttggcattgatgacaaaatctcctttgacctgagccttgctcgagggctggattactacactggggtgatctatgaggcagtgctgctacagaccccagcccaggcaggggaagagcccctgggtgtgggcagtgtggctgctggaggacgctatgatgggctagtgggcatgttcgaccccaaagggcgcaaggtgccatgtgtggggctcagcattggggtggagcggattttctccatcgtggaacagagactagaggctttggaggagaagatacggaccacggagacacaggtgcttgtggcatctgcacagaagaagctgctagaggaaagactaaagcttgtctcagaactgtgggatgctgggatcaaggctgagctgctgtacaagaagaacccaaagctactgaaccagttacagtactgtgaggaggcaggcatcccactggtggctatcatcggcgagcaggaactcaaggatggggtcatcaagctccgttcagtgacgagcagggaagaggtggatgtccgaagagaagaccttgtggaggaaatcaaaaggagaacaggccagcccctctgcatctgctgaactgaacaaactatcagaggaaaggaagtgggactggcactatttgaggttaagacaaactgcatatgtacttcaattgctttgcacttttccgtttcagcggaagacctgaagagtggtcagaacagagcctttgatttttattatggttattttattgattattactggcaaaaacggccaggtacaacacctttttcatacaaggcccaggaggcttagtccagtctgtgctcctgggctacaaggacccagcctgagatggtcccatctgcagggccccgcaccagttggagcagatgcctccccaccaccaattgccaaaggtccaataaaatgcctcaaccacgg

SEQ ID NO: 124570 - DNA, 3334 bp, Artificial Sequence
  derived and/or modified sequence
cccttactacatatccgtgtataagtcattcatttaatcttgcagcctccgtttcctcaactgcagaatggaaatcaaaactccaacctctcaagattgctccaaggattaaatgaccaggcatccaaatcgcttagttcagtgtcagtacatagtgggcactcgataaaaaccgattgtaacactactggaatacaggccgcgaggctatgcgttcagatctggagaccctgctgggacagaccagagataattctgtctcgctcacctggctttggcaacggaccgccccggtgcacgaagcgcagggcggtcgcaggagctggctgagcagcgaagcccaggccctcctgggaagaagtccgagcaggggcatcgcgcggcaggacgccggctttccgggacaggaacaaaaggcctgggaaggaggcgggtcagacaccaggaagggtggagggcactgcaaaggcggaacccgcgcaccagggaaaactcgggcgtttgcgcacctcactagtcacgaaggctgaggtgggatcctcccaagttcccttagtagccagcttcggcacttccgggaggagccggaaataatttttgtgctcggcggaggctctctaggcgtgcgacccagcgactcgatagccggaagtcatccttgctgaggctggggcaaccaccgcaggtcgagacagcaggcggctcaagtggacagccgggatggcagagcgtgcggcgctggaggagctggtgaaacttcagggagagcgcgtgcgaggcctcaagcagcagaaggccagcgccgagctgatcgaggaggaggtggcgaaactcctgaaactgaaggcacagctgggtcctgatgaaagcaaacagaaatttgtgctcaaaacccccaagggcacaagagactatagtccccggcagatggcagttcgcgagaaggtgtttgacgtaatcatccgttgcttcaagcgccacggtgcagaagtcattgatacacctgtatttgaactaaaggaaacactgatgggaaagtatggggaagactccaagcttatctatgacctgaaggaccagggcggggagctcctgtcccttcgctatgacctcactgttccttttgctcggtatttggcaatgaataaactgaccaacattaaacgctaccacatagcaaaggtatatcggcgggataacccagccatgacccgtggccgataccgggaattctaccagtgtgattttgacattgctgggaactttgatcccatgatccctgatgcagagtgcctgaagatcatgtgcgagatcctgagttcacttcagataggcgacttcctggtcaaggtaaacgatcgacgcattctagatgggatgtttgctatctgtggtgtttctgacagcaagttccgtaccatctgctcctcagtagacaagctggacaaggtgtcctgggaagaggtgaagaatgagatggtgggagagaagggccttgcacctgaggtggctgaccgcattggggactatgtccagcaacatggtggggtatccctggtggaacagctgctccaggatcctaaactatcccaaaacaagcaggccttggagggcctgggagacctgaagttgctctttgagtacctgaccctatttggcattgatgacaaaatctcctttgacctgagccttgctcgagggctggattactacactggggtgatctatgaggcagtgctgctacagaccccagcccaggcaggggaagagcccctgggtgtgggcagtgtggctgctggaggacgctatgatgggctagtgggcatgttcgaccccaaagggcgcaaggtgccatgtgtggggctcagcattggggtggagcggattttctccatcgtggaacagagactagaggctttggaggagaagatacggaccacggagacacaggtgcttgtggcatctgcacagaagaagctgctagaggaaagactaaagcttgtctcagaactgtgggatgctgggatcaaggctgagctgctgtacaagaagaacccaaagctactgaaccagttacagtactgtgaggaggcaggcatcccactggtggctatcatcggcgagcaggaactcaaggatggggtcatcaagctccgttcagtgacgagcagggaagaggtggatgtccgaagagaagaccttgtggaggaaatcaaaaggagaacaggccagcccctctgcatctgctgaactgaacaaactatcagaggaaaggaagtgggactggcactatttgaggttaagacaaactgcatatgtacttcaattgctttgcacttttccgtttcagcggaagacctgaagagtggtcagaacagagcctttgatttttattatggttattttattgattattactggcaaaaacggccaggtacaacacctttttcatacaaggcccaggaggcttagtccagtctgtgctcctgggctacaaggacccagcctgagatggtcccatctgcagggccccgcaccagttggagcagatgcctccccaccaccaattgccaaaggtccaataaaatgcctcaaccacggagtctgcgtgtgtcagtgatgcctagccccgccttccccagcagaccaatgtagggatggaaaagggagaaaaacagtaaacttgtgaccctgaggttcttgtctccagcgtccaccctgcggcttgggagctcctcctcgggaggcagcccccgtacatacgcacccgcgactttgcagctttcacctgaaggtctgagcgaagcccgggcggcgcacgtgcagtggatacctccacccccctgggaggcggggtcgcgctcagagccaatgagagcttgcggggtggaggggtagggaagcttccagaggccggtggggaggaagttataaagagggtacgagggggccagctggagagccatgcagtccaagcgggattgtgaggtaagcggctggcgacttgggggccggcgagccccgccggagcgggggtcggctttagggaccccagtaccacaggagaggtgggggcgcgcttggcgatccgccattccaaccttcctttccctctcagctgtggtgtgagagggtgaatccagagaacaaggcggcgctggaggcgtgggtcagggagacaggcatccgcctggtgcaggtgaacgggcagaggaagtatggcgggccacccccaggtacggtagtcccagcccctccgcctgtccggctacaccagccccctttgggggaggggctgctccgagccttcactgtcagaaactgcgaactaccc

SEQ ID NO: 124571 - DNA, 1530 bp, Artificial Sequence
  derived and/or modified sequence
atggccgagagagctgccctggaggagctggtgaagctgcagggcgagcgggtgcggggcctgaagcagcagaaggccagcgctgagctgattgaggaggaggtggccaagctgctgaagctgaaggcccagctgggcccagatgagagcaagcagaagtttgtgctgaagacccccaagggcacccgggactacagcccccggcagatggctgtgcgggagaaggtgtttgatgtgatcatccgctgcttcaagagacatggagctgaggtgattgacacccctgtgtttgagctgaaggagaccctgatgggcaagtatggagaggacagcaagctgatctatgacctgaaggaccagggcggggagctgctgagcctgcgctatgacctgactgtgccctttgcccgctacctggccatgaacaagctgaccaacatcaagcgctaccacatcgccaaggtgtacagaagagacaacccagccatgacccggggccgctaccgggagttctaccagtgtgactttgatattgctggcaactttgaccccatgatcccagatgctgagtgcctgaagatcatgtgtgagatcctgagcagcctgcagatcggggacttcctggtgaaggtgaatgaccggcgcatcctggatggcatgtttgccatctgtggggtgtctgacagcaagttccgcaccatctgcagctctgtggacaagctggacaaggtgtcctgggaggaggtgaagaatgagatggtgggggagaagggcctggcccctgaggtggccgacagaattggagactatgtgcagcagcacggcggcgtgtccctggtggagcagctgctgcaggaccccaagctgagccagaacaagcaggccctggagggcctgggggacctgaagctgctgtttgagtacctgaccctgtttggaattgatgacaagatcagctttgacctgagcctggcccggggcctggactactacacaggagtcatctatgaggccgtgctgctgcagaccccagcccaggccggggaggagcccctgggcgtgggctctgtggccgccggcggccgctatgatggcctggtgggcatgtttgaccccaagggcaggaaggtgccctgtgtgggcctgagcattggagtggagcgcatcttcagcatcgtggagcagaggctggaggccctggaggagaagatccgcaccacagagacccaggtgctggtggccagcgcccagaagaagctgctggaggagcggctgaagctggtgtctgagctgtgggatgctggcatcaaggccgagctgctgtacaagaagaaccccaagctgctgaaccagctgcagtactgtgaggaggccggcatccccctggtggccatcatcggggagcaggagctgaaggatggagtcatcaagctgcggtctgtgaccagccgggaggaggtggatgtgcggcgggaggacctggtggaggagatcaagagaagaacaggccagcccctgtgcatctgctag

SEQ ID NO: 124572 - DNA, 1530 bp, Artificial Sequence
  derived and/or modified sequence
atggccgagcgggccgccctggaggagctggtgaagctgcagggcgaacgcgtaagggggctgaagcaacagaaggcgagcgcagaattgattgaggaagaggtcgccaaactgttgaaactgaaggcccaactgggccccgatgaaagtaaacagaaatttgtgctgaaaacgccgaagggcacccgggattactccccgagacagatggcagttcgggaaaaggtgttcgacgtcattataaggtgtttcaaacggcacggcgccgaggtgattgatactccagtttttgagctcaaggaaacacttatgggcaagtatggcgaggacagtaagttaatctatgacctcaaggaccaagggggcgagctgctctcccttcggtatgacctaaccgtaccgttcgcaaggtaccttgccatgaacaaattgaccaacatcaagcggtaccacatcgcaaaggtctacaggagggacaaccccgccatgacgagaggtcgatacagagagttctaccagtgcgattttgatatagcagggaacttcgaccccatgattccggatgcggaatgcctgaaaatcatgtgtgagattctaagtagcctgcagatcggcgacttcctcgtgaaggtgaacgaccgccgcatcttggatggtatgtttgctatatgtggcgtgagcgattcaaagtttaggaccatttgttcgtctgtagacaagctggataaagtgtcatgggaagaagttaaaaatgagatggtcggcgagaaaggactcgcacccgaagtggcagaccgtattggcgattacgtccaacagcatggcggcgttagtctggtagagcaacttctgcaagaccccaagctaagccagaacaaacaagcgctggagggtctgggcgacctgaagcttctcttcgaatacctgaccttatttggaatcgacgacaaaatttccttcgatctgagtctcgccaggggcctagattactacacaggggtcatttatgaggctgtgctgctccaaacgccggcccaagcaggagaagagcccctcggagtggggtcagtggcagctggtggccgatacgatggcctggtgggtatgtttgaccccaaaggtcgcaaagttccctgcgtcggactgtccattggagtggaacgtatcttctctattgttgagcagcgtctggaggctctcgaggagaagatcaggacaaccgagacccaagtccttgttgctagcgcccagaaaaaactgctggaagaacgacttaagctcgtcagtgagctatgggatgccggcatcaaggcagagctgctgtataaaaaaaacccaaaactactaaatcagttacagtactgtgaggaagcggggataccattggtggccattatcggggagcaggagctgaaggacggagtcatcaaattgaggtctgttacctctcgtgaggaagttgacgtgcgaagggaagatctcgttgaggagattaaacggcgaacgggccaacctttgtgcatatgttag

SEQ ID NO: 124573 - DNA, 1530 bp, Artificial Sequence
  derived and/or modified sequence
atggcggagcgggctgctctagaggaactagtgaagctgcagggagagagggtgcgcggtttgaagcagcagaaggcctcagccgagctcatcgaggaggaagtggccaaactgctcaagctgaaagcacagctgggccctgacgagagtaagcagaagtttgtcctgaaaactcccaagggaactagggattacagcccaaggcaaatggctgtgcgcgagaaggtgttcgacgtaataatccgttgctttaaacggcatggggcagaagtaattgatactcccgtcttcgaactgaaagagaccctgatgggcaagtatggggaggactccaagctgatatacgatcttaaagaccagggcggtgagttgttgtcccttaggtatgacttaaccgtgccctttgccagatatctggcgatgaacaagctaacaaatatcaagagataccatatagccaaggtgtatcggagagacaaccccgctatgaccaggggcaggtatcgtgagttctaccagtgcgacttcgacattgccggaaacttcgatcctatgatccccgacgcagagtgtttgaaaattatgtgcgaaatcctgtccagcctgcagatcggggatttcctggtcaaagttaacgataggcggatcttggatggtatgtttgctatatgtggcgtgtccgacagtaagtttcggaccatctgttcttctgttgataaactagataaagtttcctgggaggaggtcaagaatgagatggtcggagaaaaggggttagcacctgaggttgccgacagaataggggattatgtgcagcagcacggaggcgtgtcactggtggaacagctgttacaggacccaaaactgtcccagaacaaacaggctctggagggcctgggcgatctgaagctgctctttgaatacctgacactgttcggcatagatgataagattagtttcgatcttagcctcgcaagaggattggactactatactggggtcatttatgaagcagtcctcctccagaccccagcccaagccggagaggagcccttgggtgtagggtcagtggcggctggtggaagatatgatgggctcgtgggcatgttcgaccccaagggacgcaaggttccatgtgtgggcctcagcattggagtggagcggatcttcagcatcgtcgagcagaggttagaagccctcgaagaaaaaataagaactactgagacacaggtactcgtggcctccgcgcagaaaaagctcctggaggagagactgaaactggtaagtgaactctgggacgctggtattaaggccgaactcctgtacaaaaaaaatccgaagctactgaatcaactgcagtattgcgaggaggccggaattccgctggttgctatcattggggaacaggagttaaaggacggagttatcaaactcagatccgtgacttctagagaggaggtagacgtccgcagggaggatctggtggaggaaattaaaagaagaactggacagcccttgtgtatatgttag

SEQ ID NO: 124574 - DNA, 1530 bp, Artificial Sequence
  derived and/or modified sequence
atggccgagagagccgccctggaggagctggtgaagctgcagggcgagagagtgagaggcctgaagcagcagaaggccagcgccgagctgatcgaggaggaggtggccaagctgctgaagctgaaggcccagctgggccccgacgagagcaagcagaagttcgtgctgaagacccccaagggcaccagagactacagccccagacagatggccgtgagagagaaggtgttcgacgtgatcatcagatgcttcaagagacacggcgccgaggtgatcgacacccccgtgttcgagctgaaggagaccctgatgggcaagtacggcgaggacagcaagctgatctacgacctgaaggaccagggcggcgagctgctgagcctgagatacgacctgaccgtgcccttcgccagatacctggccatgaacaagctgaccaacatcaagagataccacatcgccaaggtgtacagaagagacaaccccgccatgaccagaggcagatacagagagttctaccagtgcgacttcgacatcgccggcaacttcgaccccatgatccccgacgccgagtgcctgaagatcatgtgcgagatcctgagcagcctgcagatcggcgacttcctggtgaaggtgaacgacagaagaatcctggacggcatgttcgccatctgcggcgtgagcgacagcaagttcagaaccatctgcagcagcgtggacaagctggacaaggtgagctgggaggaggtgaagaacgagatggtgggcgagaagggcctggcccccgaggtggccgacagaatcggcgactacgtgcagcagcacggcggcgtgagcctggtggagcagctgctgcaggaccccaagctgagccagaacaagcaggccctggagggcctgggcgacctgaagctgctgttcgagtacctgaccctgttcggcatcgacgacaagatcagcttcgacctgagcctggccagaggcctggactactacaccggcgtgatctacgaggccgtgctgctgcagacccccgcccaggccggcgaggagcccctgggcgtgggcagcgtggccgccggcggcagatacgacggcctggtgggcatgttcgaccccaagggcagaaaggtgccctgcgtgggcctgagcatcggcgtggagagaatcttcagcatcgtggagcagagactggaggccctggaggagaagatcagaaccaccgagacccaggtgctggtggccagcgcccagaagaagctgctggaggagagactgaagctggtgagcgagctgtgggacgccggcatcaaggccgagctgctgtacaagaagaaccccaagctgctgaaccagctgcagtactgcgaggaggccggcatccccctggtggccatcatcggcgagcaggagctgaaggacggcgtgatcaagctgagaagcgtgaccagcagagaggaggtggacgtgagaagagaggacctggtggaggagatcaagagaagaaccggccagcccctgtgcatctgctag

SEQ ID NO: 124575 - protein, 526 aa, Artificial Sequence
  derived and/or modified sequence
LGGRSSCEDPGCPRDEERAPRMGCMKSKFLQVGGNTFSKTETSASPHCPVYVPDPTSTIKPGPNSHNSNTPGIREAGSEDIIVVALYDYEAIHHEDLSFQKGDQMVVLEESGEWWKARSLATRKEGYIPSNYVARVDSLETEEWFFKGISRKDAERQLLAPGNMLGSFMIRDSETTKGSYSLSVRDYDPRQGDTVKHYKIRTLDNGGFYISPRSTFSTLQELVDHYKKGNDGLCQKLSVPCMSSKPQKPWEKDAWEIPRESLKLEKKLGAGQFGEVWMATYNKHTKVAVKTMKPGSMSVEAFLAEANVMKTLQHDKLVKLHAVVTKEPIYIITEFMAKGSLLDFLKSDEGSKQPLPKLIDFSAQIAEGMAFIEQRNYIHRDLRAANILVSASLVCKIADFGLARVIEDNEYTAREGAKFPIKWTAPEAINFGSFTIKSDVWSFGILLMEIVTYGRIPYPGMSNPEVIRALERGYRMPRPENCPEELYNIMMRCWKNRPEERPTFEYIQSVLDDFYTATESQYQQQP

SEQ ID NO: 124576 - DNA, 1581 bp, Artificial Sequence
  derived and/or modified sequence
ctgggcggcagaagcagctgcgaggaccccggctgccccagagacgaggagagagcccccagaatgggctgcatgaagagcaagttcctgcaggtgggcggcaacaccttcagcaagaccgagaccagcgccagcccccactgccccgtgtacgtgcccgaccccaccagcaccatcaagcccggccccaacagccacaacagcaacacccccggcatcagagaggccggcagcgaggacatcatcgtggtggccctgtacgactacgaggccatccaccacgaggacctgagcttccagaagggcgaccagatggtggtgctggaggagagcggcgagtggtggaaggccagaagcctggccaccagaaaggagggctacatccccagcaactacgtggccagagtggacagcctggagaccgaggagtggttcttcaagggcatcagcagaaaggacgccgagagacagctgctggcccccggcaacatgctgggcagcttcatgatcagagacagcgagaccaccaagggcagctacagcctgagcgtgagagactacgaccccagacagggcgacaccgtgaagcactacaagatcagaaccctggacaacggcggcttctacatcagccccagaagcaccttcagcaccctgcaggagctggtggaccactacaagaagggcaacgacggcctgtgccagaagctgagcgtgccctgcatgagcagcaagccccagaagccctgggagaaggacgcctgggagatccccagagagagcctgaagctggagaagaagctgggcgccggccagttcggcgaggtgtggatggccacctacaacaagcacaccaaggtggccgtgaagaccatgaagcccggcagcatgagcgtggaggccttcctggccgaggccaacgtgatgaagaccctgcagcacgacaagctggtgaagctgcacgccgtggtgaccaaggagcccatctacatcatcaccgagttcatggccaagggcagcctgctggacttcctgaagagcgacgagggcagcaagcagcccctgcccaagctgatcgacttcagcgcccagatcgccgagggcatggccttcatcgagcagagaaactacatccacagagacctgagagccgccaacatcctggtgagcgccagcctggtgtgcaagatcgccgacttcggcctggccagagtgatcgaggacaacgagtacaccgccagagagggcgccaagttccccatcaagtggaccgcccccgaggccatcaacttcggcagcttcaccatcaagagcgacgtgtggagcttcggcatcctgctgatggagatcgtgacctacggcagaatcccctaccccggcatgagcaaccccgaggtgatcagagccctggagagaggctacagaatgcccagacccgagaactgccccgaggagctgtacaacatcatgatgagatgctggaagaacagacccgaggagagacccaccttcgagtacatccagagcgtgctggacgacttctacaccgccaccgagagccagtaccagcagcagccctag

SEQ ID NO: 124577 - DNA, 1581 bp, Artificial Sequence
  derived and/or modified sequence
ctcggaggcagatcaagctgcgaggaccccggctgtcctagagatgaagaacgggctccccggatggggtgtatgaaatctaagttcctgcaggtaggcggcaacactttttcaaagaccgaaacctctgccagtccacactgtccagtttacgtcccggacccgaccagcacaataaaaccggggcccaactcccataattctaacactccgggcattagagaggccgggtctgaggacattattgtggtggccctgtacgactacgaagcaatccaccacgaagacctgtcctttcagaagggcgatcaaatggtggttctggaggagtccggcgagtggtggaaggccagatccctggctacccgcaaggaaggctatatacctagcaattacgtggctcgtgtcgatagcctagagaccgaggagtggttctttaaaggcatcagccggaaggatgccgagagacaattactggccccaggaaacatgctgggttctttcatgatccgcgattctgaaaccactaagggctcctactcgctctcagtgagggattacgatcctagacagggggacactgtcaaacactataagattaggacactagacaatggaggcttctatatcagtccaaggagtaccttcagtacactgcaggaactggtggatcattacaaaaagggtaatgacggtctgtgccaaaagctttccgtcccttgtatgtcgagcaagccccagaaaccctgggagaaagacgcatgggagattcctcgagagtcactaaaactcgagaaaaagctcggagctgggcagtttggcgaagtgtggatggcgacatacaacaagcacacaaaagtggccgtcaagaccatgaagcccggttcaatgagcgtagaagcttttctggcagaagcgaacgtgatgaagaccctgcagcatgataagctggtgaaactgcacgccgtcgtgaccaaggaaccgatttacataatcacagaattcatggccaagggttctctcctagacttcttgaagtcagatgagggatctaagcagcccctacccaagttgatcgactttagcgcacagattgccgaggggatggcatttattgagcagagaaactacatccatagagacctcagagctgccaatatactcgtgtctgcgagccttgtatgcaagatcgcagactttggattggcacgagtgattgaagataatgagtacaccgcgcgagaaggagcaaaattccccatcaagtggacagctcccgaagccattaatttcggctcctttacaattaagagcgacgtttggtcatttgggatactcctgatggagatcgttacatacggccgcattccttaccccggcatgagcaaccccgaagtgataagggcactggagagggggtatagaatgcctcggcccgagaactgcccagaagaactctacaatatcatgatgaggtgctggaagaatagaccggaggaacgcccaactttcgagtatattcagtccgtgttggatgatttctatacggccacggagtctcagtaccaacagcagccctag

SEQ ID NO: 124578 - DNA, 2082 bp, Artificial Sequence
  derived and/or modified sequence
ctcgggagcacatcagaggcttagaggcgagtgggaagggactcagacagtgcaggacgagaaacgcccgcggcaccaaagcccctcagagcgtcgcccccgcctctagttctagaaagtcagtttcccggcactggcaccccggaacctcaggggctgccgagctgggggggcgctcaagctgcgaggatccgggctgcccgcgagacgaggagcgggcgcccaggatggggtgcatgaagtccaagttcctccaggtcggaggcaatacattctcaaaaactgaaaccagcgccagcccacactgtcctgtgtacgtgccggatcccacatccaccatcaagccggggcctaatagccacaacagcaacacaccaggaatcagggaggcaggctctgaggacatcatcgtggttgccctgtatgattacgaggccattcaccacgaagacctcagcttccagaagggggaccagatggtggtcctagaggaatccggggagtggtggaaggctcgatccctggccacccggaaggagggctacatcccaagcaactatgtcgcccgcgttgactctctggagacagaggagtggtttttcaagggcatcagccggaaggacgcagagcgccaactgctggctcccggcaacatgctgggctccttcatgatccgggatagcgagaccactaaaggaagctactctttgtccgtgcgagactacgaccctcggcagggagataccgtgaaacattacaagatccggaccctggacaacgggggcttctacatatccccccgaagcaccttcagcactctgcaggagctggtggaccactacaagaaggggaacgacgggctctgccagaaactgtcggtgccctgcatgtcttccaagccccagaagccttgggagaaagatgcctgggagatccctcgggaatccctcaagctggagaagaaacttggagctgggcagtttggggaagtctggatggccacctacaacaagcacaccaaggtggcagtgaagacgatgaagccagggagcatgtcggtggaggccttcctggcagaggccaacgtgatgaaaactctgcagcatgacaagctggtcaaacttcatgcggtggtcaccaaggagcccatctacatcatcacggagttcatggccaaaggaagcttgctggactttctgaaaagtgatgagggcagcaagcagccattgccaaaactcattgacttctcagcccagattgcagaaggcatggccttcatcgagcagaggaactacatccaccgagacctccgagctgccaacatcttggtctctgcatccctggtgtgtaagattgctgactttggcctggcccgggtcattgaggacaacgagtacacggctcgggaaggggccaagttccccatcaagtggacagctcctgaagccatcaactttggctccttcaccatcaagtcagacgtctggtcctttggtatcctgctgatggagatcgtcacctacggccggatcccttacccagggatgtcaaaccctgaagtgatccgagctctggagcgtggataccggatgcctcgcccagagaactgcccagaggagctctacaacatcatgatgcgctgctggaaaaaccgtccggaggagcggccgaccttcgaatacatccagagtgtgctggatgacttctacacggccacagagagccagtaccaacagcagccatgatagggaggaccagggcagggccagggggtgcccaggtggtggctgcaaggtggctccagcaccatccgccagggcccacacccccttcctactcccagacacccaccctcgcttcagccacagtttcctcatctgtccagtgggtaggttggactggaaaatctctttttgactcttgcaatccacaatctgacattctcaggaagcccccaagttgatatttctatttcctggaatggttggattttagttacagctgtgatttggaagggaaactttcaaaatagtgaaatgaatatttaaataaaagatataaatgccaaagtctttaccaaaa

SEQ ID NO: 124579 - DNA, 2101 bp, Artificial Sequence
  derived and/or modified sequence
accacgtccctggtcccagctcgggagcacatcagaggcttagaggcgagtgggaagggactcagacagtgcaggacgagaaacgcccgcggcaccaaagcccctcagagcgtcgcccccgcctctagttctagaaagtcagtttcccggcactggcaccccggaacctcaggggctgccgagctgggggggcgctcaagctgcgaggatccgggctgcccgcgagacgaggagcgggcgcccaggatggggtgcatgaagtccaagttcctccaggtcggaggcaatacattctcaaaaactgaaaccagcgccagcccacactgtcctgtgtacgtgccggatcccacatccaccatcaagccggggcctaatagccacaacagcaacacaccaggaatcagggaggcaggctctgaggacatcatcgtggttgccctgtatgattacgaggccattcaccacgaagacctcagcttccagaagggggaccagatggtggtcctagaggaatccggggagtggtggaaggctcgatccctggccacccggaaggagggctacatcccaagcaactatgtcgcccgcgttgactctctggagacagaggagtggtttttcaagggcatcagccggaaggacgcagagcgccaactgctggctcccggcaacatgctgggctccttcatgatccgggatagcgagaccactaaaggaagctactctttgtccgtgcgagactacgaccctcggcagggagataccgtgaaacattacaagatccggaccctggacaacgggggcttctacatatccccccgaagcaccttcagcactctgcaggagctggtggaccactacaagaaggggaacgacgggctctgccagaaactgtcggtgccctgcatgtcttccaagccccagaagccttgggagaaagatgcctgggagatccctcgggaatccctcaagctggagaagaaacttggagctgggcagtttggggaagtctggatggccacctacaacaagcacaccaaggtggcagtgaagacgatgaagccagggagcatgtcggtggaggccttcctggcagaggccaacgtgatgaaaactctgcagcatgacaagctggtcaaacttcatgcggtggtcaccaaggagcccatctacatcatcacggagttcatggccaaaggaagcttgctggactttctgaaaagtgatgagggcagcaagcagccattgccaaaactcattgacttctcagcccagattgcagaaggcatggccttcatcgagcagaggaactacatccaccgagacctccgagctgccaacatcttggtctctgcatccctggtgtgtaagattgctgactttggcctggcccgggtcattgaggacaacgagtacacggctcgggaaggggccaagttccccatcaagtggacagctcctgaagccatcaactttggctccttcaccatcaagtcagacgtctggtcctttggtatcctgctgatggagatcgtcacctacggccggatcccttacccagggatgtcaaaccctgaagtgatccgagctctggagcgtggataccggatgcctcgcccagagaactgcccagaggagctctacaacatcatgatgcgctgctggaaaaaccgtccggaggagcggccgaccttcgaatacatccagagtgtgctggatgacttctacacggccacagagagccagtaccaacagcagccatgatagggaggaccagggcagggccagggggtgcccaggtggtggctgcaaggtggctccagcaccatccgccagggcccacacccccttcctactcccagacacccaccctcgcttcagccacagtttcctcatctgtccagtgggtaggttggactggaaaatctctttttgactcttgcaatccacaatctgacattctcaggaagcccccaagttgatatttctatttcctggaatggttggattttagttacagctgtgatttggaagggaaactttcaaaatagtgaaatgaatatttaaataaaagatataaatgccaaagtctttaccaaaa

SEQ ID NO: 124580 - DNA, 2217 bp, Artificial Sequence
  derived and/or modified sequence
ggagttagcctcgctcagggcgcggctaaggcgcccagatggcctgcgggcgccaccacgtccctggtcccagctcgggagcacatcagaggcttagaggcgagtgggaagggactcagacagtgcaggacgagaaacgcccgcggcaccaaagcccctcagagcgtcgcccccgcctctagttctagaaagtcagtttcccggcactggcaccccggaacctcaggggctgccgagctgggggggcgctcaagctgcgaggatccgggctgcccgcgagacgaggagcgggcgcccaggggcaaccgctgtcatgagttacagtccttccaggatgtgcctctgaaaatggattgcatataaatgatggggtgcatgaagtccaagttcctccaggtcggaggcaatacattctcaaaaactgaaaccagcgccagcccacactgtcctgtgtacgtgccggatcccacatccaccatcaagccggggcctaatagccacaacagcaacacaccaggaatcagggaggcaggctctgaggacatcatcgtggttgccctgtatgattacgaggccattcaccacgaagacctcagcttccagaagggggaccagatggtggtcctagaggaatccggggagtggtggaaggctcgatccctggccacccggaaggagggctacatcccaagcaactatgtcgcccgcgttgactctctggagacagaggagtggtttttcaagggcatcagccggaaggacgcagagcgccaactgctggctcccggcaacatgctgggctccttcatgatccgggatagcgagaccactaaaggaagctactctttgtccgtgcgagactacgaccctcggcagggagataccgtgaaacattacaagatccggaccctggacaacgggggcttctacatatccccccgaagcaccttcagcactctgcaggagctggtggaccactacaagaaggggaacgacgggctctgccagaaactgtcggtgccctgcatgtcttccaagccccagaagccttgggagaaagatgcctgggagatccctcgggaatccctcaagctggagaagaaacttggagctgggcagtttggggaagtctggatggccacctacaacaagcacaccaaggtggcagtgaagacgatgaagccagggagcatgtcggtggaggccttcctggcagaggccaacgtgatgaaaactctgcagcatgacaagctggtcaaacttcatgcggtggtcaccaaggagcccatctacatcatcacggagttcatggccaaaggaagcttgctggactttctgaaaagtgatgagggcagcaagcagccattgccaaaactcattgacttctcagcccagattgcagaaggcatggccttcatcgagcagaggaactacatccaccgagacctccgagctgccaacatcttggtctctgcatccctggtgtgtaagattgctgactttggcctggcccgggtcattgaggacaacgagtacacggctcgggaaggggccaagttccccatcaagtggacagctcctgaagccatcaactttggctccttcaccatcaagtcagacgtctggtcctttggtatcctgctgatggagatcgtcacctacggccggatcccttacccagggatgtcaaaccctgaagtgatccgagctctggagcgtggataccggatgcctcgcccagagaactgcccagaggagctctacaacatcatgatgcgctgctggaaaaaccgtccggaggagcggccgaccttcgaatacatccagagtgtgctggatgacttctacacggccacagagagccagtaccaacagcagccatgatagggaggaccagggcagggccagggggtgcccaggtggtggctgcaaggtggctccagcaccatccgccagggcccacacccccttcctactcccagacacccaccctcgcttcagccacagtttcctcatctgtccagtgggtaggttggactggaaaatctctttttgactcttgcaatccacaatctgacattctcaggaagcccccaagttgatatttctatttcctggaatggttggattttagttacagctgtgatttggaagggaaactttcaaaatagtgaaatgaatatttaaataaaagatataaatgccaaagtctttacc

SEQ ID NO: 124581 - DNA, 2215 bp, Artificial Sequence
  derived and/or modified sequence
ggagttagcctcgctcagggcgcggctaaggcgcccagatggcctgcgggcgccaccacgtccctggtcccagctcgggagcacatcagaggcttagaggcgagtgggaagggactcagacagtgcaggacgagaaacgcccgcggcaccaaagcccctcagagcgtcgcccccgcctctagttctagaaagtcagtttcccggcactggcaccccggaacctcaggggctgccgagctgggggggcgctcaagctgcgaggatccgggctgcccgcgagacgaggagcgggcgcccagacaaacaaagcaaaaccgctcaagtcttgaggtggcaaatctttcccagttcccaccagaagaggatggggtgcatgaagtccaagttcctccaggtcggaggcaatacattctcaaaaactgaaaccagcgccagcccacactgtcctgtgtacgtgccggatcccacatccaccatcaagccggggcctaatagccacaacagcaacacaccaggaatcagggaggcaggctctgaggacatcatcgtggttgccctgtatgattacgaggccattcaccacgaagacctcagcttccagaagggggaccagatggtggtcctagaggaatccggggagtggtggaaggctcgatccctggccacccggaaggagggctacatcccaagcaactatgtcgcccgcgttgactctctggagacagaggagtggtttttcaagggcatcagccggaaggacgcagagcgccaactgctggctcccggcaacatgctgggctccttcatgatccgggatagcgagaccactaaaggaagctactctttgtccgtgcgagactacgaccctcggcagggagataccgtgaaacattacaagatccggaccctggacaacgggggcttctacatatccccccgaagcaccttcagcactctgcaggagctggtggaccactacaagaaggggaacgacgggctctgccagaaactgtcggtgccctgcatgtcttccaagccccagaagccttgggagaaagatgcctgggagatccctcgggaatccctcaagctggagaagaaacttggagctgggcagtttggggaagtctggatggccacctacaacaagcacaccaaggtggcagtgaagacgatgaagccagggagcatgtcggtggaggccttcctggcagaggccaacgtgatgaaaactctgcagcatgacaagctggtcaaacttcatgcggtggtcaccaaggagcccatctacatcatcacggagttcatggccaaaggaagcttgctggactttctgaaaagtgatgagggcagcaagcagccattgccaaaactcattgacttctcagcccagattgcagaaggcatggccttcatcgagcagaggaactacatccaccgagacctccgagctgccaacatcttggtctctgcatccctggtgtgtaagattgctgactttggcctggcccgggtcattgaggacaacgagtacacggctcgggaaggggccaagttccccatcaagtggacagctcctgaagccatcaactttggctccttcaccatcaagtcagacgtctggtcctttggtatcctgctgatggagatcgtcacctacggccggatcccttacccagggatgtcaaaccctgaagtgatccgagctctggagcgtggataccggatgcctcgcccagagaactgcccagaggagctctacaacatcatgatgcgctgctggaaaaaccgtccggaggagcggccgaccttcgaatacatccagagtgtgctggatgacttctacacggccacagagagccagtaccaacagcagccatgatagggaggaccagggcagggccagggggtgcccaggtggtggctgcaaggtggctccagcaccatccgccagggcccacacccccttcctactcccagacacccaccctcgcttcagccacagtttcctcatctgtccagtgggtaggttggactggaaaatctctttttgactcttgcaatccacaatctgacattctcaggaagcccccaagttgatatttctatttcctggaatggttggattttagttacagctgtgatttggaagggaaactttcaaaatagtgaaatgaatatttaaataaaagatataaatgccaaagtctttacc

SEQ ID NO: 124582 - DNA, 1581 bp, Artificial Sequence
  derived and/or modified sequence
ctgggcggccgcagcagctgtgaggaccccggctgccccagagatgaggagcgggcccccaggatgggctgcatgaagagcaagttcctgcaggtgggcggcaacaccttcagcaagacagagaccagcgccagcccccactgccctgtgtatgtgcctgaccccaccagcaccatcaagccaggccccaacagccacaacagcaacaccccaggcatccgggaggccggcagcgaggacatcatcgtggtggccctgtatgactatgaggccatccaccacgaggacctgtccttccagaagggggaccagatggtggtgctggaggagagcggggagtggtggaaggcccggagcctggccaccaggaaggagggctacatccccagcaactacgtggcccgggtggacagcctggagacagaggagtggttcttcaagggcatcagcaggaaggatgctgagcggcagctgctggcccctggcaacatgctgggcagcttcatgatccgggacagcgagaccaccaagggcagctacagcctgtctgtgcgggactatgacccccggcagggcgacacagtgaagcactacaagatccgcaccctggacaatggaggcttctacatcagccccaggagcaccttcagcaccctgcaggagctggtggaccactacaagaagggaaatgatggcctgtgccagaagctgtctgtgccctgcatgagcagcaagccccagaagccctgggagaaggatgcctgggagatcccccgggagagcctgaagctggagaagaagctgggcgccggccagtttggagaggtgtggatggccacctacaacaagcacaccaaggtggccgtgaagaccatgaagccaggctccatgtctgtggaggccttcctggccgaggccaacgtgatgaagaccctgcagcacgacaagctggtgaagctgcatgctgtggtgaccaaggagcccatctacatcatcacagagttcatggccaagggcagcctgctggacttcctgaagagtgatgagggcagcaagcagcccctgcccaagctgattgacttcagcgcccagattgctgagggcatggccttcatcgagcagaggaactacatccaccgggacctgcgggccgccaacatcctggtgtctgccagcctggtgtgcaagattgctgactttggcctggcccgggtgattgaagataatgagtacacagcccgggagggcgccaagttccccatcaagtggacagcccctgaggccatcaactttggcagcttcaccatcaagagtgatgtgtggagctttggcatcctgctgatggagatcgtgacctacggccgcatcccctacccaggcatgagcaaccctgaggtgatccgggccctggagcggggctacaggatgcccaggcctgagaactgcccagaggagctgtacaacatcatgatgcgctgctggaagaacagacctgaggagcggcccacctttgagtacatccagagcgtgctggatgacttctacacagccacagagagccagtaccagcagcagccctag

SEQ ID NO: 124583 - DNA, 1581 bp, Artificial Sequence
  derived and/or modified sequence
ctgggcggccggagcagctgcgaggaccccggctgcccccgggacgaggagcgggctcctaggatgggatgcatgaagtcaaaattccttcaggttggaggaaacactttttcaaaaactgaaacgtcagcgtcaccccactgccccgtgtatgtgccagaccctacatcaaccattaagcctgggcccaatagtcataattctaatacccctgggatccgggaagccgggtccgaggatattatagtagtcgccctgtacgactacgaggccatccaccacgaggacctcagctttcagaagggagaccaaatggtggtgctggaggagagtggtgaatggtggaaagcccggtccctagctactagaaaggaaggctatattcccagcaattacgttgcccgtgtcgattcactcgagaccgaagagtggttctttaaaggaatctcacgaaaagatgcagagcggcagctgctggcgccagggaacatgttaggcagctttatgatacgcgattcggagaccaccaagggcagttatagcctgagtgtgcgtgactacgaccccagacagggcgacaccgtaaaacattataagatccgcactctggacaacggaggattctacatctcaccccgcagcaccttctcgaccctgcaggaattagtggatcattacaagaagggaaatgacggtctttgtcagaagttgagcgtcccatgtatgagctcaaaaccacagaaaccttgggaaaaagacgcctgggagattcctcgcgagagcctgaagctggagaaaaagctgggtgcaggtcaatttggcgaagtttggatggcaacttacaacaagcacacaaaagtcgctgtcaagacaatgaaaccagggtctatgagcgtggaagcgttcctggcagaggccaacgttatgaagacgctccagcacgataagctggttaagctgcatgccgtggtgactaaggagcctatttatatcattacagaattcatggctaagggctccctgctggactttttgaagtcagatgagggaagtaagcagccattaccgaaactgatcgactttagcgcccagatcgcagaggggatggcattcatcgaacagagaaattacatccaccgagacctcagagcagctaacattctggtatcagccagtctcgtatgcaagatagctgatttcggattggctcgggtgatagaagataatgagtataccgcccgggagggcgctaagttcccgataaaatggactgcacccgaagcgatcaatttcgggtccttcaccataaagtctgatgtctggtcttttgggatcctgctgatggaaatagttacttacggtagaataccttatccagggatgtccaacccagaagtgattagggcattagagcgcggatatagaatgccccgccctgaaaattgtcccgaagagctgtataacatcatgatgcgatgctggaaaaatagacccgaagagcgaccaacttttgagtacatccaatccgtgctggatgatttctataccgccactgagagccaataccagcagcagccctag

SEQ ID NO: 124584 - DNA, 1581 bp, Artificial Sequence
  derived and/or modified sequence
cttgggggaaggtcttcctgcgaagaccccggatgcccaagggacgaggaaagggcgcctcgtatgggatgtatgaagagtaaatttttgcaggtgggaggaaacactttttctaagacagaaacatctgcctcgccccattgtccagtatacgtgcctgaccccaccagcacaattaagccgggaccgaattcgcacaattctaacacgcctggtatcagggaggctggctccgaggacattatcgtcgtggcattgtacgactacgaagctatccatcatgaggacctctcatttcagaagggggatcagatggtggtcctcgaggaatccggcgagtggtggaaagcccgtagtctggcgactcggaaagagggctatattccctcaaactacgtagccagggtcgatagccttgagacagaggagtggtttttcaaagggattagtagaaaggatgcagagcgacagctgttagctcccggtaacatgctggggtcgttcatgatcagagattccgaaacgacaaaggggtcctactccttgtcagttagagactatgatcccaggcagggggatacagtgaaacattacaagattcgaactttggataacggaggattctatattagccccagatccactttcagtacattgcaagagttagtagaccattataagaagggaaacgatggcctgtgtcagaaacttagtgtgccttgcatgagcagcaaacctcaaaaaccttgggagaaggatgcgtgggagattccccgagagagtctgaagctggagaaaaaattgggcgctggccagtttggagaggtctggatggccacttacaataagcacaccaaggttgccgttaagacaatgaaaccaggaagcatgtctgtggaggcttttctcgctgaggctaatgttatgaaaacgttgcagcacgacaaactggtgaagctgcatgcagtagtcaccaaagaacctatttacattattaccgaatttatggcaaaagggagcctgctcgacttcctaaagagcgatgaaggtagcaaacagcctcttcccaaacttatagatttcagcgcccaaattgccgaaggcatggctttcattgaacagagaaactacattcaccgcgacctgcgggcagcaaacattctggtgtccgcttccctggtgtgcaagattgccgactttgggctggcacgggtaattgaggataacgagtacacagcacgggagggggcaaaattccctatcaaatggaccgcacccgaagccattaacttcggaagctttaccatcaagtccgacgtgtggtccttcggaatactgcttatggagatcgtgacctacggacgtatcccttaccccggaatgagtaatcccgaagtgatcagggcactggagcgcggttaccgaatgccgcgacccgagaactgccctgaagaactgtataatattatgatgaggtgctggaaaaataggcctgaagagcgaccaactttcgagtatatccagtccgtacttgacgacttttacacagcgaccgagtcccagtaccagcagcaaccgtag

SEQ ID NO: 124585 - DNA, 9429 bp, Artificial Sequence
  derived and/or modified sequence
atggctaccttggagaagctgatgaaggcttttgaatccttaaagagtttccagcagcaacagcagcagcaacagcagcagcagcagcagcagcagcaacagcagcagcagcaaccaccgcctccacctcccccccccccgcccccccagctgcctcagccacctccacaagcccaaccgttactgcctcagccacaacctcccccacccccgcctccacccccaccaggccccgcggtggccgaggagccgttgcataggccaaaaaaggagttgtccgccacaaagaaggatcgggtgaaccactgcctgactatttgtgaaaacattgtggcccagtccgtccgcaacagccccgaattccaaaagctgcttggcatcgccatggaactgttcttgctgtgttcagacgacgccgagtccgatgtgcggatggtcgctgacgaatgtctgaataaggttatcaaggcgcttatggactcaaatctgcctagacttcagctggagctttacaaagaaattaaaaagaatggtgcccctagaagtctgcgggcggctctatggaggttcgctgagctggcacacctcgttaggcctcagaaatgtagaccctatctggtcaatctgttgccatgcctcaccaggacaagcaagagacccgaagaaagtgttcaggagacactagcggcggcagttcccaaaattatggccagcttcggaaattttgcgaatgacaacgagatcaaggtgctgttgaaggctttcattgcaaatctcaaaagcagttctccaacaattcggagaacggcagctgggtctgcggtgtcaatttgccagcacagccggagaacccagtacttttattcctggctcctgaatgttctcttgggactgctcgtacccgtggaggatgaacactccactttgctgatcctcggggtactgctcactctccgctacttggtgccattgttgcagcagcaggtgaaggatacctcactaaaaggaagctttggggtgactcggaaggaaatggaagtgagcccctcagctgaacagctggtgcaagtatatgaactgactttacatcatacgcagcatcaagaccataatgttgtgacaggggctctagagctcttacagcaactgtttcgcaccccgcctccagagctactgcagacactcacagccgtagggggaatcggacaactgactgcagcaaaggaggaaagcggtggcaggtctaggtctggatctatcgtggagctgattgctggaggaggttcttcctgcagccctgtcctgtctcgaaagcagaaaggtaaggtgctgctaggagaggaggaggccttggaagacgactctgagtctaggagcgatgtgtcgagctccgcactcaccgcatctgtgaaggatgagataagtggagagcttgccgcctcgtcaggggtatcaacccctgggtccgcaggccacgacattatcacagaacagcccagaagtcagcacacattgcaggccgactctgttgaccttgcttcatgcgacttgacatccagtgctactgacggagatgaagaagatatcctgtcacacagctcctctcaggtgtctgctgtcccatccgaccctgccatggatctgaatgacggcacacaggcctcctcgcccattagcgattcatctcagacgaccactgaagggcctgactccgccgtcacccctagcgattcctccgagatcgtcctcgatgggacggataaccagtatctgggactgcagatcggtcagccacaggacgaggatgaggaggcaactggcattctacccgatgaagccagcgaggctttccggaattcctcaatggcactccaacaggcccatctcctgaagaacatgtctcattgccgtcagcccagcgatagtagcgtagacaaatttgtcctgagagacgaagcaactgaacccggcgatcaggaaaataagccctgtcggattaaaggagacattggccagagtacagatgacgactccgctcctcttgtccactgtgtgaggcttctgtccgccagtttcctgttaacagggggaaagaatgtcctggttcctgacagagatgtaagggtcagcgtaaaagcactggcattatcttgcgtgggcgcagccgtcgcactacaccctgaatcatttttctcgaaactttacaaggtgcctctggacaccactgaatatcccgaggagcagtatgtttctgacattctcaattatatcgatcacggagacccacaggtcagaggtgcaacggcaatcctgtgcggcaccctcatctgctcaattctttcacggtctcgatttcacgtaggtgattggatgggaaccattagaacgctgactggcaacacattttctcttgcggactgtatccccttactcaggaaaacgctgaaggatgagtcatcagtcacctgtaagttggcctgcacggcagtcagaaactgtgtgatgtccctgtgctcgagtagctactccgaattgggtctgcagttaataatagacgtgctcaccttgagaaatagcagctactggcttgtgaggaccgaacttctggaaaccctggctgagattgatttcagactagtttcctttctggaagctaaggccgaaaacctccatagaggcgcccatcattatacgggactgctgaagctccaggagcgggttctgaataatgtggttattcacctgttaggagacgaagaccctcgcgtgcgccatgtcgccgccgcaagtttaattagactagtgcccaagcttttctataagtgtgaccagggccaggctgatcccgtggttgccgtggccagagatcagtcaagcgtgtacctgaagctactcatgcacgaaacgcaacccccctcgcatttctctgtttcaaccataactaggatttaccgcggctacaacttgctgcccagcatcaccgacgtcaccatggagaacaatctaagtagagtgattgcggctgtgagccacgagctcatcacctcaacaacaagagcactgacctttggttgttgtgaagcgctctgtcttctgtccaccgccttcccagtttgtatttggtctttggggtggcactgtggagttccccccttatccgcatcagacgaatctcgtaagtcctgtactgttgggatggctacaatgatactgacactgctatcatctgcgtggttcccccttgatctgtctgcccaccaggacgccttaattttggcagggaatctcctcgcagcatccgccccaaaaagtctgcggagtagctgggccagtgaggaagaagccaatcctgccgctactaagcaggaagaagtctggcccgccctaggggatagggctcttgtccctatggtggagcaactgttttctcatctactcaaggttataaatatctgcgcacatgtgctggacgacgttgccccaggcccagccattaaggctgccttaccttcattgacaaatcctccatcactttcacccatacgtcgtaaggggaaagaaaaggaacctggcgaacaggctagcgtacctctgtcccctaagaaaggctccgaggcgtccgcagcttcacggcagtctgatacgagtgggccggtcactacttccaaatcttcctccctcgggagcttttaccaccttccctcctatttgaagctgcatgacgtgctgaaagccacacatgcaaactataaagtgactctcgatcttcagaatagtacagagaagtttggtggtttcctgcggtcagctctcgatgtgctatcccagattctggagctcgccacattacaggacattggaaagtgcgttgaggaaattctgggctatctcaagtcgtgctttagcagggagccaatgatggccacagtgtgcgtacagcaactgctcaaaacattattcggtactaatctggcctcacagtttgacggtttgagctccaaccctagcaaatcacagggacgggcccagagactaggcagtagttctgtcagaccgggcctgtaccattattgcttcatggcaccttacacccactttacgcaggctctggccgatgcttcactgaggaatatggtgcaagccgaacaggagaatgacacgagtggctggttcgacgtgctacaaaaggtgagtacccagctaaagaccaacctgacctctgtgaccaagaaccgcgcagacaaaaacgctatacacaaccacatccgactgttcgaacccctggtgatcaaggctctgaaacagtataccaccactacttgtgtccagctccagaagcaggtgctggatctgttagctcaactggtacagctgcgtgtgaattattgtctcctggacagcgatcaggtctttatcggctttgtacttaaacagttcgaatatatagaggtggggcaattccgcgagagcgaagccattatccccaacatttttttctttctggtcctgctctcctacgaacgctatcactccaagcagataatcgggatccctaaaatcatccagctgtgcgatggaattatggcatcagggcggaaggcagtgactcacgctattccagctctgcagccgatcgtccacgacttgttcgtccttaggggcaccaacaaggctgatgccgggaaggaacttgaaacgcagaaagaggtggtggtgagtatgcttctaaggctcattcaataccaccaggttctggaaatgttcattctggttttacaacaatgccacaaggaaaacgaggataagtggaaacgcctcagtaggcagattgccgacataatacttccaatgctcgctaaacagcaaatgcacatcgacagccacgaggccttgggagtgcttaacaccctgttcgagattctggcaccctcctcactgagaccagttgatatgcttctgagaagcatgttcgtgacccctaacactatggcatccgtttccacagtacagttgtggataagcggaatactggctattttgcgcgtactgattagtcagtccaccgaggatatcgttctgtcccgcatccaggaactaagcttcagcccctatctgatctcttgcacagttattaacaggctgagagatggggatagtacttccaccctggaggagcactctgagggtaagcagattaagaaccttcccgaggagactttctctaggttccttctccaactggtggggattcttctggaggatatcgtcactaagcagctcaaagtagaaatgagtgaacagcagcatacattctactgccaggagctgggaactcttctgatgtgtctcatacatatcttcaagagcggcatgtttagaagaataaccgccgcagccactcgcctctttcgctcagatggatgtggcggatcattctacactctagatagcctgaacctgcgcgcccgatccatgattacaacccatcctgccttagttctcttatggtgccaaattctgcttctggtcaatcatactgactatcggtggtgggcggaagtgcagcagaccccgaagcggcacagcctctcgagcacaaaattgctatcacctcagatgtccggcgaggaggaggattcagaccttgcagcaaaactgggcatgtgtaaccgtgaaatcgtcagaaggggggccctgattttgttttgtgattatgtttgccagaacttacatgattctgagcacttaacctggttgatagtgaaccacatccaggacctcatcagcctctcgcacgagcctcccgttcaggattttatctcagctgttcaccggaattcagctgccagtggcttgtttatccaggccatccaaagtagatgtgagaaccttagcactcctaccatgctcaaaaaaacactgcagtgcttagaagggattcatctgagtcagtcaggcgcggtgcttacattgtatgtggatagacttctgtgcacgccctttagggtactggccaggatggttgacattcttgcttgccggagggtagagatgctgttggctgctaatctccagtcatccatggctcaattaccgatggaggaactcaatcgtatacaggaatacctccagagctctggattagcccagcggcaccaacggctgtattccctgctggatcggttcaggctcagtactatgcaggattcgttgtcaccatcaccgccagtcagcagtcacccgctggacggcgatggccacgtgtcgttagagaccgtgtctcccgacaaggattggtacgtccatctagtgaaatctcagtgttggacaaggagcgacagtgcacttttagagggcgcagaactagttaaccgcataccggccgaggacatgaacgccttcatgatgaattcggaattcaatttgtccctgcttgctccatgcctgtctttgggcatgtccgaaatcagcggaggccagaagagtgccctgttcgaggcggctcgggaggtgacactggcccgcgtatcaggtactgtgcagcagcttcccgccgttcaccacgtcttccagcccgaactgcccgcagagcctgccgcttattggtctaagctgaacgacctgtttggcgatgccgctctctatcaatcgctgcccaccttagcccgcgccctggcacaatacttggtggtggtgtccaaactaccaagccaccttcacttgccaccggagaaagaaaaggatatcgttaagtttgtcgttgcaactctagaggcgctgagctggcacctcatacacgaacaaatccccctctcccttgatctgcaagctgggttggattgttgttgtctggcactccagctacctgggttatggtctgtagtgtctagcacagaatttgtcacgcacgcttgctctctgatatactgtgtacatttcattctggaagccgtcgccgtgcaaccgggcgagcagcttctgagccccgagaggcgcacgaatacacccaaggctatctctgaggaggaggaggaagtggaccccaatacgcaaaacccgaaatacatcaccgcagcctgcgagatggttgcagaaatggttgagtctctccagagcgtactcgcgctggggcacaagaggaatagcggagtcccagccttccttaccccgcttctcaggaatatcattatatcacttgccagactgccccttgtaaacagctacacacgcgttcccccactggtttggaagttggggtggtccccaaagcccggaggggactttggtacagccttccctgaaattcctgtagaattcctgcaggagaaagaggttttcaaggagttcatttaccgcattaatactctgggatggacgagtaggactcagttcgaagaaacgtgggccactttgctgggcgtgctagtgacccaaccccttgtgatggagcaggaagagagtcccccggaagaggacacagaaagaacgcaaataaacgtcctggccgttcaggctattacgtcactcgtccttagcgcaatgaccgtgcccgtcgccggaaaccctgccgtgagctgcttagaacagcagccacgaaataaacctttaaaggcactcgacacgagatttgggcgcaagctctctatcatcagagggattgttgaacaggagatccaggctatggtaagtaagagagaaaatatcgccactcaccatctataccaggcatgggacccagtgcccagcctgagtcccgccaccacaggggcgcttattagccacgagaaactactgctgcagattaatccagaacgtgaactcggatctatgtcttacaagttaggacaggtgtctattcactctgtttggctcgggaactcgattacaccactgcgggaagaggagtgggatgaagaagaggaagaggaggctgatgcccccgctccctcaagcccacccacttccccggtcaattctcgtaaacacagagctggtgtcgatatccactcttgcagccagttccttctggagctctacagcaggtggatcttaccctcttcctctgcccggagaactcctgctatactgatcagcgaggtggtgcggtctcttttagttgtctccgacctgttcaccgagaggaatcagtttgagttgatgtatgttaccctgaccgagttgcgccgggtccatccaagcgaggatgagatcctcgctcagtacttggtgccagctacctgcaaggcagcggcggtgcttggcatggataaggccgttgctgagcccgtatctcggctactcgaatccacgttaagatccagtcacttaccttctcgtgtgggggcattgcatggagtgctgtacgtgcttgaatgtgatctgttggacgacaccgcaaagcaactcattccggttatttctgattacctcctgtcaaacctgaaaggcattgcacactgtgtcaacattcatagtcagcagcatgtgctggtaatgtgtgccacagccttttacttaatcgaaaactaccctctggacgttggacccgagtttagcgcttctatcattcagatgtgtggcgtgatgctcagcggctccgaggaatctactcccagtatcatctaccattgtgctctaaggggtctcgagcggctgcttctttcagagcagctctcacggctcgacgcggagtcactcgtgaagctctcagtcgatagggttaacgtccacagcccgcatcgtgctatggccgctctgggcctgatgctgacctgcatgtatactggtaaagaaaaagtgtcccctggacggaccagcgatccgaatcccgctgcaccagactccgagtcagtgatcgtggccatggagagagtgagtgtcctctttgatcggatccgtaaaggcttcccttgtgaggcacgcgtggtggcccgcatattaccacaatttctggacgattttttcccccctcaggatatcatgaacaaggtcatcggggagttcttgagtaatcaacagccctacccccagtttatggcaacggtagtgtacaaagtcttccagacacttcactccaccgggcagtcaagcatggtcagggactgggtgatgctgagtctgtcaaacttcactcagcgggcaccagtggccatggctacatggtctctcagctgtttctttgtatcagcatcaaccagcccctgggtggctgccattctccctcacgtgatttcaaggatgggcaaacttgaacaagtggacgttaacctgttttgtctggtggctactgatttttatcggcaccagatagaggaagagctggatcggcgtgctttccagtcagttcttgaggtcgtcgccgcgccaggatcaccgtaccacaggttgctcacatgcttgcgtaacgtgcataaagtaaccacgtgttag

SEQ ID NO: 124586 - DNA, 13464 bp, Artificial Sequence
  derived and/or modified sequence
gctgccgggacgggtccaagatggacggccgctcaggttctgcttttacctgcggcccagagccccattcattgccccggtgctgagcggcgccgcgagtcggcccgaggcctccggggactgccgtgccgggcgggagaccgccatggcgaccctggaaaagctgatgaaggccttcgagtccctcaagtccttccagcagcagcagcagcagcagcagcagcagcagcagcagcagcagcagcagcagcagcaacagccgccaccgccgccgccgccgccgccgcctcctcagcttcctcagccgccgccgcaggcacagccgctgctgcctcagccgcagccgcccccgccgccgcccccgccgccacccggcccggctgtggctgaggagccgctgcaccgaccaaagaaagaactttcagctaccaagaaagaccgtgtgaatcattgtctgacaatatgtgaaaacatagtggcacagtctgtcagaaattctccagaatttcagaaacttctgggcatcgctatggaactttttctgctgtgcagtgatgacgcagagtcagatgtcaggatggtggctgacgaatgcctcaacaaagttatcaaagctttgatggattctaatcttccaaggttacagctcgagctctataaggaaattaaaaagaatggtgcccctcggagtttgcgtgctgccctgtggaggtttgctgagctggctcacctggttcggcctcagaaatgcaggccttacctggtgaaccttctgccgtgcctgactcgaacaagcaagagacccgaagaatcagtccaggagaccttggctgcagctgttcccaaaattatggcttcttttggcaattttgcaaatgacaatgaaattaaggttttgttaaaggccttcatagcgaacctgaagtcaagctcccccaccattcggcggacagcggctggatcagcagtgagcatctgccagcactcaagaaggacacaatatttctatagttggctactaaatgtgctcttaggcttactcgttcctgtcgaggatgaacactccactctgctgattcttggcgtgctgctcaccctgaggtatttggtgcccttgctgcagcagcaggtcaaggacacaagcctgaaaggcagcttcggagtgacaaggaaagaaatggaagtctctccttctgcagagcagcttgtccaggtttatgaactgacgttacatcatacacagcaccaagaccacaatgttgtgaccggagccctggagctgttgcagcagctcttcagaacgcctccacccgagcttctgcaaaccctgaccgcagtcgggggcattgggcagctcaccgctgctaaggaggagtctggtggccgaagccgtagtgggagtattgtggaacttatagctggagggggttcctcatgcagccctgtcctttcaagaaaacaaaaaggcaaagtgctcttaggagaagaagaagccttggaggatgactctgaatcgagatcggatgtcagcagctctgccttaacagcctcagtgaaggatgagatcagtggagagctggctgcttcttcaggggtttccactccagggtcagcaggtcatgacatcatcacagaacagccacggtcacagcacacactgcaggcggactcagtggatctggccagctgtgacttgacaagctctgccactgatggggatgaggaggatatcttgagccacagctccagccaggtcagcgccgtcccatctgaccctgccatggacctgaatgatgggacccaggcctcgtcgcccatcagcgacagctcccagaccaccaccgaagggcctgattcagctgttaccccttcagacagttctgaaattgtgttagacggtaccgacaaccagtatttgggcctgcagattggacagccccaggatgaagatgaggaagccacaggtattcttcctgatgaagcctcggaggccttcaggaactcttccatggcccttcaacaggcacatttattgaaaaacatgagtcactgcaggcagccttctgacagcagtgttgataaatttgtgttgagagatgaagctactgaaccgggtgatcaagaaaacaagccttgccgcatcaaaggtgacattggacagtccactgatgatgactctgcacctcttgtccattgtgtccgccttttatctgcttcgtttttgctaacagggggaaaaaatgtgctggttccggacagggatgtgagggtcagcgtgaaggccctggccctcagctgtgtgggagcagctgtggccctccacccggaatctttcttcagcaaactctataaagttcctcttgacaccacggaataccctgaggaacagtatgtctcagacatcttgaactacatcgatcatggagacccacaggttcgaggagccactgccattctctgtgggaccctcatctgctccatcctcagcaggtcccgcttccacgtgggagattggatgggcaccattagaaccctcacaggaaatacattttctttggcggattgcattcctttgctgcggaaaacactgaaggatgagtcttctgttacttgcaagttagcttgtacagctgtgaggaactgtgtcatgagtctctgcagcagcagctacagtgagttaggactgcagctgatcatcgatgtgctgactctgaggaacagttcctattggctggtgaggacagagcttctggaaacccttgcagagattgacttcaggctggtgagctttttggaggcaaaagcagaaaacttacacagaggggctcatcattatacagggcttttaaaactgcaagaacgagtgctcaataatgttgtcatccatttgcttggagatgaagaccccagggtgcgacatgttgccgcagcatcactaattaggcttgtcccaaagctgttttataaatgtgaccaaggacaagctgatccagtagtggccgtggcaagagatcaaagcagtgtttacctgaaacttctcatgcatgagacgcagcctccatctcatttctccgtcagcacaataaccagaatatatagaggctataacctactaccaagcataacagacgtcactatggaaaataacctttcaagagttattgcagcagtttctcatgaactaatcacatcaaccaccagagcactcacatttggatgctgtgaagctttgtgtcttctttccactgccttcccagtttgcatttggagtttaggttggcactgtggagtgcctccactgagtgcctcagatgagtctaggaagagctgtaccgttgggatggccacaatgattctgaccctgctctcgtcagcttggttcccattggatctctcagcccatcaagatgctttgattttggccggaaacttgcttgcagccagtgctcccaaatctctgagaagttcatgggcctctgaagaagaagccaacccagcagccaccaagcaagaggaggtctggccagccctgggggaccgggccctggtgcccatggtggagcagctcttctctcacctgctgaaggtgattaacatttgtgcccacgtcctggatgacgtggctcctggacccgcaataaaggcagccttgccttctctaacaaaccccccttctctaagtcccatccgacgaaaggggaaggagaaagaaccaggagaacaagcatctgtaccgttgagtcccaagaaaggcagtgaggccagtgcagcttctagacaatctgatacctcaggtcctgttacaacaagtaaatcctcatcactggggagtttctatcatcttccttcatacctcaaactgcatgatgtcctgaaagctacacacgctaactacaaggtcacgctggatcttcagaacagcacggaaaagtttggagggtttctccgctcagccttggatgttctttctcagatactagagctggccacactgcaggacattgggaagtgtgttgaagagatcctaggatacctgaaatcctgctttagtcgagaaccaatgatggcaactgtttgtgttcaacaattgttgaagactctctttggcacaaacttggcctcccagtttgatggcttatcttccaaccccagcaagtcacaaggccgagcacagcgccttggctcctccagtgtgaggccaggcttgtaccactactgcttcatggccccgtacacccacttcacccaggccctcgctgacgccagcctgaggaacatggtgcaggcggagcaggagaacgacacctcgggatggtttgatgtcctccagaaagtgtctacccagttgaagacaaacctcacgagtgtcacaaagaaccgtgcagataagaatgctattcataatcacattcgtttgtttgaacctcttgttataaaagctttaaaacagtacacgactacaacatgtgtgcagttacagaagcaggttttagatttgctggcgcagctggttcagttacgggttaattactgtcttctggattcagatcaggtgtttattggctttgtattgaaacagtttgaatacattgaagtgggccagttcagggaatcagaggcaatcattccaaacatctttttcttcttggtattactatcttatgaacgctatcattcaaaacagatcattggaattcctaaaatcattcagctctgtgatggcatcatggccagtggaaggaaggctgtgacacatgccataccggctctgcagcccatagtccacgacctctttgtattaagaggaacaaataaagctgatgcaggaaaagagcttgaaacccaaaaagaggtggtggtgtcaatgttactgagactcatccagtaccatcaggtgttggagatgttcattcttgtcctgcagcagtgccacaaggagaatgaagacaagtggaagcgactgtctcgacagatagctgacatcatcctcccaatgttagccaaacagcagatgcacattgactctcatgaagcccttggagtgttaaatacattatttgagattttggccccttcctccctccgtccggtagacatgcttttacggagtatgttcgtcactccaaacacaatggcgtccgtgagcactgttcaactgtggatatcgggaattctggccattttgagggttctgatttcccagtcaactgaagatattgttctttctcgtattcaggagctctccttctctccgtatttaatctcctgtacagtaattaataggttaagagatggggacagtacttcaacgctagaagaacacagtgaagggaaacaaataaagaatttgccagaagaaacattttcaaggtttctattacaactggttggtattcttttagaagacattgttacaaaacagctgaaggtggaaatgagtgagcagcaacatactttctattgccaggaactaggcacactgctaatgtgtctgatccacatcttcaagtctggaatgttccggagaatcacagcagctgccactaggctgttccgcagtgatggctgtggcggcagtttctacaccctggacagcttgaacttgcgggctcgttccatgatcaccacccacccggccctggtgctgctctggtgtcagatactgctgcttgtcaaccacaccgactaccgctggtgggcagaagtgcagcagaccccgaaaagacacagtctgtccagcacaaagttacttagtccccagatgtctggagaagaggaggattctgacttggcagccaaacttggaatgtgcaatagagaaatagtacgaagaggggctctcattctcttctgtgattatgtctgtcagaacctccatgactccgagcacttaacgtggctcattgtaaatcacattcaagatctgatcagcctttcccacgagcctccagtacaggacttcatcagtgccgttcatcggaactctgctgccagcggcctgttcatccaggcaattcagtctcgttgtgaaaacctttcaactccaaccatgctgaagaaaactcttcagtgcttggaggggatccatctcagccagtcgggagctgtgctcacgctgtatgtggacaggcttctgtgcacccctttccgtgtgctggctcgcatggtcgacatccttgcttgtcgccgggtagaaatgcttctggctgcaaatttacagagcagcatggcccagttgccaatggaagaactcaacagaatccaggaataccttcagagcagcgggctcgctcagagacaccaaaggctctattccctgctggacaggtttcgtctctccaccatgcaagactcacttagtccctctcctccagtctcttcccacccgctggacggggatgggcacgtgtcactggaaacagtgagtccggacaaagactggtacgttcatcttgtcaaatcccagtgttggaccaggtcagattctgcactgctggaaggtgcagagctggtgaatcggattcctgctgaagatatgaatgccttcatgatgaactcggagttcaacctaagcctgctagctccatgcttaagcctagggatgagtgaaatttctggtggccagaagagtgccctttttgaagcagcccgtgaggtgactctggcccgtgtgagcggcaccgtgcagcagctccctgctgtccatcatgtcttccagcccgagctgcctgcagagccggcggcctactggagcaagttgaatgatctgtttggggatgctgcactgtatcagtccctgcccactctggcccgggccctggcacagtacctggtggtggtctccaaactgcccagtcatttgcaccttcctcctgagaaagagaaggacattgtgaaattcgtggtggcaacccttgaggccctgtcctggcatttgatccatgagcagatcccgctgagtctggatctccaggcagggctggactgctgctgcctggccctgcagctgcctggcctctggagcgtggtctcctccacagagtttgtgacccacgcctgctccctcatctactgtgtgcacttcatcctggaggccgttgcagtgcagcctggagagcagcttcttagtccagaaagaaggacaaataccccaaaagccatcagcgaggaggaggaggaagtagatccaaacacacagaatcctaagtatatcactgcagcctgtgagatggtggcagaaatggtggagtctctgcagtcggtgttggccttgggtcataaaaggaatagcggcgtgccggcgtttctcacgccattgctaaggaacatcatcatcagcctggcccgcctgccccttgtcaacagctacacacgtgtgcccccactggtgtggaagcttggatggtcacccaaaccgggaggggattttggcacagcattccctgagatccccgtggagttcctccaggaaaaggaagtctttaaggagttcatctaccgcatcaacacactaggctggaccagtcgtactcagtttgaagaaacttgggccaccctccttggtgtcctggtgacgcagcccctcgtgatggagcaggaggagagcccaccagaagaagacacagagaggacccagatcaacgtcctggccgtgcaggccatcacctcactggtgctcagtgcaatgactgtgcctgtggccggcaacccagctgtaagctgcttggagcagcagccccggaacaagcctctgaaagctctcgacaccaggtttgggaggaagctgagcattatcagagggattgtggagcaagagattcaagcaatggtttcaaagagagagaatattgccacccatcatttatatcaggcatgggatcctgtcccttctctgtctccggctactacaggtgccctcatcagccacgagaagctgctgctacagatcaaccccgagcgggagctggggagcatgagctacaaactcggccaggtgtccatacactccgtgtggctggggaacagcatcacacccctgagggaggaggaatgggacgaggaagaggaggaggaggccgacgcccctgcaccttcgtcaccacccacgtctccagtcaactccaggaaacaccgggctggagttgacatccactcctgttcgcagtttttgcttgagttgtacagccgctggatcctgccgtccagctcagccaggaggaccccggccatcctgatcagtgaggtggtcagatcccttctagtggtctcagacttgttcaccgagcgcaaccagtttgagctgatgtatgtgacgctgacagaactgcgaagggtgcacccttcagaagacgagatcctcgctcagtacctggtgcctgccacctgcaaggcagctgccgtccttgggatggacaaggccgtggcggagcctgtcagccgcctgctggagagcacgctcaggagcagccacctgcccagcagggttggagccctgcacggcgtcctctatgtgctggagtgcgacctgctggacgacactgccaagcagctcatcccggtcatcagcgactatctcctctccaacctgaaagggatcgcccactgcgtgaacattcacagccagcagcacgtactggtcatgtgtgccactgcgttttacctcattgagaactatcctctggacgtagggccggaattttcagcatcaataatacagatgtgtggggtgatgctgtctggaagtgaggagtccaccccctccatcatttaccactgtgccctcagaggcctggagcgcctcctgctctctgagcagctctcccgcctggatgcagaatcgctggtcaagctgagtgtggacagagtgaacgtgcacagcccgcaccgggccatggcggctctgggcctgatgctcacctgcatgtacacaggaaaggagaaagtcagtccgggtagaacttcagaccctaatcctgcagcccccgacagcgagtcagtgattgttgctatggagcgggtatctgttctttttgataggatcaggaaaggctttccttgtgaagccagagtggtggccaggatcctgccccagtttctagacgacttcttcccaccccaggacatcatgaacaaagtcatcggagagtttctgtccaaccagcagccatacccccagttcatggccaccgtggtgtataaggtgtttcagactctgcacagcaccgggcagtcgtccatggtccgggactgggtcatgctgtccctctccaacttcacgcagagggccccggtcgccatggccacgtggagcctctcctgcttctttgtcagcgcgtccaccagcccgtgggtcgcggcgatcctcccacatgtcatcagcaggatgggcaagctggagcaggtggacgtgaaccttttctgcctggtcgccacagacttctacagacaccagatagaggaggagctcgaccgcagggccttccagtctgtgcttgaggtggttgcagccccaggaagcccatatcaccggctgctgacttgtttacgaaatgtccacaaggtcaccacctgctgagcgccatggtgggagagactgtgaggcggcagctggggccggagcctttggaagtctgcgcccttgtgccctgcctccaccgagccagcttggtccctatgggcttccgcacatgccgcgggcggccaggcaacgtgcgtgtctctgccatgtggcagaagtgctctttgtggcagtggccaggcagggagtgtctgcagtcctggtggggctgagcctgaggccttccagaaagcaggagcagctgtgctgcaccccatgtgggtgaccaggtcctttctcctgatagtcacctgctggttgttgccaggttgcagctgctcttgcatctgggccagaagtcctccctcctgcaggctggctgttggcccctctgctgtcctgcagtagaaggtgccgtgagcaggctttgggaacactggcctgggtctccctggtggggtgtgcatgccacgccccgtgtctggatgcacagatgccatggcctgtgctgggccagtggctgggggtgctagacacccggcaccattctcccttctctcttttcttctcaggatttaaaatttaattatatcagtaaagagattaattttaacgtaactctttctatgcccgtgtaaagtatgtgaatcgcaaggcctgtgctgcatgcgacagcgtccggggtggtggacagggcccccggccacgctccctctcctgtagccactggcatagccctcctgagcacccgctgacatttccgttgtacatgttcctgtttatgcattcacaaggtgactgggatgtagagaggcgttagtgggcaggtggccacagcaggactgaggacaggcccccattatcctaggggtgcgctcacctgcagcccctcctcctcgggcacagacgactgtcgttctccacccaccagtcagggacagcagcctccctgtcactcagctgagaaggccagccctccctggctgtgagcagcctccactgtgtccagagacatgggcctcccactcctgttccttgctagccctggggtggcgtctgcctaggagctggctggcaggtgttgggacctgctgctccatggatgcatgccctaagagtgtcactgagctgtgttttgtctgagcctctctcggtcaacagcaaagcttggtgtcttggcactgttagtgacagagcccagcatcccttctgcccccgttccagctgacatcttgcacggtgaccccttttagtcaggagagtgcagatctgtgctcatcggagactgccccacggccctgtcagagccgccactcctatccccaggccaggtccctggaccagcctcctgtttgcaggcccagaggagccaagtcattaaaatggaagtggattctggatggccgggctgctgctgatgtaggagctggatttgggagctctgcttgccgactggctgtgagacgaggcaggggctctgcttcctcagccctagaggcgagccaggcaaggttggcgactgtcatgtggcttggtttggtcatgcccgtcgatgttttgggtattgaatgtggtaagtggaggaaatgttggaactctgtgcaggtgctgccttgagacccccaagcttccacctgtccctctcctatgtggcagctggggagcagctgagatgtggacttgtatgctgcccacatacgtgagggggagctgaaagggagcccctcctctgagcagcctctgccaggcctgtatgaggcttttcccaccagctcccaacagaggcctcccccagccaggaccacctcgtcctcgtggcggggcagcaggagcggtagaaaggggtccgatgtttgaggaggcccttaagggaagctactgaattataacacgtaagaaaatcaccattccgtattggttgggggctcctgtttctcatcctagctttttcctggaaagcccgctagaaggtttgggaacgaggggaaagttctcagaactgttggctgctccccacccgcctcccgcctcccccgcaggttatgtcagcagctctgagacagcagtatcacaggccagatgttgttcctggctagatgtttacatttgtaagaaataacactgtgaatgtaaaacagagccattcccttggaatgcatatcgctgggctcaacatagagtttgtcttcctcttgtttacgacgtgatctaaaccagtccttagcaaggggctcagaacaccccgctctggcagtaggtgtcccccacccccaaagacctgcctgtgtgctccggagatgaatatgagctcattagtaaaaatgacttcacccacgcatatacataaagtatccatgcatgtgcatatagacacatctataattttacacacacacctctcaagacggagatgcatggcctctaagagtgcccgtgtcggttcttcctggaagttgactttccttagacccgccaggtcaagttagccgcgtgacggacatccaggcgtgggacgtggtcagggcagggctcattcattgcccactaggatcccactggcgaagatggtctccatatcagctctctgcagaagggaggaagactttatcatgttcctaaaaatctgtggcaagcacccatcgtattatccaaattttgttgcaaatgtgattaatttggttgtcaagttttgggggtgggctgtggggagattgcttttgttttcctgctggtaatatcgggaaagattttaatgaaaccagggtagaattgtttggcaatgcactgaagcgtgtttctttcccaaaatgtgcctcccttccgctgcgggcccagctgagtctatgtaggtgatgtttccagctgccaagtgctctttgttactgtccaccctcatttctgccagcgcatgtgtcctttcaaggggaaaatgtgaagctgaaccccctccagacacccagaatgtagcatctgagaaggccctgtgccctaaaggacacccctcgcccccatcttcatggagggggtcatttcagagccctcggagccaatgaacagctcctcctcttggagctgagatgagccccacgtggagctcgggacggatagtagacagcaataactcggtgtgtggccgcctggcaggtggaacttcctcccgttgcggggtggagtgaggttagttctgtgtgtctggtgggtggagtcaggcttctcttgctacctgtgagcatccttcccagcagacatcctcatcgggctttgtccctcccccgcttcctccctctgcggggaggacccgggaccacagctgctggccagggtagacttggagctgtcctccagaggggtcacgtgtaggagtgagaagaaggaagatcttgagagctgctgagggaccttggagagctcaggatggctcagacgaggacactcgcttgccgggcctgggcctcctgggaaggagggagctgctcagaatgccgcatgacaactgaaggcaacctggaaggttcaggggccgctcttcccccatgtgcctgtcacgctctggtgcagtcaaaggaacgccttcccctcagttgtttctaagagcagagtctcccgctgcaatctgggtggtaactgccagccttggaggatcgtggccaacgtggacctgcctacggagggtgggctctgacccaagtggggcctccttgtccaggtctcactgctttgcaccgtggtcagagggactgtcagctgagcttgagctcccctggagccagcagggctgtgatgggcgagtcccggagccccacccagacctgaatgcttctgagagcaaagggaaggactgacgagagatgtatatttaattttttaactgctgcaaacattgtacatccaaattaaaggaaaaaaat

SEQ ID NO: 124587 - DNA, 9429 bp, Artificial Sequence
  derived and/or modified sequence
atggccaccctggagaagctgatgaaggcctttgagagcctgaagagcttccagcagcagcagcagcagcagcagcagcagcagcagcagcagcagcagcagcagcagcagcagcccccacctcctcctcctcctcctcctccaccccagctgccccagcccccaccccaggcccagcccctgctgccccagccccagcccccacctcctcctcctcctcctcctcctggccctgctgtggccgaggagcccctgcaccggcccaagaaggagctgagcgccaccaagaaggacagagtgaaccactgcctgaccatctgtgagaacatcgtggcccagagcgtgaggaacagccctgagttccagaagctgctgggcatcgccatggagctgttcctgctgtgcagtgatgatgctgagagtgatgtgaggatggtggctgatgaatgtctgaacaaggtgatcaaggccctgatggacagcaacctgccccggctgcagctggagctgtacaaggagatcaagaagaatggagcccccaggagcctgcgggccgccctgtggaggtttgctgagctggcccacctggtgcggccccagaagtgccggccctacctggtgaacctgctgccctgcctgaccaggaccagcaagaggcctgaggagagcgtgcaggagaccctggccgctgctgtgcccaagatcatggccagctttggaaactttgccaatgacaatgagatcaaggtgctgctgaaggccttcatcgccaacctgaagagcagcagccccaccatcagaagaacagctgctggcagcgctgtgtccatctgccagcacagcaggaggacccagtacttctacagctggctgctgaatgtgctgctgggcctgctggtgcctgtggaggatgagcacagcaccctgctgatcctgggcgtgctgctgaccctgcgctacctggtgcccctgctgcagcagcaggtgaaggacaccagcctgaagggcagctttggagtgaccaggaaggagatggaggtgagccccagcgctgagcagctggtgcaggtgtatgagctgaccctgcaccacacccagcaccaggaccacaacgtggtgactggagccctggagctgctgcagcagctgttccgcaccccacctcctgagctgctgcagaccctgacagctgtgggcggcatcggccagctgacagctgccaaggaggagagcggcggccgcagccgcagcggcagcatcgtggagctgattgctgggggcggcagcagctgcagccctgtgctgagcaggaagcagaagggcaaggtgctgctgggggaggaggaggccctggaggatgattctgagagcagaagtgatgtgagcagcagcgccctgacagcctctgtgaaggatgagatctctggagagctggccgccagcagcggcgtgtccaccccaggcagcgctggccatgacatcatcacagagcagcccaggagccagcacaccctgcaggccgacagcgtggacctggccagctgtgacctgaccagcagcgccacagatggagatgaggaggacatcctgagccacagcagcagccaggtgtctgctgtgcccagcgaccctgccatggacctgaatgatggcacccaggccagcagccccatcagtgacagcagccagaccaccacagagggcccagattctgctgtgacccccagcgacagcagcgagatcgtgctggatggaacagacaaccagtacctgggcctgcagatcggccagccccaggatgaagatgaggaggccaccggcatcctgcctgatgaggccagcgaggccttcaggaacagctccatggccctgcagcaggcccacctgctgaagaacatgagccactgccggcagcccagcgacagctctgtggacaagtttgtgctgagagatgaggccacagagcccggggaccaggagaacaagccctgccgcatcaagggggacatcggccagagcacagatgatgacagcgcccccctggtgcactgtgtgcggctgctgagcgccagcttcctgctgactggaggcaagaatgtgctggtgcctgacagagatgtgcgggtgtctgtgaaggccctggccctgagctgtgtgggcgctgctgtggccctgcaccctgagagcttcttcagcaagctgtacaaggtgcccctggacaccacagagtacccagaggagcagtatgtgtctgacatcctgaactacatcgaccatggagacccccaggtgcggggggccacagccatcctgtgtggcaccctcatctgcagcatcctgagccgcagccgcttccacgtgggggactggatgggcaccatccgcaccctgaccggcaacaccttcagcctggccgactgcatccccctgctgaggaagaccctgaaggatgagagctctgtgacctgcaagctggcctgcacagctgtgaggaactgtgtgatgagcctgtgcagcagcagctacagcgagctgggcctgcagctgatcattgatgtgctgaccctgaggaacagcagctactggctggtgaggacagagctgctggagaccctggccgagattgacttccggctggtgtccttcctggaggccaaggccgagaacctgcacagaggagcccaccactacacaggcctgctgaagctgcaggagcgggtgctgaacaacgtggtgatccacctgctgggagatgaggacccccgggtgagacatgtggccgccgccagcctcatccggctggtgcccaagctgttctacaagtgtgaccagggccaggccgaccctgtggtggccgtggcccgggaccagagctctgtgtacctgaagctgctgatgcatgagacccagccccccagccacttctctgtgtccaccatcacccgcatctaccggggctacaacctgctgcccagcatcacagatgtgaccatggagaacaacctgagccgggtgattgctgctgtgtcccatgagctgatcaccagcaccacccgggccctgaccttcggctgctgtgaggccctgtgcctgctgagcacagccttccctgtgtgcatctggagcctgggctggcactgcggcgtgccccccctgagcgccagtgatgagagcaggaagagctgcaccgtgggcatggccaccatgatcctgaccctgctgagcagcgcctggttccccctggacctgagcgcccaccaggatgccctgatcctggccggcaacctgctggccgccagcgcccccaagagcctgcggagctcctgggccagcgaggaggaggccaacccagctgccaccaagcaggaggaggtgtggccagccctgggggaccgggccctggtgcccatggtggagcagctgttcagccacctgctgaaggtgatcaacatctgtgcccacgtgctggatgatgtggcccctggccctgccatcaaggccgccctgcccagcctgaccaacccccccagcctgagccccatccggaggaagggcaaggagaaggagcccggggagcaggcctctgtgcccctgagccccaagaagggcagcgaggccagcgctgccagccggcagagcgacaccagcggccctgtgaccaccagcaagagcagcagcctgggcagcttctaccacctgcccagctacctgaagctgcatgatgtgctgaaggccacccacgccaactacaaggtgaccctggacctgcagaacagcacagagaagtttggaggcttcctgcggagcgccctggatgtgctgagccagatcctggagctggccaccctgcaggacatcggcaaatgtgtggaggagatcctgggctacctgaagagctgcttcagccgggagcccatgatggccaccgtgtgtgtgcagcagctgctgaagaccctgtttggcaccaacctggccagccagtttgatggcctgagcagcaaccccagcaagagccagggccgggcccagaggctgggcagcagctctgtgcggcccggcctgtaccactactgcttcatggccccctacacccacttcacccaggccctggctgatgccagcctgaggaacatggtgcaggccgagcaggagaatgacaccagcggctggtttgatgtgctgcagaaggtgtccacccagctgaagaccaacctgacctctgtgaccaagaacagagctgacaagaatgccatccacaaccacatccggctgtttgagcccctggtgatcaaggccctgaagcagtacaccaccaccacctgtgtgcagctgcagaagcaggtgctggacctgctggcccagctggtgcagctgcgggtgaactactgcctgctggacagcgaccaggtgttcatcggctttgtgctgaagcagtttgagtacatcgaggtgggccagttccgggagagcgaggccatcatccccaacatcttcttcttcctggtgctgctgtcctatgaaagataccacagcaagcagatcatcggcatccccaagatcatccagctgtgtgatggcatcatggccagcggcaggaaggctgtgacccacgccatcccagccctgcagcccatcgtgcatgacctgtttgtgctgcggggcaccaacaaggcagatgctgggaaggagctggagacccagaaggaggtggtggtgtccatgctgctgcggctcatccagtaccaccaggtgctggagatgttcatcctggtgctgcagcagtgccacaaggaaaatgaagacaagtggaagaggctgagccggcagattgctgacatcatcctgcccatgctggccaagcagcagatgcacatcgacagccatgaggccctgggcgtgctgaacaccctgtttgagatcctggcccccagcagcctgcggcctgtggacatgctgctgcgctccatgtttgtgacccccaacaccatggcctctgtgtccacagtgcagctgtggatcagcggcatcctggccatcctgcgggtgctgatcagccagagcacagaagatattgtgctgagccgcatccaggagctgtccttcagcccctacctgatcagctgcaccgtcatcaaccggctgagagatggagacagcaccagcaccctggaggagcacagcgagggcaagcagatcaagaacctgcctgaggagaccttcagccgcttcctgctgcagctggtgggcatcctgctggaggacatcgtgaccaagcagctgaaggtggagatgtctgagcagcagcacaccttctactgccaggagctgggcaccctgctgatgtgcctgatccacatcttcaagagcggcatgttccgccgcatcacagctgctgccaccaggctcttcagaagtgatggctgcggcggcagcttctacaccctggacagcctgaacctgcgggcccgctccatgatcaccacccacccagccctggtgctgctgtggtgccagatcctgctgctggtgaaccacacagactaccgctggtgggccgaggtgcagcagacccccaagaggcacagcctgagcagcaccaagctgctgagcccccagatgtctggagaggaggaggacagcgacctggccgccaagctgggcatgtgcaaccgggagatcgtgagaagaggagccctgatcctcttctgtgactatgtgtgccagaacctgcatgattctgagcacctgacctggctgattgtgaaccacatccaggacctgatcagcctgagccatgagccccctgtgcaggacttcatctctgctgtgcacagaaattctgctgccagcggcctcttcatccaggccatccagagccgctgtgagaacctgagcacccccaccatgctgaagaagaccctgcagtgcctggagggcatccacctgagccagagcggggctgtgctgaccctgtatgtggaccggctgctgtgcacccccttccgggtgctggccaggatggtggacatcctggcctgccggcgggtggagatgctgctggccgccaacctgcagagctccatggcccagctgcccatggaggagctgaaccgcatccaggagtacctgcagagcagcggcctggcccagaggcaccagaggctgtacagcctgctggaccgcttccggctgagcaccatgcaggacagcctgagccccagcccccctgtgagcagccaccccctggatggagatggccacgtgtccctggagaccgtgtccccagacaaggactggtacgtgcacctggtgaagagccagtgctggaccaggagtgacagcgccctgctggagggcgctgagctggtgaaccgcatcccagctgaggacatgaatgccttcatgatgaacagcgagttcaacctgagcctgctggccccctgcctgagcctgggcatgtctgagatcagcggcggccagaagagcgccctgtttgaagctgcccgggaggtgaccctggcccgggtgtctggaacagtgcagcagctgcctgctgtgcaccacgtgttccagcctgagctgcctgctgagcctgctgcctactggagcaagctgaatgacctgtttggagatgctgccctgtaccagagcctgcccaccctggcccgggccctggcccagtacctggtggtggtgtccaagctgcccagccacctgcacctgcccccagagaaggagaaggacatcgtgaagtttgtggtggccaccctggaggccctgtcctggcacctgatccacgagcagatccccctgagcctggacctgcaggccggcctggactgctgctgcctggccctgcagctgcccggcctgtggagcgtggtgagcagcacagaatttgtgacccacgcctgcagcctcatctactgtgtgcacttcatcctggaggccgtggccgtgcagcccggggagcagctgctgagccctgagaggaggaccaacacccccaaggccatcagcgaggaggaggaggaggtggaccccaacacccagaaccccaagtacatcacagctgcctgtgagatggtggccgagatggtggagagcctgcagagcgtgctggccctgggccacaagaggaacagcggcgtgcctgccttcctgacccccctgctgaggaacatcatcatcagcctggcccggctgcccctggtgaacagctacaccagggtgccccccctggtgtggaagctgggctggagccccaagccaggaggagactttggaacagccttccctgagatccctgtggagttcctgcaggagaaggaggtgttcaaggagttcatctaccgcatcaacaccctgggctggaccagcaggacccagtttgaggagacctgggccaccctgctgggcgtgctggtgacccagcccctggtgatggagcaggaggagagccccccagaggaggacacagagaggacccagatcaacgtgctggccgtgcaggccatcaccagcctggtgctgagcgccatgacagtgcctgtggccggcaacccagctgtgtcctgcctggagcagcagcccaggaacaagcccctgaaggccctggacaccaggtttggaaggaagctgagcatcatccggggcatcgtggagcaggagatccaggccatggtgtccaagcgggagaacatcgccacccaccacctgtaccaggcctgggaccctgtgcccagcctgagccctgccaccaccggggccctgatcagccatgagaagctgctgctgcagatcaaccctgagcgggagctgggctccatgagctacaagctgggccaggtgtccatccacagcgtgtggctgggcaacagcatcacccccctgcgggaggaggagtgggatgaggaggaggaggaggaggctgatgccccagcccccagcagcccccccaccagccctgtgaacagcaggaagcaccgggccggcgtggacatccacagctgcagccagttcctgctggagctgtacagccgctggatcctgcccagcagcagcgcccggaggaccccagccatcctgatcagcgaggtggtgcgcagcctgctggtggtgtctgacctcttcacagagaggaaccagtttgagctgatgtatgtgaccctgacagagctgcggcgggtgcaccccagtgaagatgagatcctggcccagtacctggtgcctgccacctgcaaggctgctgctgtgctgggcatggacaaggctgtggccgagcctgtgtcccggctgctggagagcaccctgcggagcagccacctgcccagccgggtgggcgccctgcacggcgtgctgtatgtgctggagtgtgacctgctggatgacacagccaagcagctgatccctgtgatcagtgactacctgctgagcaacctgaagggcatcgcccactgtgtgaacatccacagccagcagcacgtgctggtgatgtgtgccacagccttctacctgattgagaactaccccctggatgtgggccctgagttcagcgccagcatcatccagatgtgtggggtgatgctgagcggcagcgaggagagcacccccagcatcatctaccactgtgccctgcggggcctggagcggctgctgctgtctgagcagctgagccggctggatgctgagagcctggtgaagctgtctgtggacagagtgaatgtgcacagcccccaccgggccatggccgccctgggcctgatgctgacctgcatgtacaccgggaaggagaaggtgtccccaggccgcaccagtgaccccaacccagctgccccagacagcgagagcgtcatcgtggccatggagcgggtgtctgtgctgtttgaccgcatcaggaagggcttcccctgtgaggcccgggtggtggcccgcatcctgccccagttcctggatgacttcttccccccccaggacatcatgaacaaggtgattggagagttcctgagcaaccagcagccctacccccagttcatggccaccgtggtgtacaaggtgttccagaccctgcacagcacaggccagagctccatggtgcgggactgggtgatgctgagcctgagcaacttcacccagagggcccctgtggccatggccacctggagcctgagctgcttctttgtgtctgccagcaccagcccctgggtggccgccatcctgccccacgtgatcagcaggatgggcaagctggagcaggtggatgtgaacctcttctgcctggtggccacagacttctaccgccaccagatcgaggaggagctggacagaagagccttccagagcgtgctggaggtggtggccgcccctggcagcccctaccaccggctgctgacctgcctgagaaatgtgcacaaggtgaccacctgctag

SEQ ID NO: 124588 - DNA, 9429 bp, Artificial Sequence
  derived and/or modified sequence
atggccaccctggagaagctgatgaaggccttcgagagcctgaagtccttccagcagcaacagcagcagcagcagcagcaacagcaacagcagcagcagcaacaacagcagcagcctcccccacctcctcccccaccccctcctccccaattgccacagccaccacctcaggcccagccccttctgccccagcctcagccccccccacctcctccacccccaccgccaggtcctgctgttgccgaagagcctttacaccggcctaaaaaggagcttagcgctacaaaaaaggaccgcgtcaaccattgcctgacaatttgcgagaatatcgtagcacagagcgttcgtaacagccccgagtttcagaagctgctcggaatcgcgatggagctgttcctcctatgctctgatgacgctgaaagcgatgtaaggatggtcgcagacgagtgtctgaataaggtaattaaagccctcatggactctaatctccctcgcctgcagctggaattgtataaagaaatcaagaaaaatggtgcacctcggtcgctgagagccgccctctggcgctttgcagagcttgctcacttggttcgccctcagaaatgtagaccttatctggtgaaccttctgccttgtcttaccagaacttccaaacgaccagaagagagcgtacaggaaaccctggctgctgcagtgcccaagatcatggcttcattcggcaactttgccaacgataatgagatcaaagtgctactgaaagcctttatcgccaacctcaaaagctccagccccaccattagacgcactgcggcaggttccgctgtttcgatctgtcagcacagccggcggactcagtatttttactcttggttactgaatgttctgttgggccttctggtcccggtggaggacgaacattcaacattactaattcttggcgttctcttaaccctgcggtatctcgttcctctattgcaacagcaagtgaaagacacgtccttgaagggctcattcggcgtcacacgaaaggaaatggaggtgagcccttccgcagagcagctggtacaagtgtatgaactgactctgcaccatacgcagcaccaggatcataacgtggttacaggggcgctggaacttctacagcagctgttccgtactccaccccctgaattgctccagactttgaccgccgtaggagggatcggccagcttactgccgccaaagaggaaagcggaggcagatcgcgatccggctctattgtcgaattgatcgcaggggggggctcttcctgcagtcctgtgctgtctcgcaagcagaaaggtaaggtactcctcggtgaggaagaggctcttgaagatgatagcgagtctaggtcagacgtctccagtagcgcgcttacagcaagcgtgaaggacgaaatctctggtgaactggcagcttcatccggagtgagcaccccaggaagcgcagggcatgatataataactgagcagccacggtctcagcacacactgcaggctgactcagtcgacttagcttcctgtgatcttacatccagcgcaaccgatggcgacgaagaggacatcttaagtcattcatcaagtcaagtatcagccgtgcccagtgatccagccatggatttgaatgacgggacccaggcttccagtcccatatcagacagttctcagacaaccacggagggaccagatagcgccgttaccccatccgattcgagcgagatcgtgctggacggcactgataatcagtacttggggctgcagattggtcagccgcaggacgaggacgaggaagctacaggaatcctccccgacgaagcgagcgaggcctttcgaaactctagtatggcgcttcagcaggcccacctgctgaaaaacatgagtcactgccgtcaacccagtgactcctcagtggataaattcgtgctccgtgatgaagccaccgaaccaggggaccaggagaataagccctgtcggatcaagggcgacatcggacagtcaacagacgatgactcagcaccactcgtgcactgtgtgaggcttctgtcggcgtcatttctcttgacagggggcaagaatgtcctcgtgccagaccgcgacgtccgcgtctccgtgaaagctctcgccctgagctgcgtgggcgccgccgtggccctccatccagaatcttttttctcaaaactgtacaaagtgcccctggacaccaccgagtaccctgaagagcagtatgtaagcgatattctcaattacattgaccatggggaccctcaggtgaggggtgccacagcgatactctgtgggacactgatttgtagcatattgtcacggagccggtttcacgtgggcgactggatggggacgatacgaactctgacaggcaacaccttctctctagctgattgcatcccgcttcttcgaaagaccttaaaagatgagagcagcgtgacctgtaagctcgcatgtaccgccgtacgcaactgcgtaatgagcctctgctcgagtagctactccgaattgggactgcaattgatcatcgatgtgctgacattgcgcaattcaagctactggctggtcaggacggagctcctcgagactctggccgaaatcgacttcaggcttgtaagtttcctggaagcgaaggccgaaaatctgcatcggggagcacaccactataccggtctgttgaaactacaggaaagggtgctgaacaacgttgtgatccacttattaggagacgaggatccacgagtccgacatgtggccgccgcctccctgatccggctcgtgcccaagctgttctacaaatgcgatcagggacaggcagacccggtggttgccgtcgcccgagaccagtccagcgtgtacctaaagcttcttatgcacgaaacgcagccgcctagccacttcagcgtttccaccattaccaggatctacagaggctacaacctgttgccctctatcacggatgtgaccatggaaaataatctgagccgtgtcatcgccgccgtgtcacacgagctgattacctcaacgacacgagccctcacatttggatgctgcgaggccctgtgtctgcttagtacggctttcccggtgtgcatctggagtctgggctggcattgtggggttcctcccttaagcgcatcagatgagtccagaaagtcttgcactgtgggcatggcaacaatgatcttaacactgctctctagcgcctggttcccgcttgacctcagcgctcatcaggacgcactgatcctcgctggcaatttgctggccgcctccgctcctaaatctctgagaagctcttgggcatctgaagaagaggccaacccggccgcaacaaaacaggaggaagtatggcccgcgctgggggacagagccctggtgccaatggttgaacagctgttctcacacctgctcaaagttattaatatttgcgcccatgtgctggacgatgtcgccccaggaccagctatcaaagccgcactgccttccctgactaatcccccttctctgagccctatcaggaggaaagggaaagagaaagaacccggagaacaggccagtgtacccctgagccctaagaaagggagcgaggcaagcgccgccagtcggcagtctgatacttcagggcctgttaccacgtctaagtcaagctctctgggctctttttaccaccttccgtcctacctaaaactgcatgacgtgttgaaggccactcatgctaactataaggtgactttggacctgcagaattcaactgagaaattcggcggcttccttcggtccgctttggatgtcttgtctcaaattttggagctcgccaccctccaggacatcggcaaatgcgtcgaagagattttaggctacctcaagtcttgcttcagcagagagccaatgatggcaacagtatgtgtacagcaactcctcaagacattatttggtacgaatctggcctcgcagttcgatgggctgagctcgaatccctcaaaaagtcagggcagggcccagcggctgggcagcagctctgtacggccgggcctataccattactgttttatggcgccttacactcatttcactcaggcattggccgacgcatctctgaggaatatggtacaggccgaacaagaaaacgacaccagcggttggtttgacgtccttcagaaggtctcaacacaactcaaaactaacctgacctctgtaaccaaaaacagggcagataaaaatgctatccacaatcacattagattgtttgagccgctggtgataaaagctctcaaacagtacaccaccaccacctgtgttcagttacagaagcaggtgctcgatttgctggcacagctagtgcagctgcgagtgaactactgcttgctggactccgaccaggtgtttatcggatttgttctcaagcagttcgaatatattgaggtcggacagtttagagaaagcgaagctatcatccccaatatattcttctttctggtgctgcttagctatgagaggtatcactctaaacagatcatcggaattccaaaaatcatacagctctgtgatggcattatggcaagtggacgaaaggctgtgacgcacgccataccggcgttacaaccgatcgtgcacgatctctttgtcctgcgggggacaaataaggcagatgctggaaaagagctcgagacgcaaaaagaagttgtagtgagcatgctgctcaggctcattcaatatcaccaagtcctggagatgtttattctggtcctgcagcagtgccataaggaaaatgaggacaaatggaaaagactctctagacagattgccgatatcattttaccaatgcttgccaagcagcagatgcacatcgacagtcacgaagccctgggagtcctgaatacactcttcgaaattcttgcaccctcatccctgcgccccgtggacatgctgctgagatccatgttcgtaacacctaatacaatggcttccgtatcaaccgtccaactctggataagcgggattctggcgatcctccgcgtgctgatttcccaaagtaccgaggacatcgtcctgtcacggatccaagagctgtctttcagcccctatctaattagctgtaccgtcattaacaggctacgtgatggggacagtacttccactttagaagagcattctgaaggcaagcagatcaaaaatttacctgaggaaactttcagccgatttctgctacagctggtggggatactactcgaggatatagtgacaaagcagcttaaagttgagatgtcggagcaacaacacacgttttattgtcaggagctgggaacactgctaatgtgcctgatccatattttcaagtccggcatgtttcggcggatcacggccgccgccacccgcttgttccgaagtgacggttgcggcgggtcattctacaccctggactcactcaacctgagggctagatctatgatcacaacgcatccggcactggttctcctctggtgtcagattttactgttggtcaaccacaccgactatcgctggtgggccgaggttcagcagactcctaaacgccactcactcagcagtactaagcttctttccccacagatgtcaggcgaagaggaggatagtgatctggctgccaagctgggaatgtgcaatagggaaatcgtgagacgaggtgctcttatcctcttttgcgactatgtttgccagaatctgcatgatagcgaacatctcacatggttaatagtcaatcacatacaggacctgatatcgttaagtcacgagccaccagtgcaggacttcatatccgccgttcacagaaactctgcggcatctggcctttttatacaggctattcagagccgctgcgaaaacctcagtacgcccaccatgctgaagaagactcttcagtgtcttgagggcatacacctctcacagagtggcgctgtgctgacactgtacgttgacaggctgctctgcacaccgtttagagtgctggcccgtatggtcgatatactcgcatgcagaagagtggagatgctcctggccgccaacctgcaatcaagcatggcacaactgcccatggaagagctcaatcggatccaggagtatctccaaagctcaggactggcccagagacatcaacgcctgtatagccttctagacagatttcggctctcaaccatgcaggacagtctgtccccaagccctccggtcagtagccatcctctggacggcgatggacacgtgtccctcgaaacagtttccccagataaagattggtacgtccacctggtgaagtcacagtgctggaccagatcagatagtgcccttcttgagggagctgagctcgtgaaccggattccagccgaggacatgaatgctttcatgatgaacagcgagtttaacctgagtctcctcgctccgtgtctctccctgggcatgtcagagatcagtggcggccagaagtctgcactgtttgaagctgccagggaagtcaccttagcaagggttagcggtacggttcaacaactgccagccgttcaccatgtcttccagcccgagctgccagccgagccagcggcctactggtcaaagttaaatgatctgtttggcgatgctgccctgtatcagtctctgccaacattggctcgcgccctggctcagtatctcgtggttgtgagtaaactccccagccatctgcatctccctccagagaaagaaaaggacatcgtgaagttcgtagtggctaccctggaagctctgagttggcatcttatacatgagcagattccactgtcattggatttgcaggccggtctagactgttgctgcctagcgttacaattgcctggcctgtggtctgttgtgtcttccacagagtttgtcacccacgcttgtagtctgatctactgtgtccattttatccttgaggccgttgcagttcagccaggcgagcagctgctgagccccgagagacggacaaacactccaaaggccatcagcgaggaagaggaggaggtggatccaaatacgcagaacccaaaatatatcacggctgcatgcgaaatggtcgccgaaatggtggagagccttcaaagcgtgcttgctctaggccacaaacgaaactccggagtgccagcctttctgacccctctcctgaggaacatcataataagtttggcccgtctgccattagtgaatagttacacccgggtgccccctctggtgtggaagttaggatggtcccccaaacctggtggagattttgggaccgcttttccagagataccagtcgagtttctgcaggagaaagaggtgttcaaggaatttatatacaggatcaacacactgggttggacaagtagaacccagttcgaagagacctgggccactctgctgggggtgcttgtgacacagcctctagtgatggagcaggaagaaagtccccctgaagaggatacagagaggacccagattaatgtcctggcagtgcaggccatcacgagcctcgtgctttcagccatgacagttcccgtggccggaaatcccgccgtttcatgtctggagcaacagcccaggaacaagccactgaaagccctggatacacgatttggtaggaagctctccattatcaggggcatagtggaacaggagattcaggctatggtgtcaaaacgcgaaaacatcgccacccaccatctgtaccaggcctgggacccagtcccctccctttctcctgctactacaggggcactgatcagccatgaaaaacttttactgcaaataaatccagagcgtgaactcggttcaatgagctataaactaggtcaggtcagcatccacagcgtctggctcggaaactcaattacccccctgcgggaagaagagtgggacgaggaagaggaagaagaagctgacgcgcctgccccatctagtcccccaacttcccctgtcaacagcagaaaacatcgagccggggttgacatccatagctgcagtcagtttctgttagaactgtacagccggtggattcttccctcttcttccgctcgtagaacaccagcaatcctcatcagcgaggtagtgcggtcgctcttggtggttagtgatctgttcaccgaacgcaaccagtttgaactaatgtacgtcaccttgacagaactgcggcgggtccaccctagcgaagacgaaatcctcgctcagtacctggtgcccgccacatgtaaggccgccgccgtactggggatggataaagcagtagcggagcccgtatcgaggttgcttgagtcgaccctccgctcgagccacctgcccagtagggtgggtgcgctgcacggcgtattatatgtcttggagtgcgatttactcgatgacacagcaaaacagctcatccctgtcatcagcgactatctgctgtccaatctgaaggggatcgcacactgcgttaatattcacagtcagcaacatgtgttggtcatgtgcgccactgcattctacttaatcgagaactacccattggatgttggacccgaattctcagcttccattatccagatgtgcggagtaatgctttcaggttcagaagagagcaccccctccatcatctaccattgtgcattgcgaggactggaaagactcttgttaagtgagcagctctctcgtttggatgcggaaagcttggtgaagctgtcggtggatagggtcaatgttcactcaccacaccgagcgatggccgccctgggactgatgttgacgtgcatgtatacgggtaaggaaaaggtgtcacctggccggactagcgacccaaatcccgccgcaccagatagcgagagcgtcattgtggctatggagagggtaagtgtgctattcgacaggattaggaaaggcttcccatgcgaggctagggtggtcgcccgcatcttgcctcagttccttgacgattttttccccccacaagacattatgaataaggtgatcggtgagtttctgtctaaccaacaaccctacccgcagtttatggccaccgtcgtttataaagtgtttcagactctccacagtaccggacaatctagtatggtgcgggattgggtcatgttgagcctgagcaattttacccagcgggcaccagtggccatggctacttggtccctctcctgcttctttgtttcagctagcacctccccttgggtggctgccatcctccctcacgtgatatcacggatgggaaaactggagcaggttgacgtcaacctgttctgtttggtggctaccgacttttaccggcatcagatcgaggaggagctggaccgtcgggctttccagtcagtcctggaagtggtggccgctcccggatctccctatcaccgcctgctcacctgcctgcgaaacgtgcacaaagtcaccacttgctag

SEQ ID NO: 124589 - DNA, 9428 bp, Artificial Sequence
  derived and/or modified sequence
atggcaactctggaaaaacttatgaaagccttcgagagtctgaagtcattccagcaacagcagcagcagcagcaacagcagcagcaacagcagcagcaacagcagcagcagcagccaccacccccaccccctccaccgcctcctccccaactccctcagccgcctccccaagctcagcctctacttccccagccacagcctcctcctccgccacccccaccaccgcctggccctgccgtagccgaggagcccctccaccgccctaaaaaggaattaagcgccaccaaaaaagacagagtgaaccactgtctgactatttgtgagaatattgttgcgcagagcgtgaggaatagtccagaattccagaagttacttgggatcgccatggaactatttctcctctgctccgacgatgctgagagtgacgtgcgaatggtggccgatgagtgtctcaacaaagtcattaaggcgctgatggattcgaatctgccacggctccaactggagctgtataaggagatcaagaagaatggggcacccagatcgctgagggccgcattgtggagatttgcagagctggcgcacttagtgcggcctcagaaatgtcgtccttatctggtgaatctccttccttgcttgacacgtaccagcaagcgtcctgaagagtccgtgcaggaaaccttggctgccgcagtacccaagattatggcttcattcgggaatttcgcaaatgataacgagatcaaggtgcttctcaaagcgttcatagccaacctaaagagcagttcccccacaattaggcggactgccgctgggagcgctgtgtctatatgccagcattccaggcgcacacagtacttttattcttggcttttgaacgtcttgctggggctgcttgtgcccgtagaagatgaacacagtactttgctcatccttggcgttctgctgacactgagatatctcgtgcccctgttgcagcaacaggttaaggacacatctttgaagggctcctttggcgttacacggaaagaaatggaagtatcacccagtgccgagcagctcgtgcaggtgtatgaattaacactacatcatacccaacaccaagatcacaacgtcgtcacaggtgctttggaacttctgcagcaactgttcagaacaccgcctcctgagttgcttcagacactgactgccgttggaggaatcggccaactcacagcagctaaagaggagtccggaggcaggtcgcgaagcggatctatcgtggaactgatcgcagggggaggatcctcctgcagtccagttctgagtaggaagcagaagggaaaagtgcttcttggtgaggaggaggccctggaggacgactcagaaagccgttcagatgtgtctagtagtgctctgaccgcctcagtgaaggatgaaataagtggagagctcgcagcatccagcggcgtctccactcctggttctgccggacatgacatcatcaccgagcagccccgtagccagcacaccctgcaggccgactctgtggacctggcaagctgtgacttaacatcatctgccaccgacggggatgaggaggacatcctttctcactcgagctcacaagtaagcgccgtgccttccgatccagccatggacctgaacgacgggacccaggcttcctcaccaatctcggacagttcccaaaccacaacggaagggcctgacagcgcagtgacccccagcgacagctcagagatagtactcgatggcactgataatcagtacctagggctccaaatcgggcagcctcaggacgaggatgaagaagccactggcatcctcccggacgaagccagcgaagccttcagaaactcctcaatggccctgcagcaagcacacctgctgaagaatatgtcccactgtagacagccctccgactcttcggtcgacaagtttgtgctacgcgatgaagccaccgagccaggtgaccaagagaataagccgtgtcgaattaaaggcgacattggacagagtaccgatgacgacagcgcacccctcgtccactgtgtgcgtctactgtcagcctcttttctcctgacgggaggaaaaaacgtcctggtgcccgaccgggatgtgcgtgtgtccgtgaaagctcttgcgctgtcatgtgttggagccgctgtggccctccatcctgaaagtttcttctctaagctgtacaaagttcccctcgatactactgagtacccggaagagcagtacgtgagcgacattttgaactacatcgatcacggcgaccctcaggttcggggagcgacggcaattctatgcggcaccttaatttgtagtattctgtccaggtctagattccatgtgggggactggatgggcacaattaggacacttacgggaaacacattcagtctggccgattgtattccactcctgcgcaagactctcaaggatgaaagtagcgttacatgtaagttagcttgcacggccgtaagaaattgtgtaatgtcattatgctcctcctcttatagcgaattaggtctgcagttaatcattgatgtcctgacgcttcgaaactccagctattggctggtcagaacagagctgttggaaaccctcgctgaaatcgatttcaggctcgtcagtttcctcgaggccaaagccgagaaccttcaccgaggggcacatcattacaccggcctactcaaactgcaggagcgcgtgctcaataatgttgttatacacctgctgggcgacgaggaccctcgtgtccgccatgtagctgcagcctcactgattaggctggtgccgaagcttttctacaagtgcgatcagggccaggcagacccagtggtggcagtcgcccgagatcaatccagtgtctaccttaagctgctgatgcacgagacacagcctccaagtcacttttcagtctcaaccattaccagaatttatagggggtacaatctcttaccttccatcacagatgtgacaatggagaataatctttcaagggttatcgccgcagtcagccacgaactcattacgagtacaactagagcccttactttcggatgctgcgaagccctctgcctgctaagcaccgcctttccggtgtgcatttggtccctcggatggcactgcggagtacctcctctctccgctagcgacgagagtagaaagtcctgcactgttgggatggcaaccatgattcttacattactgtcatctgcctggtttcccttggacctttcagcacaccaggacgctctgatcttagctggcaatctgctggctgcgagtgctcctaagagtcttaggtcaagttgggctagcgaagaagaagcaaaccccgcagctacaaaacaagaggaggtctggccagccttgggcgacagggcccttgtgccaatggttgagcaacttttcagccacctcctgaaagtgatcaacatctgcgctcacgtcctggatgacgtggctcccggacctgccatcaaagccgctcttcccagtctgactaatcctccgtcgctcagccctatacgtagaaagggtaaggagaaagaacccggagaacaggcatctgtgcctctaagtcccaaaaagggaagcgaggcatcagcagcctctcgccagagtgatacaagcgggcctgttactaccagtaagagctcctctctcggcagcttttaccaccttccttcttacctgaagctgcatgatgtgcttaaggccacgcacgccaattataaggtcaccctggacctccagaacagcaccgaaaaatttggaggttttttgagatccgccttggacgttctttctcagatattggagttggcaactctccaggatattggaaaatgtgtggaagaaatattggggtacctcaaaagctgtttttcgcgagaaccaatgatggctaccgtgtgtgtgcagcagctgctgaagacactgtttggcactaacttagcatctcagttcgacggactgtcaagcaacccttccaagtcccagggcagagcccagaggctgggcagctcctctgttcgccctggtctgtaccactattgtttcatggctccatacacccacttcacacaggccctggctgacgcctccctacgcaatatggtccaggcggaacaggaaaacgacacgtcaggctggttcgacgtgctccaaaaggtgagcacccaactcaagaccaatctcacatctgtcacaaaaaatcgcgcagataagaacgctatccataaccacatccgcctgttcgagccactggtgataaaggctcttaaacagtacactacaactacttgtgtgcagctacagaagcaggtactagacctactagctcaacttgtccagttacgtgttaactactgtctgctggattccgaccaggtgtttattggatttgtactcaagcagtttgaatatatcgaagtcgggcagttccgggagagtgaagctatcattccaaatattttcttctttctggtgttgctctcatacgaacgctaccattccaagcaaataatcggaatccccaaaataatacagctctgtgacggcattatggcaagcggcagaaaggcagtgactcatgccatccctgccctgcagcccatcgtgcatgatctctttgttctcaggggcaccaacaaggctgatgccggaaaggagctggagacacaaaaagaggtggtggtctctatgctgcttagactaattcagtatcaccaggtgcttgaaatgtttatactggtcttgcagcagtgccacaaagagaacgaagataaatggaagcggctttccaggcagattgctgatattattcttcccatgctcgcaaagcagcagatgcacatcgatagccacgaagcgttaggagtcctcaacacccttttcgagattcttgcgccatccagcttacgccctgttgacatgctgctgcggtcaatgtttgtgactcctaataccatggccagcgtttcaacagtacagctgtggatctctggtattttggctatcctgcgggtcctgatttcccagagtaccgaggatattgtcctatcaaggatacaggagctgagcttttcaccctatttgatctcttgcactgtgatcaacagattgcgcgatggagatagcacaagcacacttgaggagcacagcgaggggaagcagatcaagaatctcccggaggaaacattttcacggttcctccttcagcttgtgggaatcctgcttgaggacattgtgacaaaacagctaaaagtggaaatgtctgagcaacagcataccttctactgccaagagttaggaactttgttgatgtgcctcatacatatctttaagtcgggcatgtttcggcgtatcacagctgccgctacccgcctctttcgcagcgatggctgtgggggttccttttatactctggattcgctgaatcttagagccagaagcatgatcacaactcatcccgcacttgtgctgctttggtgtcaaattctgctgctggtgaatcataccgattatagatggtgggctgaggtgcaacagacccccaagcggcactcattgagtagtaccaaattattgtcacctcaaatgagcggtgaagaagaggactcagatctagccgcaaaattaggtatgtgtaaccgagagatcgtgagacggggtgctttaatccttttttgtgattacgtgtgccagaatcttcatgactcagaacacctcacctggctcatcgtcaaccatatacaagaccttatctcattgtcccatgaaccccctgtgcaggatttcatcagcgccgtacataggaatagtgccgctagcggactttttattcaggcaatccagtccagatgtgagaacctgagcaccccaactatgttgaagaaaacattgcagtgcctggaaggcatccacctgtctcagtcgggtgccgttctgacattatacgtcgacaggttgttgtgtacacctttccgcgtgttggccaggatggtcgatatactggcatgccgcagagtggaaatgctgctggctgccaatctgcaatcctctatggctcagctgccaatggaagagctcaaccgtatccaggaataccttcagtctagcggactggcgcagcgccaccagcgcttgtacagcctccttgatcgcttccgcctctcaacaatgcaagactccctttcacccagccccccagtctctagtcaccccctggacggcgacggccacgtatctttagaaactgtgagccccgataaggactggtacgtacatcttgtgaagagccaatgctggaccagaagcgactctgcattgcttgagggggcagagctggtcaataggatccctgctgaggatatgaatgcatttatgatgaacagcgagttcaatttatctttactggcaccttgcctgagtttgggcatgagtgaaatcagcggcggacagaagagcgccctgttcgaagccgcacgggaagtgaccttagcacgtgttagcggaacagtgcagcagctgccagccgtgcatcacgtgtttcagccagagctgcccgctgagccagccgcttattggtctaagttgaacgacttgtttggagatgcggctctataccagtcccttccaaccctagcgagagctctggctcagtatctggtcgtcgtgagtaaacttcctagccatctgcacctgccacctgaaaaagaaaaggatattgtaaaattcgtcgtcgccacgctggaggcgctctcttggcacctcatacatgagcagatacctctcagcctggatctgcaggccggactggattgttgttgcctcgccctccagctccccggactgtggtcagtcgtgagttcaacagaattcgttacgcacgcgtgctctcttatatattgcgtgcacttcattcttgaggcagtcgcagtgcaaccaggcgagcagctgctctcacccgagaggaggactaatacccccaaggccatctccgaggaggaagaagaggtggatcctaacactcagaatcccaagtacatcacagccgcatgcgagatggtcgcagagatggttgaatctttgcaatccgtgttggctctgggacataaacgcaactccggagtccccgctttcctgactccgttacttaggaatatcattatcagtctggcccgactccccctggtgaacagctatacacgggtgccgcctctagtatggaagctgggatggagtccaaaacccggaggtgactttggcacagcatttccggaaatacctgtggagtttctgcaggagaaggaagtgtttaaagagtttatttacagaattaacacattaggatggacctcacgcacccagttcgaggagacatgggcaacactactaggtgttctagttacacaacctctggtcatggagcaagaggagagtcctcctgaagaagacacggagcgcacgcagattaacgtgctcgcagtgcaagccatcacctccctggtcctctccgcaatgacagtgccagtagccggaaatccggctgtctcatgtttggaacagcaaccacgcaataagccccttaaagcacttgacaccaggtttggacgaaagctgagcatcattagagggattgtcgaacaagagatccaagcaatggtatccaagcgggagaatatcgcgacccatcacctgtatcaagcttgggatcctgttccatctctttctcccgcaaccaccggagctcttattagtcatgaaaagctgcttcttcaaatcaatcctgagcgtgagctcgggtccatgtcctataagctcggtcaagtgtctatccacagcgtgtggcttggaaattccataactccgctaagggaggaggaatgggacgaagaggaagaagaggaggccgatgccccagctccgagctccccacctacaagcccagtgaactctagaaagcaccgcgcaggggtcgacattcattcttgttctcagttcctgctggagctttatagccgctggattctgcctagtagttctgcgcgacgtactccagccattcttatcagcgaagttgttcgtagtctcctggtcgtctctgacctgtttacagagaggaaccagttcgagttaatgtatgtaactctgactgagttacggcgtgtacacccaagcgaggacgaaatcctcgctcagtaccttgtgcccgctacctgtaaggcagcagcagtgctggggatggacaaggcagtggccgagcctgtttcccgcctcctggaaagtaccctgcgttcctctcatctaccatctagggtcggagctttacatggtgtgctgtatgtgctcgagtgtgacctcctcgacgataccgcaaagcaacttatccctgtcatctccgactacctccttagcaatctcaaaggtattgcccactgcgtgaacattcactctcagcagcatgtcctggtgatgtgtgccaccgccttctatctgatcgagaactatccacttgacgttgggcctgaattcagcgcttccatcatccagatgtgtggtgttatgctgtcaggttcggaggaatccactccatcaattatttaccactgcgccctcagaggcttagagaggctgctgcttagcgagcagctcagccggctagatgctgaaagtttggtcaagctgagtgtcgaccgagtgaacgtgcactctccccatcgtgccatggcagccctcggcctaatgcttacctgcatgtataccggcaaagagaaagtgtcccctggaagaaccagtgacccgaacccagcagcgcctgattccgagagtgtgattgtagccatggaacgagtcagcgtcctcttcgatcgcattcggaagggtttcccatgcgaggccagagtggtggctagaattctgccacagttccttgacgactttttcccgccacaggacattatgaacaaagtcatcggcgaattcctctctaaccagcagccctatccccagttcatggccaccgttgtgtataaggtgttccagacccttcactccacaggacagtccagtatggtgagggattgggttatgctgtccttatccaacttcacccaaagagcccctgtggcaatggcaacctggagcctttcttgcttttttgtatccgcgagcacctcaccgtgggtggccgcaattcttcctcacgtaataagccgaatggggaagctcgagcaggtcgatgtcaatctgttctgcctcgttgcaacagacttctataggcaccagatagaagaggaattagatcgaagggcgtttcagtccgtactcgaggtagtggctgcgcctggctcaccctaccatcggctgctgacctgtctccgtaatgtacacaaggtaacaacatgcta

SEQ ID NO: 124590 - DNA, 9429 bp, Artificial Sequence
  derived and/or modified sequence
atggccaccctggagaagctgatgaaggccttcgagagcctgaagagcttccagcagcagcagcagcagcagcagcagcagcagcagcagcagcagcagcagcagcagcagcagccccccccccccccccccccccccccccccccccagctgccccagccccccccccaggcccagcccctgctgccccagccccagccccccccccccccccccccccccccccccggccccgccgtggccgaggagcccctgcacagacccaagaaggagctgagcgccaccaagaaggacagagtgaaccactgcctgaccatctgcgagaacatcgtggcccagagcgtgagaaacagccccgagttccagaagctgctgggcatcgccatggagctgttcctgctgtgcagcgacgacgccgagagcgacgtgagaatggtggccgacgagtgcctgaacaaggtgatcaaggccctgatggacagcaacctgcccagactgcagctggagctgtacaaggagatcaagaagaacggcgcccccagaagcctgagagccgccctgtggagattcgccgagctggcccacctggtgagaccccagaagtgcagaccctacctggtgaacctgctgccctgcctgaccagaaccagcaagagacccgaggagagcgtgcaggagaccctggccgccgccgtgcccaagatcatggccagcttcggcaacttcgccaacgacaacgagatcaaggtgctgctgaaggccttcatcgccaacctgaagagcagcagccccaccatcagaagaaccgccgccggcagcgccgtgagcatctgccagcacagcagaagaacccagtacttctacagctggctgctgaacgtgctgctgggcctgctggtgcccgtggaggacgagcacagcaccctgctgatcctgggcgtgctgctgaccctgagatacctggtgcccctgctgcagcagcaggtgaaggacaccagcctgaagggcagcttcggcgtgaccagaaaggagatggaggtgagccccagcgccgagcagctggtgcaggtgtacgagctgaccctgcaccacacccagcaccaggaccacaacgtggtgaccggcgccctggagctgctgcagcagctgttcagaacccccccccccgagctgctgcagaccctgaccgccgtgggcggcatcggccagctgaccgccgccaaggaggagagcggcggcagaagcagaagcggcagcatcgtggagctgatcgccggcggcggcagcagctgcagccccgtgctgagcagaaagcagaagggcaaggtgctgctgggcgaggaggaggccctggaggacgacagcgagagcagaagcgacgtgagcagcagcgccctgaccgccagcgtgaaggacgagatcagcggcgagctggccgccagcagcggcgtgagcacccccggcagcgccggccacgacatcatcaccgagcagcccagaagccagcacaccctgcaggccgacagcgtggacctggccagctgcgacctgaccagcagcgccaccgacggcgacgaggaggacatcctgagccacagcagcagccaggtgagcgccgtgcccagcgaccccgccatggacctgaacgacggcacccaggccagcagccccatcagcgacagcagccagaccaccaccgagggccccgacagcgccgtgacccccagcgacagcagcgagatcgtgctggacggcaccgacaaccagtacctgggcctgcagatcggccagccccaggacgaggacgaggaggccaccggcatcctgcccgacgaggccagcgaggccttcagaaacagcagcatggccctgcagcaggcccacctgctgaagaacatgagccactgcagacagcccagcgacagcagcgtggacaagttcgtgctgagagacgaggccaccgagcccggcgaccaggagaacaagccctgcagaatcaagggcgacatcggccagagcaccgacgacgacagcgcccccctggtgcactgcgtgagactgctgagcgccagcttcctgctgaccggcggcaagaacgtgctggtgcccgacagagacgtgagagtgagcgtgaaggccctggccctgagctgcgtgggcgccgccgtggccctgcaccccgagagcttcttcagcaagctgtacaaggtgcccctggacaccaccgagtaccccgaggagcagtacgtgagcgacatcctgaactacatcgaccacggcgacccccaggtgagaggcgccaccgccatcctgtgcggcaccctgatctgcagcatcctgagcagaagcagattccacgtgggcgactggatgggcaccatcagaaccctgaccggcaacaccttcagcctggccgactgcatccccctgctgagaaagaccctgaaggacgagagcagcgtgacctgcaagctggcctgcaccgccgtgagaaactgcgtgatgagcctgtgcagcagcagctacagcgagctgggcctgcagctgatcatcgacgtgctgaccctgagaaacagcagctactggctggtgagaaccgagctgctggagaccctggccgagatcgacttcagactggtgagcttcctggaggccaaggccgagaacctgcacagaggcgcccaccactacaccggcctgctgaagctgcaggagagagtgctgaacaacgtggtgatccacctgctgggcgacgaggaccccagagtgagacacgtggccgccgccagcctgatcagactggtgcccaagctgttctacaagtgcgaccagggccaggccgaccccgtggtggccgtggccagagaccagagcagcgtgtacctgaagctgctgatgcacgagacccagccccccagccacttcagcgtgagcaccatcaccagaatctacagaggctacaacctgctgcccagcatcaccgacgtgaccatggagaacaacctgagcagagtgatcgccgccgtgagccacgagctgatcaccagcaccaccagagccctgaccttcggctgctgcgaggccctgtgcctgctgagcaccgccttccccgtgtgcatctggagcctgggctggcactgcggcgtgccccccctgagcgccagcgacgagagcagaaagagctgcaccgtgggcatggccaccatgatcctgaccctgctgagcagcgcctggttccccctggacctgagcgcccaccaggacgccctgatcctggccggcaacctgctggccgccagcgcccccaagagcctgagaagcagctgggccagcgaggaggaggccaaccccgccgccaccaagcaggaggaggtgtggcccgccctgggcgacagagccctggtgcccatggtggagcagctgttcagccacctgctgaaggtgatcaacatctgcgcccacgtgctggacgacgtggcccccggccccgccatcaaggccgccctgcccagcctgaccaacccccccagcctgagccccatcagaagaaagggcaaggagaaggagcccggcgagcaggccagcgtgcccctgagccccaagaagggcagcgaggccagcgccgccagcagacagagcgacaccagcggccccgtgaccaccagcaagagcagcagcctgggcagcttctaccacctgcccagctacctgaagctgcacgacgtgctgaaggccacccacgccaactacaaggtgaccctggacctgcagaacagcaccgagaagttcggcggcttcctgagaagcgccctggacgtgctgagccagatcctggagctggccaccctgcaggacatcggcaagtgcgtggaggagatcctgggctacctgaagagctgcttcagcagagagcccatgatggccaccgtgtgcgtgcagcagctgctgaagaccctgttcggcaccaacctggccagccagttcgacggcctgagcagcaaccccagcaagagccagggcagagcccagagactgggcagcagcagcgtgagacccggcctgtaccactactgcttcatggccccctacacccacttcacccaggccctggccgacgccagcctgagaaacatggtgcaggccgagcaggagaacgacaccagcggctggttcgacgtgctgcagaaggtgagcacccagctgaagaccaacctgaccagcgtgaccaagaacagagccgacaagaacgccatccacaaccacatcagactgttcgagcccctggtgatcaaggccctgaagcagtacaccaccaccacctgcgtgcagctgcagaagcaggtgctggacctgctggcccagctggtgcagctgagagtgaactactgcctgctggacagcgaccaggtgttcatcggcttcgtgctgaagcagttcgagtacatcgaggtgggccagttcagagagagcgaggccatcatccccaacatcttcttcttcctggtgctgctgagctacgagagataccacagcaagcagatcatcggcatccccaagatcatccagctgtgcgacggcatcatggccagcggcagaaaggccgtgacccacgccatccccgccctgcagcccatcgtgcacgacctgttcgtgctgagaggcaccaacaaggccgacgccggcaaggagctggagacccagaaggaggtggtggtgagcatgctgctgagactgatccagtaccaccaggtgctggagatgttcatcctggtgctgcagcagtgccacaaggagaacgaggacaagtggaagagactgagcagacagatcgccgacatcatcctgcccatgctggccaagcagcagatgcacatcgacagccacgaggccctgggcgtgctgaacaccctgttcgagatcctggcccccagcagcctgagacccgtggacatgctgctgagaagcatgttcgtgacccccaacaccatggccagcgtgagcaccgtgcagctgtggatcagcggcatcctggccatcctgagagtgctgatcagccagagcaccgaggacatcgtgctgagcagaatccaggagctgagcttcagcccctacctgatcagctgcaccgtgatcaacagactgagagacggcgacagcaccagcaccctggaggagcacagcgagggcaagcagatcaagaacctgcccgaggagaccttcagcagattcctgctgcagctggtgggcatcctgctggaggacatcgtgaccaagcagctgaaggtggagatgagcgagcagcagcacaccttctactgccaggagctgggcaccctgctgatgtgcctgatccacatcttcaagagcggcatgttcagaagaatcaccgccgccgccaccagactgttcagaagcgacggctgcggcggcagcttctacaccctggacagcctgaacctgagagccagaagcatgatcaccacccaccccgccctggtgctgctgtggtgccagatcctgctgctggtgaaccacaccgactacagatggtgggccgaggtgcagcagacccccaagagacacagcctgagcagcaccaagctgctgagcccccagatgagcggcgaggaggaggacagcgacctggccgccaagctgggcatgtgcaacagagagatcgtgagaagaggcgccctgatcctgttctgcgactacgtgtgccagaacctgcacgacagcgagcacctgacctggctgatcgtgaaccacatccaggacctgatcagcctgagccacgagccccccgtgcaggacttcatcagcgccgtgcacagaaacagcgccgccagcggcctgttcatccaggccatccagagcagatgcgagaacctgagcacccccaccatgctgaagaagaccctgcagtgcctggagggcatccacctgagccagagcggcgccgtgctgaccctgtacgtggacagactgctgtgcacccccttcagagtgctggccagaatggtggacatcctggcctgcagaagagtggagatgctgctggccgccaacctgcagagcagcatggcccagctgcccatggaggagctgaacagaatccaggagtacctgcagagcagcggcctggcccagagacaccagagactgtacagcctgctggacagattcagactgagcaccatgcaggacagcctgagccccagcccccccgtgagcagccaccccctggacggcgacggccacgtgagcctggagaccgtgagccccgacaaggactggtacgtgcacctggtgaagagccagtgctggaccagaagcgacagcgccctgctggagggcgccgagctggtgaacagaatccccgccgaggacatgaacgccttcatgatgaacagcgagttcaacctgagcctgctggccccctgcctgagcctgggcatgagcgagatcagcggcggccagaagagcgccctgttcgaggccgccagagaggtgaccctggccagagtgagcggcaccgtgcagcagctgcccgccgtgcaccacgtgttccagcccgagctgcccgccgagcccgccgcctactggagcaagctgaacgacctgttcggcgacgccgccctgtaccagagcctgcccaccctggccagagccctggcccagtacctggtggtggtgagcaagctgcccagccacctgcacctgccccccgagaaggagaaggacatcgtgaagttcgtggtggccaccctggaggccctgagctggcacctgatccacgagcagatccccctgagcctggacctgcaggccggcctggactgctgctgcctggccctgcagctgcccggcctgtggagcgtggtgagcagcaccgagttcgtgacccacgcctgcagcctgatctactgcgtgcacttcatcctggaggccgtggccgtgcagcccggcgagcagctgctgagccccgagagaagaaccaacacccccaaggccatcagcgaggaggaggaggaggtggaccccaacacccagaaccccaagtacatcaccgccgcctgcgagatggtggccgagatggtggagagcctgcagagcgtgctggccctgggccacaagagaaacagcggcgtgcccgccttcctgacccccctgctgagaaacatcatcatcagcctggccagactgcccctggtgaacagctacaccagagtgccccccctggtgtggaagctgggctggagccccaagcccggcggcgacttcggcaccgccttccccgagatccccgtggagttcctgcaggagaaggaggtgttcaaggagttcatctacagaatcaacaccctgggctggaccagcagaacccagttcgaggagacctgggccaccctgctgggcgtgctggtgacccagcccctggtgatggagcaggaggagagcccccccgaggaggacaccgagagaacccagatcaacgtgctggccgtgcaggccatcaccagcctggtgctgagcgccatgaccgtgcccgtggccggcaaccccgccgtgagctgcctggagcagcagcccagaaacaagcccctgaaggccctggacaccagattcggcagaaagctgagcatcatcagaggcatcgtggagcaggagatccaggccatggtgagcaagagagagaacatcgccacccaccacctgtaccaggcctgggaccccgtgcccagcctgagccccgccaccaccggcgccctgatcagccacgagaagctgctgctgcagatcaaccccgagagagagctgggcagcatgagctacaagctgggccaggtgagcatccacagcgtgtggctgggcaacagcatcacccccctgagagaggaggagtgggacgaggaggaggaggaggaggccgacgcccccgcccccagcagcccccccaccagccccgtgaacagcagaaagcacagagccggcgtggacatccacagctgcagccagttcctgctggagctgtacagcagatggatcctgcccagcagcagcgccagaagaacccccgccatcctgatcagcgaggtggtgagaagcctgctggtggtgagcgacctgttcaccgagagaaaccagttcgagctgatgtacgtgaccctgaccgagctgagaagagtgcaccccagcgaggacgagatcctggcccagtacctggtgcccgccacctgcaaggccgccgccgtgctgggcatggacaaggccgtggccgagcccgtgagcagactgctggagagcaccctgagaagcagccacctgcccagcagagtgggcgccctgcacggcgtgctgtacgtgctggagtgcgacctgctggacgacaccgccaagcagctgatccccgtgatcagcgactacctgctgagcaacctgaagggcatcgcccactgcgtgaacatccacagccagcagcacgtgctggtgatgtgcgccaccgccttctacctgatcgagaactaccccctggacgtgggccccgagttcagcgccagcatcatccagatgtgcggcgtgatgctgagcggcagcgaggagagcacccccagcatcatctaccactgcgccctgagaggcctggagagactgctgctgagcgagcagctgagcagactggacgccgagagcctggtgaagctgagcgtggacagagtgaacgtgcacagcccccacagagccatggccgccctgggcctgatgctgacctgcatgtacaccggcaaggagaaggtgagccccggcagaaccagcgaccccaaccccgccgcccccgacagcgagagcgtgatcgtggccatggagagagtgagcgtgctgttcgacagaatcagaaagggcttcccctgcgaggccagagtggtggccagaatcctgccccagttcctggacgacttcttccccccccaggacatcatgaacaaggtgatcggcgagttcctgagcaaccagcagccctacccccagttcatggccaccgtggtgtacaaggtgttccagaccctgcacagcaccggccagagcagcatggtgagagactgggtgatgctgagcctgagcaacttcacccagagagcccccgtggccatggccacctggagcctgagctgcttcttcgtgagcgccagcaccagcccctgggtggccgccatcctgccccacgtgatcagcagaatgggcaagctggagcaggtggacgtgaacctgttctgcctggtggccaccgacttctacagacaccagatcgaggaggagctggacagaagagccttccagagcgtgctggaggtggtggccgcccccggcagcccctaccacagactgctgacctgcctgagaaacgtgcacaaggtgaccacctgctag

SEQ ID NO: 124591 - protein, 662 aa, Artificial Sequence
  derived and/or modified sequence
MMEPEEYRERGREMVDYICQYLSTVRERRVTPDVQPGYLRAQLPESAPEDPDSWDSIFGDIERIIMPGVVHWQSPHMHAYYPALTSWPSLLGDMLADAINCLGFTWASSPACTELEMNVMDWLAKMLGLPEHFLHHHPSSQGGGVLQSTVSESTLIALLAARKNKILEMKTSEPDADESCLNARLVAYASDQAHSSVEKAGLISLVKMKFLPVDDNFSLRGEALQKAIEEDKQRGLVPVFVCATLGTTGVCAFDCLSELGPICAREGLWLHIDAAYAGTAFLCPEFRGFLKGIEYADSFTFNPSKWMMVHFDCTGFWVKDKYKLQQTFSVNPIYLRHANSGVATDFMHWQIPLSRRFRSVKLWFVIRSFGVKNLQAHVRHGTEMAKYFESLVRNDPSFEIPAKRHLGLVVFRLKGPNCLTENVLKEIAKAGRLFLIPATIQDKLIIRFTVTSQFTTRDDILRDWNLIRDAATLILSQHCTSQPSPRVGNLISQIRGARAWACGTSLQSVSGAGDDPVQARKIIKQPQRVGAGPMKRENGLHLETLLDPVDDCFSEEAPDATKHKLSSFLFSYLSVQTKKKTVRSLSCNSVPVSAQKPLPTEASVKNGGSSRVRIFSRFPEDMMMLKKSAFKKLIKFYSVPSFPECSSQCGLQLPCCPLQAMV

SEQ ID NO: 124592 - DNA, 1989 bp, Artificial Sequence
  derived and/or modified sequence
atgatggaaccagaggagtaccgagagcggggcagggaaatggtggactacatatgccagtatctgtccaccgtacgcgagcggcgggtgacgcctgacgtgcagccaggatacctgcgggcccagttgcctgaatcagcccctgaagatccagactcttgggattccatatttggcgacattgagcgaatcatcatgcctggtgttgtgcattggcagtccccccacatgcatgcttattaccctgctttgacatcttggcctagtctgttgggcgacatgctggccgatgccattaattgtctcggatttacctgggcctctagtcccgcatgcaccgaactcgagatgaacgtgatggactggctggccaagatgctggggcttcccgaacactttctacaccaccacccaagctctcaaggaggcggagtactccaatcaacagtgtcagaatcgactctgatcgccttgctcgcagcccgcaagaacaaaatccttgagatgaaaacttctgagccggacgctgatgagtcatgtctgaatgcccgcctcgtggcctatgcttcggaccaagctcacagttcagtggagaaagctggactgatttccctggtaaagatgaagtttctaccagtggacgataacttcagtctcagaggcgaagccctgcagaaggctatcgaggaggacaaacagcggggactggttcctgtgtttgtctgcgctactctgggaacaacaggagtgtgcgcctttgactgtctgtccgaactggggccaatttgtgctcgggagggattatggctgcacatagacgcagcttacgccggcactgcttttctctgccccgagtttagaggatttctgaagggcatcgaatacgctgattcctttaccttcaatccttcaaagtggatgatggtgcatttcgactgcactggtttttgggttaaggataagtataagcttcaacagacctttagcgttaacccaatctacctacggcacgccaattcgggcgtagccactgactttatgcactggcagattcctcttagtcgccgtttccgttctgtgaagctttggttcgtgatccgctcattcggtgttaagaatctgcaggcacacgttaggcacgggacggaaatggctaaatactttgagtctctagtccgaaacgacccttcatttgaaatccctgccaagcgacatctcggactggtggtatttcgcctgaagggacccaattgtctcaccgagaacgttttgaaggaaatagccaaggccgggcgcctgtttttgatccccgcaactattcaggacaaactgattatccgatttacagtcacgtcacagtttaccaccagagatgacattctgagagattggaatttgatacgggacgcagcaaccctcatcctttcccagcactgtacaagtcagccatctccccgggtgggcaacctcatctctcagatccgaggggcaagggcttgggcttgtgggacaagcctgcaatccgtctccggagcgggtgacgatcccgtccaggcgaggaagatcatcaaacagccccagagagtgggcgctggaccaatgaagcgggagaatggactgcaccttgagaccctcttggatcccgtcgacgactgcttctcggaggaagctcctgacgcgacaaaacacaaattaagcagcttcctgttttcatatctcagcgtccagactaaaaaaaagactgtgaggagcttatcatgtaacagtgtacctgtttctgcccaaaagccgcttccaaccgaggcctctgtgaaaaacggcggctccagcagagttcgcatcttttctaggtttcccgaagatatgatgatgctgaaaaagtcagcattcaaaaagctgatcaagttctactctgtgcccagcttccctgagtgttcatcacagtgcggtttgcagctgccatgttgccctctgcaggccatggtgtag

SEQ ID NO: 124593 - DNA, 2705 bp, Artificial Sequence
  derived and/or modified sequence
gggagcttgtctgaggctggagctctattgtctgaatccaggggcagaaagaactgagggctcttttacggcatccacctggaggctgcctgcaggcttgggttgctaagtgcactgcttaatttagaagcgccttttatcctggctctcttgaccagtcaaagttgtggtcgctgttttctacaaggactggggaaagaaagggtggaattaattaaacctggaggaagggactttgaagggcggagctaaggtcaaagaaagaaccctttaaataaagggcccacactggctgccagggagtgcgcaggactggcaagagggaagccgggctgctccacgcctttcacgccttccacctcctgcgtgtccatctgtgagaaggagccagagcccaagggagatgatggagcctgaggagtacagagagagagggagagagatggtggattacatctgccagtacctgagcactgtgcgggagagacgtgtgacgccagacgtgcagcctggctacctgcgagcccagctgcctgagagtgctcctgaggaccccgacagctgggacagcatctttggggacattgaacgaatcatcatgcctggggtggtacattggcagagcccccatatgcacgcctactacccagccctcacctcttggccctccctgctaggagacatgctggctgatgccatcaactgcttgggattcacctgggcatccagccctgcgtgtacagagctggagatgaacgtcatggactggttggcaaaaatgctgggacttccagagcacttcttgcaccaccaccccagcagccagggcggaggcgtcctgcagagcacggtcagtgaatccactttgattgccctgctggcagcaaggaagaacaaaatcctggaaatgaaaacgtctgagcccgatgctgatgagtcctgcctaaatgcccgactcgtggcctatgcctctgaccaggctcactcctctgtggaaaaggctggtttgatttcccttgtgaagatgaaatttctgcctgtggatgacaacttctcactccgaggggaagctcttcagaaggccatcgaggaagacaagcagcggggcttggtgcccgtctttgtctgtgcaacactagggaccactggggtctgtgcatttgactgcctgtcagagctgggccccatctgtgcccgtgaggggctgtggctccacatcgatgctgcttatgcaggcactgccttcctgtgccccgagttccgggggtttctgaaggggattgagtatgccgactccttcacctttaatccttccaagtggatgatggtgcattttgactgtactgggttctgggtcaaggacaagtacaagctgcagcagaccttcagtgtgaatcccatctacctcaggcatgccaactcaggcgtggccaccgacttcatgcactggcagatccccctgagccgacggtttcgctctgttaaactctggttcgtgattcggtccttcggggtgaagaatcttcaagcacatgtcagacatggtactgaaatggctaaatattttgaatctctggtcagaaacgacccttcctttgaaattcctgccaagaggcaccttggcctggtggtttttcgtctaaagggtcctaattgtctcacagaaaatgtgttaaaggaaatagctaaagctggccgtctcttcctcatcccggccactatccaggacaagttaatcatccgtttcactgtgacatcccagtttaccactagggatgacatcctgagagactggaatctcattcgagatgctgccactctcatcctgagtcagcactgtacttcccaacccagccctcgggttgggaacctcatctcccaaatcaggggtgccagagcctgggcctgtggaacgtcccttcagtctgtcagtggggcaggagatgatccagtccaggccaggaagatcatcaagcagcctcagcgtgtgggagccggtcccatgaaaagggaaaatggcctccatcttgaaaccctgctggacccagttgatgactgcttttcagaagaggccccagatgccaccaagcacaagctgtcctccttcctgttcagttacttgtctgtgcagactaagaagaagacggtgcgctccctcagttgcaacagtgtgccagtgagtgctcagaagccactgcccacagaggcctctgtgaagaatgggggctcctccagggtcagaatcttttccaggtttccagaagacatgatgatgctgaagaaaagtgccttcaaaaaactcatcaaattctacagcgtccccagctttcctgaatgcagctctcaatgtggactccagctgccctgttgccctctgcaggccatggtttagacacagggccttcagccagagtctgaggatatacttcagggactctgtgaacccctcacaattgtatgccaactttgtgtgcttatgtgtacatgcatttttcttggggcgagttcataattttaatcaaattctcataggggttcatgacccacaataggatacaaacgaagagtttaagccagcatgatccagatgggttcagcagtctggtcagtgagaaagggccgagggtagacaggcagcttctgtggttcagcttgtgacatgatatataacacagaaataaattatgcttgtccctgaaacaaaa

SEQ ID NO: 124594 - DNA, 1989 bp, Artificial Sequence
  derived and/or modified sequence
atgatggagcctgaggagtaccgggagcggggccgggagatggtggactacatctgccagtacctgagcacagtgcgggagcggcgggtgaccccagatgtgcagcccggctacctgcgggcccagctgcctgagagcgccccagaagatcctgacagctgggacagcatctttggagacatcgagcgcatcatcatgcctggggtggtgcactggcagagcccccacatgcacgcctactacccagccctgacctcctggcccagcctgctgggggacatgctggctgatgccatcaactgcctgggcttcacctgggccagcagccctgcctgcacagagctggagatgaatgtgatggactggctggccaagatgctgggcctgcctgagcacttcctgcaccaccaccccagcagccagggcggcggcgtgctgcagagcacagtgtctgagagcaccctcatcgccctgctggccgccaggaagaacaagatcctggagatgaagaccagcgagccagatgctgatgagagctgcctgaatgcccggctggtggcctatgccagtgaccaggcccacagctctgtggagaaggccggcctcatcagcctggtgaagatgaagttcctgcctgtggatgacaacttcagcctgcggggggaggccctgcagaaggccatcgaggaggacaagcagaggggcctggtgcctgtgtttgtgtgtgccaccctgggcaccaccggggtgtgtgcctttgactgcctgtctgagctgggccccatctgtgcccgggagggcctgtggctgcacattgatgctgcctatgccggcacagccttcctgtgcccagagttccggggcttcctgaagggcattgaatatgctgacagcttcaccttcaaccccagcaagtggatgatggtgcactttgactgcaccggcttctgggtgaaggacaagtacaagctgcagcagaccttctctgtgaaccccatctacctgcggcatgccaacagcggcgtggccacagacttcatgcactggcagatccccctgagccgccgcttccgctctgtgaagctgtggtttgtgatccgcagctttggagtgaagaacctgcaggcccacgtgcgccacggcacagagatggccaagtactttgagagcctggtgagaaatgaccccagctttgagatcccagccaagaggcacctgggcctggtggtgttccggctgaagggccccaactgcctgacagaaaatgtgctgaaggagatcgccaaggccggccgcctcttcctgatcccagccaccatccaggacaagctgatcatccgcttcaccgtgaccagccagttcaccaccagagatgacatcctgcgggactggaacctgatcagagatgctgccaccctcatcctgagccagcactgcaccagccagcccagcccccgggtgggcaacctgatcagccagatccggggggcccgggcctgggcctgtggcaccagcctgcagagcgtgtctggagctggagatgatcctgtgcaggccaggaagatcatcaagcagccccagagggtgggcgccggccccatgaagagagaaaatggcctgcacctggagaccctgctggaccctgtggatgactgcttcagcgaggaggccccagatgccaccaagcacaagctgagcagcttcctgttctcctacctgtctgtgcagaccaagaagaagacagtgcgcagcctgagctgcaacagcgtgcctgtgtctgcccagaagcccctgcccacagaggcctctgtgaagaatggaggcagcagccgggtgcgcatcttcagccgcttccctgaggacatgatgatgctgaagaagagcgccttcaagaagctgatcaagttctacagcgtgcccagcttccctgagtgcagcagccagtgtggcctgcagctgccctgctgccccctgcaggccatggtgtag

SEQ ID NO: 124595 - DNA, 1989 bp, Artificial Sequence
  derived and/or modified sequence
atgatggagcccgaggagtaccgggagcggggccgggagatggtggactacatctgtcaatatttgtctaccgtgagagagcggcgagtgacccccgacgtgcagcctggatacctcagagcacagctacctgaatctgcgcccgaggatccagacagttgggacagtatcttcggtgatatcgaaaggattatcatgcccggcgtggttcactggcaaagccctcacatgcacgcttattaccccgccctgacgtcatggcctagcttgctgggagacatgctggcagatgccattaactgcctcggatttacctgggcaagttcacctgcctgcaccgagctggaaatgaatgtgatggactggctcgcaaaaatgctcggactcccggagcactttctccaccatcacccaagtagccagggtggaggagtgctacagagcactgtttctgaatcgactcttatcgcactgctcgccgctcgaaagaacaaaattctagaaatgaagacatcagagcctgatgcagatgaaagctgtttaaatgcccggctggttgcctatgcttctgatcaagctcacagcagcgtggagaaagcgggtttgatcagcctggtcaagatgaagtttttgccagtagacgacaacttttccctgaggggcgaggccttgcaaaaagccatcgaagaagacaaacagagggggctggtcccggtcttcgtctgtgctactctagggactacgggtgtctgcgcgtttgattgcctttccgagctcgggcccatatgcgcacgtgaggggctctggctgcacatcgatgctgcgtacgcaggcactgcatttctctgtcctgagttccgggggttccttaaaggcatagagtacgccgatagtttcacatttaatcccagcaagtggatgatggtacacttcgactgcaccggcttctgggtgaaagataagtacaaactccagcaaaccttttccgtgaatcccatttatctgcgacatgccaactcaggagtggctaccgacttcatgcattggcagatcccacttagtagacggtttaggtccgtgaagctctggttcgtgattcgctcctttggtgtaaagaatctgcaggctcacgtgagacatgggaccgaaatggctaaatatttcgagtcacttgtaagaaatgatccctctttcgagattcctgctaagcgccacttgggcttagttgtttttcggctgaagggacctaattgtctgacagagaacgtgctgaaagagatcgccaaagctggtcggctgttccttatccctgccaccattcaagacaaactgatcatccgctttacagtgacttctcagtttaccacgcgggatgacatactgcgtgattggaatctgattagagatgctgccaccttgatcctaagtcagcactgcacgagccaaccgtcaccgcgtgtcgggaatctgatttcccagatacgaggcgcacgggcttgggcttgtggaacctcgcttcagagcgtgagcggggctggcgacgatcccgtacaagctcggaagatcatcaagcagccccagagggtcggagctggaccgatgaagagggagaatgggctgcatctggagaccctgctggatcccgtggatgactgcttctccgaggaagcacctgacgctaccaagcacaaactgtctagctttctctttagctaccttagtgtccagaccaaaaagaagacagtaagaagcctgtcatgtaattcagttccagtctctgctcagaaaccactgcccactgaggcgtcagtgaagaatggaggctcttcacgagtccgaatctttagccgattccctgaagatatgatgatgctgaagaagtctgctttcaaaaagctgattaagttctactctgtgccgtccttccctgaatgctccagccaatgcggacttcagctgccttgctgtcccttgcaggccatggtttag

SEQ ID NO: 124596 - DNA, 1989 bp, Artificial Sequence
  derived and/or modified sequence
atgatggaaccagaagaataccgagagcgtggtcgggagatggtggactacatttgtcaatatttgtctaccgtgcgagagaggcgcgtgacgccagatgtgcagccgggatatctgcgagcccaattgccagagtctgcacccgaggaccccgactcttgggatagcatcttcggagacattgaacgcatcataatgcctggggtggtgcattggcagtccccccacatgcatgcatattaccctgccttaactagctggccctctctgctgggcgatatgttggccgacgctattaattgtctggggtttacatgggcatcttcccctgcatgtacagaactggagatgaatgtcatggattggctggctaagatgcttgggctccccgaacatttcttacaccatcatccctcctcccaaggcggaggtgttttgcaatccacggtgtcagagagtacattgattgccctgctcgccgcaagaaagaataagatcttagaaatgaaaacctcagaaccagacgcagatgaaagctgcttaaatgcgcgtcttgtcgcgtacgcatctgaccaggcacacagttcggtggagaaagctggcctgatctctttagtcaaaatgaaatttctacctgtggacgacaacttttcgctgcgcggagaggctctgcaaaaagccatcgaagaggataaacagcgcggtctggtcccagtcttcgtgtgtgctacactagggaccaccggagtgtgcgccttcgactgcctttccgaactagggccaatttgtgccagagaggggctgtggctccatatcgacgctgcttatgctggaacagcattcctgtgtcctgagttcaggggcttcctgaagggtatcgaatacgccgattctttcacctttaatccgtcaaaatggatgatggtgcacttcgattgcacagggttttgggtcaaggacaaatacaaattgcagcaaacattttctgtcaatcccatctacctgaggcacgcaaacagcggtgtcgccacagacttcatgcattggcaaataccactgagtagaaggtttaggagtgttaaactgtggttcgtgatccgatccttcggtgtcaaaaacctgcaggcacacgttcggcacggtactgaaatggccaagtactttgagtctctggtgcggaatgacccctctttcgaaattccggcaaagcgacatctagggctggtagtattccgcctgaaaggacccaactgtctaacggagaatgttttaaaagaaattgccaaggccggtaggcttttcctcattcctgctacaattcaagacaagctaataatccggttcaccgtgactagccagttcactacaagagacgatatcttgcgggactggaaccttattagggacgccgctactctgatactaagccagcactgtacttctcaaccctctcctcgagttggtaacctaatttctcagattagaggagcgcgtgcttgggcctgcgggaccagcctccagtcagtttctggcgctggagatgaccccgtgcaggctcgaaagattattaaacagccccagcgggtgggcgctgggcctatgaagagagagaacggcctgcatctcgagacattgcttgaccctgtcgacgactgctttagtgaggaggcacccgacgccacaaaacacaagctgtcaagctttttattctcttacctgtcagtccagacaaaaaaaaaaacagtgcgtagtctctcttgtaactccgttcctgtcagcgcacagaagccactgccaaccgaggcatctgttaagaacggcggttcaagccgcgtgcggatcttctccagattccctgaagacatgatgatgttgaaaaagtcggcctttaaaaaactgatcaaattttacagcgtgccctcgttcccagaatgtagctctcagtgcggactgcagttgccttgttgccctctccaagccatggtttag

SEQ ID NO: 124597 - DNA, 1989 bp, Artificial Sequence
  derived and/or modified sequence
atgatggagcccgaggagtacagagagagaggcagagagatggtggactacatctgccagtacctgagcaccgtgagagagagaagagtgacccccgacgtgcagcccggctacctgagagcccagctgcccgagagcgcccccgaggaccccgacagctgggacagcatcttcggcgacatcgagagaatcatcatgcccggcgtggtgcactggcagagcccccacatgcacgcctactaccccgccctgaccagctggcccagcctgctgggcgacatgctggccgacgccatcaactgcctgggcttcacctgggccagcagccccgcctgcaccgagctggagatgaacgtgatggactggctggccaagatgctgggcctgcccgagcacttcctgcaccaccaccccagcagccagggcggcggcgtgctgcagagcaccgtgagcgagagcaccctgatcgccctgctggccgccagaaagaacaagatcctggagatgaagaccagcgagcccgacgccgacgagagctgcctgaacgccagactggtggcctacgccagcgaccaggcccacagcagcgtggagaaggccggcctgatcagcctggtgaagatgaagttcctgcccgtggacgacaacttcagcctgagaggcgaggccctgcagaaggccatcgaggaggacaagcagagaggcctggtgcccgtgttcgtgtgcgccaccctgggcaccaccggcgtgtgcgccttcgactgcctgagcgagctgggccccatctgcgccagagagggcctgtggctgcacatcgacgccgcctacgccggcaccgccttcctgtgccccgagttcagaggcttcctgaagggcatcgagtacgccgacagcttcaccttcaaccccagcaagtggatgatggtgcacttcgactgcaccggcttctgggtgaaggacaagtacaagctgcagcagaccttcagcgtgaaccccatctacctgagacacgccaacagcggcgtggccaccgacttcatgcactggcagatccccctgagcagaagattcagaagcgtgaagctgtggttcgtgatcagaagcttcggcgtgaagaacctgcaggcccacgtgagacacggcaccgagatggccaagtacttcgagagcctggtgagaaacgaccccagcttcgagatccccgccaagagacacctgggcctggtggtgttcagactgaagggccccaactgcctgaccgagaacgtgctgaaggagatcgccaaggccggcagactgttcctgatccccgccaccatccaggacaagctgatcatcagattcaccgtgaccagccagttcaccaccagagacgacatcctgagagactggaacctgatcagagacgccgccaccctgatcctgagccagcactgcaccagccagcccagccccagagtgggcaacctgatcagccagatcagaggcgccagagcctgggcctgcggcaccagcctgcagagcgtgagcggcgccggcgacgaccccgtgcaggccagaaagatcatcaagcagccccagagagtgggcgccggccccatgaagagagagaacggcctgcacctggagaccctgctggaccccgtggacgactgcttcagcgaggaggcccccgacgccaccaagcacaagctgagcagcttcctgttcagctacctgagcgtgcagaccaagaagaagaccgtgagaagcctgagctgcaacagcgtgcccgtgagcgcccagaagcccctgcccaccgaggccagcgtgaagaacggcggcagcagcagagtgagaatcttcagcagattccccgaggacatgatgatgctgaagaagagcgccttcaagaagctgatcaagttctacagcgtgcccagcttccccgagtgcagcagccagtgcggcctgcagctgccctgctgccccctgcaggccatggtgtag

SEQ ID NO: 124598 - protein, 330 aa, Artificial Sequence
  derived and/or modified sequence
MWLLVSVILISRISSVGGEATFCDFPKINHGILYDEEKYKPFSQVPTGEVFYYSCEYNFVSPSKSFWTRITCTEEGWSPTPKCLRLCFFPFVENGHSESSGQTHLEGDTVQIICNTGYRLQNNENNISCVERGWSTPPKCRSTDTSCVNPPTVQNAHILSRQMSKYPSGERVRYECRSPYEMFGDEEVMCLNGNWTEPPQCKDSTGKCGPPPPIDNGDITSFPLSVYAPASSVEYQCQNLYQLEGNKRITCRNGQWSEPPKCLHPCVISREIMENYNIALRWTAKQKLYLRTGESAEFVCKRGYRLSSRSHTLRTTCWDGKLEYPTCAKR

SEQ ID NO: 124599 - DNA, 993 bp, Artificial Sequence
  derived and/or modified sequence
atgtggctccttgtgtcagtgatactcatatcacggatctcaagcgtgggtggagaagcaaccttctgcgatttccctaagattaaccacgggattctatatgacgaggaaaaatataaaccctttagccaggtgcccacaggcgaggttttctactatagctgtgaatacaacttcgtgagcccttctaaaagtttctggaccagaataacatgtactgaggagggatggtcaccaacgcccaaatgtttaagattgtgcttcttccctttcgtcgagaacggtcactccgagagttccggacaaacacatctggaaggagacactgtacagattatttgtaacacaggatatcggctgcagaataatgagaacaatatctcctgcgtggaacggggctggtctactccacctaagtgccgaagcacagatacgagctgcgtgaaccctcccacggttcagaatgcccatatccttagtagacagatgtcaaagtatccatccggggagcgagtacgctacgagtgccgtagtccttacgaaatgtttggagacgaggaggtaatgtgcctgaacggcaattggacagaacctccacagtgcaaagatagtactggcaaatgtggaccgcctcctcctatcgacaatggcgacataacctcttttcccttatcggtttatgctcctgccagcagtgtggaatatcagtgccagaatctataccaactggagggaaacaagcgcattacctgtaggaacggccagtggagcgagccaccaaaatgtctgcacccctgcgtaatcagcagggaaattatggagaactataacatcgccttgcggtggaccgcgaaacagaagctctatctccgtaccggcgaaagcgctgagtttgtgtgcaaacgtggctaccgcctttctagtcggagtcacactctgcgcactacatgctgggatggtaagcttgaatatccgacgtgtgccaagcgctag

SEQ ID NO: 124600 - DNA, 993 bp, Artificial Sequence
  derived and/or modified sequence
atgtggctgctggtgtctgtcatcctgatcagccgcatcagctctgtgggcggggaggccaccttctgtgacttccccaagatcaaccacggcatcctgtatgatgaggagaagtacaagcccttcagccaggtgcccactggagaggtgttctactacagctgtgagtacaactttgtgagccccagcaagagcttctggacccgcatcacctgcacagaggagggctggagccccacccccaagtgcctgcggctgtgcttcttcccctttgtggagaatggccacagcgagagcagcggccagacccacctggagggggacacagtgcagatcatctgcaacacaggctaccgcctgcagaacaatgaaaacaacatcagctgtgtggagcggggctggagcaccccacccaagtgccgcagcacagacaccagctgtgtgaacccccccaccgtgcagaatgcccacatcctgagccggcagatgagcaagtaccccagcggggagcgggtgcgctatgaatgtcgcagcccctatgagatgtttggagatgaggaggtgatgtgcctgaatggaaactggacagagcccccccagtgcaaggacagcactggaaaatgtggccccccaccacccatcgacaacggggacatcaccagcttccccctgtctgtgtatgccccagccagctctgtggagtaccagtgccagaacctgtaccagctggagggcaacaagaggatcacctgcagaaatggccagtggagcgagccccccaagtgcctgcacccctgcgtcatcagccgggagatcatggagaactacaacatcgccctgcgctggacagccaagcagaagctgtacctgaggactggagagagcgctgagtttgtgtgcaagaggggctaccgcctgagcagccgcagccacaccctgcggaccacctgctgggatggcaagctggagtaccccacctgtgccaagaggtag

SEQ ID NO: 124601 - DNA, 993 bp, Artificial Sequence
  derived and/or modified sequence
atgtggctgctggtgagcgtgatcctgatcagccggatcagcagcgtcggaggagaagctacattctgcgattttcccaaaattaaccacgggatcctgtacgatgaagagaaatataagccgttttctcaggtcccgaccggagaagtattttactactcttgcgagtataatttcgtctccccaagcaagagcttttggacccgaatcacttgcaccgaagaaggatggagtccgacacctaaatgtctgagactgtgcttcttcccatttgtggagaatggacattccgaatcaagtgggcagacgcacctggagggggatactgttcagatcatctgcaataccggatatcgtcttcagaataatgaaaataatatttcttgcgtagagcgcggttggagcacacctcccaaatgccgaagtactgacaccagttgtgttaatcctcctacagtgcagaacgcacacattctgtcaagacagatgtccaaatacccttccggggagagagtccgctacgaatgccgctcgccctacgagatgtttggagatgaagaggtcatgtgtttgaatggcaattggacagaaccaccccagtgcaaggatagtaccggaaagtgcggccctccaccgcccattgataatggagacatcacaagcttccccctgtcagtgtatgcccctgccagcagtgtggagtaccagtgccaaaacctctaccagctggagggaaataaaagaattacatgtcgaaatggacaatggagcgaaccaccgaagtgcttgcacccttgtgtcatctctagagagatcatggaaaattataatatcgcattacgttggacagctaagcagaagctgtacttacggacaggggaatccgccgaatttgtctgcaagaggggatataggctgtccagcagatcacataccctgcgaacgacctgttgggacggcaagctggaatatcctacatgcgccaagaggtag

SEQ ID NO: 124602 - DNA, 993 bp, Artificial Sequence
  derived and/or modified sequence
atgtggctactcgtcagtgtgattctgatttcccgaatctcgagcgttggtggtgaagcgacattttgtgattttccgaagattaaccatggcatactgtatgatgaagaaaagtacaaacccttttcccaggtccccacaggtgaggtgttctactatagctgtgagtacaattttgtgagcccgtcaaagtctttttggacccgaatcacatgcactgaggaaggttggtcccctactcccaagtgcttaaggctctgtttttttccttttgtggagaatgggcactctgagtccagcggccagactcacttggagggggacaccgtgcagatcatctgtaacactggatatagactgcagaacaacgagaacaacatttcatgcgtagagaggggatggagcactccaccgaagtgtcgctcaacagacacctcctgcgtcaatcccccaacagtgcaaaatgcccacatactcagcagacaaatgagcaagtatccctctggcgagagagttagatacgaatgccgctctccttatgagatgttcggagatgaggaggtaatgtgtctgaatggcaactggaccgaaccccctcagtgtaaagactccaccgggaaatgcggcccaccaccacccatcgacaacggagacatcacatctttcccactgagcgtatatgccccagcaagctccgtagagtatcaatgccagaacctgtatcagctggagggaaataagcgaattacctgtcgcaatggtcagtggtctgagccacccaaatgccttcatccgtgtgttattagcagagaaattatggagaattacaacatcgctctgcgctggacagcgaagcagaagttgtatctgcgaaccggggaaagcgcagagtttgtctgtaaacgaggctatagattatcttcccgctcccatacgcttagaaccacctgttgggatggaaagctagaatatcctacctgcgccaaacgctag

SEQ ID NO: 124603 - DNA, 1271 bp, Artificial Sequence
  derived and/or modified sequence
atgctcataactgttaatgaaagcagattcaaagcaacaccaccaccactgaagtatttttagttatataagattggaactaccaagcatgtggctcctggtcagtgtaattctaatctcacggatatcctctgttgggggagaagcaacattttgtgattttccaaaaataaaccatggaattctatatgatgaagaaaaatataagccattttcccaggttcctacaggggaagttttctattactcctgtgaatataattttgtgtctccttcaaaatcattttggactcgcataacatgcacagaagaaggatggtcaccaacaccaaagtgtctcagactgtgtttctttccttttgtggaaaatggtcattctgaatcttcaggacaaacacatctggaaggtgatactgtgcaaattatttgcaacacaggatacagacttcaaaacaatgagaacaacatttcatgtgtagaacggggctggtccacccctcccaaatgcaggtccactgacacttcctgtgtgaatccgcccacagtacaaaatgctcatatactgtcgagacagatgagtaaatatccatctggtgagagagtacgttatgaatgtaggagcccttatgaaatgtttggggatgaagaagtgatgtgtttaaatggaaactggacagaaccacctcaatgcaaagattctacgggaaaatgtgggccccctccacctattgacaatggggacattacttcattcccgttgtcagtatatgctccagcttcatcagttgagtaccaatgccagaacttgtatcaacttgagggtaacaagcgaataacatgtagaaatggacaatggtcagaaccaccaaaatgcttacatccgtgtgtaatatcccgagaaattatggaaaattataacatagcattaaggtggacagccaaacagaagctttatttgagaacaggtgaatcagctgaatttgtgtgtaaacggggatatcgtctttcatcacgttctcacacattgcgaacaacatgttgggatgggaaactggagtatccaacttgtgcaaaaagatagaatcaatcataaaatgcacacctttattcagaactttagtattaaatcagttcttaatttcatttttaagtattgttttactcctttttattcatacgtaaaattttggattaatttgtgaaaatgtaattataagctgagaccggtggctctcttcttaaaagcaccatattaaaacttggaaaactaa

SEQ ID NO: 124604 - DNA, 993 bp, Artificial Sequence
  derived and/or modified sequence
atgtggctgctggtgagcgtgatcctgatcagcagaatcagcagcgtgggcggcgaggccaccttctgcgacttccccaagatcaaccacggcatcctgtacgacgaggagaagtacaagcccttcagccaggtgcccaccggcgaggtgttctactacagctgcgagtacaacttcgtgagccccagcaagagcttctggaccagaatcacctgcaccgaggagggctggagccccacccccaagtgcctgagactgtgcttcttccccttcgtggagaacggccacagcgagagcagcggccagacccacctggagggcgacaccgtgcagatcatctgcaacaccggctacagactgcagaacaacgagaacaacatcagctgcgtggagagaggctggagcaccccccccaagtgcagaagcaccgacaccagctgcgtgaacccccccaccgtgcagaacgcccacatcctgagcagacagatgagcaagtaccccagcggcgagagagtgagatacgagtgcagaagcccctacgagatgttcggcgacgaggaggtgatgtgcctgaacggcaactggaccgagcccccccagtgcaaggacagcaccggcaagtgcggcccccccccccccatcgacaacggcgacatcaccagcttccccctgagcgtgtacgcccccgccagcagcgtggagtaccagtgccagaacctgtaccagctggagggcaacaagagaatcacctgcagaaacggccagtggagcgagccccccaagtgcctgcacccctgcgtgatcagcagagagatcatggagaactacaacatcgccctgagatggaccgccaagcagaagctgtacctgagaaccggcgagagcgccgagttcgtgtgcaagagaggctacagactgagcagcagaagccacaccctgagaaccacctgctgggacggcaagctggagtaccccacctgcgccaagagatag

SEQ ID NO: 124605 - protein, 923 aa, Artificial Sequence
  derived and/or modified sequence
MDSIGSSGLRQGEETLSCSEEGLPGPSDSSELVQECLQQFKVTRAQLQQIQASLLGSMEQALRGQASPAPAVRMLPTYVGSTPHGTEQGDFVVLELGATGASLRVLWVTLTGIEGHRVEPRSQEFVIPQEVMLGAGQQLFDFAAHCLSEFLDAQPVNKQGLQLGFSFSFPCHQTGLDRSTLISWTKGFRCSGVEGQDVVQLLRDAIRRQGAYNIDVVAVVNDTVGTMMGCEPGVRPCEVGLVVDTGTNACYMEEARHVAVLDEDRGRVCVSVEWGSFSDDGALGPVLTTFDHTLDHESLNPGAQRFEKMIGGLYLGELVRLVLAHLARCGVLFGGCTSPALLSQGSILLEHVAEMEDPSTGAARVHAILQDLGLSPGASDVELVQHVCAAVCTRAAQLCAAALAAVLSCLQHSREQQTLQVAVATGGRVCERHPRFCSVLQGTVMLLAPECDVSLIPSVDGGGRGVAMVTAVAARLAAHRRLLEETLAPFRLNHDQLAAVQAQMRKAMAKGLRGEASSLRMLPTFVRATPDGSERGDFLALDLGGTNFRVLLVRVTTGVQITSEIYSIPETVAQGSGQQLFDHIVDCIVDFQQKQGLSGQSLPLGFTFSFPCRQLGLDQGILLNWTKGFKASDCEGQDVVSLLREAITRRQAVELNVVAIVNDTVGTMMSCGYEDPRCEIGLIVGTGTNACYMEELRNVAGVPGDSGRMCINMEWGAFGDDGSLAMLSTRFDASVDQASINPGKQRFEKMISGMYLGEIVRHILLHLTSLGVLFRGQQIQRLQTRDIFKTKFLSEIESDSLALRQVRAILEDLGLPLTSDDALMVLEVCQAVSQRAAQLCGAGVAAVVEKIRENRGLEELAVSVGVDGTLYKLHPRFSSLVAATVRELAPRCVVTFLQSEDGSGKGAALVTAVACRLAQLTRV

SEQ ID NO: 124606 - DNA, 2772 bp, Artificial Sequence
  derived and/or modified sequence
atggactccattggaagctccggacttaggcagggggaagagacactgtcctgctcggaagaaggtttgcccggccccagcgattcctctgagctggtgcaggaatgcctccagcagttcaaggtgacacgggctcaattgcagcagattcaggcttcactgctgggaagcatggagcaagccttaagaggacaggcttcgccggcccctgccgttcgcatgctacccacgtacgttggaagcaccccacacgggaccgagcaaggggattttgtcgtgttagagctcggcgctacaggagccagcctgcgggtcctgtgggtgacgcttacagggatcgaggggcatcgcgtcgagcctaggtcccaggaattcgtaatcccccaggaggtaatgctcggcgcgggccaacagctgttcgatttcgccgcccattgtttgtctgaattcctagacgcccagccagtcaacaaacagggtcttcagctcgggttctcttttagttttccatgtcaccagacagggttggacagatcgaccctgatctcatggactaaagggttccggtgtagtggcgtggaagggcaggatgtggttcaactgctcagagatgccattcggcgccagggggcttacaatatcgacgtggtcgcagtcgttaatgataccgtcgggacaatgatgggctgtgagcccggggtgaggccctgtgaggtaggacttgtggtggatacaggtacgaacgcatgctacatggaggaagctcgccacgttgcagtcctggacgaggaccgggggagggtgtgtgtgtccgtggagtggggatcctttagcgacgatggggcactgggccctgtcctgaccacttttgaccacactctcgaccacgaaagcctcaaccctggagctcagagattcgaaaagatgatcggtggactgtatttgggagaattggtgcgcctggtgttggctcatctcgccagatgtggcgtcctcttcggaggctgcactagccctgcactcctgtctcagggctctatactgctcgagcacgtggccgagatggaagatccttccacaggagccgctagagtccacgcaattctacaggaccttggtctatcccctggcgcttccgacgttgaattagtacaacatgtatgtgctgctgtgtgcacccgcgccgcacagctgtgtgccgctgctcttgctgctgtcctcagttgtcttcagcactcccgagaacagcagacactccaggtggccgtagccacaggtggtcgtgtttgcgaacgccaccctcgcttttgttctgtgctacaaggcaccgtgatgctgctggccccagagtgtgacgtgagtcttataccgtcggtggacggcgggggcaggggagttgccatggtgaccgccgtagctgctaggctggcagcccaccggagactcctcgaggagaccttagcccccttccgcttgaaccacgaccagctggccgctgtgcaggcccagatgagaaaagccatggccaagggcctgcggggcgaggcctctagtttacgcatgctgcctaccttcgttagagctacacccgacggaagcgagcggggtgatttcttggccctcgacctgggcggaacaaacttccgggtgttgctggtgagagtaaccaccggggtgcagatcacctcagagatatatagcatccccgagacggtggcgcaggggagcggccagcagttgtttgatcacatagtcgactgtatcgtggactttcagcagaagcagggactcagcggtcaatccctgcctttaggcttcaccttttcgtttccctgccgccagctgggccttgatcaagggatcctcttgaactggaccaagggattcaaggcctcagactgtgagggacaggacgttgtttccttgctacgcgaagctattaccaggagacaggcagtcgagctgaacgtcgttgccatcgtgaatgatactgtgggaaccatgatgtcctgcggctatgaggacccaagatgcgaaataggcctcattgttggtacggggactaacgcgtgctacatggaggaactcagaaacgttgccggagttccaggggattctggacgtatgtgtattaacatggaatggggggcatttggcgacgatgggtctctggctatgctgtcgactagatttgatgcgtcggttgatcaggcatctatcaaccccggaaagcagcgatttgagaagatgatctcagggatgtatctcggcgaaatagttcggcatattctgttgcacctgacgtctctcggcgtgctcttcagaggccagcaaatccaaagactccagactcgggatatcttcaagaccaagtttctttccgaaattgagtccgactctttagctcttaggcaagttcgggccatcctggaagatctcgggctgcctctgactagcgacgacgcccttatggtgttagaagtgtgccaggccgtctctcagcgtgctgcccagctctgcggtgctggagttgccgccgtggtcgaaaaaataagggagaacagggggttggaagagcttgccgtttccgtgggggtcgatggcaccttgtataaactccatcctcggttcagcagtctagtggcagccaccgtgagggagctcgcgccacgctgcgtcgtgaccttcctacagtcagaagacggtagtggaaagggcgccgcattggtgaccgccgtcgcctgccgtctcgcccagcttacaagagtctag

SEQ ID NO: 124607 - DNA, 3066 bp, Artificial Sequence
  derived and/or modified sequence
gggtgcctcatattgccagacaagagctcagacctgaggagagtgactagcttctctgtgtcccaggtggccaccttccactgtggaagctcatggactccattgggtcttcagggttgcggcagggggaagaaaccctgagttgctctgaggagggcttgcccgggccctcagacagctcagagctggtgcaggagtgcctgcagcagttcaaggtgacaagggcacagctacagcagatccaagccagcctcttgggttccatggagcaggcgctgaggggacaggccagccctgcccctgcggtccggatgctgcctacatacgtggggtccaccccacatggcactgagcaaggagacttcgtggtgctggagctgggggccacaggggcctcactgcgtgttttgtgggtgactctaactggcattgaggggcatagggtggagcccagaagccaggagtttgtgatcccccaagaggtgatgctgggtgctggccagcagctctttgactttgctgcccactgcctgtctgagttcctggatgcgcagcctgtgaacaaacagggtctgcagcttggcttcagcttctctttcccttgtcaccagacgggcttggacaggagcaccctcatttcctggaccaaaggttttaggtgcagtggtgtggaaggccaggatgtggtccagctgctgagagatgccattcggaggcagggggcctacaacatcgacgtggttgctgtggtgaacgacacagtgggcaccatgatgggctgtgagccgggggtcaggccgtgtgaggttgggctagttgtagacacgggcaccaacgcgtgttacatggaggaggcacggcatgtggcagtgctggacgaagaccggggccgcgtctgcgtcagcgtcgagtggggctccttcagcgatgatggggcgctgggaccagtgctgaccaccttcgaccataccctggaccatgagtccctgaatcctggtgctcagaggtttgagaagatgatcggaggcctgtacctgggtgagctggtgcggctggtgctggctcacttggcccggtgtggggtcctctttggtggctgcacctcccctgccctgctgagccaaggcagcatcctcctggaacacgtggctgagatggaggacccctctactggggcagcccgtgtccatgctatcctgcaggacttgggcctgagccctggggcttcggatgttgagcttgtgcagcacgtctgtgcggccgtgtgcacgcgggctgcccagctctgtgctgccgccctggccgctgttctctcctgcctccagcacagccgggagcaacaaacactccaggttgctgtggccaccggaggccgagtgtgtgagcggcaccccaggttctgcagcgtcctgcaggggacagtgatgctcctggccccggaatgcgatgtctccttaatcccctctgtggatggtggtggccggggagtggcgatggtgactgccgtggctgcccgtctggctgcccaccggcgcctgctggaggagaccctggccccattccggttgaaccatgatcaactggctgcggttcaggcacagatgcggaaggccatggccaaggggctccgaggggaggcctcctcccttcgcatgctgcccactttcgtccgggccacccctgacggcagcgagcgaggggatttcctggccctggacctcgggggcacgaacttccgtgtcctcctggtacgtgtgaccacaggcgtgcagatcaccagcgagatctactccattcccgagactgtggcccagggttctgggcagcagctctttgaccacatcgtggactgcatcgtggacttccagcagaagcagggcctgagcgggcagagcctcccactgggttttaccttctccttcccatgtaggcagcttggcctagaccagggcatcctcctgaactggaccaagggtttcaaggcatcagactgcgagggccaagatgtcgtgagtctgttgcgggaagccatcactcgcagacaggcagtggagctgaatgtggttgccattgtcaatgacacggtggggaccatgatgtcctgtggctatgaggacccccgttgcgagataggcctcattgtcggaaccggcaccaatgcctgctacatggaggagctccggaatgtggcgggcgtgcctggggactcaggccgcatgtgcatcaacatggagtggggcgcctttggggacgatggctctctggccatgctcagcacccgctttgatgcaagtgtggaccaggcgtccatcaaccccggcaagcagaggtttgaaaagatgatcagcggcatgtacctgggggagatcgtccgccacatccttttacatttaaccagccttggcgttctcttccggggccagcagatccagcgccttcagaccagggacatcttcaagaccaagttcctctctgagatcgaaagtgacagcctggccctgcggcaggtccgagccatcctagaggatctggggctacccctgacctcagatgacgccctgatggtgctagaggtgtgccaggctgtgtcccagagggctgcccagctctgtggggcgggtgtagctgccgtggtggagaagatccgggagaaccggggcctggaagagctggcagtgtctgtgggggtggatggaacgctctacaagctgcacccgcgcttctccagcctggtggcggccacagtgcgggagctggcccctcgctgtgtggtcacgttcctgcagtcagaggatgggtccggcaaaggtgcggccctggtcaccgctgttgcctgccgccttgcgcagttgactcgtgtctgaggaaacctccaggctgaggaggtctccgccgcagccttgctggagccgggtcggggtctgcctgtttcccagccaggcccagccacccaggactcctgggacatcccatgtgtgacccctctgcggccatttggccttgctccctggctttccctgagagaagtagcactcaggttagcaatatatatatataatttattta

SEQ ID NO: 124608 - DNA, 2772 bp, Artificial Sequence
  derived and/or modified sequence
atggacagcatcggcagcagcggcctgcggcagggcgaggagaccctgagctgcagcgaggagggcctgcccggccccagcgacagcagcgagctggtgcaggagtgcctgcagcagttcaaggtgacccgggcccagctgcagcagatccaggccagcctgctgggctccatggagcaggccctgcggggccaggccagccctgccccagctgtgaggatgctgcccacctacgtgggcagcaccccccacggcacagagcagggcgactttgtggtgctggagctgggcgccactggagccagcctgcgggtgctgtgggtgaccctgactggaattgagggccaccgggtggagcccaggagccaggagtttgtgatcccccaggaggtgatgctgggcgccggccagcagctgtttgattttgctgcccactgcctgtctgagttcctggatgcccagcctgtgaacaagcagggcctgcagctgggcttctccttctccttcccctgccaccagacaggcctggacaggagcaccctcatctcctggaccaagggcttccgctgcagcggcgtggagggccaggatgtggtgcagctgctgagagatgccatccggcggcagggcgcctacaacattgatgtggtggccgtggtgaatgacacagtgggcaccatgatgggctgtgagcccggggtgcggccctgtgaggtgggcctggtggtggacaccggcaccaatgcctgctacatggaggaggcccggcacgtggccgtgctggatgaagatcggggccgggtgtgtgtgtctgtggagtggggcagcttcagtgatgatggagccctgggccctgtgctgaccacctttgaccacaccctggaccacgagagcctgaaccctggggcccagagatttgagaagatgattggaggcctgtacctgggggagctggtgcggctggtgctggcccacctggcccgctgtggggtgctgtttggaggctgcaccagccctgccctgctgagccagggcagcatcctgctggagcacgtggccgagatggaggaccccagcactggagctgcccgggtgcacgccatcctgcaggacctgggcctgagccctggggccagtgatgtggagctggtgcagcacgtgtgtgccgctgtgtgcaccagggctgcccagctgtgtgccgccgccctggccgctgtgctgagctgcctgcagcacagccgggagcagcagaccctgcaggtggccgtggccactggaggccgggtgtgtgagcggcacccccgcttctgcagcgtgctgcagggcaccgtgatgctgctggccccagaatgtgatgtgtccctcatccccagcgtggatggcggcggccggggcgtggccatggtgacagctgtggccgcccggctggccgcccaccggcggctgctggaggagaccctggcccccttccggctgaaccacgaccagctggccgctgtgcaggcccagatgaggaaggccatggccaagggcctgcggggggaggccagcagcctgaggatgctgcccacctttgtgcgggccaccccagatggcagcgagcggggggacttcctggccctggacctgggcggcaccaacttccgggtgctgctggtgcgggtgaccactggagtgcagatcaccagcgagatctacagcatccctgagaccgtggcccagggcagcggccagcagctgtttgaccacatcgtggactgcatcgtggacttccagcagaagcagggcctgagcggccagagcctgcccctgggcttcaccttctccttcccctgccggcagctgggcctggaccagggcatcctgctgaactggaccaagggcttcaaggccagtgactgtgagggccaggatgtggtgtccctgctgcgggaggccatcacccggcggcaggccgtggagctgaatgtggtggccatcgtgaatgacacagtgggcaccatgatgagctgtggctatgaggacccccgctgtgagatcggcctgattgtgggcaccggcaccaatgcctgctacatggaggagctgagaaatgtggccggcgtgcctggggacagcggccgcatgtgcatcaacatggagtggggcgcctttggagatgatggcagcctggccatgctgagcaccaggtttgatgcctctgtggaccaggccagcatcaaccctgggaagcagagatttgagaagatgatcagcggcatgtacctgggggagatcgtgcgccacatcctgctgcacctgaccagcctgggcgtgctcttccggggccagcagatccagaggctgcagacccgggacatcttcaagaccaagttcctgtctgaaattgaaagtgacagcctggccctgcggcaggtgcgggccatcctggaggacctgggcctgcccctgaccagtgatgatgccctgatggtgctggaggtgtgccaggccgtgtcccagagagctgcccagctgtgtggggccggcgtggccgctgtggtggagaagatcagagaaaatagaggcctggaggagctggccgtgtctgtgggcgtggatggcaccctgtacaagctgcacccccgcttcagcagcctggtggccgccaccgtgcgggagctggccccccgctgtgtggtgaccttcctgcagagtgaagatggcagcgggaaaggagctgccctggtgacagctgtggcctgccgcctggcccagctgaccagggtgtag

SEQ ID NO: 124609 - DNA, 2772 bp, Artificial Sequence
  derived and/or modified sequence
atggacagcatcggcagcagcggcctgcggcagggcgaggagaccttgtcctgctctgaggagggcttgcctgggccttctgacagttctgagttagtgcaagaatgcctccaacagttcaaagtgaccagagcgcagttgcaacaaatacaagcctccctcctgggatccatggagcaggccctgagaggtcaggcttctcctgcccctgccgttaggatgcttcccacatatgttggctctactcctcatggtactgagcagggcgactttgtagtcctggagctaggtgcgacaggagccagcttaagagtgctctgggtgaccctgaccggtattgaaggccaccgggtggaaccacgcagccaggaatttgtgattcctcaagaggtgatgcttggcgctggacaacagcttttcgattttgcagcgcattgcctgagcgagtttctggacgctcagccagttaacaaacaggggctgcagctgggtttttcgttcagtttcccctgtcatcaaacaggtcttgatcgttctactctgattagttggacaaagggattccgctgtagcggggtggagggccaagatgtggttcagctgttgcgggacgccatccgtcgtcaaggggcctacaatattgacgtggtggccgttgttaatgacacggtgggaactatgatgggatgtgagccaggcgtcaggccctgtgaagttggactggtcgtagacactgggactaacgcgtgctacatggaggaggcccgccatgtggccgtacttgacgaagacagagggagggtttgtgtttcagtggaatggggctcgttcagcgacgatggagcccttgggccagttcttactacatttgatcacaccctcgaccatgagagtctgaatccaggtgcacaacggtttgagaagatgattgggggtctgtacctgggcgaactggtaagactggtactggcccatctggcccggtgcggggtgctatttggtggatgcacgtcccctgccctgctttcacagggtagtatcctgttggaacatgtggccgagatggaggacccatcaacgggagctgccagagtacatgcgatactccaagacctcggcctgagccctggggcttccgatgtggagttagtccagcacgtgtgtgctgctgtttgtaccagagcagcccagctgtgcgccgctgccctagccgcagttttaagctgcttgcagcattctcgtgagcagcaaactctccaggtcgctgtggcaactggaggcagggtgtgcgagcgacacccgcggttctgcagcgtgctccagggaacagtcatgcttttggcacccgagtgtgacgtctcactgattccatccgtcgatggcggcggccggggtgtggcaatggtgactgcggtggcagctagactcgcagcgcatcgacgcctgctagaggagactctggcaccttttcggcttaaccatgatcagctcgctgccgtgcaggcccagatgcgaaaggcgatggcaaaagggcttaggggcgaggcttcgtcacttaggatgcttccaacgttcgtgcgcgctactcctgatggctccgaaagaggagatttcctcgccctcgacctaggcgggacaaactttagggtactactagtgcgtgtgactacaggcgttcagattacctcggaaatttatagtatacctgagacagtggctcaaggtagcggacaacagctttttgatcacatagtggattgcatcgtagatttccagcagaaacagggtctgagtggccagtctctgcccctgggcttcaccttttcattcccttgtcggcagctgggccttgatcagggaatcctcctgaattggacaaaagggttcaaggctagcgactgtgaagggcaggacgtagtgtcactgctcagagaagccatcacaaggcggcaagccgtggagctgaacgtcgtggccatcgtaaatgacaccgtcggaaccatgatgtcatgcggatacgaagacccgcgctgcgagattggtctcattgttggcacggggacaaatgcctgttacatggaagaactgagaaatgtggcaggggtgcccggcgattctggccggatgtgcatcaatatggaatggggcgcattcggcgatgacggatctctcgccatgctgtccaccagattcgatgcctcagtggaccaggcgtccatcaaccctggtaagcagcgtttcgaaaaaatgatctccgggatgtacctgggcgaaattgtcagacatatcctgcttcacttgacgagcctcggcgtcctttttcgagggcagcagatacagaggctgcaaacccgggatatctttaagacgaagtttctttctgagatcgaatctgattctttagctttgcggcaggtgagagctattttggaagacctgggcctgccactcaccagtgacgatgcccttatggtgctcgaggtctgccaggccgtgtcccagagggccgcacagctgtgtggtgctggcgtcgccgcagttgtggaaaagattagagaaaatagagggctcgaggagctagcagtgtccgtgggggtagatggaactctgtacaagctgcatcctagattctcatccctagttgctgccacagtgcgcgagcttgcaccgcgctgcgtggtgacattcttgcagtcagaggacgggtcaggaaaaggagccgctctggtgaccgcagtcgcctgtcggctcgctcaactaacaagggtgtag

SEQ ID NO: 124610 - DNA, 2772 bp, Artificial Sequence
  derived and/or modified sequence
atggactcaataggctcaagcggcctgcgtcagggtgaagaaactctgtcctgctccgaggaggggctgccgggtccgagcgacagcagtgagctggtgcaagaatgcctgcagcagttcaaagttactagggctcagttacaacagatccaggcctcccttcttggctcaatggagcaagctttgcgaggtcaggcaagcccagcacctgccgtgcggatgctcccaacctacgtcggatcgaccccccatggaacagagcagggagacttcgtggttcttgaactgggagctactggagcctcactgcgagtgctttgggtaaccctaaccgggatcgaggggcatcgggtcgagccaaggtcgcaagagtttgtaatcccacaagaagtgatgctgggcgcaggccagcagctcttcgacttcgccgctcattgtctcagcgagttcttggatgcccagccagtcaacaagcagggcctgcagctgggtttcagtttttcattcccctgtcaccaaactgggctggatagaagcacattgatatcttggaccaaaggttttcgatgtagtggagtggaaggccaggatgtggtgcagctgttaagggatgccatcaggcgacagggggcttacaatatcgacgtggtggccgtggtcaatgacacagtaggcacaatgatgggctgtgaacccggtgtgaggccgtgtgaggttggactggtagtggatacaggcaccaatgcgtgttatatggaggaggctcggcatgtcgctgtactggatgaagaccgtgggagggtatgtgtaagtgtggagtggggcagcttctctgacgacggcgcattaggccctgtacttactacctttgatcacactcttgatcatgagagcctcaatcctggagcgcagagatttgaaaaaatgattgggggactgtacctcggggaactggtgagactggtcctggcccatcttgcaagatgtggcgtgcttttcgggggttgtacctcccccgcattgctgtcccagggctccatattgttggaacacgtcgccgagatggaggacccctcaacaggcgcagcacgggtgcacgccatcctgcaggatttagggctgagcccaggcgctagtgatgtcgagctggtgcagcacgtttgtgcggcagtctgcactagggcagcccagttgtgcgccgctgcacttgctgcagtactcagttgcctccagcatagcagagagcaacagacactgcaggtggctgtggctaccggaggcagggtgtgcgagcggcacccacgattttgcagcgtgctccaggggacagtgatgctcttagcaccggagtgtgatgtgtcactgatcccaagcgtggatggagggggaaggggtgtcgccatggtgaccgcagttgcagccagactagccgctcatcggcgactgctcgaggagacactagccccatttcggttgaatcacgaccagctggccgcagtccaggcccaaatgcgaaaagccatggccaagggtctgagaggcgaggcctcgtccctccggatgcttcctacattcgtcagggctacccccgacggctccgaacggggagatttcctggccctggaccttgggggtacgaattttcgcgttctgctggttcgcgtaacaacaggcgtccagataaccagtgagatttattccattcccgagactgtggctcagggatctggacaacagctttttgaccacatagtggactgtatcgtggacttccaacagaaacaggggctgtcaggtcagtcactgcctctgggcttcacgttctccttcccctgtcgccaactaggccttgatcagggaattttactgaattggactaagggcttcaaagcgtcggactgtgaggggcaagatgtagtgtctctgctccgcgaggctataactcgcaggcaggcggtggaattgaacgtagtagcaattgtcaacgatactgttggtaccatgatgagttgcggatatgaagaccctaggtgcgaaattggactgattgttggtaccggtaccaatgcgtgttatatggaggagctccgcaacgtggctggcgttcctggggatagtggaaggatgtgtatcaacatggagtggggggcattcggagatgacggaagcttggcaatgctgtccacccgcttcgatgcctctgtggaccaggcgtccatcaacccaggcaaacagcgatttgaaaagatgatttcggggatgtatctgggtgaaatcgtgagacacatactgctgcatctgacttccctgggggtgctgttcaggggacagcagattcagcgactccagaccagggacatttttaagaccaagtttctaagtgagatcgagtcagattccctggccctccgccaggtaagagcgattttagaagatcttggactgccccttaccagcgatgatgccctgatggtgctggaagtctgtcaggccgtaagtcagagagcagcccagctctgtggcgcaggagtcgccgcagttgttgagaagatcagagagaaccgtggactggaggaactcgcggtgtctgtgggggtggatggcaccctatataagctgcatccgagattttctagcttggttgccgcaaccgtgagagaactggcccctagatgtgtcgtgaccttcttgcagagcgaagacggatctggtaagggagctgcgttggtgacagccgtggcgtgccggctcgcccagctgacccgggtgtag

SEQ ID NO: 124611 - DNA, 2772 bp, Artificial Sequence
  derived and/or modified sequence
atggacagcatcggcagcagcggcctgagacagggcgaggagaccctgagctgcagcgaggagggcctgcccggccccagcgacagcagcgagctggtgcaggagtgcctgcagcagttcaaggtgaccagagcccagctgcagcagatccaggccagcctgctgggcagcatggagcaggccctgagaggccaggccagccccgcccccgccgtgagaatgctgcccacctacgtgggcagcaccccccacggcaccgagcagggcgacttcgtggtgctggagctgggcgccaccggcgccagcctgagagtgctgtgggtgaccctgaccggcatcgagggccacagagtggagcccagaagccaggagttcgtgatcccccaggaggtgatgctgggcgccggccagcagctgttcgacttcgccgcccactgcctgagcgagttcctggacgcccagcccgtgaacaagcagggcctgcagctgggcttcagcttcagcttcccctgccaccagaccggcctggacagaagcaccctgatcagctggaccaagggcttcagatgcagcggcgtggagggccaggacgtggtgcagctgctgagagacgccatcagaagacagggcgcctacaacatcgacgtggtggccgtggtgaacgacaccgtgggcaccatgatgggctgcgagcccggcgtgagaccctgcgaggtgggcctggtggtggacaccggcaccaacgcctgctacatggaggaggccagacacgtggccgtgctggacgaggacagaggcagagtgtgcgtgagcgtggagtggggcagcttcagcgacgacggcgccctgggccccgtgctgaccaccttcgaccacaccctggaccacgagagcctgaaccccggcgcccagagattcgagaagatgatcggcggcctgtacctgggcgagctggtgagactggtgctggcccacctggccagatgcggcgtgctgttcggcggctgcaccagccccgccctgctgagccagggcagcatcctgctggagcacgtggccgagatggaggaccccagcaccggcgccgccagagtgcacgccatcctgcaggacctgggcctgagccccggcgccagcgacgtggagctggtgcagcacgtgtgcgccgccgtgtgcaccagagccgcccagctgtgcgccgccgccctggccgccgtgctgagctgcctgcagcacagcagagagcagcagaccctgcaggtggccgtggccaccggcggcagagtgtgcgagagacaccccagattctgcagcgtgctgcagggcaccgtgatgctgctggcccccgagtgcgacgtgagcctgatccccagcgtggacggcggcggcagaggcgtggccatggtgaccgccgtggccgccagactggccgcccacagaagactgctggaggagaccctggcccccttcagactgaaccacgaccagctggccgccgtgcaggcccagatgagaaaggccatggccaagggcctgagaggcgaggccagcagcctgagaatgctgcccaccttcgtgagagccacccccgacggcagcgagagaggcgacttcctggccctggacctgggcggcaccaacttcagagtgctgctggtgagagtgaccaccggcgtgcagatcaccagcgagatctacagcatccccgagaccgtggcccagggcagcggccagcagctgttcgaccacatcgtggactgcatcgtggacttccagcagaagcagggcctgagcggccagagcctgcccctgggcttcaccttcagcttcccctgcagacagctgggcctggaccagggcatcctgctgaactggaccaagggcttcaaggccagcgactgcgagggccaggacgtggtgagcctgctgagagaggccatcaccagaagacaggccgtggagctgaacgtggtggccatcgtgaacgacaccgtgggcaccatgatgagctgcggctacgaggaccccagatgcgagatcggcctgatcgtgggcaccggcaccaacgcctgctacatggaggagctgagaaacgtggccggcgtgcccggcgacagcggcagaatgtgcatcaacatggagtggggcgccttcggcgacgacggcagcctggccatgctgagcaccagattcgacgccagcgtggaccaggccagcatcaaccccggcaagcagagattcgagaagatgatcagcggcatgtacctgggcgagatcgtgagacacatcctgctgcacctgaccagcctgggcgtgctgttcagaggccagcagatccagagactgcagaccagagacatcttcaagaccaagttcctgagcgagatcgagagcgacagcctggccctgagacaggtgagagccatcctggaggacctgggcctgcccctgaccagcgacgacgccctgatggtgctggaggtgtgccaggccgtgagccagagagccgcccagctgtgcggcgccggcgtggccgccgtggtggagaagatcagagagaacagaggcctggaggagctggccgtgagcgtgggcgtggacggcaccctgtacaagctgcaccccagattcagcagcctggtggccgccaccgtgagagagctggcccccagatgcgtggtgaccttcctgcagagcgaggacggcagcggcaagggcgccgccctggtgaccgccgtggcctgcagactggcccagctgaccagagtgtag

SEQ ID NO: 124612 - protein, 154 aa, Artificial Sequence
  derived and/or modified sequence
MAVMAPRTLLLLLSGALALTQTWAGSHSMRYFFTSVSRPGRGEPRFIAVGYVDDTQFVRFDSDAASQRMEPRAPWIEQEGPEYWDQETRNVKAQSQTDRVDLGTLRGYYNQSEAGSHTIQIMYGCDVGSDGRFLRGYRLRSPSASGRRPMRRSS

SEQ ID NO: 124613 - protein, 299 aa, Artificial Sequence
  derived and/or modified sequence
MAVMAPRTLLLLLSGALALTQTWAGSHSMRYFFTSVSRPGRGEPRFIAVGYVDDTQFVRFDSDAASQRMEPRAPWIEQEGPEYWDQETRNVKAQSQTDRVDLGTLRGYYNQSEAGSHTIQIMYGCDVGSDGRFLRGYRQDAYDGKDYIALNEDLRSWTAADMAAQITKRKWEAAHEAEQLRAYLDGTCVEWLRRYLENGKETLQRTDPPKTHMTHHPISDHEATLRCWALGFYPAEITLTWQRDGEDQTQDTELVETRPAGDGTFQKWAAVVVPSGEEQRYTCHVQHEGLPKPLTLRWV

SEQ ID NO: 124614 - protein, 371 aa, Artificial Sequence
  derived and/or modified sequence
MAVMAPRTLLLLLSGALALTQTWAGSHSMRYFFTSVSRPGRGEPRFIAVGYVDDTQFVRFDSDAASQRMEPRAPWIEQEGPEYWDQETRNVKAQSQTDRVDLGTLRGYYNQSEAGSHTIQIMYGCDVGSDGRFLRGYRQDAYDGKDYIALNEDLRSWTAADMAAQITKRKWEAAHEAEQLRAYLDGTCVEWLRRYLENGKETLQRTDPPKTHMTHHPISDHEATLRCWALGFYPAEITLTWQRDGEDQTQDTELVETRPAGDGTFQKWAAVVVPSGEEQRYTCHVQHEGLPKPLTLRWELSSQPTIPIVGIIAGLVLLGAVITGAVVAAVMWRRKSSGGEGVKDRKGGSYTQAASSDSAQGSDVSLTACKV

SEQ ID NO: 124615 - protein, 365 aa, Artificial Sequence
  derived and/or modified sequence
MAVMAPRTLLLLLSGALALTQTWAGSHSMRYFFTSVSRPGRGEPRFIAVGYVDDTQFVRFDSDAASQRMEPRAPWIEQEGPEYWDQETRNVKAQSQTDRVDLGTLRGYYNQSEAGSHTIQIMYGCDVGSDGRFLRGYRQDAYDGKDYIALNEDLRSWTAADMAAQITKRKWEAAHEAEQLRAYLDGTCVEWLRRYLENGKETLQRTDPPKTHMTHHPISDHEATLRCWALGFYPAEITLTWQRDGEDQTQDTELVETRPAGDGTFQKWAAVVVPSGEEQRYTCHVQHEGLPKPLTLRWELSSQPTIPIVGIIAGLVLLGAVITGAVVAAVMWRRKSSDRKGGSYTQAASSDSAQGSDVSLTACKV

SEQ ID NO: 124616 - protein, 299 aa, Artificial Sequence
  derived and/or modified sequence
MAVMAPRTLLLLLLGALALTQTWAGSHSMRYFTTSVSRPGRGEPRFIAVGYVDDTQFVRFDSDAASQRMEPRAPWIEQEGPEYWDLQTRNVKAQSQTDRANLGTLRGYYNQSEAGSHTIQMMYGCDVGSDGRFLRGYRQDAYDGKDYIALNEDLRSWTAADMAAQITQRKWEAARVAEQLRAYLEGTCVEWLRRYLENGKETLQRTDAPKTHMTHHAVSDHEATLRCWALSFYPAEITLTWQRDGEDQTQDTELVETRPAGDGTFQKWASVVVPSGQEQRYTCHVQHEGLPKPLTLRWV

SEQ ID NO: 124617 - protein, 241 aa, Artificial Sequence
  derived and/or modified sequence
  misc_feature (1)..(1): Xaa can be any naturally occurring amino acid
XPDGRLLRGHDQSAYDGKDYIALNEDLSSWTAADTAAQITQRKWEAARVAEQLRAYLEGTCVEWLRRHLENGKETLQRADPPKTHVTHHPISDHEATLRCWALGFYPAEITLTWQRDGEDQTQDTELVETRPAGDRTFQKWAAVVVPSGEEQRYTCHVQHEGLPKPLTLRWEPSSQSTIPIVGIVAGLAVLAVVVIGAVVATVMCRRKSSGHFLPTGGKGGSYSQAASSDSAQGSDVSLTA

SEQ ID NO: 124618 - DNA, 465 bp, Artificial Sequence
  derived and/or modified sequence
atggccgtgatggcccccagaaccctgctgctgctgctgagcggcgccctggccctgacccagacctgggccggcagccacagcatgagatacttcttcaccagcgtgagcagacccggcagaggcgagcccagattcatcgccgtgggctacgtggacgacacccagttcgtgagattcgacagcgacgccgccagccagagaatggagcccagagccccctggatcgagcaggagggccccgagtactgggaccaggagaccagaaacgtgaaggcccagagccagaccgacagagtggacctgggcaccctgagaggctactacaaccagagcgaggccggcagccacaccatccagatcatgtacggctgcgacgtgggcagcgacggcagattcctgagaggctacagactgagaagccccagcgccagcggcagaagacccatgagaagaagcagctag

SEQ ID NO: 124619 - DNA, 900 bp, Artificial Sequence
  derived and/or modified sequence
atggccgtgatggcccccagaaccctgctgctgctgctgagcggcgccctggccctgacccagacctgggccggcagccacagcatgagatacttcttcaccagcgtgagcagacccggcagaggcgagcccagattcatcgccgtgggctacgtggacgacacccagttcgtgagattcgacagcgacgccgccagccagagaatggagcccagagccccctggatcgagcaggagggccccgagtactgggaccaggagaccagaaacgtgaaggcccagagccagaccgacagagtggacctgggcaccctgagaggctactacaaccagagcgaggccggcagccacaccatccagatcatgtacggctgcgacgtgggcagcgacggcagattcctgagaggctacagacaggacgcctacgacggcaaggactacatcgccctgaacgaggacctgagaagctggaccgccgccgacatggccgcccagatcaccaagagaaagtgggaggccgcccacgaggccgagcagctgagagcctacctggacggcacctgcgtggagtggctgagaagatacctggagaacggcaaggagaccctgcagagaaccgacccccccaagacccacatgacccaccaccccatcagcgaccacgaggccaccctgagatgctgggccctgggcttctaccccgccgagatcaccctgacctggcagagagacggcgaggaccagacccaggacaccgagctggtggagaccagacccgccggcgacggcaccttccagaagtgggccgccgtggtggtgcccagcggcgaggagcagagatacacctgccacgtgcagcacgagggcctgcccaagcccctgaccctgagatgggtgtag

SEQ ID NO: 124620 - DNA, 1116 bp, Artificial Sequence
  derived and/or modified sequence
atggccgtgatggcccccagaaccctgctgctgctgctgagcggcgccctggccctgacccagacctgggccggcagccacagcatgagatacttcttcaccagcgtgagcagacccggcagaggcgagcccagattcatcgccgtgggctacgtggacgacacccagttcgtgagattcgacagcgacgccgccagccagagaatggagcccagagccccctggatcgagcaggagggccccgagtactgggaccaggagaccagaaacgtgaaggcccagagccagaccgacagagtggacctgggcaccctgagaggctactacaaccagagcgaggccggcagccacaccatccagatcatgtacggctgcgacgtgggcagcgacggcagattcctgagaggctacagacaggacgcctacgacggcaaggactacatcgccctgaacgaggacctgagaagctggaccgccgccgacatggccgcccagatcaccaagagaaagtgggaggccgcccacgaggccgagcagctgagagcctacctggacggcacctgcgtggagtggctgagaagatacctggagaacggcaaggagaccctgcagagaaccgacccccccaagacccacatgacccaccaccccatcagcgaccacgaggccaccctgagatgctgggccctgggcttctaccccgccgagatcaccctgacctggcagagagacggcgaggaccagacccaggacaccgagctggtggagaccagacccgccggcgacggcaccttccagaagtgggccgccgtggtggtgcccagcggcgaggagcagagatacacctgccacgtgcagcacgagggcctgcccaagcccctgaccctgagatgggagctgagcagccagcccaccatccccatcgtgggcatcatcgccggcctggtgctgctgggcgccgtgatcaccggcgccgtggtggccgccgtgatgtggagaagaaagagcagcggcggcgagggcgtgaaggacagaaagggcggcagctacacccaggccgccagcagcgacagcgcccagggcagcgacgtgagcctgaccgcctgcaaggtgtag

SEQ ID NO: 124621 - DNA, 1098 bp, Artificial Sequence
  derived and/or modified sequence
atggccgtgatggcccccagaaccctgctgctgctgctgagcggcgccctggccctgacccagacctgggccggcagccacagcatgagatacttcttcaccagcgtgagcagacccggcagaggcgagcccagattcatcgccgtgggctacgtggacgacacccagttcgtgagattcgacagcgacgccgccagccagagaatggagcccagagccccctggatcgagcaggagggccccgagtactgggaccaggagaccagaaacgtgaaggcccagagccagaccgacagagtggacctgggcaccctgagaggctactacaaccagagcgaggccggcagccacaccatccagatcatgtacggctgcgacgtgggcagcgacggcagattcctgagaggctacagacaggacgcctacgacggcaaggactacatcgccctgaacgaggacctgagaagctggaccgccgccgacatggccgcccagatcaccaagagaaagtgggaggccgcccacgaggccgagcagctgagagcctacctggacggcacctgcgtggagtggctgagaagatacctggagaacggcaaggagaccctgcagagaaccgacccccccaagacccacatgacccaccaccccatcagcgaccacgaggccaccctgagatgctgggccctgggcttctaccccgccgagatcaccctgacctggcagagagacggcgaggaccagacccaggacaccgagctggtggagaccagacccgccggcgacggcaccttccagaagtgggccgccgtggtggtgcccagcggcgaggagcagagatacacctgccacgtgcagcacgagggcctgcccaagcccctgaccctgagatgggagctgagcagccagcccaccatccccatcgtgggcatcatcgccggcctggtgctgctgggcgccgtgatcaccggcgccgtggtggccgccgtgatgtggagaagaaagagcagcgacagaaagggcggcagctacacccaggccgccagcagcgacagcgcccagggcagcgacgtgagcctgaccgcctgcaaggtgtag

SEQ ID NO: 124622 - DNA, 900 bp, Artificial Sequence
  derived and/or modified sequence
atggccgtgatggcccccagaaccctgctgctgctgctgctgggcgccctggccctgacccagacctgggccggcagccacagcatgagatacttcttcaccagcgtgagcagacccggcagaggcgagcccagattcatcgccgtgggctacgtggacgacacccagttcgtgagattcgacagcgacgccgccagccagagaatggagcccagagccccctggatcgagcaggagggccccgagtactgggaccaggagaccagaaacgtgaaggcccacagccagaccgacagagagagcctgagaatcgccctgagatactacaaccagagcgaggccggcagccacaccatccagatgatgtacggctgcgacgtgggccccgacggcagactgctgagaggctaccagcaggacgcctacgacggcaaggactacatcgccctgaacgaggacctgagaagctggaccgccgccgacatggccgcccagatcacccagagaaagtgggaggccgccagagtggccgagcagctgagagcctacctggagggcacctgcgtggagtggctgagaagatacctggagaacggcaaggagaccctgcagagaaccgacgcccccaagacccacatgacccaccacgccgtgagcgaccacgaggccaccctgagatgctgggccctgagcttctaccccgccgagatcaccctgacctggcagagagacggcgaggaccagacccaggacaccgagctggtggagaccagacccgccggcgacggcaccttccagaagtgggccagcgtggtggtgcccagcggccaggagcagagatacacctgccacgtgcagcacgagggcctgcccaagcccctgaccctgagatgggtgtag

SEQ ID NO: 124623 - DNA, 900 bp, Artificial Sequence
  derived and/or modified sequence
atggccgtgatggcccccagaaccctgctgctgctgctgctgggcgccctggccctgacccagacctgggccggcagccacagcatgagatacttcaccaccagcgtgagcagacccggcagaggcgagcccagattcatcgccgtgggctacgtggacgacacccagttcgtgagattcgacagcgacgccgccagccagagaatggagcccagagccccctggatcgagcaggagggccccgagtactgggacctgcagaccagaaacgtgaaggcccagagccagaccgacagagccaacctgggcaccctgagaggctactacaaccagagcgaggccggcagccacaccatccagatgatgtacggctgcgacgtgggcagcgacggcagattcctgagaggctacagacaggacgcctacgacggcaaggactacatcgccctgaacgaggacctgagaagctggaccgccgccgacatggccgcccagatcacccagagaaagtgggaggccgccagagtggccgagcagctgagagcctacctggagggcacctgcgtggagtggctgagaagatacctggagaacggcaaggagaccctgcagagaaccgacgcccccaagacccacatgacccaccacgccgtgagcgaccacgaggccaccctgagatgctgggccctgagcttctaccccgccgagatcaccctgacctggcagagagacggcgaggaccagacccaggacaccgagctggtggagaccagacccgccggcgacggcaccttccagaagtgggccagcgtggtggtgcccagcggccaggagcagagatacacctgccacgtgcagcacgagggcctgcccaagcccctgaccctgagatgggtgtag

SEQ ID NO: 124624 - DNA, 1098 bp, Artificial Sequence
  derived and/or modified sequence
atggccgtgatggcccccagaaccctgctgctgctgctgctgggcgccctggccctgacccagacctgggccggcagccacagcatgagatacttcttcaccagcgtgagcagacccggcagaggcgagcccagattcatcgccgtgggctacgtggacgacacccagttcgtgagattcgacagcgacgccgccagccagagaatggagcccagagccccctggatcgagcaggagggccccgagtactgggaccaggagaccagaaacgtgaaggcccacagccagaccgacagagagagcctgagaatcgccctgagatactacaaccagagcgaggccggcagccacaccatccagatgatgtacggctgcgacgtgggccccgacggcagactgctgagaggctaccagcaggacgcctacgacggcaaggactacatcgccctgaacgaggacctgagaagctggaccgccgccgacatggccgcccagatcacccagagaaagtgggaggccgccagagtggccgagcagctgagagcctacctggagggcacctgcgtggagtggctgagaagatacctggagaacggcaaggagaccctgcagagaaccgacgcccccaagacccacatgacccaccacgccgtgagcgaccacgaggccaccctgagatgctgggccctgagcttctaccccgccgagatcaccctgacctggcagagagacggcgaggaccagacccaggacaccgagctggtggagaccagacccgccggcgacggcaccttccagaagtgggccagcgtggtggtgcccagcggccaggagcagagatacacctgccacgtgcagcacgagggcctgcccaagcccctgaccctgagatgggagcccagcagccagcccaccatccccatcgtgggcatcatcgccggcctggtgctgttcggcgccatgttcgccggcgccgtggtggccgccgtgagatggagaagaaagagcagcgacagaaagggcggcagctacagccaggccgccagcagcgacagcgcccagggcagcgacatgagcctgaccgcctgcaaggtgtag

SEQ ID NO: 124625 - DNA, 1098 bp, Artificial Sequence
  derived and/or modified sequence
atggccgtgatggcccccagaaccctgctgctgctgctgctgggcgccctggccctgacccagacctgggccggcagccacagcatgagatacttcaccaccagcgtgagcagacccggcagaggcgagcccagattcatcgccgtgggctacgtggacgacacccagttcgtgagattcgacagcgacgccgccagccagagaatggagcccagagccccctggatcgagcaggagggccccgagtactgggacctgcagaccagaaacgtgaaggcccagagccagaccgacagagccaacctgggcaccctgagaggctactacaaccagagcgaggccggcagccacaccatccagatgatgtacggctgcgacgtgggcagcgacggcagattcctgagaggctacagacaggacgcctacgacggcaaggactacatcgccctgaacgaggacctgagaagctggaccgccgccgacatggccgcccagatcacccagagaaagtgggaggccgccagagtggccgagcagctgagagcctacctggagggcacctgcgtggagtggctgagaagatacctggagaacggcaaggagaccctgcagagaaccgacgcccccaagacccacatgacccaccacgccgtgagcgaccacgaggccaccctgagatgctgggccctgagcttctaccccgccgagatcaccctgacctggcagagagacggcgaggaccagacccaggacaccgagctggtggagaccagacccgccggcgacggcaccttccagaagtgggccagcgtggtggtgcccagcggccaggagcagagatacacctgccacgtgcagcacgagggcctgcccaagcccctgaccctgagatgggagcccagcagccagcccaccatccccatcgtgggcatcatcgccggcctggtgctgttcggcgccgtgttcgccggcgccgtggtggccgccgtgagatggagaagaaagagcagcgacagaaagggcggcagctacagccaggccgccagcagcgacagcgcccagggcagcgacatgagcctgaccgcctgcaaggtgtag

SEQ ID NO: 124626 - DNA, 1029 bp, Artificial Sequence
  derived and/or modified sequence
atggccgtgatggcccccagaaccctgctgctgctgctgctgggcgccctggccctgacccagacctgggccggcagccacagcatgagatacttcaccaccagcgtgagcagacccggcagaggcgagcccagattcatcgccgtgggctacgtggacgacacccagttcgtgagattcgacagcgacgccgccagccagagaatggagcccagagccccctggatcgagcaggagggccccgagtactgggacctgcagaccagaaacgtgaaggcccagagccagaccgacagagccaacctgggcaccctgagaggctactacaaccagagcgaggccggcagccacaccatccagatgatgtacggctgcgacgtgggcagcgacggcagattcctgagaggctacagacaggacgcctacgacggcaaggactacatcgccctgaacgaggacctgagaagctggaccgccgccgacatggccgcccagatcacccagagaaagtgggaggccgccagagtggccgagcagctgagagcctacctggagggcacctgcgtggagtggctgagaagatacctggagaacggcaaggagaccctgcagagaaccgacgcccccaagacccacatgacccaccacgccgtgagcgaccacgaggccaccctgagatgctgggccctgagcttctaccccgccgagatcaccctgacctggcagagagacggcgaggaccagacccaggacaccgagctggtggagaccagacccgccggcgacggcaccttccagaagtgggccagcgtggtggtgcccagcggccaggagcagagatacacctgccacgtgcagcacgagggcctgcccaagcccctgaccctgagatgggagcccagcagccagcccaccatccccatcgtgggcatcatcgccggcctggtgctgttcggcgccgtgttcgccggcgccgtggtggccgccgtgagatggagaagaaagagcagcggcggcgtgaagggctag

SEQ ID NO: 124627 - DNA, 465 bp, Artificial Sequence
  derived and/or modified sequence
atggccgttatggcccctcgcactctattgctcctcctttcaggggctctcgccctgactcaaacatgggccggaagccattcgatgcgttactttttcacctccgtctcccgcccaggacgtggggagccccggttcatagccgtggggtatgtggacgacactcagttcgttagatttgattctgatgccgcaagccaaagaatggagccccgcgcaccgtggatcgagcaggaaggaccagagtactgggaccaggagacaaggaatgtgaaagcccagtcccagacagaccgtgttgacctggggacactcaggggctattacaatcaatcagaggctggttcccacacgatccagattatgtacggatgtgatgttgggtccgacggtcgctttctgcgagggtatagactccggtccccatccgcaagtgggcgcagacctatgagaagatcttcatag

SEQ ID NO: 124628 - DNA, 900 bp, Artificial Sequence
  derived and/or modified sequence
atggccgtcatggccccccgcacactgctgttgcttctaagcggcgctctagcccttactcagacctgggccggttctcacagtatgaggtacttcttcacaagcgtgagccgcccagggaggggcgagcctagattcatcgccgttggatatgttgacgatactcagttcgtgaggttcgactctgatgccgcctcacagaggatggaaccaagggcaccttggattgagcaagaaggcccagaatactgggatcaggaaactaggaatgtaaaggcccagagccagaccgaccgggtagaccttggaacactccgtggctattataatcagtccgaggccgggtctcacacgatccagattatgtacgggtgtgacgtaggctcagacggcaggttcttgcgcggatatcgccaagatgcttacgacggcaaagactatatcgctctaaacgaagacctgagatcctggactgcagccgatatggctgcacagattacaaagcgaaagtgggaggccgcacacgaagcagaacaactcagagcctatctcgatggtacctgtgtcgagtggcttagacgataccttgaaaacggtaaggagacgttacagcgcacggaccctccgaagacccatatgacccatcacccaatctcagatcatgaggctacactgcgctgttgggccctaggcttttatccagctgaaatcaccctcacatggcagcgggacggagaggatcagacacaagacacagaactggtggagacaaggcctgctggtgatggaacattccagaagtgggccgcagttgtggtcccctcgggagaagagcagaggtacacttgccacgtgcagcacgaagggctgcccaagcccttgactctccgctgggtttag

SEQ ID NO: 124629 - DNA, 1116 bp, Artificial Sequence
  derived and/or modified sequence
atggcagtgatggcccctaggacattgctgctgctcctgtccggcgccctcgcgcttacccaaacttgggccggctcacatagtatgcgctatttctttacatcagtgtctcgccccgggaggggcgaaccaaggttcattgctgtgggatatgtggatgatactcagttcgttcggtttgactctgacgcggcgtctcaaagaatggagccccgcgcaccttggattgagcaggaaggtcccgagtactgggatcaggaaacacgcaacgttaaggcgcaatcccagaccgacagagtcgatctcgggactttgcgcggatactacaaccagtcagaagctggctcccacaccatccagattatgtacggctgcgacgttgggtcggacggcaggttccttaggggctaccggcaggatgcatatgacggtaaagactacattgcacttaacgaagacctgcgatcctggacagccgctgatatggcagcccagataaccaaacgtaagtgggaggcagctcatgaggccgaacaattgcgcgcctaccttgatggcacctgtgttgaatggctcagacgctacctggaaaacggaaaagagaccctccagcgaacggacccccccaaaacacatatgacacaccatcctatctccgaccatgaggcaaccctccgatgctgggcactcgggttttaccccgctgagataactcttacctggcagagagatggcgaggaccaaacgcaggataccgagcttgtggaaacccgccccgcaggcgacgggacattccagaagtgggccgccgtggtcgtgccttccggcgaagaacagaggtatacatgtcatgtacaacacgagggactgcctaagccactgacattacgctgggaactgtcatcccagccaacgattcctatcgttggaattattgcgggactggtcctgctgggagcggttatcaccggggctgttgtagcagctgtgatgtggcggcgtaaatcttctggtggagaaggggtaaaggatcggaaggggggctcatatacccaagccgcaagctctgatagcgcccaggggagcgacgtttccttgactgcctgcaaagtgtag

SEQ ID NO: 124630 - DNA, 1098 bp, Artificial Sequence
  derived and/or modified sequence
atggcggtgatggcacccaggactctgttgcttctcttgagtggcgctctggctctgacccagacatgggccgggtcacatagcatgcgatatttcttcaccagcgtcagcaggccggggcgaggggagcctcgattcatcgccgtggggtacgtagacgatacacagttcgtacggttcgattctgatgccgccagtcagcgcatggagccacgggccccttggatcgagcaagaagggcccgaatactgggatcaggaaacacgcaatgtcaaggcccagtcccagaccgaccgggttgatctcggaactctgcgaggttactataaccaatcagaggcaggctcgcacactatacagatcatgtacggctgcgacgtcggcagcgatggacgttttctgagaggctataggcaagacgcctacgacggaaaggattacattgccttgaacgaagacctacgttcatggacggcagccgacatggccgcccaaatcactaagcgaaaatgggaggctgctcatgaagcagaacagctgagagcatacctagacgggacttgcgttgaatggctgagacggtatcttgaaaatggtaaggaaaccttgcagaggaccgatccgccaaaaactcacatgacacaccaccctatttctgaccatgaggccacattgaggtgctgggctctcggattttatccggcagagataacactcacctggcagagagatggggaggaccaaacgcaggacaccgaacttgtcgaaacgcgccccgccggggatggaacatttcaaaaatgggcggctgtcgtcgtcccttcaggagaagagcagaggtatacctgccacgtgcagcatgaaggtctgcctaagccactgacactgaggtgggaactgagctcacaacctactattcctatcgtcggcattattgctggtttggtgctcctcggggccgtgattacaggtgccgttgtcgcggcggttatgtggagaaggaagtcatccgacagaaaggggggctcgtacactcaggcggcatcaagcgattcagcacaaggctccgatgtgtctctgacagcttgcaaggtatag

SEQ ID NO: 124631 - DNA, 1098 bp, Artificial Sequence
  derived and/or modified sequence
atggccgtgatggcgccaaggaccctgctgctcctgttgtccggagcattagcactaacacagacttgggctggttctcattcaatgcgctactttttcacctccgtgtctagacctggccggggcgaaccacgctttatcgccgtagggtatgttgatgacacccaattcgtgcgcttcgatagtgacgcagctagccaacgaatggaacctcgcgccccatggatcgaacaggaaggacccgagtactgggaccaggaaacacggaatgtgaaggcccagagtcagacagaccgagtggatctgggtacgctaagaggctattataaccagtccgaggcagggagccacactatccagatcatgtatggttgcgacgtgggatccgatgggcggtttctacggggatatcgccaagacgcttacgatggtaaggactacattgcactaaatgaagatctgcgatcttggacagctgcagacatggccgcccagatcaccaagagaaagtgggaggccgcccatgaagcagagcagctccgagcatacctggatggcacatgtgtagagtggctacgcagatatttggagaatggtaaggaaacccttcagcgaactgacccacccaaaacacatatgacccatcatcccattagcgaccacgaagccacattacgctgttgggcgttagggttctacccggccgagattacactgacttggcagcgagacggggaggaccaaactcaggacaccgagctggttgagaccagaccagcaggagatggtacttttcaaaagtgggccgctgtcgttgtgccgagcggagaggagcaaaggtatacttgtcacgtacagcatgagggtctgccgaaaccattgaccctgcgttgggaacttagctcacaacccacaatcccaatagtggggattattgctggtctggttttactcggcgctgtgattacaggagccgtagttgccgcggtgatgtggaggagaaagtctagcgaccggaagggagggtcttatacacaagctgcatcttctgattccgcccaaggttccgatgtgtcgctcactgcctgtaaagtatag

SEQ ID NO: 124632 - DNA, 900 bp, Artificial Sequence
  derived and/or modified sequence
atggcagttatggcgccaaggaccttgctgctcctgctgctgggcgccctggcgcttacacagacctgggctggaagccattcgatgcggtactttttcacatccgtgtcgcgtcccggaagaggggaacctcggttcatagccgtggggtatgtcgacgacacacagttcgttcggttcgattcagatgctgcctcgcaacggatggagcccagagccccttggattgagcaggaggggcccgagtattgggatcaagaaactcgaaacgtgaaagctcacagccagacagatagggaatctctccggattgcgctgcggtattacaaccagtcggaggcaggcagccacaccatacagatgatgtatggttgcgatgtgggccctgatggtcgactgctccgcggttaccagcaggatgcatatgacggtaaagactatattgccctgaatgaggatctgcggtcttggactgcggccgacatggccgctcagatcacacagagaaaatgggaggccgctagagtggccgagcagctaagagcttacctcgagggcacttgtgtcgagtggctgcgcagatacttggagaatggcaaggagacactgcagaggaccgatgctccaaagacgcacatgactcatcatgcggtaagtgatcatgaggccactttacgatgctgggcgttaagcttctatcctgcggaaatcaccctgacctggcagagggacggggaggaccagacacaagacacggaactggtagaaacgaggcccgccggcgatggcaccttccaaaaatgggcctccgtggtggttccatccggtcaggagcagcgttatacctgccatgttcagcacgagggcctcccaaagcctctcacactcaggtgggtatag

SEQ ID NO: 124633 - DNA, 900 bp, Artificial Sequence
  derived and/or modified sequence
atggctgtgatggccccccgcaccctgctcctgttgctgttaggcgcactggccctaactcaaacatgggctggctctcattcgatgaggtacttcactacctctgtctctcgtcctggcagaggtgaacccagatttatcgccgtggggtatgtcgacgatactcagtttgtgcgatttgactctgacgctgcatctcagaggatggaacccagggccccctggattgaacaggaaggtcccgagtattgggatttgcaaactaggaatgtgaaggctcagtcacagaccgaccgcgcgaacttaggaacgctgagaggctattataaccagtcagaggccggcagccacaccatccagatgatgtacggctgtgacgtgggctccgatggtagattcctgagagggtacagacaggatgcctacgacgggaaagactacatcgcactgaacgaagatctgcgatcatggactgctgccgacatggcagcgcagataacccaaaggaaatgggaggctgccagagtcgccgaacagttacgtgcgtatctggaaggcacttgcgtcgagtggttgcggcggtatctcgagaacgggaaggagaccctacagagaaccgacgctccaaagacccatatgacacaccatgccgtgtcagatcacgaggcaaccctgcggtgctgggcactgtccttctaccccgctgagatcactctcacatggcagcgagacggggaggatcagacacaagataccgagctggttgaaaccaggccagccggcgatggaacctttcagaagtgggcttcagtggtcgttccatccggccaggagcagcgttatacatgccacgtgcagcacgaaggcctccccaaaccactaaccctgcgctgggtctag

SEQ ID NO: 124634 - DNA, 1098 bp, Artificial Sequence
  derived and/or modified sequence
atggcagtgatggctccaagaacactactactgctgctcttgggggcattagctctcacacagacttgggctggtagccactctatgaggtacttcttcaccagtgtctctcggcctggccgcggagaacctcgttttatcgctgttggctacgtggacgacacccagtttgtaagatttgacagcgacgctgcaagtcaacgaatggaaccccgggcgccgtggattgagcaggagggacccgagtactgggaccaggaaactaggaacgtgaaggcccatagccagactgaccgagaatctctccggattgctctgaggtattataaccagtcagaggcaggcagccataccattcagatgatgtacggatgcgacgtaggccccgacgggaggctgcttcgggggtatcaacaagacgcttatgacggaaaagactatatcgctctcaacgaggacctcagaagctggaccgcggcagacatggcagctcagattacacagaggaagtgggaggcagctagagtggccgaacagcttcgagcctacctggaggggacttgcgtagaatggctccgccggtacctggagaatgggaaggaaacactccaacgcacagatgctcctaaaacccacatgactcaccacgccgtgtccgatcacgaagcgaccctgcgttgttgggccttgagtttttatcccgcagaaattacgctgacatggcaacgcgatggcgaagaccagacgcaggataccgaattagtggaaacacgaccagctggagacgggacctttcagaaatgggccagcgtcgtggttccgtccggacaggaacagaggtacacgtgccacgttcagcacgaagggcttcccaagcccctaaccctccgatgggagccttcgtctcaacccacaatcccaatcgtgggtattattgcaggactggtcttgttcggggccatgttcgctggggcagtggtggccgccgtcagatggaggcgcaagagttctgaccggaagggcggaagttattcccaggcagcctcctcagattcagcacaggggagtgacatgtctctcaccgcatgcaaggtgtag

SEQ ID NO: 124635 - DNA, 1098 bp, Artificial Sequence
  derived and/or modified sequence
atggctgtgatggccccgaggactttgttgcttctactgttgggcgcactagccctgactcagacctgggccgggtcccactcaatgcgatattttaccacttccgtgtctaggcccggtcgcggtgaacctcggttcatcgcagttgggtatgtcgatgacactcaattcgtccgctttgacagcgatgccgccagccagaggatggaacccagggctccatggatcgagcaagagggcccagagtattgggacctgcagacccgcaatgtgaaggcacagtcccaaacagacagggctaatctgggcacgctgagagggtactacaatcaaagcgaagcgggatcacatacaatacagatgatgtatgggtgcgacgtgggatccgacgggcgattcctcaggggataccgccaagatgcctatgatggcaaagattacatagcactcaacgaggacctgcggtcatggactgcagctgacatggcagcgcagatcacgcagagaaagtgggaagccgcccgcgtagcagaacagctgagggcctatcttgaggggacatgcgtggagtggctccgcagatatctggaaaacggaaaggaaacgcttcagagaacagatgctcccaagacgcatatgacacatcacgctgtgagcgaccacgaggccactcttcggtgctgggcattaagcttctacccagctgagatcactctgacttggcaacgagacggggaagaccagacccaggacactgaactggttgaaactcgccccgccggagatggcaccttccagaagtgggcttccgtggtggttcctagtgggcaggaacagcgctacacatgccacgtacagcatgagggtctcccgaaacccctgactctgcggtgggagccaagtagtcaaccgactatcccgattgtcgggattattgccgggttggtgctctttggagctgtgtttgctggcgcagtagtggcggccgtgcgatggcggcgaaagtcttccgacaggaaggggggatcttactctcaagcagcctctagtgattcagcccaggggagtgacatgtccctcacagcctgtaaggtgtag

SEQ ID NO: 124636 - DNA, 1029 bp, Artificial Sequence
  derived and/or modified sequence
atggcagtcatggcccccaggacactgctattactgctcctgggagcactcgccctgacgcagacctgggccggctctcattctatgcgctattttactacgagcgtgtctcggccaggcaggggggaacccagattcatagccgtcgggtacgtagacgatacccaattcgtgcgattcgactccgacgccgcatcccagcggatggagcctcgtgcaccatggatcgagcaggagggccccgagtactgggacttacagacacgaaatgtgaaggcccagtcccagacggacagggccaacctgggtaccctgcgcggatactacaaccaatccgaggctggatcccatacaattcagatgatgtatggttgtgacgtcgggtcagacgggcgctttctgcgcggctatagacaagacgcatacgatggaaaagactatattgccctgaatgaggacttgcgatcctggaccgcggctgacatggccgcgcagatcacgcaacgaaaatgggaggccgctcgcgtcgccgagcagctacgggcctatttggagggaacatgtgtcgagtggctcaggcgctatctggaaaatgggaaagagaccctccaacggacagacgccccgaaaactcatatgacgcaccatgctgtgagtgaccacgaagctactctgcgctgctgggcactgagtttttatccagccgagatcacgctgacttggcagagagacggggaagatcagacgcaggacaccgaattggtggaaacaagacctgccggagatggaacatttcagaagtgggccagcgttgtggttccgtccgggcaggaacaacgatatacatgccatgttcaacacgagggccttcccaagccactcacactacgctgggaaccgagctctcagcctactatacccatagtgggcattatcgctggactggtcctgttcggagcagtgttcgccggagcggtcgtggctgccgtgcgttggaggcggaaaagttccggcggagttaaaggttag

SEQ ID NO: 124637 - DNA, 1098 bp, Artificial Sequence
  derived and/or modified sequence
atggctgttatggcacccagaactttgctgttactgctgctcggagccctggcccttacacaaacttgggctggctctcatagcatgcgatacttcaccacgagtgtatcccgacccggccggggtgaacctcgcttcattgcagtaggctacgtggacgacactcagtttgtccgctttgattctgacgcggcatctcagcgcatggaaccacgagccccttggatagaacaagagggccctgaatactgggatctacagacgaggaatgttaaggctcagagccaaacggaccgggccaacctggggacactgagagggtattataaccagagtgaggctggctctcacacaatccaaatgatgtacggttgcgacgtgggttcggacggaagattcctgagggggtacagacaggacgcatacgatggcaaggactacatcgcactgaatgaagatctgagaagttggacagccgccgatatggccgcgcagattacccagcggaagtgggaggccgcgcgggttgcggagcagctacgggcctacctggagggtacttgtgttgagtggctgcgccgctacctggagaatggaaaagagacgctgcagcgcaccgatgcccctaagacccacatgacgcatcatgctgtctccgaccatgaagccactctgcgctgctgggctttgtctttttaccctgccgagattacactgacatggcagcgcgacggcgaagatcaaacgcaggacactgaacttgttgagacgcggcctgcaggggacggcacattccagaaatgggcttccgtggtcgttccttccggacaggagcaacgctatacctgccacgtgcagcatgagggcctgccaaagcctctcacgcttcgttgggagccttcgtcccaacccaccataccaatcgttggcattattgctgggctggtgctgtttggagccgtgttcgccggcgccgtcgtcgccgcggttaggtggcgaagaaagtccagcgatcgaaagggtgggtcatacagccaggctgcttcgtccgactcggcgcagggatctgacatgagcctgaccgcctgtaaagtgtag

SEQ ID NO: 124638 - DNA, 1098 bp, Artificial Sequence
  derived and/or modified sequence
atggctgttatggcacctcgtacactattgctgctgctgctgggggccttagccctgactcagacatgggccggctctcattccatgcggtactttttcaccagtgtgagcagaccagggcggggcgaacctcgttttatcgctgtgggatatgttgacgacacacagttcgtcaggtttgacagcgatgccgcttcgcaaagaatggagccacgggctccatggatcgagcaagaaggtccggaatattgggaccaggaaacgaggaacgtcaaggctcactctcagacagaccgggagagcctccgtatcgctctgagatattacaatcagtccgaggccggctcacacaccattcagatgatgtatgggtgtgacgtggggccagacggtcgattattacgtgggtaccaacaggacgcctacgatggcaaggattacattgcactgaacgaagaccttaggagttggaccgccgcagacatggcggcccagatcacccagcggaaatgggaggcggcccgggtcgcagaacagcttcgcgcctacctggaggggacctgcgtggaatggctgagaaggtatctggagaatggcaaagagacattgcagagaactgacgcacctaagacacacatgacacatcacgcagtttctgaccacgaggcgaccttacggtgctgggcattgtccttttatccagcggaaatcaccttgacatggcagcgtgacggggaagatcagacccaggataccgagctggttgaaacaagacctgcaggcgacggaacattccaaaaatgggctagcgtagtagtaccctctggacaggagcagcgatacacatgtcacgtgcagcacgagggactgcccaaaccgctgaccctccgctgggaaccttcaagtcagcccaccatccccattgtaggaatcatcgctggactggttctcttcggggcaatgtttgcaggggcagtcgtcgcagccgtgcgatggcgcaggaaaagctctgatagaaagggcggctcgtactcacaggccgcttcctctgactctgctcaaggaagtgacatgtcactgacggcatgcaaagtctag

SEQ ID NO: 124639 - DNA, 1334 bp, Artificial Sequence
  derived and/or modified sequence
cgaggatggccgtcatggcgccccgaaccctcctcctgctactctcgggggccctggccctgacccagacctgggcgggctcccactccatgaggtatttcttcacatccgtgtcccggcccggccgcggggagccccgcttcatcgccgtgggctacgtggacgacacgcagttcgtgcggttcgacagcgacgccgcgagccagaggatggagccgcgggcgccgtggatagagcaggaggggccggagtattgggaccaggagacacggaatgtgaaggcccagtcacagactgaccgagtggacctggggaccctgcgcggctactacaaccagagcgaggccggttctcacaccatccagataatgtatggctgcgacgtggggtcggacgggcgcttcctccgcgggtaccggcaggacgcctacgacggcaaggattacatcgccctgaacgaggacctgcgctcttggaccgcggcggacatggcggctcagatcaccaagcgcaagtgggaggcggcccatgaggcggagcagttgagagcctacctggatggcacgtgcgtggagtggctccgcagatacctggagaacgggaaggagacgctgcagcgcacggacccccccaagacacatatgacccaccaccccatctctgaccatgaggccaccctgaggtgctgggccctgggcttctaccctgcggagatcacactgacctggcagcgggatggggaggaccagacccaggacacggagctcgtggagaccaggcctgcaggggatggaaccttccagaagtgggcggctgtggtggtgccttctggagaggagcagagatacacctgccatgtgcagcatgagggtctgcccaagcccctcaccctgagatgggtgtgagacagctgccttgtgtgggactgagaggcaagagttgttcctgcccttccctttgtgacttgaagaaccctgactttgtttctgcaaaggcacctgcatgtgtctgtgttcgtgtaggcataatgtgaggaggtggggagaccaccccacccccatgtccaccatgaccctcttcccacgctgacctgtgctccctccccaatcatctttcctgttccagagaggtggggctgaggtgtctccatctctgtctcaacttcatggtgcactgagctgtaacttcttccttccctattaaaattagaaccttagtataaatttactttctcaaattcttgccatgagaggttgatgagttaattaaaggagaagattcctaaaatttgagagacaaaataaatggaagacatgagaaccttccagagtcca

SEQ ID NO: 124640 - DNA, 1854 bp, Artificial Sequence
  derived and/or modified sequence
cgcttcgcacaggagcagaggggtcagggcgaagtcccagggccccaggcgtggctctcagagtctcaggccccgaaggcggtgtatggattggggagtcccagccttggggattccccaactccgcagtttcttttctccctctcccaacctacgtagggtccttcatcctggatactcacgacgcggacccagttctcactcccattgggtgtcgggtttccagagaagccaatcagtgtcgtcgcggtcgctgttctaaagcccgcacgcacccaccgggactcagattctccccagacgccgaggatggccgtcatggcgccccgaaccctcctcctgctactctcgggggccctggccctgacccagacctgggcgggctcccactccatgaggtatttcttcacatccgtgtcccggcccggccgcggggagccccgcttcatcgccgtgggctacgtggacgacacgcagttcgtgcggttcgacagcgacgccgcgagccagaggatggagccgcgggcgccgtggatagagcaggaggggccggagtattgggaccaggagacacggaatgtgaaggcccagtcacagactgaccgagtggacctggggaccctgcgcggctactacaaccagagcgaggccggttctcacaccatccagataatgtatggctgcgacgtggggtcggacgggcgcttcctccgcgggtaccggcaggacgcctacgacggcaaggattacatcgccctgaacgaggacctgcgctcttggaccgcggcggacatggcggctcagatcaccaagcgcaagtgggaggcggcccatgaggcggagcagttgagagcctacctggatggcacgtgcgtggagtggctccgcagatacctggagaacgggaaggagacgctgcagcgcacggacccccccaagacacatatgacccaccaccccatctctgaccatgaggccaccctgaggtgctgggccctgggcttctaccctgcggagatcacactgacctggcagcgggatggggaggaccagacccaggacacggagctcgtggagaccaggcctgcaggggatggaaccttccagaagtgggcggctgtggtggtgccttctggagaggagcagagatacacctgccatgtgcagcatgagggtctgcccaagcccctcaccctgagatgggagctgtcttcccagcccaccatccccatcgtgggcatcattgctggcctggttctccttggagctgtgatcactggagctgtggtcgctgccgtgatgtggaggaggaagagctcaggtggagaaggggtgaaggatagaaaaggagggagttacactcaggctgcaagcagtgacagtgcccagggctctgatgtgtccctcacagcttgtaaagtgtgagacagctgccttgtgtgggactgagaggcaagagttgttcctgcccttccctttgtgacttgaagaaccctgactttgtttctgcaaaggcacctgcatgtgtctgtgttcgtgtaggcataatgtgaggaggtggggagaccaccccacccccatgtccaccatgaccctcttcccacgctgacctgtgctccctccccaatcatctttcctgttccagagaggtggggctgaggtgtctccatctctgtctcaacttcatggtgcactgagctgtaacttcttccttccctattaaaattagaaccttagtataaatttactttctcaaattcttgccatgagaggttgatgagttaattaaaggagaagattcctaaaatttgagagacaaaataaatggaagacatgagaaccttccagagtcca

SEQ ID NO: 124641 - DNA, 1548 bp, Artificial Sequence
  derived and/or modified sequence
agattctccccagacgccgaggatggccgtcatggcgccccgaaccctcctcctgctactctcgggggccctggccctgacccagacctgggcgggctcccactccatgaggtatttcttcacatccgtgtcccggcccggccgcggggagccccgcttcatcgccgtgggctacgtggacgacacgcagttcgtgcggttcgacagcgacgccgcgagccagaggatggagccgcgggcgccgtggatagagcaggaggggccggagtattgggaccaggagacacggaatgtgaaggcccagtcacagactgaccgagtggacctggggaccctgcgcggctactacaaccagagcgaggccggttctcacaccatccagataatgtatggctgcgacgtggggtcggacgggcgcttcctccgcgggtaccggcaggacgcctacgacggcaaggattacatcgccctgaacgaggacctgcgctcttggaccgcggcggacatggcggctcagatcaccaagcgcaagtgggaggcggcccatgaggcggagcagttgagagcctacctggatggcacgtgcgtggagtggctccgcagatacctggagaacgggaaggagacgctgcagcgcacggacccccccaagacacatatgacccaccaccccatctctgaccatgaggccaccctgaggtgctgggccctgggcttctaccctgcggagatcacactgacctggcagcgggatggggaggaccagacccaggacacggagctcgtggagaccaggcctgcaggggatggaaccttccagaagtgggcggctgtggtggtgccttctggagaggagcagagatacacctgccatgtgcagcatgagggtctgcccaagcccctcaccctgagatgggagctgtcttcccagcccaccatccccatcgtgggcatcattgctggcctggttctccttggagctgtgatcactggagctgtggtcgctgccgtgatgtggaggaggaagagctcagatagaaaaggagggagttacactcaggctgcaagcagtgacagtgcccagggctctgatgtgtccctcacagcttgtaaagtgtgagacagctgccttgtgtgggactgagaggcaagagttgttcctgcccttccctttgtgacttgaagaaccctgactttgtttctgcaaaggcacctgcatgtgtctgtgttcgtgtaggcataatgtgaggaggtggggagaccaccccacccccatgtccaccatgaccctcttcccacgctgacctgtgctccctccccaatcatctttcctgttccagagaggtggggctgaggtgtctccatctctgtctcaacttcatggtgcactgagctgtaacttcttccttccctattaaaattagaaccttagtataaatttactttctcaaattcttgccatgagaggttgatgagttaattaaaggagaagattcctaaaatttgagagacaaaataaatggaagacatgagaaccttccagagtcc

SEQ ID NO: 124642 - DNA, 1868 bp, Artificial Sequence
  derived and/or modified sequence
aaggggagaggagggcctgaaggatgagaaggatggagggaagggctggagaagcaggaggcacaacttttccggattaaaaacaaaaacaacaacaacaaaaatctacacctccattcccagatcaagcttactctctggcaccaaactccatggggtgatttttcttctagaagagtccaggtggacagggtccttcatcctggatactcacgacgcggacccagttctcactcccattgggtgtcgggtttccagagaagccaatcagtgtcgtcgcggtcgctgttctaaagcccgcacgcacccaccgggactcagattctccccagacgccgaggatggccgtcatggcgccccgaaccctcctcctgctactctcgggggccctggccctgacccagacctgggcgggctcccactccatgaggtatttcttcacatccgtgtcccggcccggccgcggggagccccgcttcatcgccgtgggctacgtggacgacacgcagttcgtgcggttcgacagcgacgccgcgagccagaggatggagccgcgggcgccgtggatagagcaggaggggccggagtattgggaccaggagacacggaatgtgaaggcccagtcacagactgaccgagtggacctggggaccctgcgcggctactacaaccagagcgaggccggttctcacaccatccagataatgtatggctgcgacgtggggtcggacgggcgcttcctccgcgggtaccggcaggacgcctacgacggcaaggattacatcgccctgaacgaggacctgcgctcttggaccgcggcggacatggcggctcagatcaccaagcgcaagtgggaggcggcccatgaggcggagcagttgagagcctacctggatggcacgtgcgtggagtggctccgcagatacctggagaacgggaaggagacgctgcagcgcacggacccccccaagacacatatgacccaccaccccatctctgaccatgaggccaccctgaggtgctgggccctgggcttctaccctgcggagatcacactgacctggcagcgggatggggaggaccagacccaggacacggagctcgtggagaccaggcctgcaggggatggaaccttccagaagtgggcggctgtggtggtgccttctggagaggagcagagatacacctgccatgtgcagcatgagggtctgcccaagcccctcaccctgagatgggagctgtcttcccagcccaccatccccatcgtgggcatcattgctggcctggttctccttggagctgtgatcactggagctgtggtcgctgccgtgatgtggaggaggaagagctcagatagaaaaggagggagttacactcaggctgcaagcagtgacagtgcccagggctctgatgtgtccctcacagcttgtaaagtgtgagacagctgccttgtgtgggactgagaggcaagagttgttcctgcccttccctttgtgacttgaagaaccctgactttgtttctgcaaaggcacctgcatgtgtctgtgttcgtgtaggcataatgtgaggaggtggggagaccaccccacccccatgtccaccatgaccctcttcccacgctgacctgtgctccctccccaatcatctttcctgttccagagaggtggggctgaggtgtctccatctctgtctcaacttcatggtgcactgagctgtaacttcttccttccctattaaaattagaaccttagtataaatttactttctcaaattcttgccatgagaggttgatgagttaattaaaggagaagattcctaaaatttgagagacaaaataaatggaagacatgagaaccttccagagtcca

SEQ ID NO: 124643 - DNA, 1334 bp, Artificial Sequence
  derived and/or modified sequence
cgaggatggccgtcatggcgccccgaaccctcctcctgctactcttgggggccctggccctgacccagacctgggcgggctcccactccatgaggtatttcttcacatccgtgtcccggcccggccgcggggagccccgcttcatcgccgtgggctacgtggacgacacgcagttcgtgcggtttgacagcgacgccgcgagccagaggatggagccgcgggcgccgtggatagagcaggaggggccggagtattgggaccaggagacacggaatgtgaaggcccactcacagactgaccgagagagcctgcggatcgcgctccgctactacaaccagagcgaggccggttctcacaccatccagatgatgtatggctgcgacgtggggccggacgggcgcctcctccgcgggtaccagcaggacgcctacgacggcaaggattacatcgccttgaacgaggacctgcgctcttggaccgcggcggacatggcggctcagatcacccagcgcaagtgggaggcggcccgtgtggcggagcagttgagagcctacctggagggcacgtgcgtggagtggctccgcagatacctggagaacgggaaggagacgctgcagcgcacggacgcccccaagacgcatatgactcaccacgctgtctctgaccatgaggccaccctgaggtgctgggccctgagcttctaccctgcggagatcacactgacctggcagcgggatggggaggaccagacccaggacacggagcttgtggagaccaggcctgcaggggatggaaccttccagaagtgggcgtctgtggtggtgccttctggacaggagcagagatacacctgccatgtgcagcatgagggtctgcccaagcccctcaccctgagatgggtgtgagacagctgccttgtgtgggactgagaggcaagatttgttcctgcccttccctttgtgacttgaagaaccctgactttgtttctgcaaaggcacctgcatgtgtctgtgttcttgtaggcataatgtgaggaggtggggagaccaccccacccccatgtccaccatgaccctcttcccacgctgacctgtgctccctccccaatcatctttcctgttccagagaggtggggctgaggtgtctccatctctgcctcaacttcatggtgcactgagctgtaacttcttccttccctattaaaattagaacctgagtataaatttactttctcaaattcttgccatgagaggttgatgagttaattaaaggagaagattcctaaaatttgagagacaaaataaatggaacacatgagaaccttccagagtcca

SEQ ID NO: 124644 - DNA, 1334 bp, Artificial Sequence
  derived and/or modified sequence
cgaggatggccgtcatggcgccccgaaccctcctcctgctactcttgggggccctggccctgacccagacctgggcgggctcccactccatgaggtatttcaccacatccgtgtcccggcccggccgcggggagccccgcttcatcgccgtgggctacgtggacgacacgcagttcgtgcggtttgacagcgacgccgcgagccagaggatggagccgcgggcaccgtggatagagcaggaggggccggagtattgggacctgcagacacggaatgtgaaggcccagtcacagactgaccgagcgaacctggggaccctgcgcggctactacaaccagagcgaggccggttctcacaccatccagatgatgtatggctgcgacgtggggtcggacgggcgcttcctccgcgggtaccggcaggacgcctacgacggcaaggattacatcgccttgaacgaggacctgcgctcttggaccgcggcggacatggcggctcagatcacccagcgcaagtgggaggcggcccgtgtggcggagcagttgagagcctacctggagggcacgtgcgtggagtggctccgcagatacctggagaacgggaaggagacgctgcagcgcacggacgcccccaagacgcatatgactcaccacgctgtctctgaccatgaggccaccctgaggtgctgggccctgagcttctaccctgcggagatcacactgacctggcagcgggatggggaggaccagacccaggacacggagcttgtggagaccaggcctgcaggggatggaaccttccagaagtgggcgtctgtggtggtgccttctggacaggagcagagatacacctgccatgtgcagcatgagggtctgcccaagcccctcaccctgagatgggtgtgagacagctgccttgtgtgggactgagaggcaagatttgttcctgcccttccctttgtgacttgaagaaccctgactttgtttctgcaaaggcacctgcatgtgtctgtgttcttgtaggcataatgtgaggaggtggggagaccaccccacccccatgtccaccatgaccctcttcccacgctgacctgtgctccctccccaatcatctttcctgttccagagaggtggggctgaggtgtctccatctctgcctcaacttcatggtgcactgagctgtaacttcttccttccctattaaaattagaacctgagtataaatttactttctcaaattcttgccatgagaggttgatgagttaattaaaggagaagattcctaaaatttgagagacaaaataaatggaacacatgagaaccttccagagtcca

SEQ ID NO: 124645 - DNA, 1868 bp, Artificial Sequence
  derived and/or modified sequence
aaggggagaggagggcctgaaggatgagaaggatggagggaagggctggagaagcaggaggcgcaacttttcccgattaaaaacaaaaacaacaacaacaaaaatctacacctccattcccagagcaagcttactctctggcaccaaactccatggggtgatttttcttctagaagagtccaggtggacagggtccttcttcctggatactcacgacgcggacccagttctcactcccattgggtgtcgggtttccagagaagccaatcagtgtcgtcgcggtcgcggttctaaagtccgcacgcacccaccgggactcagattctccccagacgccgaggatggccgtcatggcgccccgaaccctcctcctgctactcttgggggccctggccctgacccagacctgggcgggctcccactccatgaggtatttcttcacatccgtgtcccggcccggccgcggggagccccgcttcatcgccgtgggctacgtggacgacacgcagttcgtgcggtttgacagcgacgccgcgagccagaggatggagccgcgggcgccgtggatagagcaggaggggccggagtattgggaccaggagacacggaatgtgaaggcccactcacagactgaccgagagagcctgcggatcgcgctccgctactacaaccagagcgaggccggttctcacaccatccagatgatgtatggctgcgacgtggggccggacgggcgcctcctccgcgggtaccagcaggacgcctacgacggcaaggattacatcgccttgaacgaggacctgcgctcttggaccgcggcggacatggcggctcagatcacccagcgcaagtgggaggcggcccgtgtggcggagcagttgagagcctacctggagggcacgtgcgtggagtggctccgcagatacctggagaacgggaaggagacgctgcagcgcacggacgcccccaagacgcatatgactcaccacgctgtctctgaccatgaggccaccctgaggtgctgggccctgagcttctaccctgcggagatcacactgacctggcagcgggatggggaggaccagacccaggacacggagcttgtggagaccaggcctgcaggggatggaaccttccagaagtgggcgtctgtggtggtgccttctggacaggagcagagatacacctgccatgtgcagcatgagggtctgcccaagcccctcaccctgagatgggagccgtcttcccagcccaccatccccatcgtgggcatcattgctggcctagttctctttggagctatgttcgctggagctgtggtcgctgctgtgaggtggaggaggaagagctcagatagaaaaggagggagctactctcaggctgcaagcagtgacagtgcccagggctctgatatgtctctcacagcttgtaaagtgtgagacagctgccttgtgtgggactgagaggcaagatttgttcctgcccttccctttgtgacttgaagaaccctgactttgtttctgcaaaggcacctgcatgtgtctgtgttcttgtaggcataatgtgaggaggtggggagaccaccccacccccatgtccaccatgaccctcttcccacgctgacctgtgctccctccccaatcatctttcctgttccagagaggtggggctgaggtgtctccatctctgcctcaacttcatggtgcactgagctgtaacttcttccttccctattaaaattagaacctgagtataaatttactttctcaaattcttgccatgagaggttgatgagttaattaaaggagaagattcctaaaatttgagagacaaaataaatggaacacatgagaaccttccagagtcca

SEQ ID NO: 124646 - DNA, 1868 bp, Artificial Sequence
  derived and/or modified sequence
aaggggagaggagggcctgaaggatgagaaggatggagggaagggctggagaagcaggaggcgcaacttttcccgattaaaaacaaaaacaacaacaacaaaaatctacacctccattcccagagcaagcttactctctggcaccaaactccatggggtgatttttcttctagaagagtccaggtggacagggtccttcttcctggatactcacgacgcggacccagttctcactcccattgggtgtcgggtttccagagaagccaatcagtgtcgtcgcggtcgcggttctaaagtccgcacgcacccaccgggactcagattctccccagacgccgaggatggccgtcatggcgccccgaaccctcctcctgctactcttgggggccctggccctgacccagacctgggcgggctcccactccatgaggtatttcaccacatccgtgtcccggcccggccgcggggagccccgcttcatcgccgtgggctacgtggacgacacgcagttcgtgcggtttgacagcgacgccgcgagccagaggatggagccgcgggcaccgtggatagagcaggaggggccggagtattgggacctgcagacacggaatgtgaaggcccagtcacagactgaccgagcgaacctggggaccctgcgcggctactacaaccagagcgaggccggttctcacaccatccagatgatgtatggctgcgacgtggggtcggacgggcgcttcctccgcgggtaccggcaggacgcctacgacggcaaggattacatcgccttgaacgaggacctgcgctcttggaccgcggcggacatggcggctcagatcacccagcgcaagtgggaggcggcccgtgtggcggagcagttgagagcctacctggagggcacgtgcgtggagtggctccgcagatacctggagaacgggaaggagacgctgcagcgcacggacgcccccaagacgcatatgactcaccacgctgtctctgaccatgaggccaccctgaggtgctgggccctgagcttctaccctgcggagatcacactgacctggcagcgggatggggaggaccagacccaggacacggagcttgtggagaccaggcctgcaggggatggaaccttccagaagtgggcgtctgtggtggtgccttctggacaggagcagagatacacctgccatgtgcagcatgagggtctgcccaagcccctcaccctgagatgggagccgtcttcccagcccaccatccccatcgtgggcatcattgctggcctagttctctttggagctgtgttcgctggagctgtggtcgctgctgtgaggtggaggaggaagagctcagatagaaaaggagggagctactctcaggctgcaagcagtgacagtgcccagggctctgatatgtctctcacagcttgtaaagtgtgagacagctgccttgtgtgggactgagaggcaagatttgttcctgcccttccctttgtgacttgaagaaccctgactttgtttctgcaaaggcacctgcatgtgtctgtgttcttgtaggcataatgtgaggaggtggggagaccaccccacccccatgtccaccatgaccctcttcccacgctgacctgtgctccctccccaatcatctttcctgttccagagaggtggggctgaggtgtctccatctctgcctcaacttcatggtgcactgagctgtaacttcttccttccctattaaaattagaacctgagtataaatttactttctcaaattcttgccatgagaggttgatgagttaattaaaggagaagattcctaaaatttgagagacaaaataaatggaacacatgagaaccttccagagtcca

SEQ ID NO: 124647 - DNA, 1856 bp, Artificial Sequence
  derived and/or modified sequence
agcttggcacaggagcagaggggtcagggcgaagtcccagggccccaggcgtggctctcagggtctcaggccccgaaggcggtgtatggattggggagtcccagccttggggattccccaactccgcagtttcttttctccctctgccaacctatgtagggtccttcttcctggatactcacgacgcggacccagttctcactcccattgggtgtcgggtttccagagaagccaatcagtgtcgtcgcggtcgcggttctaaagtccgcacgcacccaccgggactcagattctccccagacgccgaggatggccgtcatggcgccccgaaccctcctcctgctactcttgggggccctggccctgacccagacctgggcgggctcccactccatgaggtatttcaccacatccgtgtcccggcccggccgcggggagccccgcttcatcgccgtgggctacgtggacgacacgcagttcgtgcggtttgacagcgacgccgcgagccagaggatggagccgcgggcaccgtggatagagcaggaggggccggagtattgggacctgcagacacggaatgtgaaggcccagtcacagactgaccgagcgaacctggggaccctgcgcggctactacaaccagagcgaggccggttctcacaccatccagatgatgtatggctgcgacgtggggtcggacgggcgcttcctccgcgggtaccggcaggacgcctacgacggcaaggattacatcgccttgaacgaggacctgcgctcttggaccgcggcggacatggcggctcagatcacccagcgcaagtgggaggcggcccgtgtggcggagcagttgagagcctacctggagggcacgtgcgtggagtggctccgcagatacctggagaacgggaaggagacgctgcagcgcacggacgcccccaagacgcatatgactcaccacgctgtctctgaccatgaggccaccctgaggtgctgggccctgagcttctaccctgcggagatcacactgacctggcagcgggatggggaggaccagacccaggacacggagcttgtggagaccaggcctgcaggggatggaaccttccagaagtgggcgtctgtggtggtgccttctggacaggagcagagatacacctgccatgtgcagcatgagggtctgcccaagcccctcaccctgagatgggagccgtcttcccagcccaccatccccatcgtgggcatcattgctggcctagttctctttggagctgtgttcgctggagctgtggtcgctgctgtgaggtggaggaggaagagctcaggtggggtgaagggatgaaggatagaaaaggagggagctactctcaggctgcaagcagtgacagtgcccagggctctgatatgtctctcacagcttgtaaagtgtgagacagctgccttgtgtgggactgagaggcaagatttgttcctgcccttccctttgtgacttgaagaaccctgactttgtttctgcaaaggcacctgcatgtgtctgtgttcttgtaggcataatgtgaggaggtggggagaccaccccacccccatgtccaccatgaccctcttcccacgctgacctgtgctccctccccaatcatctttcctgttccagagaggtggggctgaggtgtctccatctctgcctcaacttcatggtgcactgagctgtaacttcttccttccctattaaaattagaacctgagtataaatttactttctcaaattcttgccatgagaggttgatgagttaattaaaggagaagattcctaaaatttgagagacaaaataaatggaacacatgagaaccttccagagtcca

SEQ ID NO: 124648 - DNA, 1410 bp, Artificial Sequence
  derived and/or modified sequence
ccgcacgcacccaccgggactcagattctccccagacgccgaggatggccgtcatggcgccccgaaccctcctcctgctactctcgggggccctggccctgacccagacctgggcgggctcccactccatgaggtatttcttcacatccgtgtcccggcccggccgcggggagccccgcttcatcgccgtgggctacgtggacgacacgcagttcgtgcggttcgacagcgacgccgcgagccagaggatggagccgcgggcgccgtggatagagcaggaggggccggagtattgggaccaggagacacggaatgtgaaggcccagtcacagactgaccgagtggacctggggaccctgcgcggctactacaaccagagcgaggccggttctcacaccatccagataatgtatggctgcgacgtggggtcggacgggcgcttcctccgcgggtaccggcaggacgcctacgacggcaaggattacatcgccctgaacgaggacctgcgctcttggaccgcggcggacatggcggctcagatcaccaagcgcaagtgggaggcggcccatgaggcggagcagttgagagcctacctggatggcacgtgcgtggagtggctccgcagatacctggagaacgggaaggagacgctgcagcgcacggacccccccaagacacatatgacccaccaccccatctctgaccatgaggccaccctgaggtgctgggccctgggcttctaccctgcggagatcacactgacctggcagcgggatggggaggaccagacccaggacacggagctcgtggagaccaggcctgcaggggatggaaccttccagaagtgggcggctgtggtggtgccttctggagaggagcagagatacacctgccatgtgcagcatgagggtctgcccaagcccctcaccctgagatgggatagaaaaggagggagttacactcaggctgcaagcagtgacagtgcccagggctctgatgtgtccctcacagcttgtaaagtgtgagacagctgccttgtgtgggactgagaggcaagagttgttcctgcccttccctttgtgacttgaagaaccctgactttgtttctgcaaaggcacctgcatgtgtctgtgttcgtgtaggcataatgtgaggaggtggggagaccaccccacccccatgtccaccatgaccctcttcccacgctgacctgtgctccctccccaatcatctttcctgttccagagaggtggggctgaggtgtctccatctctgtctcaacttcatggtgcactgagctgtaacttcttccttccctattaaaattagaaccttagtataaatttactttctcaaattcttgccatgagaggttgatgagttaattaaaggagaagattcctaaaattt

SEQ ID NO: 124649 - DNA, 1466 bp, Artificial Sequence
  derived and/or modified sequence
ttctaaagtccgcacgcacccaccgggactcagattctccccagacgccgaggatggccgtcatggcgccccgaaccctcctcctgctactcttgggggccctggccctgacccagacctgggcgggctcccactccatgaggtatttcaccacatccgtgtcccggcccggccgcggggagccccgcttcatcgccgtgggctacgtggacgacacgcagttcgtgcggtttgacagcgacgccgcgagccagaggatggagccgcgggcaccgtggatagagcaggaggggccggagtattgggacctgcagacacggaatgtgaaggcccagtcacagactgaccgagcgaacctggggaccctgcgcggctactacaaccagagcgaggccggttctcacaccatccagatgatgtatggctgcgacgtggggtcggacgggcgcttcctccgcgggtaccggcaggacgcctacgacggcaaggattacatcgccttgaacgaggacctgcgctcttggaccgcggcggacatggcggctcagatcacccagcgcaagtgggaggcggcccgtgtggcggagcagttgagagcctacctggagggcacgtgcgtggagtggctccgcagatacctggagaacgggaaggagacgctgcagcgcacggacgcccccaagacgcatatgactcaccacgctgtctctgaccatgaggccaccctgaggtgctgggccctgagcttctaccctgcggagatcacactgacctggcagcgggatggggaggaccagacccaggacacggagcttgtggagaccaggcctgcaggggatggaaccttccagaagtgggcgtctgtggtggtgccttctggacaggagcagagatacacctgccatgtgcagcatgagggtctgcccaagcccctcaccctgagatgggagccgtcttcccagcccaccatccccatcgtgggcatcattgctggcctagttctctttggagctgtgttcgctggagctgtggtcgctgctgtgaggtggaggaggaagagctcagatagaaaaggagggagctactctcaggctgcaagcagtgacagtgcccagggctctgatatgtctctcacagcttgtaaagtgtgagacagctgccttgtgtgggactgagaggcaagatttgttcctgcccttccctttgtgacttgaagaaccctgactttgtttctgcaaaggcacctgcatgtgtctgtgttcttgtaggcataatgtgaggaggtggggagaccaccccacccccatgtccaccatgaccctcttcccacgctgacctgtgctccctccccaatcatctttcctgttccagagaggtggggctgaggtgtctccatctctgcctcaacttcatggtgcactgagctgtaacttcttccttccctattaaaattagaacctgagtat

SEQ ID NO: 124650 - DNA, 1416 bp, Artificial Sequence
  derived and/or modified sequence
cgaggatggccgtcatggcgccccgaaccctcctcctgctactcttgggggccctggccctgacccagacctgggcgggctcccactccatgaggtatttcttcacatccgtgtcccggcccggccgcggggagccccgcttcatcgccgtgggctacgtggacgacacgcagttcgtgcggtttgacagcgacgccgcgagccagaggatggagccgcgggcgccgtggatagagcaggaggggccggagtattgggaccaggagacacggaatgtgaaggcccactcacagactgaccgagagagcctgcggatcgcgctccgctactacaaccagagcgaggccggttctcacaccatccagatgatgtatggctgcgacgtggggccggacgggcgcctcctccgcgggtaccagcaggacgcctacgacggcaaggattacatcgccttgaacgaggacctgcgctcttggaccgcggcggacatggcggctcagatcacccagcgcaagtgggaggcggcccgtgtggcggagcagttgagagcctacctggagggcacgtgcgtggagtggctccgcagatacctggagaacgggaaggagacgctgcagcgcacggacgcccccaagacgcatatgactcaccacgctgtctctgaccatgaggccaccctgaggtgctgggccctgagcttctaccctgcggagatcacactgacctggcagcgggatggggaggaccagacccaggacacggagcttgtggagaccaggcctgcaggggatggaaccttccagaagtgggcgtctgtggtggtgccttctggacaggagcagagatacacctgccatgtgcagcatgagggtctgcccaagcccctcaccctgagatgggagccgtcttcccagcccaccatccccatcgtgggcatcattgctggcctagttctctttggagctatgttcgctggagctgtggtcgctgctgtgaggtggaggaggaagagctcagatagaaaaggagggagctactctcaggctgcaagcagtgacagtgcccagggctctgatatgtctctcacagcttgtaaagtgtgagacagctgccttgtgtgggactgagaggcaagatttgttcctgcccttccctttgtgacttgaagaaccctgactttgtttctgcaaaggcacctgcatgtgtctgtgttcttgtaggcataatgtgaggaggtggggagaccaccccacccccatgtccaccatgaccctcttcccacgctgacctgtgctccctccccaatcatctttcctgttccagagaggtggggctgaggtgtctccatctctgcctcaacttcatggtgcactgagctgtaacttcttccttccctattaaaattagaacctgagt

SEQ ID NO: 124651 - DNA, 465 bp, Artificial Sequence
  derived and/or modified sequence
atggctgtgatggcccccaggaccctgctgctgctgctgagcggggccctggccctgacccagacctgggccggcagccacagcatgagatacttcttcacctctgtgtccaggcctggccgcggggagccccgcttcatcgctgtgggctacgtggatgacacccagtttgtgcgctttgacagtgatgctgccagccagaggatggagccccgggccccctggattgagcaggagggccctgagtactgggaccaggagaccagaaatgtgaaggcccagagccagacagacagagtggacctgggcaccctgcggggctactacaaccagagcgaggccggcagccacaccatccagatcatgtatggctgtgatgtgggcagtgatggccgcttcctgcggggctaccgcctgcggagccccagcgccagcggcagaagacccatgagaagaagcagctag

SEQ ID NO: 124652 - DNA, 900 bp, Artificial Sequence
  derived and/or modified sequence
atggctgtgatggcccccaggaccctgctgctgctgctgagcggggccctggccctgacccagacctgggccggcagccacagcatgagatacttcttcacctctgtgtccaggcctggccgcggggagccccgcttcatcgctgtgggctacgtggatgacacccagtttgtgcgctttgacagtgatgctgccagccagaggatggagccccgggccccctggattgagcaggagggccctgagtactgggaccaggagaccagaaatgtgaaggcccagagccagacagacagagtggacctgggcaccctgcggggctactacaaccagagcgaggccggcagccacaccatccagatcatgtatggctgtgatgtgggcagtgatggccgcttcctgcggggctaccggcaggatgcctatgatggcaaggactacatcgccctgaatgaagacctgcgctcctggacagctgctgacatggccgcccagatcaccaagaggaagtgggaggccgcccatgaagctgagcagctgcgggcctacctggatggcacctgtgtggagtggctgcggcgctacctggagaatggcaaggagaccctgcagaggacagacccccccaagacccacatgacccaccaccccatcagtgaccacgaggccaccctgcgctgctgggccctgggcttctacccagctgagatcaccctgacctggcagagagatggagaggaccagacccaggacacagagctggtggagaccaggcctgctggagatggcaccttccagaagtgggccgctgtggtggtgcccagcggggaggagcagcgctacacctgccacgtgcagcacgagggcctgcccaagcccctgaccctgcgctgggtgtag

SEQ ID NO: 124653 - DNA, 1116 bp, Artificial Sequence
  derived and/or modified sequence
atggctgtgatggcccccaggaccctgctgctgctgctgagcggggccctggccctgacccagacctgggccggcagccacagcatgagatacttcttcacctctgtgtccaggcctggccgcggggagccccgcttcatcgctgtgggctacgtggatgacacccagtttgtgcgctttgacagtgatgctgccagccagaggatggagccccgggccccctggattgagcaggagggccctgagtactgggaccaggagaccagaaatgtgaaggcccagagccagacagacagagtggacctgggcaccctgcggggctactacaaccagagcgaggccggcagccacaccatccagatcatgtatggctgtgatgtgggcagtgatggccgcttcctgcggggctaccggcaggatgcctatgatggcaaggactacatcgccctgaatgaagacctgcgctcctggacagctgctgacatggccgcccagatcaccaagaggaagtgggaggccgcccatgaagctgagcagctgcgggcctacctggatggcacctgtgtggagtggctgcggcgctacctggagaatggcaaggagaccctgcagaggacagacccccccaagacccacatgacccaccaccccatcagtgaccacgaggccaccctgcgctgctgggccctgggcttctacccagctgagatcaccctgacctggcagagagatggagaggaccagacccaggacacagagctggtggagaccaggcctgctggagatggcaccttccagaagtgggccgctgtggtggtgcccagcggggaggagcagcgctacacctgccacgtgcagcacgagggcctgcccaagcccctgaccctgcgctgggagctgagcagccagcccaccatccccatcgtgggcatcatcgccggcctggtgctgctgggcgccgtcatcactggagctgtggtggccgctgtgatgtggaggaggaagagcagtggaggagaaggagtgaaggacaggaagggcggcagctacacccaggccgccagcagtgacagcgcccagggcagtgatgtgtccctgacagcctgcaaggtgtag

SEQ ID NO: 124654 - DNA, 1098 bp, Artificial Sequence
  derived and/or modified sequence
atggctgtgatggcccccaggaccctgctgctgctgctgagcggggccctggccctgacccagacctgggccggcagccacagcatgagatacttcttcacctctgtgtccaggcctggccgcggggagccccgcttcatcgctgtgggctacgtggatgacacccagtttgtgcgctttgacagtgatgctgccagccagaggatggagccccgggccccctggattgagcaggagggccctgagtactgggaccaggagaccagaaatgtgaaggcccagagccagacagacagagtggacctgggcaccctgcggggctactacaaccagagcgaggccggcagccacaccatccagatcatgtatggctgtgatgtgggcagtgatggccgcttcctgcggggctaccggcaggatgcctatgatggcaaggactacatcgccctgaatgaagacctgcgctcctggacagctgctgacatggccgcccagatcaccaagaggaagtgggaggccgcccatgaagctgagcagctgcgggcctacctggatggcacctgtgtggagtggctgcggcgctacctggagaatggcaaggagaccctgcagaggacagacccccccaagacccacatgacccaccaccccatcagtgaccacgaggccaccctgcgctgctgggccctgggcttctacccagctgagatcaccctgacctggcagagagatggagaggaccagacccaggacacagagctggtggagaccaggcctgctggagatggcaccttccagaagtgggccgctgtggtggtgcccagcggggaggagcagcgctacacctgccacgtgcagcacgagggcctgcccaagcccctgaccctgcgctgggagctgagcagccagcccaccatccccatcgtgggcatcatcgccggcctggtgctgctgggcgccgtcatcactggagctgtggtggccgctgtgatgtggaggaggaagagcagtgacaggaagggcggcagctacacccaggccgccagcagtgacagcgcccagggcagtgatgtgtccctgacagcctgcaaggtgtag

SEQ ID NO: 124655 - DNA, 900 bp, Artificial Sequence
  derived and/or modified sequence
atggctgtgatggcccccaggaccctgctgctgctgctgctgggcgccctggccctgacccagacctgggccggcagccacagcatgagatacttcttcacctctgtgtccaggcctggccgcggggagccccgcttcatcgctgtgggctacgtggatgacacccagtttgtgcgctttgacagtgatgctgccagccagaggatggagccccgggccccctggattgagcaggagggccctgagtactgggaccaggagaccagaaatgtgaaggcccacagccagacagaccgggagagcctgcgcatcgccctgcgctactacaaccagagcgaggccggcagccacaccatccagatgatgtatggctgtgatgtgggcccagatggccgcctgctgcggggctaccagcaggatgcctatgatggcaaggactacatcgccctgaatgaagacctgcgctcctggacagctgctgacatggccgcccagatcacccagaggaagtgggaggccgcccgggtggccgagcagctgcgggcctacctggagggcacctgtgtggagtggctgcggcgctacctggagaatggcaaggagaccctgcagaggacagatgcccccaagacccacatgacccaccacgctgtgtctgaccacgaggccaccctgcgctgctgggccctgtccttctacccagctgagatcaccctgacctggcagagagatggagaggaccagacccaggacacagagctggtggagaccaggcctgctggagatggcaccttccagaagtgggcctctgtggtggtgcccagcggccaggagcagcgctacacctgccacgtgcagcacgagggcctgcccaagcccctgaccctgcgctgggtgtag

SEQ ID NO: 124656 - DNA, 900 bp, Artificial Sequence
  derived and/or modified sequence
atggctgtgatggcccccaggaccctgctgctgctgctgctgggcgccctggccctgacccagacctgggccggcagccacagcatgagatacttcaccacctctgtgtccaggcctggccgcggggagccccgcttcatcgctgtgggctacgtggatgacacccagtttgtgcgctttgacagtgatgctgccagccagaggatggagccccgggccccctggattgagcaggagggccctgagtactgggacctgcagaccagaaatgtgaaggcccagagccagacagaccgggccaacctgggcaccctgcggggctactacaaccagagcgaggccggcagccacaccatccagatgatgtatggctgtgatgtgggcagtgatggccgcttcctgcggggctaccggcaggatgcctatgatggcaaggactacatcgccctgaatgaagacctgcgctcctggacagctgctgacatggccgcccagatcacccagaggaagtgggaggccgcccgggtggccgagcagctgcgggcctacctggagggcacctgtgtggagtggctgcggcgctacctggagaatggcaaggagaccctgcagaggacagatgcccccaagacccacatgacccaccacgctgtgtctgaccacgaggccaccctgcgctgctgggccctgtccttctacccagctgagatcaccctgacctggcagagagatggagaggaccagacccaggacacagagctggtggagaccaggcctgctggagatggcaccttccagaagtgggcctctgtggtggtgcccagcggccaggagcagcgctacacctgccacgtgcagcacgagggcctgcccaagcccctgaccctgcgctgggtgtag

SEQ ID NO: 124657 - DNA, 1098 bp, Artificial Sequence
  derived and/or modified sequence
atggctgtgatggcccccaggaccctgctgctgctgctgctgggcgccctggccctgacccagacctgggccggcagccacagcatgagatacttcttcacctctgtgtccaggcctggccgcggggagccccgcttcatcgctgtgggctacgtggatgacacccagtttgtgcgctttgacagtgatgctgccagccagaggatggagccccgggccccctggattgagcaggagggccctgagtactgggaccaggagaccagaaatgtgaaggcccacagccagacagaccgggagagcctgcgcatcgccctgcgctactacaaccagagcgaggccggcagccacaccatccagatgatgtatggctgtgatgtgggcccagatggccgcctgctgcggggctaccagcaggatgcctatgatggcaaggactacatcgccctgaatgaagacctgcgctcctggacagctgctgacatggccgcccagatcacccagaggaagtgggaggccgcccgggtggccgagcagctgcgggcctacctggagggcacctgtgtggagtggctgcggcgctacctggagaatggcaaggagaccctgcagaggacagatgcccccaagacccacatgacccaccacgctgtgtctgaccacgaggccaccctgcgctgctgggccctgtccttctacccagctgagatcaccctgacctggcagagagatggagaggaccagacccaggacacagagctggtggagaccaggcctgctggagatggcaccttccagaagtgggcctctgtggtggtgcccagcggccaggagcagcgctacacctgccacgtgcagcacgagggcctgcccaagcccctgaccctgcgctgggagcccagcagccagcccaccatccccatcgtgggcatcatcgccggcctggtgctgtttggagccatgtttgctggagctgtggtggccgctgtgcgctggaggaggaagagcagtgacaggaagggcggcagctacagccaggccgccagcagtgacagcgcccagggcagtgacatgagcctgacagcctgcaaggtgtag

SEQ ID NO: 124658 - DNA, 1098 bp, Artificial Sequence
  derived and/or modified sequence
atggctgtgatggcccccaggaccctgctgctgctgctgctgggcgccctggccctgacccagacctgggccggcagccacagcatgagatacttcaccacctctgtgtccaggcctggccgcggggagccccgcttcatcgctgtgggctacgtggatgacacccagtttgtgcgctttgacagtgatgctgccagccagaggatggagccccgggccccctggattgagcaggagggccctgagtactgggacctgcagaccagaaatgtgaaggcccagagccagacagaccgggccaacctgggcaccctgcggggctactacaaccagagcgaggccggcagccacaccatccagatgatgtatggctgtgatgtgggcagtgatggccgcttcctgcggggctaccggcaggatgcctatgatggcaaggactacatcgccctgaatgaagacctgcgctcctggacagctgctgacatggccgcccagatcacccagaggaagtgggaggccgcccgggtggccgagcagctgcgggcctacctggagggcacctgtgtggagtggctgcggcgctacctggagaatggcaaggagaccctgcagaggacagatgcccccaagacccacatgacccaccacgctgtgtctgaccacgaggccaccctgcgctgctgggccctgtccttctacccagctgagatcaccctgacctggcagagagatggagaggaccagacccaggacacagagctggtggagaccaggcctgctggagatggcaccttccagaagtgggcctctgtggtggtgcccagcggccaggagcagcgctacacctgccacgtgcagcacgagggcctgcccaagcccctgaccctgcgctgggagcccagcagccagcccaccatccccatcgtgggcatcatcgccggcctggtgctgtttggagctgtgtttgctggagctgtggtggccgctgtgcgctggaggaggaagagcagtgacaggaagggcggcagctacagccaggccgccagcagtgacagcgcccagggcagtgacatgagcctgacagcctgcaaggtgtag

SEQ ID NO: 124659 - DNA, 1029 bp, Artificial Sequence
  derived and/or modified sequence
atggctgtgatggcccccaggaccctgctgctgctgctgctgggcgccctggccctgacccagacctgggccggcagccacagcatgagatacttcaccacctctgtgtccaggcctggccgcggggagccccgcttcatcgctgtgggctacgtggatgacacccagtttgtgcgctttgacagtgatgctgccagccagaggatggagccccgggccccctggattgagcaggagggccctgagtactgggacctgcagaccagaaatgtgaaggcccagagccagacagaccgggccaacctgggcaccctgcggggctactacaaccagagcgaggccggcagccacaccatccagatgatgtatggctgtgatgtgggcagtgatggccgcttcctgcggggctaccggcaggatgcctatgatggcaaggactacatcgccctgaatgaagacctgcgctcctggacagctgctgacatggccgcccagatcacccagaggaagtgggaggccgcccgggtggccgagcagctgcgggcctacctggagggcacctgtgtggagtggctgcggcgctacctggagaatggcaaggagaccctgcagaggacagatgcccccaagacccacatgacccaccacgctgtgtctgaccacgaggccaccctgcgctgctgggccctgtccttctacccagctgagatcaccctgacctggcagagagatggagaggaccagacccaggacacagagctggtggagaccaggcctgctggagatggcaccttccagaagtgggcctctgtggtggtgcccagcggccaggagcagcgctacacctgccacgtgcagcacgagggcctgcccaagcccctgaccctgcgctgggagcccagcagccagcccaccatccccatcgtgggcatcatcgccggcctggtgctgtttggagctgtgtttgctggagctgtggtggccgctgtgcgctggaggaggaagagcagtggaggagtgaagggctag

SEQ ID NO: 124660 - DNA, 465 bp, Artificial Sequence
  derived and/or modified sequence
atggccgtgatggccccccggaccctgctgctgctgctgagcggcgctctcgctctgacacagacgtgggcaggctcacatagcatgagatacttctttacatcagtgagtaggcccggacggggtgaaccaaggttcatcgccgtcggatacgtggacgacacacaattcgtgcgctttgacagcgatgctgctagccagcggatggaacctcgggcaccctggattgagcaggagggcccagagtactgggaccaggagacaaggaatgtgaaagctcagtcccaaacagatcgcgttgatttgggcaccctgcgaggttattataaccagtccgaggccggctcgcacaccattcaaatcatgtatggctgcgacgtgggttctgacgggcggtttctccgagggtaccgtttgcgatccccttctgccagcggacgtcgtcccatgaggcggagctcttag

SEQ ID NO: 124661 - DNA, 900 bp, Artificial Sequence
  derived and/or modified sequence
atggccgtgatggccccccggaccctgctgctgctgctgagcggcgcgctcgcgttaacccagacctgggcagggtctcacagcatgaggtacttttttacttcagtcagcaggcccggacgcggcgagcccagattcatcgccgtgggctacgtcgatgacacacaattcgtacggttcgactctgacgctgctagtcagcgaatggagccacgggccccctggatagagcaagaagggccggagtactgggatcaggagacgcgcaacgtgaaagcccagagtcagactgatcgtgttgacctggggactctcagaggctactacaaccaaagcgaagcaggatctcacaccattcaaatcatgtatggctgtgatgtgggttcagacggcagatttctgcggggttaccgacaagatgcttacgatggcaaggattacatcgcccttaacgaggacctgcgctcctggactgctgccgacatggcagctcagatcacaaagcggaagtgggaggccgcccacgaggctgagcagcttcgcgcttatctggacggaacttgcgtggagtggctgagacggtatctggagaatggaaaggagacgctccaaaggaccgatccacccaagacccacatgacgcatcaccccattagcgatcatgaagccaccctgcggtgctgggcactgggcttctaccctgccgagattaccttgacttggcagcgtgatggagaggaccaaacgcaggatacggaactcgtggaaacaagaccagcaggagatgggactttccaaaagtgggcagcagttgtggtgccttcgggggaagaacagcgatatacatgtcacgtccagcacgaaggcctgcctaaaccactgaccctgaggtgggtgtag

SEQ ID NO: 124662 - DNA, 1116 bp, Artificial Sequence
  derived and/or modified sequence
atggccgtgatggccccccggaccctgctgctgctgctgagcggcgcgctggccctgacccagacttgggcagggagtcattccatgaggtatttttttacatcggtgtcacgccccggcagaggcgaacctaggtttatcgcggttgggtacgtggatgacacgcagttcgtgcggttcgacagcgatgccgcctcacagaggatggaacctagagcgccatggatagaacaggagggccctgagtattgggaccaagagacaaggaatgtaaaggcacaatcacagacagatagggttgatctaggaactctccgcggctattacaaccagagcgaggcagggagtcacactatccagattatgtacggatgtgacgtgggaagcgacgggagatttctccggggctaccggcaagacgcttacgatgggaaggactacatcgccttgaacgaagatctacgcagctggactgccgctgatatggcagcccagatcacaaaaaggaagtgggaggccgcccacgaagcagaacagctgcgggcatacctcgatggcacatgcgttgaatggttacggcgatacctggaaaatggcaaggaaaccctgcaacgtaccgacccccctaagacgcatatgacacatcaccctataagtgatcatgaagccacactccgttgctgggcactcggattctacccagctgagatcacactgacatggcagcgcgacggagaggaccaaacccaagataccgagttggtcgagactcgaccagccggcgatggcactttccagaaatgggccgctgtggtagtaccatcaggcgaggaacaacggtacacctgccacgtacagcacgaaggactacccaagcccctgaccctaagatgggaactctcctcccagccaacaattcccatcgtggggatcatcgcgggcttggtacttcttggagccgtgattacaggagccgtcgtggcggctgtaatgtggaggagaaagagttctgggggcgagggagtaaaggatcggaagggtggaagctatacgcaggcggccagcagcgattccgcacagggtagcgatgtgagcctgacagcatgcaaggtgtag

SEQ ID NO: 124663 - DNA, 1098 bp, Artificial Sequence
  derived and/or modified sequence
atggccgtgatggccccccggaccctgctgctgctgctgagcggcgccctggccctcacccagacctgggccggaagccattccatgaggtatttctttaccagcgtatctcgtcctgggcggggggagcctcggttcatagctgtcgggtacgtagatgatactcagtttgtgcgcttcgacagtgacgccgcctcccagcgaatggaaccccgggcgccctggattgagcaggaaggaccagaatattgggaccaggagactaggaacgtgaaggcgcagagtcagaccgacagagtcgacttgggcactcttcgcgggtactataatcagtcagaggccggctcgcacaccatacagatcatgtatggctgtgacgtcgggtccgatgggcggtttcttaggggctacagacaggacgcttacgacggaaaagattacatagccctgaatgaagacctgagatcttggacagcagcggatatggccgctcagattacaaagcgcaaatgggaggccgcacatgaggctgagcagctgcgcgcatatctggacgggacatgtgtggagtggctaaggcgctatctcgaaaatggaaaagaaactcttcagaggaccgatcccccgaagacccacatgacacaccaccctataagcgatcacgaggcaacactgcgctgttgggccctgggcttctaccccgccgagattaccttgacctggcagcgagatggtgaggaccaaacacaggacacagagctggtggagacccgaccagctggcgacggcaccttccagaaatgggccgccgtggttgtaccctccggagaagaacaaaggtatacatgtcatgtgcagcacgagggactgccgaagcccctgactctgcgctgggaattgtcttctcagcctacaatacctatagtggggattattgctggccttgtgctgctgggggccgtgatcactggggcagtggtggctgccgttatgtggaggaggaagtccagcgaccggaagggcgggagttacacacaagcagcatcctcagacagtgcgcaaggcagtgatgtgtccctgaccgcctgcaaagtttag

SEQ ID NO: 124664 - DNA, 1098 bp, Artificial Sequence
  derived and/or modified sequence
atggccgtgatggccccccggaccctgctgctgctgctgagcggcgctctggccctgacccaaacctgggcaggatcccattctatgaggtacttttttacctcagtgtccaggccaggtcgaggcgaacctagattcatagctgtcggctacgtggatgacacacagttcgtgcgcttcgacagtgatgcggcaagtcagagaatggaaccccgtgctccctggatcgagcaagaggggccagaatactgggaccaagagactcgcaatgtcaaggcccagtcgcagacggatcgagtggatcttggtacacttcggggatactataaccagagcgaggctggatctcatacgattcagattatgtatgggtgcgacgttggctcagacggccgcttccttcgcggatatcgccaggatgcctacgacgggaaggactacatagccttaaacgaagaccttagaagttggacagcagccgacatggccgcccaaataaccaagagaaagtgggaggctgcgcatgaagccgagcaactgagagcttacctggacggcacttgcgtggagtggctgagaaggtacctagagaatggcaaggaaactctacaaaggaccgatcccccaaagacacacatgactcaccatccaatctcagaccatgaagctacccttaggtgctgggcactaggcttctatccagccgagataaccctgacctggcaaagagatggagaggatcagactcaggacacagaacttgtcgaaacgcggccagcaggcgacgggacgtttcagaagtgggccgccgtggtcgttccgagcggggaggagcaaagatacacatgccatgtccaacacgaaggattgccgaagccactgacactgcgatgggaattgtcaagtcagcccaccatccccattgtcggcatcatcgcaggactcgtgttactgggcgctgtgattacaggggctgtggtcgcagccgtcatgtggagacgaaagagctccgataggaagggtggcagctatacacaggccgcctccagtgacagcgcacagggtagcgacgtctctctgacagcttgcaaggtgtag

SEQ ID NO: 124665 - DNA, 900 bp, Artificial Sequence
  derived and/or modified sequence
atggccgtgatggccccccggaccctgctgctgctgctgctgggcgctctggcactgactcagacctgggcaggatctcactctatgcgctatttttttacctctgtgtctcgccccggccgtggtgagccaaggtttatcgcagtggggtatgtcgatgatacccaattcgtgcggtttgatagcgacgcagcatctcagagaatggagccccgggctccttggattgagcaggaaggaccggagtactgggatcaggaaacgaggaacgtgaaggctcactcccagactgatagggaatccctgagaattgcgttgagatattataaccagtcagaagccggatctcatacaatacagatgatgtacgggtgcgacgtgggcccagatgggagactgttgagaggctatcaacaggatgcctacgacggaaaagactacatagcactgaatgaggatctgcgttcatggactgcggctgacatggctgcccagattacccagagaaagtgggaagccgccagggtggccgaacagcttagagcataccttgaaggtacctgcgtcgaatggttgcgtaggtatcttgagaatggaaaggagacccttcagagaaccgacgcccctaagacacacatgactcatcatgcggtctctgaccatgaggccaccctcaggtgctgggctctttccttttaccctgctgaaatcacgttgacttggcagagagatggagaggaccagactcaggacactgaattggtggagactcgacctgctggcgacggcacatttcagaagtgggcctctgttgtagtgccctctggacaggaacaacggtacacctgtcacgtgcaacatgagggattgcctaagccactgacattacggtgggtgtag

SEQ ID NO: 124666 - DNA, 900 bp, Artificial Sequence
  derived and/or modified sequence
atggccgtgatggccccccggaccctgctgctgctgctgctgggcgcgctggcccttacccagacttgggcaggatctcacagcatgaggtatttcaccacgagtgtgtccaggcctggtagaggagaacctcgtttcattgctgtggggtacgttgatgacacccagtttgtgaggtttgactctgacgccgccagccagaggatggagccacgagcaccttggatcgagcaggaaggacccgaatactgggacttgcagacaaggaatgtcaaggcccagtcccagacagatcgcgccaacctcggaactctccgcggatattataaccagtccgaggccggctcacacactatacagatgatgtacggctgcgacgtgggctcagacgggcgctttttgcgtggctaccgacaggatgcgtacgatggcaaggactatattgcactgaacgaagatctgcgatcctggaccgccgccgatatggccgcccagatcacacagaggaagtgggaggcagcaagggtagcagagcagctgcgtgcatacctggagggtacctgtgtggagtggctgaggcgttatctggaaaacggcaaagagactttgcagaggacagacgcccctaaaactcacatgacccaccatgctgtatctgatcatgaggcgacgctaagatgctgggcactttctttctatccagccgagatcacccttacgtggcagcgggatggcgaagatcaaacccaggacaccgaactggtggagactcggcctgctggggatggcacctttcaaaagtgggccagcgtggtagtgccgagcgggcaagaacagcgttatacctgtcacgtgcagcacgagggactccctaaaccactgacgctaagatgggtgtag

SEQ ID NO: 124667 - DNA, 1098 bp, Artificial Sequence
  derived and/or modified sequence
atggccgtgatggccccccggaccctgctgctgctgctgctgggcgccctggcactcacccagacttgggctgggtcccacagtatgaggtacttttttacttctgtgagccgacccgggcgcggcgagccaagatttatagccgtcggatatgtggacgacactcagttcgtcagattcgatagtgacgccgcgtctcagcggatggagccccgcgcaccatggatcgaacaggagggccctgaatattgggaccaagaaactcgtaacgtcaaggctcattcccagaccgatagggaatcgctgcgcatagccctcagatattacaatcagtctgaagcggggagtcacacgattcaaatgatgtatgggtgtgatgtggggcccgatggacggctactaagagggtatcaacaggatgcatacgacggtaaggactacatcgccctgaacgaggacctgcggagttggactgcagccgatatggcagcacagatcactcagagaaagtgggaagctgcccgagtggcagagcagttgagagcatacctggaagggacttgcgtagaatggttgagaagatatctggagaacgggaaggagacactacagcgtaccgatgctcccaagactcacatgacacatcacgcagtctccgatcatgaggccaccctgagatgttgggccctgtccttttaccccgcagagatcacacttacatggcagagggacggcgaggatcaaactcaagataccgagctcgtggagacacgccccgctggggacggcactttccagaaatgggcttcagtggtcgtcccgtctggacaggaacagcgctacacatgtcatgttcaacacgagggccttcctaaacctctgacccttaggtgggagccttccagccaacccactattccaatcgtgggaattattgcaggtttggtgttgttcggcgccatgttcgcaggggctgtcgtggcagctgtcagatggcggagaaaatccagcgaccgaaaaggcggatcatattcccaggccgcgtcctcggacagcgcccaaggatccgacatgagtctcaccgcatgtaaagtgtag

SEQ ID NO: 124668 - DNA, 1098 bp, Artificial Sequence
  derived and/or modified sequence
atggccgtgatggccccccggaccctgctgctgctgctgctgggcgccctggctctgacacagacctgggctggttctcactctatgaggtatttcacaaccagtgtctcaaggcctggacggggcgagcctcggtttatcgccgtaggctatgttgacgacacccagttcgtcaggtttgatagtgatgccgcaagccagcgcatggagcctcgagctccgtggatagagcaggaggggcccgagtattgggatctacagactcgaaacgtgaaggcccagagccaaaccgaccgcgccaacctggggacactaaggggctattacaaccagagcgaggcaggttctcataccatccagatgatgtatggatgcgacgtgggcagtgacggaagatttctcagagggtacaggcaagatgcttacgatgggaaagactacatagcattgaacgaggatcttaggtcctggaccgccgctgacatggccgctcagattacccaaaggaagtgggaggctgcccgggttgcggagcaactccgggcctacctcgagggaacttgtgttgagtggcttaggcggtatctagaaaacggtaaagagacgttgcaacgtacagatgcccccaaaacccacatgactcaccatgccgtatctgaccacgaggctacgctgagatgctgggccctgagtttctatcctgcagaaatcacgctgacgtggcaaagagatggcgaggaccaaacccaggacaccgagctggtggagacccggccagccggggacgggacattccagaagtgggcgtctgtcgtggttccttccggtcaggagcagcgatatacgtgtcatgtgcagcatgagggcctccccaaaccccttaccttgcgatgggagccgtcatcccaacctacgattcctatagtgggtataattgccggtctcgtcctatttggagccgtattcgctggcgccgttgtggccgccgtacggtggcgcagaaagtcatctgatcggaagggaggaagctatagccaggctgctagcagcgacagcgctcagggcagcgatatgtcccttaccgcttgcaaggtgtag

SEQ ID NO: 124669 - DNA, 1029 bp, Artificial Sequence
  derived and/or modified sequence
atggccgtgatggccccccggaccctgctgctgctgctgctgggcgcactggccctgacacagacctgggcagggtcccatagtatgcggtacttcacaacctcagtgagcagaccggggagaggcgaaccaagattcattgccgttggatacgtagacgatacgcagtttgtgcggtttgatagcgatgcagcatcccagcggatggagcctcgggcaccttggatcgagcaggaaggacccgaatattgggatctgcaaactcggaacgtgaaggctcaatcacagaccgatcgagctaacttaggaactttacgtggctactacaaccaaagtgaagccggatcacatacgatacagatgatgtacggctgtgacgtcggcagcgacgggagattcctacgaggataccgccaagatgcttacgatggaaaggattacatcgctctcaatgaggatttgcgatcatggactgctgcagacatggccgcccagataacccagcggaaatgggaggctgcacgcgttgccgaacagctgcgtgcatatctagaggggacttgcgtggaatggttaaggaggtacttggaaaacgggaaggagacgttacagcggacagacgcaccaaaaacccacatgacacatcacgcagtgtctgaccacgaggcaacgcttagatgctgggcactctctttttatcctgctgagattaccttgacatggcaacgagacggtgaagaccaaactcaggacacagagctcgtagagacgcgcccggccggagatgggacttttcagaagtgggcctctgtggttgttccatcagggcaggagcagcggtacacctgtcacgtgcaacacgaggggttacctaagccattgaccctgcggtgggaaccgtcatcacaaccaaccatccctatcgtgggtatcatagcaggtcttgtgctgtttggggcagtgttcgcgggtgctgtcgtggccgctgtaagatggcgcaggaaaagttcgggaggagtaaagggatag

SEQ ID NO: 124670 - DNA, 1098 bp, Artificial Sequence
  derived and/or modified sequence
atggccgtgatggccccccggaccctgctgctgctgctgctgggcgccttggctctgactcagacttgggcgggctcacattcgatgcggtacttcacaaccagcgtttctcggcccggtcggggcgagcccaggttcatcgcagtgggttacgttgatgatactcagtttgtcagattcgactctgatgccgcctctcaacggatggaacctagagctccttggatcgagcaagagggtccagaatattgggatttgcaaacccgcaacgtgaaggcccagagtcagacggatcgcgccaacctggggacccttagaggctactacaaccaaagcgaagctggtagccataccattcagatgatgtatgggtgtgacgtcggtagtgacggtcgttttcttaggggctacagacaggacgcttacgatggaaaagattatatcgcactgaatgaggatctgagatcttggaccgctgcagacatggccgcacagatcacacagcgaaaatgggaagctgcccgggtcgccgaacagctcagagcttacctcgaaggaacgtgtgtggagtggctgagacgctacctggaaaatggcaaggagactttacagaggacagacgctcctaagacccatatgactcaccacgctgtctctgaccatgaggctaccctaaggtgttgggccctgtcattctatcccgccgagattactctcacctggcagagagatggcgaggatcaaacccaggacaccgagttggtggaaacaaggcctgcaggcgacggcaccttccagaagtgggcctccgtcgttgtgccctcaggccaggaacagagatatacatgtcatgtgcagcacgagggtcttcctaaaccgctgaccctcaggtgggaaccatcaagccagccaacgattcctatcgtgggcatcatagctgggctggtcctttttggggcagtgttcgcgggcgcagttgtggcagctgtcagatggcgaaggaaatcgtcagatcggaagggagggagctactcccaagccgcttcatcagactctgcccaaggttccgatatgtcactgaccgcgtgcaaagtctag

SEQ ID NO: 124671 - DNA, 1098 bp, Artificial Sequence
  derived and/or modified sequence
atggccgtgatggccccccggaccctgctgctgctgctgctgggcgcgttggcactaacgcagacctgggctgggagtcactccatgagatacttcttcaccagtgtctcacgcccaggacgcggagaaccacgcttcatcgcagttggatacgtggatgatacccaattcgtgcggttcgactcggatgcagcttctcagcgaatggaaccgcgagctccttggattgagcaggagggacctgagtactgggatcaggaaacccggaatgtcaaggcacactcccagactgatagggagtctctcaggatcgcactccgctactacaaccaaagcgaagcgggctcccatacaattcagatgatgtacgggtgcgacgtcggaccagatggaagactccttcgtggctatcaacaagacgcgtacgatggaaaggattacatcgccctcaacgaggatctgcgatcttggacagcagccgatatggccgcccagatcacccagagaaagtgggaggctgctcgtgtggcggagcagctgagagcgtacctggagggcacatgtgtggaatggcttcggagatatctggagaacgggaaagagaccctccagagaactgatgcccctaagacacacatgactcatcatgccgtctctgatcatgaggctactctgcgttgttgggcgcttagtttttaccctgcagagattactcttacctggcaacgcgacggggaagaccagacacaggacactgaactggttgagacccggcctgccggcgacggcacatttcagaagtgggcttccgtagtggtgccttcaggccaggagcagaggtatacctgtcatgtacaacatgagggtttacccaaaccacttaccctgcggtgggagccgagttctcagccaaccatccccatcgttggaatcattgccgggctggttttatttggtgcaatgttcgctggcgccgtcgttgctgccgtgcgttggagacggaagtcatccgaccggaagggcgggtcctatagccaggccgcgtctagcgattccgcgcaggggagcgatatgtcactcacagcgtgtaaagtgtag

SEQ ID NO: 124672 - DNA, 465 bp, Artificial Sequence
  derived and/or modified sequence
atggccgtgatggccccacgtactctgttattgctgctgagcggggctcttgccctgacccaaacatgggccggaagtcattcaatgagatacttcttcacgtccgtcagccgacccggacgaggtgaaccgcgttttatcgccgtcggatacgtggacgacactcagttcgtgcggttcgacagtgatgctgcctcccagaggatggagccaagagccccatggatcgaacaggagggcccagagtattgggatcaggagacccggaatgttaaagcccagtcccaaaccgatagggtagacctgggcacgctgaggggctattataaccagtctgaggccggatctcataccatccagatcatgtacggctgcgacgtggggagtgacggcagatttttgcggggttatcggcttaggtcaccttccgccagtggcaggcggccaatgagaaggtctagctag

SEQ ID NO: 124673 - DNA, 900 bp, Artificial Sequence
  derived and/or modified sequence
atggcggtgatggcacctaggacgttgctgctattgttatctggggctctggcactcactcaaacatgggcaggatcacacagcatgcgctatttcttcacttccgtgtctcggcctgggcgaggagagccacgttttatcgccgttggatacgtggatgatacacagtttgtgagatttgacagtgacgcagcttcccaacgaatggaacccagggcaccctggatcgagcaggagggacctgaatactgggaccaggagacaaggaatgtaaaggctcagagccagaccgatcgcgtggacttggggaccctgaggggttattacaaccagagcgaggcagggagccataccatccagatcatgtacggatgtgacgtgggaagcgacggcagattcttgaggggctaccggcaggatgcttacgatggcaaggactatatcgccctcaatgaagatcttagatcctggaccgctgctgatatggctgcccaaataaccaaacgcaaatgggaggccgctcacgaggccgaacagctgcgggcatatttagatggcacttgcgtcgagtggttgcggagatacctagagaatggtaaagagacactacaaagaactgacccccctaaaacacatatgactcatcatccgatttcagatcacgaggctaccctgagatgctgggctctcgggttttaccctgccgaaatcacactgacctggcagcgcgacggagaagaccagactcaggacactgaattggtggagacaaggcctgcaggtgacggtaccttccagaagtgggccgctgtggtcgtgccttctggagaagaacagcgatatacctgtcatgttcagcatgaaggcttgccaaaacctcttaccctgcggtgggtgtag

SEQ ID NO: 124674 - DNA, 1116 bp, Artificial Sequence
  derived and/or modified sequence
atggcagtgatggccccacgaactctgctgctgttattatctggggctcttgcactgacacagacttgggcaggaagccattccatgagatatttttttacgtcagtgtctcggccaggacgaggtgaaccaaggttcattgccgttgggtatgtagatgacacgcagttcgtgagatttgactcagatgcggcttctcagaggatggagccgagggctccttggatagagcaagagggcccagaatattgggaccaggaaacccggaatgtgaaagcgcagagccagacagatagagtggacttagggaccctgcggggatactataatcagagtgaggccggatcccacaccatacagattatgtatgggtgcgatgtgggctcggacggtcgcttccttcgaggatacagacaggacgcttatgatggcaaggactacatcgctctgaatgaagacctgcgcagttggaccgccgcagacatggcggctcagattacaaaacggaagtgggaggccgctcacgaggcagagcagctgcgcgcatacctggacggaacgtgtgttgagtggctgcgtaggtacctggagaacggcaaggaaaccttgcagcggaccgacccacccaagactcatatgacacaccaccctattagcgaccacgaagccaccctcaggtgctgggcactgggattctaccctgcagagatcacgctcacatggcaaagggacggggaggatcagactcaggataccgaacttgtggagacaagacctgccggagacggcacatttcagaaatgggcagcggttgtcgtccccagtggagaggaacagcggtacacttgccacgtgcagcacgagggcttgcccaagccactgacattacgctgggaactgtcctcgcagccaacgattccaatagtcgggataatcgccggtctggtcctcttaggagccgtgattaccggggcagttgtcgccgcagtcatgtggagaaggaaaagctcggggggagagggagtgaaagatcggaagggcggatcctatacgcaggcagcgtccagcgacagtgcacagggtagcgacgtgtctcttaccgcttgtaaagtttag

SEQ ID NO: 124675 - DNA, 1098 bp, Artificial Sequence
  derived and/or modified sequence
atggccgtgatggccccaaggacccttctcctgcttctgtccggggctcttgcgctgacgcagacatgggctggatctcacagcatgcggtatttttttacttccgtctccaggcctggacgtggcgaacctagattcattgcagttgggtatgtagacgatacacagttcgtccggtttgattctgatgcagctagccagagaatggaaccacgcgctccttggattgaacaagagggcccagagtattgggaccaagaaacaagaaacgtcaaagcccaaagccaaactgaccgagtcgacctcgggaccttgcgtggctactacaaccagtccgaggcaggatctcacacgatacaaatcatgtacggctgcgacgtgggcagtgacggcaggtttctgcgtgggtacaggcaggatgcctacgatggcaaggattacattgccctaaacgaggatctgagatcatggaccgcagctgatatggcagcccagatcactaaacgcaagtgggaggctgcccacgaggcagagcaactacgagcctacctggatgggacatgcgtcgagtggttacggcgatatctcgagaacggaaaggagacactgcaaagaactgacccccctaagacccacatgactcatcacccgattagtgaccacgaagcaaccctccgctgctgggctctgggtttttatccagctgagatcactctgacctggcagcgtgatggggaggaccaaactcaggataccgaactagtcgagacccgacctgccggagatggcacatttcagaagtgggctgccgtcgtcgtcccttcgggggaggagcagcggtatacatgccacgtgcagcatgaagggttacctaagcccctgacactacggtgggagctgagctcacagccaacgattcccatagtgggcattatagctggactcgtgctgctcggcgcagtgattacaggggctgttgtggccgcagtgatgtggagaaggaagtcttccgaccgcaagggcggaagctatactcaggccgcaagcagcgactccgctcaggggtctgacgttagcctgaccgcctgtaaggtatag

SEQ ID NO: 124676 - DNA, 1098 bp, Artificial Sequence
  derived and/or modified sequence
atggccgttatggcccctcgtacactgctgttactgcttagtggagctctcgcccttacccagacatgggcaggctctcactccatgaggtacttttttacatcagtgtccagaccaggtcgcggtgaacctcgcttcattgccgtcgggtacgtcgacgatactcagtttgtcaggtttgattcggacgctgcttcccagcgaatggagcctagagcgccatggatcgagcaggagggacccgagtattgggatcaggaaaccaggaacgtcaaggcacagtcccaaacagaccgcgtggatctgggaaccttaaggggatattacaaccaatcagaagctgggtctcacaccatccaaattatgtatggatgcgatgtcggctcagacggaagattcctcagaggctaccgccaggatgcctacgatggcaaagattatatcgctctcaatgaggatctgcggtcctggacggctgccgatatggccgctcagatcacaaagcgcaagtgggaagcagcccatgaggctgagcagttaagggcgtacctcgatggaacctgcgtggaatggcttaggcgctatctggaaaacggcaaggaaactctgcagcgaactgaccctccaaagacccacatgacacatcatccaatttcggatcatgaggcaactctcagatgctgggcactcgggttctatccagctgagataacgcttacatggcagagggacggcgaagaccagacccaagacacagagctggtagagacacggccagcaggagacggtacatttcagaaatgggccgctgtggtggttcccagcggcgaggagcagagatatacctgccacgtgcagcatgaagggctgcctaagcctctcaccttgagatgggagctctcctcccaacctacaattcccatcgtaggaattattgccggtcttgtcctgctgggagccgttataacaggggcagtggtggcggctgttatgtggcgcaggaagagctcagatcgaaagggtggttcgtacacccaagcagcgtccagcgactcagctcagggcagcgatgtcagcctgacagcctgtaaggtatag

SEQ ID NO: 124677 - DNA, 900 bp, Artificial Sequence
  derived and/or modified sequence
atggcagtcatggcaccccgtaccctcttattgctgctgctgggggctctagctttgacccagacatgggcgggttcacacagcatgcgttacttcttcaccagcgtttcccgcccaggccgaggcgaacctaggtttatcgccgtgggctatgtggatgatactcagttcgtcagattcgacagtgatgcagcatcccagcggatggagccccgagccccttggattgaacaggaagggccagagtactgggatcaagagacacgcaatgtgaaggcacattcacagacagatcgcgaatcattgcgcattgctttacgctactacaatcaatctgaggcagggtcacataccattcagatgatgtacgggtgcgatgtaggccctgacggacggctgctccggggttatcagcaagacgcttatgatggtaaagactacattgccctaaatgaagatctgcggagttggacagccgcagacatggcagcccaaatcacacagcgcaagtgggaagcagcacgcgtggcggagcagctccgcgcatacctcgaaggaacatgcgtcgagtggctacggcgttacctagaaaatgggaaagagacattacagcgaacagacgcacctaaaactcacatgacacaccacgccgtgagcgaccacgaggcaactctgcgatgctgggccctgagtttttacccagccgagataacactgacctggcaacgggacggtgaagaccaaacccaggatacagaactcgtcgaaacccgacctgctggcgacggaacctttcagaagtgggcttccgttgtggtgccgagtggacaggaacagcgatacacgtgtcatgttcagcatgaagggctgcccaagccactgacgctgaggtgggtctag

SEQ ID NO: 124678 - DNA, 900 bp, Artificial Sequence
  derived and/or modified sequence
atggcagtgatggcccctagaactctgctcctgttgctgttaggcgcactggccttaacacagacctgggccggttctcatagtatgagatattttacaacctcagtgagccgcccaggacggggagagcctcggtttatcgccgtgggctatgttgacgacacgcagttcgtcaggtttgacagcgacgctgctagccagcggatggaaccacgggctccttggattgaacaggaaggtccagagtactgggacctgcagactcggaacgtgaaggcccaatctcagacagaccgtgccaacctcgggactttgaggggttattataatcagtcagaggccggtagccacaccatccagatgatgtacggctgcgatgtcgggtccgacggccgttttctgcgcggatatcggcaggacgcatatgatggaaaagattatattgctctcaacgaggatctgcggtcgtggaccgccgcagatatggcagctcaaattacccagcgcaagtgggaagccgcacgagtggccgaacagctgcgtgcctatctagagggaacctgcgtggaatggctcagaaggtacctggagaacggcaaagagactctgcagaggacagatgccccaaaaactcacatgactcaccacgcagtgtctgaccatgaggccaccctgagatgctgggcactgtcattctatccagccgagatcaccctaacctggcagcgggatggggaagaccagacacaggatactgagttggtggagacacgcccagctggcgacggtactttccagaaatgggcatcggtggtagtgccaagcgggcaggaacagcgctacacatgccacgtgcaacacgagggacttcccaagcccctcaccctgcgctgggtgtag

SEQ ID NO: 124679 - DNA, 1098 bp, Artificial Sequence
  derived and/or modified sequence
atggccgtcatggcccctagaacattgctgttacttctgcttggggctctagccctgacacagacttgggcaggcagccacagtatgcgttatttttttacaagtgtgtcgcggcctggacggggagagcctcgatttattgcagtggggtatgtcgacgatactcagtttgtgcgcttcgatagcgacgcagcctcccagcggatggagccaagggctccttggattgagcaggaagggccagagtactgggaccaggaaacgcgaaatgtgaaggcacactcccagaccgacagagagtcactgcgcatagctctcagatactacaatcagagtgaggccggatctcacactatccaaatgatgtatggatgcgacgtgggtccagacggacggctcctccgcggatatcagcaagatgcctatgatgggaaggattatatcgcgctgaacgaagaccttagatcttggaccgcagctgacatggctgcccaaatcacgcagaggaagtgggaggctgcaagagtggccgagcagctgcgggcataccttgaagggacctgtgtcgagtggctgagaagatatctcgaaaacgggaaagaaaccctgcagaggaccgatgcaccaaagacccacatgacccatcacgccgtgtctgatcacgaagccacactcaggtgctgggcactgagcttctatcccgctgagatcacccttacctggcaaagagacggtgaggaccagacacaagataccgagctggtggaaacacgaccagccggagacggcacatttcagaagtgggcaagtgtagtcgtaccaagcgggcaggagcagcgttacacttgccacgtacagcacgaggggttacccaagccacttactctgaggtgggaaccgagttcacaacccaccatacccatcgttgggatcatagccggactggttttgtttggggcaatgttcgcgggagccgtggtcgctgccgtgagatggagacgtaagagttctgacaggaagggcggtagctattcacaggccgcaagctctgattccgcacagggctccgatatgtcgctgacggcctgtaaggtctag

SEQ ID NO: 124680 - DNA, 1098 bp, Artificial Sequence
  derived and/or modified sequence
atggcagtcatggcacccagaacactactgctgctcctactgggggcactcgcgttgactcaaacgtgggccggatcccacagcatgcggtactttacgactagtgttagtaggcctggcagaggtgagcctcgattcatagctgtgggctacgtagacgatacccaatttgtccgtttcgattcagatgcagcctctcagaggatggaaccgagagctccctggatcgagcaggagggacctgagtattgggacctgcagacacgtaacgtgaaggcacagtcccagaccgatcgtgcgaaccttgggaccctgcggggatattacaatcaatccgaggctggctcacataccattcagatgatgtatggctgcgatgtgggaagtgatgggaggtttctgcgcggttatagacaggacgcttacgatggaaaggattatattgccctcaacgaagatctgagaagctggaccgcggctgacatggctgcccagattacccagcggaaatgggaagctgcacgggtagctgagcaactgcgggcttatctggaaggcacctgcgtagaatggcttcggcgatatctcgagaacggcaaggagaccttgcagcgaaccgatgcacctaagacacacatgacccaccatgctgtctccgaccacgaggccaccttacgctgttgggcattgtctttttatcctgcagagattactttgacttggcagagagacggcgaggaccaaacacaggatacagagctcgtggagaccaggccagcgggtgatggaacattccagaagtgggcctccgtggttgtacctagcggacaagagcagcgctacacttgtcacgtgcaacacgaagggttgcccaagccgctgacccttcgctgggagcccagttcacagcctaccattcctattgtgggaatcattgctgggctagtactgtttggcgctgtgtttgctggcgctgtggtggccgcagtgcgttggcggaggaaatctagcgataggaaaggtggatcatactctcaggcggcaagttccgattcggcgcaggggagtgacatgtccctcacagcgtgcaaggtctag

SEQ ID NO: 124681 - DNA, 1029 bp, Artificial Sequence
  derived and/or modified sequence
atggctgtgatggcaccgaggacactgctcctcctactgctaggggctcttgctctgacgcaaacttgggccggttcacatagtatgcgctattttaccacaagcgtgtcacgccctggaagaggtgagcctagattcatcgcggttggatacgtggacgacacacaattcgtgcgctttgattcagacgcagcttcacagcgaatggaacctcgtgccccttggattgagcaggagggtcccgagtactgggacctccaaacacgtaacgtaaaggcacagtctcagacggatcgcgcaaacttgggcactctgagggggtactacaatcaatccgaagcgggaagtcatacaattcagatgatgtatggctgtgacgtcggatcagatggacggttcctgcgcggataccgacaggatgcatacgatggcaaagattacatcgcacttaacgaggatctaagaagctggacagcagctgatatggctgctcagataacacagagaaaatgggaagctgccagagtcgctgagcaactcagggcttacctagaaggaacatgcgtggagtggcttcgtcggtacctggagaacggcaaggaaaccctgcaacgcaccgatgctcccaagactcatatgacacaccacgccgtctcagaccatgaggctactttgagatgctgggccctgagcttttatccagctgagatcaccctgacctggcaacgggacggcgaagaccagacccaggacaccgaactcgtggaaacgcggccagcgggagacgggacatttcagaagtgggcctccgtggtggtgccctcgggccaggagcaaagatacacatgtcacgttcaacacgaaggattacccaagcctctcactctccgatgggaacccagcagccagcctacaatccccatcgttggcataatagcaggcctggtgctgttcggggctgtgtttgcaggagccgtcgtggccgcagtaagatggcgtcggaagtctagcggtggagtgaagggatag

SEQ ID NO: 124682 - DNA, 1098 bp, Artificial Sequence
  derived and/or modified sequence
atggcagttatggctcctcgtaccttactactgctgctgttaggcgctctcgccctcacacagacatgggcagggtcacacagtatgcgatacttcaccacgagcgtgagccggcctggcaggggtgaaccgagattcatcgcagtgggctatgtcgacgatacccagtttgtgaggtttgattctgatgctgctagtcagagaatggagcccagagcaccttggattgagcaggaaggtcctgaatattgggacctgcaaacgcgtaatgtgaaggctcagtctcagaccgaccgggctaacctcggaacacttagaggctactataatcaatctgaagccggtagccacacaatccagatgatgtatggctgcgatgtaggatcagatggtagattcctgagggggtaccggcaggatgcctatgatggaaaagattatatcgccctcaacgaagatttgaggagctggacggctgccgacatggccgctcagatcacccagcggaagtgggaggccgctagggtggccgaacaacttcgggcttatctggagggaacgtgcgtcgaatggctgagacggtatctggagaacggtaaggaaacgctgcagcggaccgacgctcctaaaactcatatgacccaccacgccgtttccgaccacgaggctacactgaggtgctgggcactgagtttttaccctgcggagataaccctcacctggcagagagatggagaagatcagacccaggatactgaattggttgagaccagacccgcaggggacggtacgttccagaaatgggcttccgtggtggtaccttccggccaggaacagcgctacacttgtcacgttcaacacgagggtctgccaaaaccacttacacttagatgggagccctcctcccagccgaccatacccatcgttggaattatcgccggactggtgctcttcggagccgtgtttgcgggagccgtcgtggcggctgtgagatggcgtagaaagagctccgacaggaagggcggttcttactctcaggcagcctcaagtgactcggcgcaaggctcagatatgagcctcactgcctgcaaagtctag

SEQ ID NO: 124683 - DNA, 1098 bp, Artificial Sequence
  derived and/or modified sequence
atggccgtgatggcccctagaacactgctattactgttgctgggcgcactcgcccttactcagacttgggcagggtcccactcaatgcggtatttcttcacctctgtgtcacgcccaggccgaggcgaaccacggttcatcgctgtgggctacgtggacgacactcagtttgtccgctttgactccgatgccgctagccagagaatggaacctagagccccatggattgagcaagagggcccagaatattgggaccaagagacacgtaatgtgaaagcccactctcaaacagacagagagtccctccggatcgctttacgctactacaatcagtcagaagctggaagccataccattcaaatgatgtatggatgtgacgtggggccagacgggagactgctgagaggttatcagcaagatgcctacgatggaaaagactatatcgcactgaatgaagatctacgatcctggaccgctgcggatatggctgctcagattacacaaagaaaatgggaagccgcacgggtagcagaacagctgcgggcatacctcgagggtacctgtgtcgaatggctgagacgctacctggagaacgggaaggagacgttgcagcgcacagacgctcctaaaacccacatgacccatcatgcagtctcagatcacgaggccactctcaggtgttgggctttgtcattttacccggctgaaatcacgctgacatggcagcgggatggcgaagatcagacccaggacacagagttggtggagacaagaccagcaggcgatggtaccttccagaaatgggccagcgtcgtggtaccatctggccaagagcagaggtacacgtgccacgtacaacatgagggcctgcccaaaccactgaccctcagatgggagccaagcagtcagcctaccattcctatagtcggtataattgccggactcgtgcttttcggagccatgtttgcaggtgctgtcgtcgctgcagtgagatggcgtaggaagagttccgacagaaaggggggatcctactcgcaggcggcaagcagcgacagtgcacaagggtctgatatgtccctaaccgcctgtaaggtctag

SEQ ID NO: 124684 - DNA, 1636 bp, Artificial Sequence
  derived and/or modified sequence
gagaagccaatcagtgtcgtcgcggtcgctgttctaaagcccgcacgcacccaccgggactcagattctccccagacgccgaggatggccgtcatggcgccccgaaccctcctcctgctactctcgggggccctggccctgacccagacctgggcgggctcccactccatgaggtatttcttcacatccgtgtcccggcccggccgcggggagccccgcttcatcgccgtgggctacgtggacgacacgcagttcgtgcggttcgacagcgacgccgcgagccagaggatggagccgcgggcgccgtggatagagcaggaggggccggagtattgggaccaggagacacggaatgtgaaggcccagtcacagactgaccgagtggacctggggaccctgcgcggctactacaaccagagcgaggccggttctcacaccatccagataatgtatggctgcgacgtggggtcggacgggcgcttcctccgcgggtaccggcaggacgcctacgacggcaaggattacatcgccctgaacgaggacctgcgctcttggaccgcggcggacatggcggctcagatcaccaagcgcaagtgggaggcggcccatgaggcggagcagttgagagcctacctggatggcacgtgcgtggagtggctccgcagatacctggagaacgggaaggagacgctgcagcgcacggacccccccaagacacatatgacccaccaccccatctctgaccatgaggccaccctgaggtgctgggccctgggcttctaccctgcggagatcacactgacctggcagcgggatggggaggaccagacccaggacacggagctcgtggagaccaggcctgcaggggatggaaccttccagaagtgggcggctgtggtggtgccttctggagaggagcagagatacacctgccatgtgcagcatgagggtctgcccaagcccctcaccctgagatgggagctgtcttcccagcccaccatccccatcgtgggcatcattgctggcctggttctccttggagctgtgatcactggagctgtggtcgctgccgtgatgtggaggaggaagagctcagatagaaaaggagggagttacactcaggctgcaagcagtgacagtgcccagggctctgatgtgtccctcacagcttgtaaagtgtgagacagctgccttgtgtgggactgagaggcaagagttgttcctgcccttccctttgtgacttgaagaaccctgactttgtttctgcaaaggcacctgcatgtgtctgtgttcgtgtaggcataatgtgaggaggtggggagaccaccccacccccatgtccaccatgaccctcttcccacgctgacctgtgctccctccccaatcatctttcctgttccagagaggtggggctgaggtgtctccatctctgtctcaacttcatggtgcactgagctgtaacttcttccttccctattaaaattagaaccttagtataaatttactttctcaaattcttgccatgagaggttgatgagttaattaaaggagaagattcctaaaatttgagagacaaaataaatggaagacatgagaaccttccagagtccaaaaaaaaaaaaaaaaaaaaaaaaaa

SEQ ID NO: 124685 - protein, 366 aa, Artificial Sequence
  derived and/or modified sequence
MRVMAPRALLLLLSGGLALTETWACSHSMRYFDTAVSRPGRGEPRFISVGYVDDTQFVRFDSDAASPRGEPRAPWVEQEGPEYWDRETQKYKRQAQADRVSLRNLRGYYNQSEDGSHTLQRMSGCDLGPDGRLLRGYDQSAYDGKDYIALNEDLRSWTAADTAAQITQRKLEAARAAEQLRAYLEGTCVEWLRRYLENGKETLQRAEPPKTHVTHHPLSDHEATLRCWALGFYPAEITLTWQRDGEDQTQDTELVETRPAGDGTFQKWAAVVVPSGQEQRYTCHMQHEGLQEPLTLSWEPSSQPTIPIMGIVAGLAVLVVLAVLGAVVTAMMCRRKSSGGKGGSCSQAACSNSAQGSDESLITCKA

SEQ ID NO: 124686 - protein, 131 aa, Artificial Sequence
  derived and/or modified sequence
MRVMAPRALLLLLSGGLALTETWACSHSMRYFDTAVSRPGRGEPRFISVGYVDDTQFVRFDSDAASPRGEPRAPWVEQEGPEYWDRETQKYKRQAQADRVSLRNLRGYYNQSEDEDVWLRPGARRAPPPRV

SEQ ID NO: 124687 - protein, 372 aa, Artificial Sequence
  derived and/or modified sequence
MRVMAPRALLLLLSGGLALTETWACSHSMRYFDTAVSRPGRGEPRFISVGYVDDTQFVRFDSDAASPRGEPRAPWVEQEGPEYWDRETQKYKRQAQADRVSLRNLRGYYNQSEDGSHTLQRMSGCDLGPDGRLLRGYDQSAYDGKDYIALNEDLRSWTAADTAAQITQRKLEAARAAEQLRAYLEGTCVEWLRRYLENGKETLQRAEPPKTHVTHHPLSDHEATLRCWALGFYPAEITLTWQRDGEDQTQDTELVETRPAGDGTFQKWAAVVVPSGQEQRYTCHMQHEGLQEPLTLSWEPSSQPTIPIMGIVAGLAVLVVLAVLGAVVTAMMCRRKSSGHFLPTGGKGGSCSQAACSNSAQGSDESLITCKA

SEQ ID NO: 124688 - protein, 397 aa, Artificial Sequence
  derived and/or modified sequence
MRVMAPRALLLLLSGGLALTETWACSHSMRYFDTAVSRPGRGEPRFISVGYVDDTQFVRFDSDAASPRGEPRAPWVEQEGPEYWDRETQKYKRQAQADRVSLRNLRGYYNQSEDGSHTLQRMSGCDLGPDGRLLRGYDQSAYDGKDYIALNEDLRSWTAADTAAQITQRKLEAARAAEQLRAYLEGTCVEWLRRYLENGKETLQRAEPPKTHVTHHPLSDHEATLRCWALGFYPAEITLTWQRDGEDQTQDTELVETRPAGDGTFQKWAAVVVPSGQEQRYTCHMQHEGLQEPLTLSWEPSSQPTIPIMGIVAGLAVLVVLAVLGAVVTAMMCRRKSSGREGVKSGVWAATVPRALMSLSSLVKPETAACVGLRCRISSHLSFVTSRASGISFCKGT

SEQ ID NO: 124689 - protein, 261 aa, Artificial Sequence
  derived and/or modified sequence
  misc_feature (1)..(1): Xaa can be any naturally occurring amino acid
XRVMAPRALLLLLSGGLALTETWACSHSMRYFDTAVSRPGRGEPRFISVGYVDDTQFVRFDSDAASPRGEPRAPWVEQEGPEYWDRETQKYKRQAQADRVSLRNLRGYYNQSEDGSHTLQRMSGCDLGPDGRLLRGYDQSAYDGKDYIALNEDLRSWTAADTAAQITQRKLEAARAAEQLRAYLEGTCVEWLRRYLENGKETLQRAEPPKTHVTHHPLSDHEASRRWNLPEVGSCGGAFWTRAEIHVPYAARGAARAPHPE

SEQ ID NO: 124690 - protein, 224 aa, Artificial Sequence
  derived and/or modified sequence
MRVMAPRALLLLLSGGLALTETWACSHSMRYFDTAVSRPGRGEPRFISVGYVDDTQFVRFDSDAASPRGEPRAPWVEQEGPEYWDRETQKYKRQAQADRVSLRNLRGYYNQSEDGSHTLQRMSGCDLGPDGRLLRGYDQSAYDGKDYIALNEDLRSWTAADTAAQITQRKLEAARAAEQLRAYLEGTCVEWLRRYLENGKETLQRAGQDQKSLFLPQRLELSNE

SEQ ID NO: 124691 - protein, 131 aa, Artificial Sequence
  derived and/or modified sequence
MRVMAPRTLILLLSGALALTETWACSHSMRYFYTAVSRPGRGEPRFIAVGYVDDTQFVQFDSDAASPRGEPRAPWVEQEGPEYWDRETQKYKRQAQTDRVNLRKLRGYYNQSEAEDVWLRPGARRAPPPRV

SEQ ID NO: 124692 - protein, 131 aa, Artificial Sequence
  derived and/or modified sequence
MRVMAPRTLILLLSGALALTETWACSHSMRYFDTAVSRPGRGEPRFISVGYVDDTQFVRFDSDAASPRGEPRAPWVEQEGPEYWDRETQKYKRQAQADRVNLRKLRGYYNQSEDVDVWLRPGARRAPPPRV

SEQ ID NO: 124693 - protein, 131 aa, Artificial Sequence
  derived and/or modified sequence
MRVMAPRTLILLLSGALALTETWACSHSMRYFYTAVSRPGRGEPRFIAVGYVDDTQFVRFDSDAASPRGEPRAPWVEQEGPEYWDRETQKYKRQAQTDRVSLRNLRGYYNQSEAVDVWLRPGARRAPPPRV

SEQ ID NO: 124694 - protein, 131 aa, Artificial Sequence
  derived and/or modified sequence
MRVMAPRTLILLLSGALALTETWAGSHSMRYFYTAVSRPGRGEPHFIAVGYVDDTQFVRFDSDAASPRGEPRAPWVEQEGPEYWDRETQKYKRQAQTDRVSLRNLRGYYNQSEAEDVWLRRGARRAPPPRV

SEQ ID NO: 124695 - protein, 403 aa, Artificial Sequence
  derived and/or modified sequence
MRVMAPRALLLLLSGGLALTETWACECGVGREAASAERSEGPPGEPRREVGRAGLSPSSPPGSHSMRYFDTAVSRPGRGEPRFISVGYVDDTQFVRFDSDAASPRGEPRAPWVEQEGPEYWDRETQKYKRQAQADRVSLRNLRGYYNQSEDGSHTLQRMSGCDLGPDGRLLRGYDQSAYDGKDYIALNEDLRSWTAADTAAQITQRKLEAARAAEQLRAYLEGTCVEWLRRYLENGKETLQRAEPPKTHVTHHPLSDHEATLRCWALGFYPAEITLTWQRDGEDQTQDTELVETRPAGDGTFQKWAAVVVPSGQEQRYTCHMQHEGLQEPLTLSWEPSSQPTIPIMGIVAGLAVLVVLAVLGAVVTAMMCRRKSSGGKGGSCSQAACSNSAQGSDESLITCKA

SEQ ID NO: 124696 - DNA, 1101 bp, Artificial Sequence
  derived and/or modified sequence
atgagagtgatggcccccagagccctgctgctgctgctgagcggcggcctggccctgaccgagacctgggcctgcagccacagcatgagatacttcgacaccgccgtgagcagacccggcagaggcgagcccagattcatcagcgtgggctacgtggacgacacccagttcgtgagattcgacagcgacgccgccagccccagaggcgagcccagagccccctgggtggagcaggagggccccgagtactgggacagagagacccagaagtacaagagacaggcccaggccgacagagtgagcctgagaaacctgagaggctactacaaccagagcgaggacggcagccacaccctgcagagaatgagcggctgcgacctgggccccgacggcagactgctgagaggctacgaccagagcgcctacgacggcaaggactacatcgccctgaacgaggacctgagaagctggaccgccgccgacaccgccgcccagatcacccagagaaagctggaggccgccagagccgccgagcagctgagagcctacctggagggcacctgcgtggagtggctgagaagatacctggagaacggcaaggagaccctgcagagagccgagccccccaagacccacgtgacccaccaccccctgagcgaccacgaggccaccctgagatgctgggccctgggcttctaccccgccgagatcaccctgacctggcagagagacggcgaggaccagacccaggacaccgagctggtggagaccagacccgccggcgacggcaccttccagaagtgggccgccgtggtggtgcccagcggccaggagcagagatacacctgccacatgcagcacgagggcctgcaggagcccctgaccctgagctgggagcccagcagccagcccaccatccccatcatgggcatcgtggccggcctggccgtgctggtggtgctggccgtgctgggcgccgtggtgaccgccatgatgtgcagaagaaagagcagcggcggcaagggcggcagctgcagccaggccgcctgcagcaacagcgcccagggcagcgacgagagcctgatcacctgcaaggcctag

SEQ ID NO: 124697 - DNA, 396 bp, Artificial Sequence
  derived and/or modified sequence
atgagagtgatggcccccagagccctgctgctgctgctgagcggcggcctggccctgaccgagacctgggcctgcagccacagcatgagatacttcgacaccgccgtgagcagacccggcagaggcgagcccagattcatcagcgtgggctacgtggacgacacccagttcgtgagattcgacagcgacgccgccagccccagaggcgagcccagagccccctgggtggagcaggagggccccgagtactgggacagagagacccagaagtacaagagacaggcccaggccgacagagtgagcctgagaaacctgagaggctactacaaccagagcgaggacgaggacgtgtggctgagacccggcgccagaagagcccccccccccagagtgtag

SEQ ID NO: 124698 - DNA, 1119 bp, Artificial Sequence
  derived and/or modified sequence
atgagagtgatggcccccagagccctgctgctgctgctgagcggcggcctggccctgaccgagacctgggcctgcagccacagcatgagatacttcgacaccgccgtgagcagacccggcagaggcgagcccagattcatcagcgtgggctacgtggacgacacccagttcgtgagattcgacagcgacgccgccagccccagaggcgagcccagagccccctgggtggagcaggagggccccgagtactgggacagagagacccagaagtacaagagacaggcccaggccgacagagtgagcctgagaaacctgagaggctactacaaccagagcgaggacggcagccacaccctgcagagaatgagcggctgcgacctgggccccgacggcagactgctgagaggctacgaccagagcgcctacgacggcaaggactacatcgccctgaacgaggacctgagaagctggaccgccgccgacaccgccgcccagatcacccagagaaagctggaggccgccagagccgccgagcagctgagagcctacctggagggcacctgcgtggagtggctgagaagatacctggagaacggcaaggagaccctgcagagagccgagccccccaagacccacgtgacccaccaccccctgagcgaccacgaggccaccctgagatgctgggccctgggcttctaccccgccgagatcaccctgacctggcagagagacggcgaggaccagacccaggacaccgagctggtggagaccagacccgccggcgacggcaccttccagaagtgggccgccgtggtggtgcccagcggccaggagcagagatacacctgccacatgcagcacgagggcctgcaggagcccctgaccctgagctgggagcccagcagccagcccaccatccccatcatgggcatcgtggccggcctggccgtgctggtggtgctggccgtgctgggcgccgtggtgaccgccatgatgtgcagaagaaagagcagcggccacttcctgcccaccggcggcaagggcggcagctgcagccaggccgcctgcagcaacagcgcccagggcagcgacgagagcctgatcacctgcaaggcctag

SEQ ID NO: 124699 - DNA, 1194 bp, Artificial Sequence
  derived and/or modified sequence
atgagagtgatggcccccagagccctgctgctgctgctgagcggcggcctggccctgaccgagacctgggcctgcagccacagcatgagatacttcgacaccgccgtgagcagacccggcagaggcgagcccagattcatcagcgtgggctacgtggacgacacccagttcgtgagattcgacagcgacgccgccagccccagaggcgagcccagagccccctgggtggagcaggagggccccgagtactgggacagagagacccagaagtacaagagacaggcccaggccgacagagtgagcctgagaaacctgagaggctactacaaccagagcgaggacggcagccacaccctgcagagaatgagcggctgcgacctgggccccgacggcagactgctgagaggctacgaccagagcgcctacgacggcaaggactacatcgccctgaacgaggacctgagaagctggaccgccgccgacaccgccgcccagatcacccagagaaagctggaggccgccagagccgccgagcagctgagagcctacctggagggcacctgcgtggagtggctgagaagatacctggagaacggcaaggagaccctgcagagagccgagccccccaagacccacgtgacccaccaccccctgagcgaccacgaggccaccctgagatgctgggccctgggcttctaccccgccgagatcaccctgacctggcagagagacggcgaggaccagacccaggacaccgagctggtggagaccagacccgccggcgacggcaccttccagaagtgggccgccgtggtggtgcccagcggccaggagcagagatacacctgccacatgcagcacgagggcctgcaggagcccctgaccctgagctgggagcccagcagccagcccaccatccccatcatgggcatcgtggccggcctggccgtgctggtggtgctggccgtgctgggcgccgtggtgaccgccatgatgtgcagaagaaagagcagcggcagagagggcgtgaagagcggcgtgtgggccgccaccgtgcccagagccctgatgagcctgagcagcctggtgaagcccgagaccgccgcctgcgtgggcctgagatgcagaatcagcagccacctgagcttcgtgaccagcagagccagcggcatcagcttctgcaagggcacctag

SEQ ID NO: 124700 - DNA, 786 bp, Artificial Sequence
  derived and/or modified sequence
tgaagagtgatggcccccagagccctgctgctgctgctgagcggcggcctggccctgaccgagacctgggcctgcagccacagcatgagatacttcgacaccgccgtgagcagacccggcagaggcgagcccagattcatcagcgtgggctacgtggacgacacccagttcgtgagattcgacagcgacgccgccagccccagaggcgagcccagagccccctgggtggagcaggagggccccgagtactgggacagagagacccagaagtacaagagacaggcccaggccgacagagtgagcctgagaaacctgagaggctactacaaccagagcgaggacggcagccacaccctgcagagaatgagcggctgcgacctgggccccgacggcagactgctgagaggctacgaccagagcgcctacgacggcaaggactacatcgccctgaacgaggacctgagaagctggaccgccgccgacaccgccgcccagatcacccagagaaagctggaggccgccagagccgccgagcagctgagagcctacctggagggcacctgcgtggagtggctgagaagatacctggagaacggcaaggagaccctgcagagagccgagccccccaagacccacgtgacccaccaccccctgagcgaccacgaggccagcagaagatggaacctgcccgaggtgggcagctgcggcggcgccttctggaccagagccgagatccacgtgccctacgccgccagaggcgccgccagagccccccaccccgagtag

SEQ ID NO: 124701 - DNA, 675 bp, Artificial Sequence
  derived and/or modified sequence
atgagagtgatggcccccagagccctgctgctgctgctgagcggcggcctggccctgaccgagacctgggcctgcagccacagcatgagatacttcgacaccgccgtgagcagacccggcagaggcgagcccagattcatcagcgtgggctacgtggacgacacccagttcgtgagattcgacagcgacgccgccagccccagaggcgagcccagagccccctgggtggagcaggagggccccgagtactgggacagagagacccagaagtacaagagacaggcccaggccgacagagtgagcctgagaaacctgagaggctactacaaccagagcgaggacggcagccacaccctgcagagaatgagcggctgcgacctgggccccgacggcagactgctgagaggctacgaccagagcgcctacgacggcaaggactacatcgccctgaacgaggacctgagaagctggaccgccgccgacaccgccgcccagatcacccagagaaagctggaggccgccagagccgccgagcagctgagagcctacctggagggcacctgcgtggagtggctgagaagatacctggagaacggcaaggagaccctgcagagagccggccaggaccagaagagcctgttcctgccccagagactggagctgagcaacgagtag

SEQ ID NO: 124702 - DNA, 396 bp, Artificial Sequence
  derived and/or modified sequence
atgagagtgatggcccccagaaccctgatcctgctgctgagcggcgccctggccctgaccgagacctgggcctgcagccacagcatgagatacttctacaccgccgtgagcagacccggcagaggcgagcccagattcatcgccgtgggctacgtggacgacacccagttcgtgcagttcgacagcgacgccgccagccccagaggcgagcccagagccccctgggtggagcaggagggccccgagtactgggacagagagacccagaagtacaagagacaggcccagaccgacagagtgaacctgagaaagctgagaggctactacaaccagagcgaggccgaggacgtgtggctgagacccggcgccagaagagcccccccccccagagtgtag

SEQ ID NO: 124703 - DNA, 396 bp, Artificial Sequence
  derived and/or modified sequence
atgagagtgatggcccccagaaccctgatcctgctgctgagcggcgccctggccctgaccgagacctgggcctgcagccacagcatgagatacttcgacaccgccgtgagcagacccggcagaggcgagcccagattcatcagcgtgggctacgtggacgacacccagttcgtgagattcgacagcgacgccgccagccccagaggcgagcccagagccccctgggtggagcaggagggccccgagtactgggacagagagacccagaagtacaagagacaggcccaggccgacagagtgaacctgagaaagctgagaggctactacaaccagagcgaggacgtggacgtgtggctgagacccggcgccagaagagcccccccccccagagtgtag

SEQ ID NO: 124704 - DNA, 396 bp, Artificial Sequence
  derived and/or modified sequence
atgagagtgatggcccccagaaccctgatcctgctgctgagcggcgccctggccctgaccgagacctgggcctgcagccacagcatgagatacttctacaccgccgtgagcagacccggcagaggcgagcccagattcatcgccgtgggctacgtggacgacacccagttcgtgagattcgacagcgacgccgccagccccagaggcgagcccagagccccctgggtggagcaggagggccccgagtactgggacagagagacccagaagtacaagagacaggcccagaccgacagagtgagcctgagaaacctgagaggctactacaaccagagcgaggccgtggacgtgtggctgagacccggcgccagaagagcccccccccccagagtgtag

SEQ ID NO: 124705 - DNA, 396 bp, Artificial Sequence
  derived and/or modified sequence
atgagagtgatggcccccagaaccctgatcctgctgctgagcggcgccctggccctgaccgagacctgggccggcagccacagcatgagatacttctacaccgccgtgagcagacccggcagaggcgagccccacttcatcgccgtgggctacgtggacgacacccagttcgtgagattcgacagcgacgccgccagccccagaggcgagcccagagccccctgggtggagcaggagggccccgagtactgggacagagagacccagaagtacaagagacaggcccagaccgacagagtgagcctgagaaacctgagaggctactacaaccagagcgaggccgaggacgtgtggctgagaagaggcgccagaagagcccccccccccagagtgtag

SEQ ID NO: 124706 - DNA, 1212 bp, Artificial Sequence
  derived and/or modified sequence
atgagagtgatggcccccagagccctgctgctgctgctgagcggcggcctggccctgaccgagacctgggcctgcgagtgcggcgtgggcagagaggccgccagcgccgagagaagcgagggcccccccggcgagcccagaagagaggtgggcagagccggcctgagccccagcagcccccccggcagccacagcatgagatacttcgacaccgccgtgagcagacccggcagaggcgagcccagattcatcagcgtgggctacgtggacgacacccagttcgtgagattcgacagcgacgccgccagccccagaggcgagcccagagccccctgggtggagcaggagggccccgagtactgggacagagagacccagaagtacaagagacaggcccaggccgacagagtgagcctgagaaacctgagaggctactacaaccagagcgaggacggcagccacaccctgcagagaatgagcggctgcgacctgggccccgacggcagactgctgagaggctacgaccagagcgcctacgacggcaaggactacatcgccctgaacgaggacctgagaagctggaccgccgccgacaccgccgcccagatcacccagagaaagctggaggccgccagagccgccgagcagctgagagcctacctggagggcacctgcgtggagtggctgagaagatacctggagaacggcaaggagaccctgcagagagccgagccccccaagacccacgtgacccaccaccccctgagcgaccacgaggccaccctgagatgctgggccctgggcttctaccccgccgagatcaccctgacctggcagagagacggcgaggaccagacccaggacaccgagctggtggagaccagacccgccggcgacggcaccttccagaagtgggccgccgtggtggtgcccagcggccaggagcagagatacacctgccacatgcagcacgagggcctgcaggagcccctgaccctgagctgggagcccagcagccagcccaccatccccatcatgggcatcgtggccggcctggccgtgctggtggtgctggccgtgctgggcgccgtggtgaccgccatgatgtgcagaagaaagagcagcggcggcaagggcggcagctgcagccaggccgcctgcagcaacagcgcccagggcagcgacgagagcctgatcacctgcaaggcctag

SEQ ID NO: 124707 - DNA, 1101 bp, Artificial Sequence
  derived and/or modified sequence
atgcgagtgatggccccgagggcactgcttttacttctgagcggcggactagctcttacagaaacctgggcatgctctcacagcatgagatattttgacacggccgtgtctaggccggggagaggagaacctagattcatctccgttggatacgtcgacgacacacaattcgtacgattcgattcagatgccgcttctccaaggggagagcctagagccccgtgggttgagcaggaaggcccggagtactgggaccgggagacgcaaaagtataagaggcaggcccaagcagaccgagtgtccctacgtaatcttcgaggttattataatcagtcagaggatggtagtcatacattgcagagaatgagtggctgcgacctaggacccgacggacgtctgctgaggggatacgaccagagtgcttacgatggaaaggattacatagctttgaacgaggaccttcggtcttggacggctgctgacactgccgctcaaattactcagagaaaactcgaagccgcgcgtgccgcagagcagctgagggcctacctggagggcacctgcgtggagtggctgcgaaggtacctggagaacggaaaagagacactccaacgtgcagaaccaccgaaaacccatgtgacacatcacccgctgtcagatcacgaagctacactgcggtgctgggccctgggcttctaccccgccgaaatcacccttacctggcagcgcgacggagaagatcagacccaagacaccgaactggttgagacccgccctgccggagatggcacgttccagaagtgggcagcggttgtcgtgccttccggccaggaacagcggtatacctgtcatatgcagcacgaaggtcttcaggaacctctcacactgagttgggaaccaagctcacagccaacaattcctatcatgggaatcgttgcaggccttgctgtcctcgtcgtactggccgtcctcggcgctgtggtcaccgccatgatgtgtagaagaaagagctcaggcgggaagggcggtagttgctcccaggctgcctgctcaaacagcgctcaaggttctgatgagagtctgattacgtgtaaagcttag

SEQ ID NO: 124708 - DNA, 396 bp, Artificial Sequence
  derived and/or modified sequence
atgagagtgatggcccctcgcgctctgttacttctgttgtccggtgggctcgcactaactgagacatgggcctgttcacactccatgagatacttcgatacagccgtttccagacctgggcgcggtgaaccacgttttattagcgtgggatacgtggatgacacgcagtttgtgcgattcgactcggacgcagcaagtcccagaggggagccgagagcaccgtgggtggaacaggagggacctgaatactgggaccgagagacccagaaatacaagcgccaggctcaggctgaccgggtcagcctgaggaacctgaggggctattacaaccaatctgaggacgaggacgtttggttgcgacccggagccagaagagctccaccgcccagggtgtag

SEQ ID NO: 124709 - DNA, 1119 bp, Artificial Sequence
  derived and/or modified sequence
atgcgggtgatggcccctagggctttattgttattattgtccgggggtcttgccctgaccgagacatgggcttgctctcacagtatgcgatatttcgataccgcagtctcccggcctggcagaggcgaacctcgcttcatcagtgtcggctacgtggacgatacacaattcgtgcgatttgatagcgatgcggccagtccccgtggagagccccgcgccccctgggtggagcaggagggccccgagtactgggacagggagacccagaaatataagagacaggcacaggctgatagggtaagtcttagaaacttgagaggctattataaccagtctgaagatggatcccatacgctgcagagaatgagcggatgcgatcttggccccgatgggcggctgttgagagggtatgatcaatccgcatatgacggcaaggattacatcgctctcaatgaggatctgcggtcatggactgccgctgatacagctgctcaaataacacagaggaaacttgaggccgcaagagcagccgaacagctgcgggcctacctagagggtacttgtgttgaatggcttcgacgttatttagaaaacggcaaggagaccctacagagagccgaaccacccaagacacatgtcacccatcaccctctctcggaccatgaagcgaccctgaggtgctgggctctggggttctatcctgcggaaataactctgacgtggcaaagggacggtgaagatcagacccaggacacagagcttgttgaaacaaggcccgccggggacgggactttccaaaagtgggcggctgtcgtggtgccctctgggcaagaacaacgctacacatgtcatatgcagcatgaagggctccaggagccccttaccttgtcgtgggaaccaagctcgcagccaaccatcccaattatgggtatcgttgctggactcgcagtgctcgtagtgctggctgttctgggtgctgtggtaacagctatgatgtgtcggcggaagtctagtgggcacttcctacccaccgggggtaagggcggcagctgctcccaggcagcttgcagcaactcggcccaggggagcgatgagagcctgataacctgcaaggcatag

SEQ ID NO: 124710 - DNA, 1194 bp, Artificial Sequence
  derived and/or modified sequence
atgagggtcatggctccgcgcgctttgcttctcctgctttccggcggcctggctttgaccgagacctgggcctgcagccattccatgcggtatttcgacaccgccgtgtccagacccggccgaggagagccgcgttttatctccgtcggctatgtcgacgatacccagttcgtgcggttcgatagtgatgccgctagtcctaggggagagccaagagccccatgggtagagcaggagggaccggaatattgggatagagaaacccaaaagtataagagacaggcacaggctgaccgtgtcagtctacggaatctgcgtggctattacaatcaatctgaagacggatcacacaccctccagaggatgtcgggctgtgaccttggccctgacgggcgcctgttgcgcggctacgaccagtctgcttatgacggaaaggattacatcgctctcaacgaagatctgcgaagctggacagctgctgacaccgccgctcagattacacagcgaaaactcgaagccgcgcgcgccgcggaacagcttcgcgcctatctggaggggacgtgcgtcgaatggttgcgcagatatctggaaaacggaaaggagacactgcagcgagcagagccacccaaaacccatgtgacacaccaccccctgagtgatcatgaagcaacactgaggtgttgggcgctgggcttttatccggctgagattacactcacttggcagcgagacggtgaagatcaaactcaagacaccgagctggtggagacccgtcctgcgggcgacgggacgtttcaaaagtgggcggctgtggtggtcccgtccggccaagaacagcggtatacttgccacatgcaacacgagggcctgcaggaacccctgacactgagctgggagccgtcttcacagcccactatccctattatggggattgtggcaggcttggcggtgctagtggtgctggccgttctgggggcggtggtcactgccatgatgtgcagaagaaaatcgtcaggcagggaaggggtgaaatctggcgtgtgggctgccacagttccacgagctctgatgagcctaagttctctggtcaaaccagagacggccgcatgcgtaggactgcggtgccggattagtagccatttaagtttcgtcacctcacgggcctctggcataagtttttgcaaagggacatag

SEQ ID NO: 124711 - DNA, 786 bp, Artificial Sequence
  derived and/or modified sequence
tgacgtgtgatggctcctcgagccctgcttcttctcctaagcgggggcctcgccctgacagagacgtgggcatgctcacatagtatgaggtattttgacacggctgtgtccagaccaggcagaggcgaaccaaggttcatcagcgttggatacgtggacgacacccagtttgtgagatttgatagtgacgccgcgtcccctcgtggcgaaccgagggccccttgggtagagcaagaggggcccgagtattgggatagggagactcaaaagtacaagcggcaggctcaggcagacagggtgagcctccggaacctcagaggttactacaatcagtccgaagacggctcgcacaccctgcagcgaatgagcgggtgtgatcttggaccagacggccgtctgctgcgcggatatgatcaatcggcttatgatgggaaagactatatagcgctgaatgaggatcttagatcatggaccgccgctgacaccgcggctcagattacccagcggaaactcgaggcagccagagcagccgaacaattaagagcttacctagaaggaacctgcgtggagtggttgcgaagataccttgagaatggcaaggagactctgcagagggctgagcctccgaagactcacgtgacccaccaccccctctctgatcatgaggcctcacggcggtggaacctgccagaagtgggctcatgcgggggcgctttttggacccgagccgagatacatgttccatacgctgcgcgtggggctgcccgcgcacctcaccccgagtag

SEQ ID NO: 124712 - DNA, 675 bp, Artificial Sequence
  derived and/or modified sequence
atgagagttatggctcctagagccttgttgctgctgctcagcggtggtctggcgcttacggagacatgggcgtgctctcactccatgagatatttcgacacggctgtgtcccggcctggaaggggtgaacctcgcttcattagcgttggttacgtggatgacacccagtttgtccggtttgattccgacgctgccagcccgagaggagagccaagagcaccttgggtggaacaggagggacctgaatattgggacagagagactcagaagtacaaaaggcaagcccaggcagatagggtatccctccggaacctgcgggggtattacaaccaaagtgaggacggttcccacactctgcagcggatgtcaggttgcgatctcggtcctgatggcagacttctgagaggatatgatcagagcgcatatgatggtaaggattatattgcactgaacgaagaccttcgtagctggactgctgccgacacagctgctcaaataacccagagaaaactagaagcagcccgggcagcggaacagcttagggcctatcttgaggggacttgtgtcgaatggctcagacgctacctggaaaacggaaaggaaacactgcagcgggctgggcaggatcagaagagcctgtttttgccccagaggttggaactctcaaatgagtag

SEQ ID NO: 124713 - DNA, 396 bp, Artificial Sequence
  derived and/or modified sequence
atgcgcgtaatggctccccggacactgatcctgttgctctccggggccctggctctaaccgagacttgggcctgctcacattctatgcgctatttctatactgctgtatcccgccccgggcgcggggagccacggtttatcgcagtcgggtatgtggatgacactcagttcgtccaattcgattctgacgcggccagtccaagaggtgaaccaagagccccctgggtggagcaggagggacctgagtactgggacagggaaactcagaagtacaagaggcaagcccaaaccgatcgtgtgaatctcagaaagttaaggggctattataaccagagcgaggcagaagacgtatggctacgccctggggctcgaagggctccccctccccgggtgtag

SEQ ID NO: 124714 - DNA, 396 bp, Artificial Sequence
  derived and/or modified sequence
atgcgggtgatggccccacgtacactgatcctgctactgagtggggccctggccctgaccgagacatgggcctgttcccatagcatgagatatttcgataccgccgtctcccggcccggacggggcgaaccaaggttcatttctgtgggttacgtggatgatacccagttcgtgagatttgactcagatgctgcatcaccccgaggagagcctcgcgcaccatgggtcgagcaagaggggccagagtattgggatcgggagacacagaaatataagagacaggcccaggctgacagagtgaatctcagaaagctgcgggggtactataatcagagcgaagatgtggacgtatggctcagacccggagcaagacgggctccaccacctcgagtgtag

SEQ ID NO: 124715 - DNA, 396 bp, Artificial Sequence
  derived and/or modified sequence
atgcgggtgatggcacctcggacgctcatcctactgctttcaggagcgctagccttgacggaaacctgggcatgttctcacagtatgcggtatttttatactgcggtgtctagaccaggccgcggagagccgcgctttattgcagtggggtatgtcgatgacacacagttcgtacagtttgactctgacgccgcttccccccgaggtgagccacgcgctccctgggtggaacaagaagggccagagtactgggaccgagagacccagaagtacaagcgtcaggctcagaccgacagagttaacctccgaaaacttcgaggctactacaaccagtctgaggccgaagatgtgtggttgcgacctggcgcccggcgagcgccaccccctagggtctag

SEQ ID NO: 124716 - DNA, 396 bp, Artificial Sequence
  derived and/or modified sequence
atgcgggtgatggctccaaggaccctgattctcttgttaagcggtgcgttggctttgaccgaaacatgggcgtgctctcacagtatgcgttatttttatacagctgtcagcaggcctgggcggggagaaccacggtttatcgctgtcggttacgtcgacgacacacagtttgtccggttcgactcggacgctgcatcccctcgcggcgaacctcgggcaccctgggtggagcaagaaggtcccgaatactgggatcgcgagacgcaaaaatacaaaaggcaggctcagactgaccgagtctccctcaggaatctgagaggctactacaatcagtctgaggccgtggacgtgtggctgaggccaggcgccagacgggccccgccgcccagagtatag

SEQ ID NO: 124717 - DNA, 396 bp, Artificial Sequence
  derived and/or modified sequence
atgcgggtaatggcgcccagaactctgattctgctgttgtccggggccctggctctgaccgaaacatgggcgggctctcacagtatgcggtacttctatacagctgttagcagacccggccgcggcgaacctcatttcatagctgtggggtacgttgacgatactcagttcgtccgcttcgatagcgatgctgccagcccgaggggcgagcctagagctccctgggtcgaacaagaagggcccgaatactgggaccgggaaacccaaaagtataagagacaggcacagacagaccgcgtaagcctgagaaacttacgtggttactacaatcagagcgaggccgaggatgtctggttgcggcgcggcgcccgcagagctccaccacctagggtgtag

SEQ ID NO: 124718 - DNA, 1212 bp, Artificial Sequence
  derived and/or modified sequence
atgcgagtgatggctccccgggctctgctgctgctcctgtctggtggtcttgcactgactgaaacatgggcctgtgaatgcggcgtgggccgggaagcagcaagtgccgagcggagcgaagggccccctggcgaacctcggcgcgaagtggggagggccgggctgtctccttccagtccacccggttcacactccatgcgttatttcgacacggcagtgtcacggccaggacgaggggagccccggtttatcagcgtaggttacgtcgacgatactcagtttgtccggtttgacagtgatgctgcctcgcccagaggcgagccaagggcaccatgggtggaacaagaaggtcccgagtactgggaccgagagacacagaagtataaacggcaagcacaggcagatcgagtgtccctaaggaacctccgtggctactataaccagagtgaagatgggtctcatacactccaacgtatgtccggttgcgacctgggcccagatggaaggttgctgcgggggtatgatcagagcgcatatgatggcaaggattatattgctctaaatgaggatctgcgctcttggacagccgcagacaccgccgcacagattactcagcgcaagctggaggcagcacgagcggctgaacagttaagagcatacctggaaggcacctgtgtggagtggctacggcgctatctagaaaacggtaaagagacactccagagagccgagcctcctaagacacacgtgacgcaccaccctttgtctgatcatgaagctacacttcgttgttgggctctcggcttctaccccgctgaaataactctgacatggcagcgggatggagaagaccagacacaggataccgagctcgtcgagacccgaccggccggcgacgggacatttcagaagtgggccgcggtggtcgtgcctagcggccaggagcagcggtatacttgtcatatgcaacacgaagggctccaagaaccattaaccctcagctgggagccaagctcccagcctaccatcccaattatggggatagtggcgggcctcgctgtgttggtggttttggccgttctgggagctgtcgtcaccgccatgatgtgccgacggaaaagctctggaggtaagggcggctcgtgctcacaggccgcatgctctaattctgctcagggttctgatgaatcactcattacctgcaaagcctag

SEQ ID NO: 124719 - DNA, 1101 bp, Artificial Sequence
  derived and/or modified sequence
atgagggtgatggccccccgggccctgctgctgctgctgagcggcggcctggccctgacagagacctgggcctgcagccacagcatgagatactttgacacagctgtgtccaggcctggccgcggggagccccgcttcatctctgtgggctacgtggatgacacccagtttgtgcgctttgacagtgatgctgccagccccagaggagagccccgggccccctgggtggagcaggagggccctgagtactgggaccgggagacccagaagtacaagaggcaggcccaggccgacagagtgtccctgaggaacctgcggggctactacaaccagagtgaagatggcagccacaccctgcagaggatgagcggctgtgacctgggcccagatggccgcctgctgcggggctatgaccagagcgcctatgatggcaaggactacatcgccctgaatgaagacctgcgctcctggacagctgctgacacagctgcccagatcacccagaggaagctggaggccgcccgggctgctgagcagctgcgggcctacctggagggcacctgtgtggagtggctgcggcgctacctggagaatggcaaggagaccctgcagagagctgagccccccaagacccacgtgacccaccaccccctgagtgaccacgaggccaccctgcgctgctgggccctgggcttctacccagctgagatcaccctgacctggcagagagatggagaggaccagacccaggacacagagctggtggagaccaggcctgctggagatggcaccttccagaagtgggccgctgtggtggtgcccagcggccaggagcagcgctacacctgccacatgcagcacgagggcctgcaggagcccctgaccctgtcctgggagcccagcagccagcccaccatccccatcatgggcatcgtggccggcctggccgtgctggtggtgctggccgtgctgggcgctgtggtgacagccatgatgtgcaggaggaagagcagcggcggcaaaggaggcagctgcagccaggccgcctgcagcaacagcgcccagggcagtgatgagagcctcatcacctgcaaggcctag

SEQ ID NO: 124720 - DNA, 396 bp, Artificial Sequence
  derived and/or modified sequence
atgagggtgatggccccccgggccctgctgctgctgctgagcggcggcctggccctgacagagacctgggcctgcagccacagcatgagatactttgacacagctgtgtccaggcctggccgcggggagccccgcttcatctctgtgggctacgtggatgacacccagtttgtgcgctttgacagtgatgctgccagccccagaggagagccccgggccccctgggtggagcaggagggccctgagtactgggaccgggagacccagaagtacaagaggcaggcccaggccgacagagtgtccctgaggaacctgcggggctactacaaccagagtgaagatgaagatgtgtggctgcggcctggggcccggcgggcccccccaccccgggtgtag

SEQ ID NO: 124721 - DNA, 1119 bp, Artificial Sequence
  derived and/or modified sequence
atgagggtgatggccccccgggccctgctgctgctgctgagcggcggcctggccctgacagagacctgggcctgcagccacagcatgagatactttgacacagctgtgtccaggcctggccgcggggagccccgcttcatctctgtgggctacgtggatgacacccagtttgtgcgctttgacagtgatgctgccagccccagaggagagccccgggccccctgggtggagcaggagggccctgagtactgggaccgggagacccagaagtacaagaggcaggcccaggccgacagagtgtccctgaggaacctgcggggctactacaaccagagtgaagatggcagccacaccctgcagaggatgagcggctgtgacctgggcccagatggccgcctgctgcggggctatgaccagagcgcctatgatggcaaggactacatcgccctgaatgaagacctgcgctcctggacagctgctgacacagctgcccagatcacccagaggaagctggaggccgcccgggctgctgagcagctgcgggcctacctggagggcacctgtgtggagtggctgcggcgctacctggagaatggcaaggagaccctgcagagagctgagccccccaagacccacgtgacccaccaccccctgagtgaccacgaggccaccctgcgctgctgggccctgggcttctacccagctgagatcaccctgacctggcagagagatggagaggaccagacccaggacacagagctggtggagaccaggcctgctggagatggcaccttccagaagtgggccgctgtggtggtgcccagcggccaggagcagcgctacacctgccacatgcagcacgagggcctgcaggagcccctgaccctgtcctgggagcccagcagccagcccaccatccccatcatgggcatcgtggccggcctggccgtgctggtggtgctggccgtgctgggcgctgtggtgacagccatgatgtgcaggaggaagagcagcggccacttcctgcccaccggcggcaaaggaggcagctgcagccaggccgcctgcagcaacagcgcccagggcagtgatgagagcctcatcacctgcaaggcctag

SEQ ID NO: 124722 - DNA, 1194 bp, Artificial Sequence
  derived and/or modified sequence
atgagggtgatggccccccgggccctgctgctgctgctgagcggcggcctggccctgacagagacctgggcctgcagccacagcatgagatactttgacacagctgtgtccaggcctggccgcggggagccccgcttcatctctgtgggctacgtggatgacacccagtttgtgcgctttgacagtgatgctgccagccccagaggagagccccgggccccctgggtggagcaggagggccctgagtactgggaccgggagacccagaagtacaagaggcaggcccaggccgacagagtgtccctgaggaacctgcggggctactacaaccagagtgaagatggcagccacaccctgcagaggatgagcggctgtgacctgggcccagatggccgcctgctgcggggctatgaccagagcgcctatgatggcaaggactacatcgccctgaatgaagacctgcgctcctggacagctgctgacacagctgcccagatcacccagaggaagctggaggccgcccgggctgctgagcagctgcgggcctacctggagggcacctgtgtggagtggctgcggcgctacctggagaatggcaaggagaccctgcagagagctgagccccccaagacccacgtgacccaccaccccctgagtgaccacgaggccaccctgcgctgctgggccctgggcttctacccagctgagatcaccctgacctggcagagagatggagaggaccagacccaggacacagagctggtggagaccaggcctgctggagatggcaccttccagaagtgggccgctgtggtggtgcccagcggccaggagcagcgctacacctgccacatgcagcacgagggcctgcaggagcccctgaccctgtcctgggagcccagcagccagcccaccatccccatcatgggcatcgtggccggcctggccgtgctggtggtgctggccgtgctgggcgctgtggtgacagccatgatgtgcaggaggaagagcagcggccgggagggcgtgaagtctggagtgtgggccgccaccgtgccccgggccctgatgagcctgagcagcctggtgaagccagagacagctgcctgtgtgggcctgcgctgccgcatcagcagccacctgagctttgtgaccagccgggccagcggcatctccttctgcaagggcacctag

SEQ ID NO: 124723 - DNA, 786 bp, Artificial Sequence
  derived and/or modified sequence
tgaagagtgatggccccccgggccctgctgctgctgctgagcggcggcctggccctgacagagacctgggcctgcagccacagcatgagatactttgacacagctgtgtccaggcctggccgcggggagccccgcttcatctctgtgggctacgtggatgacacccagtttgtgcgctttgacagtgatgctgccagccccagaggagagccccgggccccctgggtggagcaggagggccctgagtactgggaccgggagacccagaagtacaagaggcaggcccaggccgacagagtgtccctgaggaacctgcggggctactacaaccagagtgaagatggcagccacaccctgcagaggatgagcggctgtgacctgggcccagatggccgcctgctgcggggctatgaccagagcgcctatgatggcaaggactacatcgccctgaatgaagacctgcgctcctggacagctgctgacacagctgcccagatcacccagaggaagctggaggccgcccgggctgctgagcagctgcgggcctacctggagggcacctgtgtggagtggctgcggcgctacctggagaatggcaaggagaccctgcagagagctgagccccccaagacccacgtgacccaccaccccctgagtgaccacgaggccagccgccgctggaacctgcctgaggtgggcagctgtggcggggccttctggaccagggctgagatccacgtgccctatgctgcccggggggccgcccgggccccccaccctgagtag

SEQ ID NO: 124724 - DNA, 675 bp, Artificial Sequence
  derived and/or modified sequence
atgagggtgatggccccccgggccctgctgctgctgctgagcggcggcctggccctgacagagacctgggcctgcagccacagcatgagatactttgacacagctgtgtccaggcctggccgcggggagccccgcttcatctctgtgggctacgtggatgacacccagtttgtgcgctttgacagtgatgctgccagccccagaggagagccccgggccccctgggtggagcaggagggccctgagtactgggaccgggagacccagaagtacaagaggcaggcccaggccgacagagtgtccctgaggaacctgcggggctactacaaccagagtgaagatggcagccacaccctgcagaggatgagcggctgtgacctgggcccagatggccgcctgctgcggggctatgaccagagcgcctatgatggcaaggactacatcgccctgaatgaagacctgcgctcctggacagctgctgacacagctgcccagatcacccagaggaagctggaggccgcccgggctgctgagcagctgcgggcctacctggagggcacctgtgtggagtggctgcggcgctacctggagaatggcaaggagaccctgcagagagctggccaggaccagaagagcctcttcctgccccagaggctggagctgagcaatgaatag

SEQ ID NO: 124725 - DNA, 396 bp, Artificial Sequence
  derived and/or modified sequence
atgagggtgatggcccccaggaccctcatcctgctgctgagcggggccctggccctgacagagacctgggcctgcagccacagcatgagatacttctacacagctgtgtccaggcctggccgcggggagccccgcttcatcgctgtgggctacgtggatgacacccagtttgtgcagtttgacagtgatgctgccagccccagaggagagccccgggccccctgggtggagcaggagggccctgagtactgggaccgggagacccagaagtacaagaggcaggcccagacagacagagtgaacctgaggaagctgcggggctactacaaccagagcgaggctgaagatgtgtggctgcggcctggggcccggcgggcccccccaccccgggtgtag

SEQ ID NO: 124726 - DNA, 396 bp, Artificial Sequence
  derived and/or modified sequence
atgagggtgatggcccccaggaccctcatcctgctgctgagcggggccctggccctgacagagacctgggcctgcagccacagcatgagatactttgacacagctgtgtccaggcctggccgcggggagccccgcttcatctctgtgggctacgtggatgacacccagtttgtgcgctttgacagtgatgctgccagccccagaggagagccccgggccccctgggtggagcaggagggccctgagtactgggaccgggagacccagaagtacaagaggcaggcccaggccgacagagtgaacctgaggaagctgcggggctactacaaccagagtgaagatgtggatgtgtggctgcggcctggggcccggcgggcccccccaccccgggtgtag

SEQ ID NO: 124727 - DNA, 396 bp, Artificial Sequence
  derived and/or modified sequence
atgagggtgatggcccccaggaccctcatcctgctgctgagcggggccctggccctgacagagacctgggcctgcagccacagcatgagatacttctacacagctgtgtccaggcctggccgcggggagccccgcttcatcgctgtgggctacgtggatgacacccagtttgtgcgctttgacagtgatgctgccagccccagaggagagccccgggccccctgggtggagcaggagggccctgagtactgggaccgggagacccagaagtacaagaggcaggcccagacagacagagtgtccctgaggaacctgcggggctactacaaccagagcgaggccgtggatgtgtggctgcggcctggggcccggcgggcccccccaccccgggtgtag

SEQ ID NO: 124728 - DNA, 396 bp, Artificial Sequence
  derived and/or modified sequence
atgagggtgatggcccccaggaccctcatcctgctgctgagcggggccctggccctgacagagacctgggccggcagccacagcatgagatacttctacacagctgtgtccaggcctggccgcggggagccccacttcatcgctgtgggctacgtggatgacacccagtttgtgcgctttgacagtgatgctgccagccccagaggagagccccgggccccctgggtggagcaggagggccctgagtactgggaccgggagacccagaagtacaagaggcaggcccagacagacagagtgtccctgaggaacctgcggggctactacaaccagagcgaggctgaagatgtgtggctgcggcggggggcccggcgggcccccccaccccgggtgtag

SEQ ID NO: 124729 - DNA, 1212 bp, Artificial Sequence
  derived and/or modified sequence
atgagggtgatggccccccgggccctgctgctgctgctgagcggcggcctggccctgacagagacctgggcctgtgaatgtggggtgggccgggaggccgccagcgctgagaggtctgagggccccccaggagagccccggcgggaggtgggccgggccggcctgagccccagcagccccccaggcagccacagcatgagatactttgacacagctgtgtcccggcccggccgcggggagccccgcttcatctctgtgggctacgtggatgacacccagtttgtgcgctttgacagtgatgctgccagccccagaggagagccccgggccccctgggtggagcaggagggccctgagtactgggaccgggagacccagaagtacaagaggcaggcccaggccgacagagtgtccctgaggaacctgcggggctactacaaccagagtgaagatggcagccacaccctgcagaggatgagcggctgtgacctgggcccagatggccgcctgctgcggggctatgaccagagcgcctatgatggcaaggactacatcgccctgaatgaagacctgcgctcctggacagctgctgacacagctgcccagatcacccagaggaagctggaggccgcccgggctgctgagcagctgcgggcctacctggagggcacctgtgtggagtggctgcggcgctacctggagaatggcaaggagaccctgcagagagctgagccccccaagacccacgtgacccaccaccccctgagtgaccacgaggccaccctgcgctgctgggccctgggcttctacccagctgagatcaccctgacctggcagagagatggagaggaccagacccaggacacagagctggtggagaccaggcctgctggagatggcaccttccagaagtgggccgctgtggtggtgcccagcggccaggagcagcgctacacctgccacatgcagcacgagggcctgcaggagcccctgaccctgtcctgggagcccagcagccagcccaccatccccatcatgggcatcgtggccggcctggccgtgctggtggtgctggccgtgctgggcgctgtggtgacagccatgatgtgcaggaggaagagcagcggcggcaagggcggcagctgcagccaggccgcctgcagcaacagcgcccagggcagtgatgagagcctcatcacctgcaaggcctag

SEQ ID NO: 124730 - DNA, 1101 bp, Artificial Sequence
  derived and/or modified sequence
atgcgggtgatggccccccgggccctgctgctgctgctgagcggcggactagctctgacagagacatgggcctgtagccactccatgaggtattttgacacagccgtaagtcggcctggaagaggtgagcctcggttcatctcagtgggctacgtggatgatacacaatttgtgcgattcgactcagacgccgcaagccctcggggggagccacgggctccttgggttgagcaagagggcccggaatattgggacagggaaactcagaaatacaaacgacaggcccaggctgaccgcgtgtcgctgaggaatctgcgggggtactataatcaatccgaggacggctcccacactctgcagcgaatgtcgggatgtgacctgggccccgatggcagactcctgcgcgggtacgaccagtcggcttacgacggcaaggattacatcgcgctgaacgaggatctacgctcttggaccgccgccgacactgccgctcagattacacagcggaaactagaagccgctcgagccgcagagcagctccgcgcatacctagaggggacctgcgtagagtggctcagacggtatctggagaacgggaaggagaccctgcagcgcgctgagccccccaagactcacgtaacacaccacccgctgagcgaccatgaagctaccctcaggtgctgggccttgggattctatcccgcagagattacactgacctggcaacgggacggcgaggaccagacacaggacactgagctggttgagaccaggccagccggtgacgggaccttccagaaatgggcggcggttgtagttccatccgggcaagagcagaggtatacttgtcatatgcagcacgaaggcctccaagagcctttgacactgtcatgggagccctctagccaacccaccattccgataatgggaattgtggcgggactggccgtgctggttgtgctggctgttttgggtgctgtcgttacagccatgatgtgtcgcagaaaatcttctggcggaaaaggtggcagctgttctcaagcagcctgctcgaactccgctcagggctctgacgaaagcttgataacctgtaaggcatag

SEQ ID NO: 124731 - DNA, 396 bp, Artificial Sequence
  derived and/or modified sequence
atgcgggtgatggccccccgggccctgctgctgctgctgagcggcgggctggcccttacagaaacatgggcatgttctcatagcatgaggtactttgacacagcggtgtcaagacccggaagaggtgagccacgatttattagtgtcggatatgtggatgatacccagtttgtacgattcgactccgacgctgccagcccacggggcgagccacgcgctccatgggttgaacaggagggtcctgagtattgggacagagagacccaaaagtataagcgccaagcccaggcggaccgtgtgtcattgcgaaacctgaggggttattataaccaatccgaagatgaggacgtttggcttaggccgggagcccgtcgcgcccctccacctcgtgtgtag

SEQ ID NO: 124732 - DNA, 1119 bp, Artificial Sequence
  derived and/or modified sequence
atgcgggtgatggccccccgggccctgctgctgctgctgagcggcggactggctctgactgagacctgggcgtgctcccatagcatgcgctattttgacaccgcagtcagccggccaggccgcggtgagccccgttttatttctgtcggctatgtggatgatacccaattcgtcagatttgattctgatgccgcaagtccgcgtggggagcctcgtgcaccttgggtggagcaagagggacctgaatattgggatagagagacacagaagtacaagcggcaggcacaagcggaccgggtctccttgagaaacctgaggggctactacaaccagtcagaggacggttcccatacgttacagcggatgtctggttgtgacctcggacctgacggccgactgcttcgcggctacgatcagagcgcttacgatggaaaggattatatcgcattgaatgaagaccttcggagttggacagccgcagacacggccgcccaaataacccagaggaaactcgaagctgccagggccgccgagcagctccgggcctatctcgaaggaacatgcgtcgagtggcttcggaggtatctcgaaaatgggaaggagactctgcagcgcgcagaacctcctaagacccacgtgacccatcaccctttgagcgatcatgaggcaacacttcgctgctgggccctgggcttctatccagcagagattacgctcacctggcaacgggatggggaggaccagacgcaagataccgagctggtagaaactcgccctgccggagacggtacttttcagaaatgggctgcagtagtcgtgcccagtgggcaggagcagagatatacctgccacatgcagcatgaaggactgcaggagcccctaacattatcttgggagcctagctcccagccaaccatacccattatgggcattgtggctgggctggctgtgctggtggtgctagctgtcctcggcgcagtggttaccgcaatgatgtgccgtcgaaaatcctccggacactttctccccactggtgggaagggcggcagctgtagccaggccgcctgctctaattcagctcagggctccgacgagtccttgattacctgtaaagcctag

SEQ ID NO: 124733 - DNA, 1194 bp, Artificial Sequence
  derived and/or modified sequence
atgcgggtgatggccccccgggccctgctgctgctgctgagcggcggcctggcccttaccgaaacgtgggcctgttcacatagcatgcgatacttcgatactgctgtgagccgccccgggaggggcgaaccccgctttatctctgtgggctatgttgacgatacgcagtttgtcagattcgactctgacgccgcctcccctcgaggcgagccccgggcaccctgggtggagcaggaaggcccagagtattgggacagagagacccagaagtacaaacgtcaggctcaagccgaccgagtcagccttcggaatctccgagggtattacaatcaatctgaagatggctcccacactctgcagaggatgtctgggtgcgacctcggtccagatggccggttgctccgggggtacgaccagtctgcttacgatggcaaggattatatcgcactgaacgaggatctgcggtcctggaccgctgcagacactgccgctcagatcacccaacgcaaactcgaggctgccagagccgctgaacagttgcgggcgtatctcgaaggcacatgcgtagaatggctcaggaggtacttggagaacgggaaggaaacactacagcgagccgaacctcccaagacccacgtgactcaccatccccttagcgaccacgaagcaacactgaggtgctgggctctaggcttctacccggcagagatcactctcacctggcagcgggacggcgaagaccagacccaggacacagagctggtcgagacgcggccagctggcgatggcaccttccagaaatgggccgcagtcgtggttccttctggacaggagcagcgttatacatgtcacatgcagcacgagggccttcaggaaccactgactcttagctgggagccttccagccagccgacaatccctataatgggtattgtggcaggccttgcagtgttagtagttctggcagtgctgggagcagtcgtgacagctatgatgtgccggaggaagtcgagtggccgcgaaggggttaaatctggcgtgtgggccgcgacagtgcccagggcattgatgtctctaagttctttagtgaagccagagaccgccgcatgtgtcgggctcagatgtcggattagcagtcacttgtccttcgtgactagccgtgcatcaggaattagcttttgcaagggtacatag

SEQ ID NO: 124734 - DNA, 786 bp, Artificial Sequence
  derived and/or modified sequence
tgacgggtgatggccccccgggccctgctgctgctgctgagcggcggtctggctcttaccgaaacttgggcttgtagtcattcaatgcgttattttgatacagccgtgagccgaccagggcgaggcgaacctaggtttatatcagtgggctatgttgacgacacgcaatttgtgcggttcgacagcgatgctgcttccccacggggcgagccaagagccccttgggtggagcaagagggacctgagtactgggatcgggagacccagaagtacaaaagacaagcgcaggcggaccgagttagtttacgcaacttgcgcggttactacaaccaatcggaggatgggtcccacaccctgcaaagaatgtcaggctgcgatctcggtccggatggtagactgctaagaggctacgaccagagcgcttacgatggcaaagactacatcgcccttaacgaggatttaagaagctggaccgcagcagatactgctgcacagattacacagcggaaattggaggccgctcgagctgccgagcaactacgtgcatatctggagggtacctgtgtggagtggctcagaaggtacctggaaaatggcaaagagacactgcagcgggctgaacccccaaaaacccatgtcactcaccatccactctctgatcacgaggcgtccaggcgctggaacctgcctgaagtcggtagctgcggtggggccttctggacaagggcggagatccacgtcccatacgccgcccggggtgcggctagggctccccacccagaatag

SEQ ID NO: 124735 - DNA, 675 bp, Artificial Sequence
  derived and/or modified sequence
atgcgggtgatggccccccgggccctgctgctgctgctgagcggcggtctcgctctgacggaaacttgggcctgtagccactctatgcgttattttgacaccgcggtctccaggccaggtcgtggagagcctagattcatatctgtgggctacgtggacgacacacagttcgtgcgattcgactccgacgccgccagtccccgcggcgagcctcgggccccttgggtggagcaagaggggcccgagtattgggatcgcgagacacaaaagtacaaaagacaggcgcaagccgaccgggtcagccttcggaacctgagaggctactacaaccaatccgaggatggttcccacactctccagagaatgagcggctgtgatctcggcccggacggcagactgctgcgcggctatgatcagagtgcctacgatggtaaagactatattgcgctgaacgaggatctgaggagttggacagccgccgataccgccgcccagatcacgcagagaaaactcgaagccgccagagctgccgagcagctgcgcgcatacctggagggcacatgcgtggaatggttgaggagatacctcgagaacgggaaggagaccctgcagcgagccggtcaggaccagaagtctctctttctgccccagcgcctggagctgagcaacgaatag

SEQ ID NO: 124736 - DNA, 396 bp, Artificial Sequence
  derived and/or modified sequence
atgcgggtgatggccccccggaccctgatcctgctgctgagcggcgccctggctttgacagagacctgggcctgcagtcactcaatgaggtacttttacactgcagtgtcccgtccgggacgtggggaacctcgcttcatcgcggtaggctatgtggacgacacccagttcgtgcagttcgactccgatgcagcttcgcctagaggtgagccccgcgccccttgggttgaacaggagggacccgaatactgggatcgagagacccagaagtataagcgccaggcacagaccgaccgggtcaacctgaggaagttgagggggtattacaaccagagtgaggcggaagatgtgtggctgaggcccggcgcgaggagggctcccccaccccgcgtctag

SEQ ID NO: 124737 - DNA, 396 bp, Artificial Sequence
  derived and/or modified sequence
atgcgggtgatggccccccggaccctgatcctgctgctgagcggcgccctcgcccttacagagacttgggcgtgtagtcatagtatgcgttatttcgatacagcagttagcaggccaggacgaggggaacccagatttatcagtgtcgggtacgtcgatgatacacagtttgtgagattcgattcagacgcagcatctcctcggggcgagccacgtgccccctgggtcgaacaggaaggtccagagtattgggacagagagacccagaagtataagcgtcaggcacaggctgacagggttaatttgagaaaactccgcgggtattacaatcagtcagaagacgtggatgtttggctaaggcccggcgcaaggagagcgccccccccccgggtgtag

SEQ ID NO: 124738 - DNA, 396 bp, Artificial Sequence
  derived and/or modified sequence
atgcgggtgatggccccccggaccctgatcctgctgctgagcggcgcccttgctctgaccgagacctgggcgtgttcccatagcatgagatacttttataccgctgttagccggccaggcagaggagagcctcgcttcattgcggtcggatacgtcgacgatacccagttcgtccaatttgactctgacgcagcaagtcctcgtggggagccccgcgctccttgggtcgagcaggaagggcctgaatattgggacagagaaacgcaaaaatacaagcgacaggcacagactgaccgcgttaatctaagaaagctcagaggctattataaccaaagcgaggctgaggacgtgtggcttcgaccgggagccagacgcgctcctccacctcgggtctag

SEQ ID NO: 124739 - DNA, 396 bp, Artificial Sequence
  derived and/or modified sequence
atgcgggtgatggccccccggaccctgatcctgctgctgagcggcgcacttgctctcacagaaacgtgggcatgttctcattcgatgcgttatttctataccgccgtttcacgacccggccggggcgagccacggtttattgcggtcggatacgtggacgatacccagttcgttaggtttgactcagatgccgctagccctcggggtgagccacgagccccatgggtggaacaggagggcccggagtactgggaccgcgagacccaaaagtataaaaggcaggctcagaccgatcgggttagtttacgaaatctaagaggctactacaatcagtctgaagccgtggatgtttggctgagaccgggcgcacgccgcgcccccccacctcgggtgtag

SEQ ID NO: 124740 - DNA, 396 bp, Artificial Sequence
  derived and/or modified sequence
atgcgggtgatggccccccggaccctgatcctgctgctgagcggcgcactggcactgacagagacctgggccggaagtcacagcatgcggtacttctacaccgcggtctcccggcccggtcgaggcgagccccacttcatcgctgtgggctatgtggacgacacgcagtttgtcagattcgattctgatgctgcaagtccccgaggcgaacctagggccccgtgggtcgagcaggaagggcctgaatattgggacagggagacccagaaatataagcgccaggcccagactgatcgggtcagtctgcgaaaccttcgtggatattataaccagagcgaggctgaggacgtttggctgcgaagaggcgctcggagagccccacctcctcgggtgtag

SEQ ID NO: 124741 - DNA, 1212 bp, Artificial Sequence
  derived and/or modified sequence
atgcgggtgatggccccccgggccctgctgctgctgctgagcggcggactcgctctcacagaaacttgggcatgcgagtgtggtgtaggaagagaggcagcctccgctgagaggagcgaagggccaccaggggagccacgcagagaagtgggtcgagcgggtttgagtccttcatccccgccagggagccactccatgcgctattttgataccgctgtgagtcgacctggtcgcggggagccccggtttatttcagtggggtacgtggatgatacacagtttgtgcgctttgactctgatgctgcttctcctcgtggcgagccaagagcaccatgggtggagcaggaaggcccagaatactgggatcgcgagacacagaagtacaaacgtcaggcccaggctgatcgggtgtcgcttaggaatctgaggggttactacaaccagtcagaagatgggagccataccctccagaggatgtccgggtgtgacctgggacccgatggtcggctgctcagaggctacgaccagtctgcatacgatggaaaggactacatagcgctgaatgaagatctccgctcttggacagctgctgacaccgcagcccagattactcagcggaagctagaggccgcaagggccgctgagcagttgcgggcatatctggagggaacctgcgtagagtggttgagaagatatctggagaacggtaaagagactctgcaaagggctgaacctccaaaaactcacgtgacccaccatccgctgtccgatcacgaagcgacgttacggtgttgggccctcggcttttatcccgccgagataaccctgacctggcagcgcgacggtgaggaccagacacaagacacagagctggtggaaacacggcccgcgggagacgggacatttcagaagtgggccgccgtggtggttccatctggccaggagcaacggtacacatgtcatatgcagcatgaaggcctacaggagccgctcaccctgagctgggagccctcttcccaacccaccatacccattatggggattgtcgcgggcctcgctgtgctggtggtgctggccgttctcggcgctgtggtgactgcgatgatgtgtcgcaggaagtcaagtggtgggaaggggggttcctgctcccaagctgcttgctctaacagtgctcaagggagcgacgagtctctgatcacctgcaaggcttag

SEQ ID NO: 124742 - DNA, 1101 bp, Artificial Sequence
  derived and/or modified sequence
atgagggtgatggctccgagagccttgctgctcctgttatccggcggactcgctttaaccgaaacttgggcctgcagccactcaatgcgctatttcgatacggctgtctcacgtcctggccgaggcgaacctaggtttatttccgtgggctatgttgacgatactcagtttgtgcggttcgactcggacgctgcctcacccaggggcgagccccgtgccccatgggttgagcaggagggcccagaatactgggatcgggaaactcagaagtataaacggcaagctcaggcagatcgtgtttccctccgtaacctcagggggtactacaaccagtctgaagatggctcccacaccctgcagaggatgtcagggtgcgacctgggtcccgatggtaggctgctcagaggttacgaccagtcagcatacgatggtaaagactatatcgcccttaacgaggatctacggtcctggactgccgcagataccgctgcacagattacgcagagaaagctcgaggcggcaagagccgctgagcaactcagagcgtatctggagggcacctgtgtcgaatggctgcggagatacttggagaatgggaaggaaacccttcaacgcgcagagccccctaaaacacacgtgacccatcatcccctgtccgatcatgaggctaccctgcggtgttgggccctcgggttctaccctgcagagatcactctgacgtggcagcgagatggtgaagaccagacacaggataccgaactagtcgaaactaggcctgctggtgacggcacttttcagaaatgggccgctgtcgtggttccgtcgggccaggaacagcggtacacctgtcatatgcagcacgaaggcctgcaagagcccctcaccttaagttgggagccctcaagccaacccactattcccattatgggaatcgttgcgggactggctgtgctggtcgtcctggctgtgctcggagctgtggttacagctatgatgtgcaggcgtaagtcctccgggggtaagggcggatcttgttcccaggccgcttgctccaactcagcccagggatcagatgagtctctgatcacttgtaaagcttag

SEQ ID NO: 124743 - DNA, 396 bp, Artificial Sequence
  derived and/or modified sequence
atgagagttatggcgcctcgagctctactactgctgctctctggaggactcgcattgacggaaacgtgggcttgttctcattccatgcggtacttcgatacggccgtgtcaagaccagggagaggggagccgcgtttcattagcgttggctatgtggacgatacacagtttgttaggttcgactctgatgccgcttccccaaggggcgagcccagagcgccttgggttgagcaggaagggccagagtattgggaccgagaaacacagaagtacaagcgacaggcccaggccgatagggtttctctgcgcaacctacgaggctattacaaccaatccgaggacgaagatgtgtggctgcgaccaggcgctagacgcgctccaccccctagagtctag

SEQ ID NO: 124744 - DNA, 1119 bp, Artificial Sequence
  derived and/or modified sequence
atgcgagtgatggctcctcgggctctgttgctccttttatcaggaggactggccctcacggagacctgggcctgttctcatagtatgaggtatttcgacaccgcggtgagccgtccaggacggggagaaccaaggttcatctcagtggggtacgtggatgatacgcagttcgttcggtttgatagtgacgccgctagtcccagaggtgagcccagggcgccatgggttgagcaggaagggccagagtattgggaccgagagacgcagaagtacaagagacaggctcaggcagacagagtatccctacgaaacctacgcggatattataaccagagtgaagacggctcccacaccctgcagagaatgtcaggctgcgaccttgggccagacggccgactgctcagggggtatgaccagtcagcctacgacggaaaggactatatcgccctcaatgaagatctgcgaagctggacagccgcagatactgccgcacagatcacccagcgcaaattagaagccgcaagggccgcagaacagctaagagcctatcttgaggggacgtgcgttgagtggctacggagatacctcgagaacggcaaagagacgctgcagagggccgagccccctaaaactcacgtaacccatcaccccctctccgatcatgaagccacactcagatgctgggcactgggtttctaccccgctgagatcacacttacttggcaacgcgatggcgaggatcagacccaagatacagagctggtcgagaccaggcctgcaggagatggcacctttcagaaatgggcagcggtggtcgtgccaagcggccaggagcagaggtacacttgccacatgcagcacgaagggttgcaggagcccttaacactgagctgggagccgtctagccagcctacaataccgatcatggggatagtagcgggactcgccgtgctagttgtgcttgccgtcctaggcgctgtagttactgctatgatgtgccgcaggaagtcaagcggccattttctacccacaggcggaaaggggggaagctgcagtcaggcagcgtgttctaattctgcacagggcagtgacgaatctctgataacctgtaaagcatag

SEQ ID NO: 124745 - DNA, 1194 bp, Artificial Sequence
  derived and/or modified sequence
atgagagtgatggctccaagggccctactgctgctcctgagcggagggttggccttaactgaaacctgggcctgctcccattctatgcgctattttgacactgcggtcagtcgtcccggaaggggtgagccgaggtttatcagtgtggggtatgttgacgatacacaatttgttagatttgactccgacgccgctagcccaagaggggaacctagggctccttgggtggagcaggaaggacccgagtactgggatagggagacccagaagtacaaacggcaggctcaagctgacagggtcagcctgcgtaatcttcgaggctactacaatcagagcgaagatggaagccataccctgcagcgtatgtccgggtgcgatctgggaccagacggccgtctcctgcggggatacgatcagtcagcttacgatggaaaagactatattgccctaaatgaagatctgcgcagctggaccgccgcagataccgcagctcagatcacccagaggaagctggaggcagcgcgtgccgctgagcaactgcgcgcttatctggagggcacttgtgttgaatggcttaggcgctacctagagaatggcaaggaaacattacagcgcgctgaacctccgaagacacacgttacgcaccatccgctgtctgatcatgaggctacgctgagatgctgggccctgggcttctatcccgctgaaatcactctaacctggcagagggacggagaggaccagacccaggatacagagttggtagaaacccgtccggcaggcgatgggacattccaaaagtgggccgctgtggtggtgcccagcggacaggaacagagatacacctgtcatatgcaacacgaggggctccaagagcccctgactttgtcctgggaaccctcatctcagcctactatccccatcatgggcattgtggcgggattggcggttctggttgtgctcgcagtcttgggcgcagtcgtgacagccatgatgtgtcgacgcaagagtagcggaagagaaggagtgaagagcggggtgtgggccgctaccgttcctcgcgcactgatgagtcttagtagtctagtgaaacccgaaacggccgcttgtgtcgggttacgctgccgcatcagctcacacctgtcttttgtgacctcaagggcgtctggaattagtttctgcaagggcacctag

SEQ ID NO: 124746 - DNA, 786 bp, Artificial Sequence
  derived and/or modified sequence
taacgggtcatggcccctcgcgctttgctactgttactgtcagggggactcgctctgaccgaaacctgggcgtgtagccactctatgagatatttcgatactgccgtctcaagaccaggtaggggcgagcctcggtttatttccgtgggatacgtagatgatacccaatttgtccgcttcgacagcgacgcggctagcccaagaggcgaaccccgagccccatgggtggaacaggaagggccagaatattgggaccgcgagacccagaaatacaagcggcaggcccaggcagatagggtctcactccgcaatctgcgtggctactacaatcagtctgaagatggatctcacaccctccagcgtatgtcaggatgtgatttagggccagatggtcgcctgcttagaggttatgaccagagcgcttatgatggaaaagactacatcgctctgaatgaggatctccgatcttggactgctgccgataccgcggcacaaataactcagcgcaaacttgaggccgcacgcgctgccgaacaattgcgagcctacctcgagggcacctgcgttgaatggcttagacgctatttggagaatgggaaggaaacgctccagcgggcagagccacctaaaacacatgtcacgcaccatcctctcagtgatcacgaagcttcaaggcgctggaacctccctgaagtcggtagctgcggcggtgccttctggactagagctgaaatccacgtaccctacgctgcacgaggggcagccagagccccacacccagaatag

SEQ ID NO: 124747 - DNA, 675 bp, Artificial Sequence
  derived and/or modified sequence
atgcgggtgatggcacctcgggcactgctgctcttgctctctggtgggctggccctgactgagacttgggcgtgcagtcactcaatgcggtattttgatacagctgtgtcacgtcctggaaggggggaaccccgtttcatttctgtcgggtacgtagacgatacacaatttgtaagattcgacagtgatgctgcctcacccagaggagagccaagagcaccctgggtagaacaggagggcccagaatattgggaccgcgaaacacagaaatacaaacgacaggcgcaggcagatcgggtctcactgcggaacttacggggatattataaccagagcgaggatggaagtcacacactgcagcgcatgtctggctgcgacctgggacctgacggacgcctgttacggggatatgatcagtcggcctacgatggcaaggactacatcgctctaaacgaggatctcagatcctggacggccgctgacaccgcagcacagattacacaacggaaactcgaagcggcaagagccgctgagcagctgcgagcgtacctagaaggcacttgtgtagaatggctaaggagatacctggaaaatgggaaagagactctgcagcgcgcagggcaggatcaaaagtcattgttcctaccacaaagactagagctctccaacgaatag

SEQ ID NO: 124748 - DNA, 396 bp, Artificial Sequence
  derived and/or modified sequence
atgcgtgtgatggccccaaggacactgatactgcttctcagcggagccctggcactgaccgagacgtgggcttgcagccatagcatgcgttacttctatacagctgtcagtcgtcccggacgcggagagcccaggttcattgctgtaggctatgttgatgacacccagtttgtgcagttcgattctgatgccgcttcaccccgaggcgagccccgagccccatgggtggaacaggagggcccagagtattgggaccgagagacacagaagtacaagcggcaggctcagaccgatcgcgtgaacctgaggaagttacgcggatactacaaccaatctgaagccgaggatgtatggctacgtcccggtgcgagaagagctccacctcctcgcgtatag

SEQ ID NO: 124749 - DNA, 396 bp, Artificial Sequence
  derived and/or modified sequence
atgagggtgatggccccaagaactctgatactgttgctgtccggtgccttagccctcaccgaaacttgggcatgcagccatagcatgcggtattttgatactgcggtttcacgacctgggaggggtgaaccccgatttatctcggtgggctacgttgatgatactcagttcgtgcggtttgattccgatgccgctagcccaagaggggagccaagggccccttgggtggagcaggaaggacctgaatactgggacagagagacccagaaatataagcgccaggcccaagccgatagagttaacttacggaaactccgaggctattacaaccaaagcgaggacgtcgatgtttggctgcggcctggcgcacgaagggcccctcccccacgcgtgtag

SEQ ID NO: 124750 - DNA, 396 bp, Artificial Sequence
  derived and/or modified sequence
atgagagtgatggcccctcgcactctcattctgctgctatccggcgctctggccctaaccgaaacatgggcttgctcccattctatgcgttacttctacacagctgtatctcgacccggacgcggagaacctcgtttcatcgccgtcgggtatgtcgacgatacgcaattcgttcaattcgattccgacgccgcttctccacgcggtgaacctcgggctccttgggttgaacaggagggcccagaatattgggaccgggagactcagaaatataaaagacaggcccagacagaccgtgtgaacctgcggaagctgagagggtactacaaccagtcggaagctgaggatgtgtggctgaggcctggggctaggagagcgccaccaccccgtgtctag

SEQ ID NO: 124751 - DNA, 396 bp, Artificial Sequence
  derived and/or modified sequence
atgagggtgatggccccacgtaccctgattctgctcctaagcggggctctggccttgacagagacctgggcctgctcacacagcatgcgatacttttacaccgcagtaagtcgcccaggtagaggcgagccaagatttatcgcggtgggctacgtcgacgacacgcagtttgtccgattcgactctgacgccgcttccccgagaggcgagccaagggccccatgggtggagcaagaaggcccagagtattgggacagggaaacacagaaatataagcgtcaagctcagacagatagagtcagccttaggaatctgcgcggttattataatcaaagcgaagccgtggacgtttggttacggccaggtgcccgtagagctccccctccacgtgtttag

SEQ ID NO: 124752 - DNA, 396 bp, Artificial Sequence
  derived and/or modified sequence
atgcgggtaatggctcccagaacacttatactgcttctttccggggcactggccctgaccgagacatgggctggttctcatagtatgcggtatttttacaccgccgtgtctcggccaggtcgcggagaacctcatttcatcgccgtggggtacgtggatgacacgcagttcgtccggttcgattctgatgccgcatcaccacgaggcgaaccgagagccccttgggtggaacaagaaggacccgagtactgggaccgggagacccagaaatacaaacgtcaggcacagacggaccgggttagcttaaggaacctccgaggatactacaaccagtcggaagctgaggacgtgtggcttaggaggggggcacgcagggctcctccacccagggtatag

SEQ ID NO: 124753 - DNA, 1212 bp, Artificial Sequence
  derived and/or modified sequence
atgagggtaatggcgcctcgagccctgcttctgctcttgtccggcggacttgctctaactgaaacgtgggcttgcgagtgtggcgtaggcagggaggccgcatccgccgagaggtccgagggcccaccaggagagccacgtagagaagtgggccgagcaggcctgtcaccaagttctccacccggaagtcactcaatgaggtacttcgacacagccgtgagccgcccaggcagaggggaacctagattcattagcgtgggttacgttgacgatactcagttcgtcagattcgatagcgacgctgcctcaccacgcggtgaaccacgcgctccctgggtggagcaggagggtcccgaatattgggatagggaaactcaaaagtacaagaggcaggcacaagcggacagggtaagcctgcgtaacttgaggggctactacaatcagtcggaagacggttcccacacccttcaacggatgtcaggttgcgatctgggccctgacggcagactgctccggggttacgatcagtccgcttacgacggtaaagattatatcgcattgaacgaagaccttagaagctggacagccgcagacaccgccgcacagatcacacagcgcaagttggaagctgcccgagccgcagagcagctgcgggcttatctcgaagggacctgcgtagagtggctcaggcgttatctggaaaacgggaaggaaaccttgcagcgggctgaacctcccaagacacacgtgacccaccaccctttatcggatcacgaggcaactctgcggtgctgggcactcgggttctatccagcagaaatcactctcacttggcagcgcgatggggaagatcagacccaagacacagaactagtggaaacacggccagctggagatggcacgttccagaagtgggccgctgtggtggtgccttccggacaggagcaacgatacacgtgccatatgcagcatgaagggctgcaggagcccctaacactctcatgggagcctagctcccagccaaccatccctattatggggattgtggccggtctggccgtgctggttgtgctggccgttttgggtgcagtggttaccgcgatgatgtgtaggaggaagtcaagtgggggaaaagggggatcctgtagtcaggcagcatgtagcaattctgcgcagggaagcgacgagtcactgatcacatgcaaggcatag

SEQ ID NO: 124754 - DNA, 1536 bp, Artificial Sequence
  derived and/or modified sequence
tccccagaggccgagatgcgggtcatggcgccccgagccctcctcctgctgctctcgggaggcctggccctgaccgagacctgggcctgctcccactccatgaggtatttcgacaccgccgtgtcccggcccggccgcggagagccccgcttcatctcagtgggctacgtggacgacacgcagttcgtgcggttcgacagcgacgccgcgagtccgagaggggagccgcgggcgccgtgggtggagcaggaggggccggagtattgggaccgggagacacagaagtacaagcgccaggcacaggctgaccgagtgagcctgcggaacctgcgcggctactacaaccagagcgaggacgggtctcacaccctccagaggatgtctggctgcgacctggggcccgacgggcgcctcctccgcgggtatgaccagtccgcctacgacggcaaggattacatcgccctgaacgaggacctgcgctcctggaccgccgcggacaccgcggctcagatcacccagcgcaagttggaggcggcccgtgcggcggagcagctgagagcctacctggagggcacgtgcgtggagtggctccgcagatacctggagaacgggaaggagacgctgcagcgcgcagaacccccaaagacacacgtgacccaccaccccctctctgaccatgaggccaccctgaggtgctgggccctgggcttctaccctgcggagatcacactgacctggcagcgggatggggaggaccagacccaggacaccgagcttgtggagaccaggccagcaggagatggaaccttccagaagtgggcagctgtggtggtgccttctggacaagagcagagatacacgtgccatatgcagcacgaggggctgcaagagcccctcaccctgagctgggagccatcttcccagcccaccatccccatcatgggcatcgttgctggcctggctgtcctggttgtcctagctgtccttggagctgtggtcaccgctatgatgtgtaggaggaagagctcaggtggaaaaggagggagctgctctcaggctgcgtgcagcaacagtgcccagggctctgatgagtctctcatcacttgtaaagcctgagacagctgcctgtgtgggactgagatgcaggatttcttcacacctctcctttgtgacttcaagagcctctggcatctctttctgcaaaggcacctgaatgtgtctgcgttcctgttagcataatgtgaggaggtggagagacagcccacccccgtgtccaccgtgacccctgtccccacactgacctgtgttccctccccgatcatctttcctgttccagagaggtggggctggatgtctccatctctgtctcaaattcatggtgcactgagctgcaacttcttacttccctaatgaagttaagaacctgaatataaatttgtgttctcaaatatttgctatgaagcgttgatggattaattaaataagtcaattcctagaagttgagagagcaaataaagacctgagaaccttccagaa

SEQ ID NO: 124755 - DNA, 1538 bp, Artificial Sequence
  derived and/or modified sequence
cccacccggactcacattctccccagaggccgagatgcgggtcatggcgccccgagccctcctcctgctgctctcgggaggcctggccctgaccgagacctgggcctgctcccactccatgaggtatttcgacaccgccgtgtcccggcccggccgcggagagccccgcttcatctcagtgggctacgtggacgacacgcagttcgtgcggttcgacagcgacgccgcgagtccgagaggggagccgcgggcgccgtgggtggagcaggaggggccggagtattgggaccgggagacacagaagtacaagcgccaggcacaggctgaccgagtgagcctgcggaacctgcgcggctactacaaccagagcgaggacgaggatgtctggctgcgacctggggcccgacgggcgcctcctccgcgggtatgaccagtccgcctacgacggcaaggattacatcgccctgaacgaggacctgcgctcctggaccgccgcggacaccgcggctcagatcacccagcgcaagttggaggcggcccgtgcggcggagcagctgagagcctacctggagggcacgtgcgtggagtggctccgcagatacctggagaacgggaaggagacgctgcagcgcgcagaacccccaaagacacacgtgacccaccaccccctctctgaccatgaggccaccctgaggtgctgggccctgggcttctaccctgcggagatcacactgacctggcagcgggatggggaggaccagacccaggacaccgagcttgtggagaccaggccagcaggagatggaaccttccagaagtgggcagctgtggtggtgccttctggacaagagcagagatacacgtgccatatgcagcacgaggggctgcaagagcccctcaccctgagctgggagccatcttcccagcccaccatccccatcatgggcatcgttgctggcctggctgtcctggttgtcctagctgtccttggagctgtggtcaccgctatgatgtgtaggaggaagagctcaggtggaaaaggagggagctgctctcaggctgcgtgcagcaacagtgcccagggctctgatgagtctctcatcacttgtaaagcctgagacagctgcctgtgtgggactgagatgcaggatttcttcacacctctcctttgtgacttcaagagcctctggcatctctttctgcaaaggcacctgaatgtgtctgcgttcctgttagcataatgtgaggaggtggagagacagcccacccccgtgtccaccgtgacccctgtccccacactgacctgtgttccctccccgatcatctttcctgttccagagaggtggggctggatgtctccatctctgtctcaaattcatggtgcactgagctgcaacttcttacttccctaatgaagttaagaacctgaatataaatttgtgttctcaaatatttgctatgaagcgttgatggattaattaaataagtcaattcctagaagttgagagagcaaataaagacctgagaaccttccagaa

SEQ ID NO: 124756 - DNA, 1554 bp, Artificial Sequence
  derived and/or modified sequence
tccccagaggccgagatgcgggtcatggcgccccgagccctcctcctgctgctctcgggaggcctggccctgaccgagacctgggcctgctcccactccatgaggtatttcgacaccgccgtgtcccggcccggccgcggagagccccgcttcatctcagtgggctacgtggacgacacgcagttcgtgcggttcgacagcgacgccgcgagtccgagaggggagccgcgggcgccgtgggtggagcaggaggggccggagtattgggaccgggagacacagaagtacaagcgccaggcacaggctgaccgagtgagcctgcggaacctgcgcggctactacaaccagagcgaggacgggtctcacaccctccagaggatgtctggctgcgacctggggcccgacgggcgcctcctccgcgggtatgaccagtccgcctacgacggcaaggattacatcgccctgaacgaggacctgcgctcctggaccgccgcggacaccgcggctcagatcacccagcgcaagttggaggcggcccgtgcggcggagcagctgagagcctacctggagggcacgtgcgtggagtggctccgcagatacctggagaacgggaaggagacgctgcagcgcgcagaacccccaaagacacacgtgacccaccaccccctctctgaccatgaggccaccctgaggtgctgggccctgggcttctaccctgcggagatcacactgacctggcagcgggatggggaggaccagacccaggacaccgagcttgtggagaccaggccagcaggagatggaaccttccagaagtgggcagctgtggtggtgccttctggacaagagcagagatacacgtgccatatgcagcacgaggggctgcaagagcccctcaccctgagctgggagccatcttcccagcccaccatccccatcatgggcatcgttgctggcctggctgtcctggttgtcctagctgtccttggagctgtggtcaccgctatgatgtgtaggaggaagagctcagggcattttcttcccacaggtggaaaaggagggagctgctctcaggctgcgtgcagcaacagtgcccagggctctgatgagtctctcatcacttgtaaagcctgagacagctgcctgtgtgggactgagatgcaggatttcttcacacctctcctttgtgacttcaagagcctctggcatctctttctgcaaaggcacctgaatgtgtctgcgttcctgttagcataatgtgaggaggtggagagacagcccacccccgtgtccaccgtgacccctgtccccacactgacctgtgttccctccccgatcatctttcctgttccagagaggtggggctggatgtctccatctctgtctcaaattcatggtgcactgagctgcaacttcttacttccctaatgaagttaagaacctgaatataaatttgtgttctcaaatatttgctatgaagcgttgatggattaattaaataagtcaattcctagaagttgagagagcaaataaagacctgagaaccttccagaa

SEQ ID NO: 124757 - DNA, 1532 bp, Artificial Sequence
  derived and/or modified sequence
tccccagaggccgagatgcgggtcatggcgccccgagccctcctcctgctgctctcgggaggcctggccctgaccgagacctgggcctgctcccactccatgaggtatttcgacaccgccgtgtcccggcccggccgcggagagccccgcttcatctcagtgggctacgtggacgacacgcagttcgtgcggttcgacagcgacgccgcgagtccgagaggggagccgcgggcgccgtgggtggagcaggaggggccggagtattgggaccgggagacacagaagtacaagcgccaggcacaggctgaccgagtgagcctgcggaacctgcgcggctactacaaccagagcgaggacgggtctcacaccctccagaggatgtctggctgcgacctggggcccgacgggcgcctcctccgcgggtatgaccagtccgcctacgacggcaaggattacatcgccctgaacgaggacctgcgctcctggaccgccgcggacaccgcggctcagatcacccagcgcaagttggaggcggcccgtgcggcggagcagctgagagcctacctggagggcacgtgcgtggagtggctccgcagatacctggagaacgggaaggagacgctgcagcgcgcagaacccccaaagacacacgtgacccaccaccccctctctgaccatgaggccaccctgaggtgctgggccctgggcttctaccctgcggagatcacactgacctggcagcgggatggggaggaccagacccaggacaccgagcttgtggagaccaggccagcaggagatggaaccttccagaagtgggcagctgtggtggtgccttctggacaagagcagagatacacgtgccatatgcagcacgaggggctgcaagagcccctcaccctgagctgggagccatcttcccagcccaccatccccatcatgggcatcgttgctggcctggctgtcctggttgtcctagctgtccttggagctgtggtcaccgctatgatgtgtaggaggaagagctcaggtagggaaggggtgaagagcggggtctgggcagcaacagtgcccagggctctgatgagtctctcatcacttgtaaagcctgagacagctgcctgtgtgggactgagatgcaggatttcttcacacctctcctttgtgacttcaagagcctctggcatctctttctgcaaaggcacctgaatgtgtctgcgttcctgttagcataatgtgaggaggtggagagacagcccacccccgtgtccaccgtgacccctgtccccacactgacctgtgttccctccccgatcatctttcctgttccagagaggtggggctggatgtctccatctctgtctcaaattcatggtgcactgagctgcaacttcttacttccctaatgaagttaagaacctgaatataaatttgtgttctcaaatatttgctatgaagcgttgatggattaattaaataagtcaattcctagaagttgagagagcaaataaagacctgagaaccttccagaa

SEQ ID NO: 124758 - DNA, 782 bp, Artificial Sequence
  derived and/or modified sequence
gcgggtcatggcgccccgagccctcctcctgctgctctcgggaggcctggccctgaccgagacctgggcctgctcccactccatgaggtatttcgacaccgccgtgtcccggcccggccgcggagagccccgcttcatctcagtgggctacgtggacgacacgcagttcgtgcggttcgacagcgacgccgcgagtccgagaggggagccgcgggcgccgtgggtggagcaggaggggccggagtattgggaccgggagacacagaagtacaagcgccaggcacaggctgaccgagtgagcctgcggaacctgcgcggctactacaaccagagcgaggacgggtctcacaccctccagaggatgtctggctgcgacctggggcccgacgggcgcctcctccgcgggtatgaccagtccgcctacgacggcaaggattacatcgccctgaacgaggacctgcgctcctggaccgccgcggacaccgcggctcagatcacccagcgcaagttggaggcggcccgtgcggcggagcagctgagagcctacctggagggcacgtgcgtggagtggctccgcagatacctggagaacgggaaggagacgctgcagcgcgcagaacccccaaagacacacgtgacccaccaccccctctctgaccatgaggccagcaggagatggaaccttccagaagtgggcagctgtggtggtgccttctggacaagagcagagatacacgtgccatatgcagcacgaggggctgcaagagcccctcaccctgagc

SEQ ID NO: 124759 - DNA, 966 bp, Artificial Sequence
  derived and/or modified sequence
agatgcgggtcatggcgccccgagccctcctcctgctgctctcgggaggcctggccctgaccgagacctgggcctgctcccactccatgaggtatttcgacaccgccgtgtcccggcccggccgcggagagccccgcttcatctcagtgggctacgtggacgacacgcagttcgtgcggttcgacagcgacgccgcgagtccgagaggggagccgcgggcgccgtgggtggagcaggaggggccggagtattgggaccgggagacacagaagtacaagcgccaggcacaggctgaccgagtgagcctgcggaacctgcgcggctactacaaccagagcgaggacgggtctcacaccctccagaggatgtctggctgcgacctggggcccgacgggcgcctcctccgcgggtatgaccagtccgcctacgacggcaaggattacatcgccctgaacgaggacctgcgctcctggaccgccgcggacaccgcggctcagatcacccagcgcaagttggaggcggcccgtgcggcggagcagctgagagcctacctggagggcacgtgcgtggagtggctccgcagatacctggagaacgggaaggagacgctgcagcgcgcaggtcaggaccagaagtcgctgttcctccctcagagactagaactttccaatgaataggagattatcccagaacccccaaagacacacgtgacccaccaccccctctctgaccatgaggccaccctgaggtgctgggccctgggcttctaccctgcggagatcacactgacctggcagcgggatggggaggaccagacccaggacaccgagcttgtggagaccaggccagcaggagatggaaccttccagaagtgggcagctgtggtggtgccttctggacaagagcagagatacacgtgccatatgcagcacgaggggctgcaagagcccctcaccctgagctggg

SEQ ID NO: 124760 - DNA, 1630 bp, Artificial Sequence
  derived and/or modified sequence
atgcgggtcatggcgccccgagccctcctcctgctgctctcgggaggcctggccctgaccgagacctgggcctgtgagtgcggggttgggagggaagcggcctctgcggagaggagcgaggggccccccggggagccgcgcagggaggtgggtcgggcgggtctcagcccctcctcgcccccaggctcccactccatgaggtatttcgacaccgccgtgtcccggcccggccgcggagagccccgcttcatctcagtgggctacgtggacgacacgcagttcgtgcggttcgacagcgacgccgcgagtccgagaggggagccgcgggcgccgtgggtggagcaggaggggccggagtattgggaccgggagacacagaagtacaagcgccaggcacaggctgaccgagtgagcctgcggaacctgcgcggctactacaaccagagcgaggacgggtctcacaccctccagaggatgtctggctgcgacctggggcccgacgggcgcctcctccgcgggtatgaccagtccgcctacgacggcaaggattacatcgccctgaacgaggacctgcgctcctggaccgccgcggacaccgcggctcagatcacccagcgcaagttggaggcggcccgtgcggcggagcagctgagagcctacctggagggcacgtgcgtggagtggctccgcagatacctggagaacgggaaggagacgctgcagcgcgcagaacccccaaagacacacgtgacccaccaccccctctctgaccatgaggccaccctgaggtgctgggccctgggcttctaccctgcggagatcacactgacctggcagcgggatggggaggaccagacccaggacaccgagcttgtggagaccaggccagcaggagatggaaccttccagaagtgggcagctgtggtggtgccttctggacaagagcagagatacacgtgccatatgcagcacgaggggctgcaagagcccctcaccctgagctgggagccatcttcccagcccaccatccccatcatgggcatcgttgctggcctggctgtcctggttgtcctagctgtccttggagctgtggtcaccgctatgatgtgtaggaggaagagctcaggtggaaaaggagggagctgctctcaggctgcgtgcagcaacagtgcccagggctctgatgagtctctcatcacttgtaaagcctgagacagctgcctgtgtgggactgagatgcaggatttcttcacacctctcctttgtgacttcaagagcctctggcatctctttctgcaaaggcacctgaatgtgtctgcgttcctgttagcataatgtgaggaggtggagagacagcccacccccgtgtccaccgtgacccctgtccccacactgacctgtgttccctccccgatcatctttcctgttccagagaggtggggctggatgtctccatctctgtctcaaattcatggtgcactgagctgcaacttcttacttccctaatgaagttaagaacctgaatataaatttgtgttctcaaatatttgctatgaagcgttgatggattaattaaataagtcaattcctagaagttgagagagcaaataaagacctgagaaccttccag

SEQ ID NO: 124761 - DNA, 1586 bp, Artificial Sequence
  derived and/or modified sequence
tccgcagtcccggttctaaagtccccagtcacccacccggactcacattctccccagaggccgagatgcgggtcatggcgccccgagccctcctcctgctgctctcgggaggcctggccctgaccgagacctgggcctgctcccactccatgaggtatttcgacaccgccgtgtcccggcccggccgcggagagccccgcttcatctcagtgggctacgtggacgacacgcagttcgtgcggttcgacagcgacgccgcgagtccgagaggggagccgcgggcgccgtgggtggagcaggaggggccggagtattgggaccgggagacacagaagtacaagcgccaggcacaggctgaccgagtgagcctgcggaacctgcgcggctactacaaccagagcgaggacgggtctcacaccctccagaggatgtctggctgcgacctggggcccgacgggcgcctcctccgcgggtatgaccagtccgcctacgacggcaaggattacatcgccctgaacgaggacctgcgctcctggaccgccgcggacaccgcggctcagatcacccagcgcaagttggaggcggcccgtgcggcggagcagctgagagcctacctggagggcacgtgcgtggagtggctccgcagatacctggagaacgggaaggagacgctgcagcgcgcagaacccccaaagacacacgtgacccaccaccccctctctgaccatgaggccaccctgaggtgctgggccctgggcttctaccctgcggagatcacactgacctggcagcgggatggggaggaccagacccaggacaccgagcttgtggagaccaggccagcaggagatggaaccttccagaagtgggcagctgtggtggtgccttctggacaagagcagagatacacgtgccatatgcagcacgaggggctgcaagagcccctcaccctgagctgggagccatcttcccagcccaccatccccatcatgggcatcgttgctggcctggctgtcctggttgtcctagctgtccttggagctgtggtcaccgctatgatgtgtaggaggaagagctcaggtggaaaaggagggagctgctctcaggctgcgtgcagcaacagtgcccagggctctgatgagtctctcatcacttgtaaagcctgagacagctgcctgtgtgggactgagatgcaggatttcttcacacctctcctttgtgacttcaagagcctctggcatctctttctgcaaaggcacctgaatgtgtctgcgttcctgttagcataatgtgaggaggtggagagacagcccacccccgtgtccaccgtgacccctgtccccacactgacctgtgttccctccccgatcatctttcctgttccagagaggtggggctggatgtctccatctctgtctcaaattcatggtgcactgagctgcaacttcttacttccctaatgaagttaagaacctgaatataaatttgtgttctcaaatatttgctatgaagcgttgatggattaattaaataagtcaattcctagaagttgagagagcaaataaagacctgagaaccttccagaa

SEQ ID NO: 124762 - protein, 263 aa, Artificial Sequence
  derived and/or modified sequence
MITFLPLLLGLSLGCTGAGGFVAHVESTCLLDDAGTPKDFTYCISFNKDLLTCWDPEENKMAPCEFGVLNSLANVLSQHLNQKDTLMQRLRNGLQNCATHTQPFWGSLTNRTRPPSVQVAKTTPFNTREPVMLACYVWGFYPAEVTITWRKNGKLVMPHSSAHKTAQPNGDWTYQTLSHLALTPSYGDTYTCVVEHIGAPEPILRDWTPGLSPMQTLKVSVSAVTLGLGLIIFSLGVISWRRAGHSSYTPLPGSNYSEGWHIS

SEQ ID NO: 124763 - protein, 263 aa, Artificial Sequence
  derived and/or modified sequence
MITFLPLLLGLSLGCTGAGGFVAHVESTCLLDDAGTPKDFTYCISFNKDLLTCWDPEENKMAPCEFGVLNSLANVLSQHLNQKDTLMQRLRNGLQNCATHTQPFWGSLTNRTRPPSVQVAKTTPFNTREPVMLACYVWGFYPAEVTITWRKNGKLVMPHSSAHKTAQPNGDWTYQTLSHLALTPSYGDTYTCVVEHTGAPEPILRDWTPGLSPMQTLKVSVSAVTLGLGLIIFSLGVISWRRAGHSSYTPLPGSNYSEGWHIS

SEQ ID NO: 124764 - protein, 141 aa, Artificial Sequence
  derived and/or modified sequence
  misc_feature (1)..(1): Xaa can be any naturally occurring amino acid
XTRPPSVQVAKTTPFNTREPVMLACYVWGFYPAEVTITWRKNGKLVMPHSSAHKTAQPNGDWTYQTLSHLALTPSYGDTYTCVVEHIGAPEPILRDWTPGLSPMQTLKVSVSAVTLGLGLIIFSLGVISWRRAGHSRWHIS

SEQ ID NO: 124765 - protein, 257 aa, Artificial Sequence
  derived and/or modified sequence
MITFLPLLLGLSLGCTGAGGFVAHVESTCLLDDAGTPKDFTYCISFNKDLLTCWDPEENKMAPCEFGVLNSLANVLSQHLNQKDTLMQRLRNGLQNCATHTQPFWGSLTNRTRPPSVQVAKTTPFNTREPVMLACYVWGFYPAEVTITWRKNGKLVMPHSSAHKTAQPNGDWTYQTLSHLALTPSYGDTYTCVVEHIGAPEPILRDWTPGLSPMQTLKVSVSAVTLGLGLIIFSLGVISWRRAGHSSDLIISLLFIL

SEQ ID NO: 124766 - protein, 106 aa, Artificial Sequence
  derived and/or modified sequence
VAKTTPFNTREPVMLACYVWGFYPAEVTITWRKNGKLVMPHSSAHKTAQPNGDWTYQTLSHLALTPSYGDTYTCVVEHTGAPEPILRDWSYTPLPGSNYSEGWHIS

SEQ ID NO: 124767 - protein, 141 aa, Artificial Sequence
  derived and/or modified sequence
  misc_feature (1)..(1): Xaa can be any naturally occurring amino acid
XTRPPSVQVAKTTPFNTREPVMLACYVWGFYPAEVTITWRKNGKLVMPHSSAHKTAQPNGDWTYQTLSHLALTPSYGDTYTCVVEHTGAPEPILRDWTPGLSPMQTLKVSVSAVTLGLGLIIFSLGVISWRRAGHSRWHIS

SEQ ID NO: 124768 - protein, 175 aa, Artificial Sequence
  derived and/or modified sequence
MGHEQNQGAALLQMLPLLWLLPHSWAVPEEQSMITFLPLLLGLSLGCTGAGGFVAHVESTCLLDDAGTPKDFTYCISFNKDLLTCWDPEENKMAPCEFGVLNSLANVLSQHLNQKDTLMQRLRNGLQNCATHTQPFWGSLTNRTRPPSVQVAKTTPFNTREPVMLACYVWGFYPA

SEQ ID NO: 124769 - protein, 216 aa, Artificial Sequence
  derived and/or modified sequence
MITFLPLLLGLSLGCTGAGGFVAHVESTCLLDDAGTPKDFTYCISFNKDLLTCWDPEENKMAPCEFGVLNSLANVLSQHLNQKDTLMQRLRNGLQNCATHTQPFWGSLTNRTRPPSVQVAKTTPFNTREPVMLACYVWGFYPAEVTITWRKNGKLVMPHSSAHKTAQPNGDWTYQTLSHLALTPSYGDTYTCVVEHTGAPEPILRDWSKCMADGWN

SEQ ID NO: 124770 - protein, 257 aa, Artificial Sequence
  derived and/or modified sequence
MITFLPLLLGLSLGCTGAGGFVAHVESTCLLDDAGTPKDFTYCISFNKDLLTCWDPEENKMAPCEFGVLNSLANVLSQHLNQKDTLMQRLRNGLQNCATHTQPFWGSLTNRTRPPSVQVAKTTPFNTREPVMLACYVWGFYPAEVTITWRKNGKLVMPHSSAHKTAQPNGDWTYQTLSHLALTPSYGDTYTCVVEHTGAPEPILRDWTPGLSPMQTLKVSVSAVTLGLGLIIFSLGVISWRRAGHSSDLIISLLFIL

SEQ ID NO: 124771 - protein, 106 aa, Artificial Sequence
  derived and/or modified sequence
VAKTTPFNTREPVMLACYVWGFYPAEVTITWRKNGKLVMPHSSAHKTAQPNGDWTYQTLSHLALTPSYGDTYTCVVEHIGAPEPILRDWSYTPLPGSNYSEGWHIS

SEQ ID NO: 124772 - protein, 216 aa, Artificial Sequence [sequence omitted]

SEQ ID NO: 124773 - protein, 56 aa, Artificial Sequence
  derived and/or modified sequence
MPHSSAHKTAQPNGDWTYQTLSHLALTPSYGDTYTCVVEHIGAPEPILRDWRWHIS

SEQ ID NO: 124774 - protein, 68 aa, Artificial Sequence
  derived and/or modified sequence
MPHSSAHKTAQPNGDWTYQTLSHLALTPSYGDTYTCVVEHIGAPEPILRDWSYTPLPGSNYSEGWHIS

SEQ ID NO: 124775 - protein, 95 aa, Artificial Sequence
  derived and/or modified sequence
MPHSSAHKTAQPNGDWTYQTLSHLALTPSYGDTYTCVVEHIGAPEPILRDWTPGLSPMQTLKVSVSAVTLGLGLIIFSLGVISWRRAGHSRWHIS

SEQ ID NO: 124776 - DNA, 792 bp, Artificial Sequence
  derived and/or modified sequence
atgatcaccttcctgcccctgctgctgggcctgagcctgggctgcaccggcgccggcggcttcgtggcccacgtggagagcacctgcctgctggacgacgccggcacccccaaggacttcacctactgcatcagcttcaacaaggacctgctgacctgctgggaccccgaggagaacaagatggccccctgcgagttcggcgtgctgaacagcctggccaacgtgctgagccagcacctgaaccagaaggacaccctgatgcagagactgagaaacggcctgcagaactgcgccacccacacccagcccttctggggcagcctgaccaacagaaccagaccccccagcgtgcaggtggccaagaccacccccttcaacaccagagagcccgtgatgctggcctgctacgtgtggggcttctaccccgccgaggtgaccatcacctggagaaagaacggcaagctggtgatgccccacagcagcgcccacaagaccgcccagcccaacggcgactggacctaccagaccctgagccacctggccctgacccccagctacggcgacacctacacctgcgtggtggagcacatcggcgcccccgagcccatcctgagagactggacccccggcctgagccccatgcagaccctgaaggtgagcgtgagcgccgtgaccctgggcctgggcctgatcatcttcagcctgggcgtgatcagctggagaagagccggccacagcagctacacccccctgcccggcagcaactacagcgagggctggcacatcagctag

SEQ ID NO: 124777 - DNA, 792 bp, Artificial Sequence
  derived and/or modified sequence
atgatcaccttcctgcccctgctgctgggcctgagcctgggctgcaccggcgccggcggcttcgtggcccacgtggagagcacctgcctgctggacgacgccggcacccccaaggacttcacctactgcatcagcttcaacaaggacctgctgacctgctgggaccccgaggagaacaagatggccccctgcgagttcggcgtgctgaacagcctggccaacgtgctgagccagcacctgaaccagaaggacaccctgatgcagagactgagaaacggcctgcagaactgcgccacccacacccagcccttctggggcagcctgaccaacagaaccagaccccccagcgtgcaggtggccaagaccacccccttcaacaccagagagcccgtgatgctggcctgctacgtgtggggcttctaccccgccgaggtgaccatcacctggagaaagaacggcaagctggtgatgccccacagcagcgcccacaagaccgcccagcccaacggcgactggacctaccagaccctgagccacctggccctgacccccagctacggcgacacctacacctgcgtggtggagcacaccggcgcccccgagcccatcctgagagactggacccccggcctgagccccatgcagaccctgaaggtgagcgtgagcgccgtgaccctgggcctgggcctgatcatcttcagcctgggcgtgatcagctggagaagagccggccacagcagctacacccccctgcccggcagcaactacagcgagggctggcacatcagctag

SEQ ID NO: 124778 - DNA, 426 bp, Artificial Sequence
  derived and/or modified sequence
tgaaccagaccccccagcgtgcaggtggccaagaccacccccttcaacaccagagagcccgtgatgctggcctgctacgtgtggggcttctaccccgccgaggtgaccatcacctggagaaagaacggcaagctggtgatgccccacagcagcgcccacaagaccgcccagcccaacggcgactggacctaccagaccctgagccacctggccctgacccccagctacggcgacacctacacctgcgtggtggagcacatcggcgcccccgagcccatcctgagagactggacccccggcctgagccccatgcagaccctgaaggtgagcgtgagcgccgtgaccctgggcctgggcctgatcatcttcagcctgggcgtgatcagctggagaagagccggccacagcagatggcacatcagctag

SEQ ID NO: 124779 - DNA, 774 bp, Artificial Sequence
  derived and/or modified sequence
atgatcaccttcctgcccctgctgctgggcctgagcctgggctgcaccggcgccggcggcttcgtggcccacgtggagagcacctgcctgctggacgacgccggcacccccaaggacttcacctactgcatcagcttcaacaaggacctgctgacctgctgggaccccgaggagaacaagatggccccctgcgagttcggcgtgctgaacagcctggccaacgtgctgagccagcacctgaaccagaaggacaccctgatgcagagactgagaaacggcctgcagaactgcgccacccacacccagcccttctggggcagcctgaccaacagaaccagaccccccagcgtgcaggtggccaagaccacccccttcaacaccagagagcccgtgatgctggcctgctacgtgtggggcttctaccccgccgaggtgaccatcacctggagaaagaacggcaagctggtgatgccccacagcagcgcccacaagaccgcccagcccaacggcgactggacctaccagaccctgagccacctggccctgacccccagctacggcgacacctacacctgcgtggtggagcacatcggcgcccccgagcccatcctgagagactggacccccggcctgagccccatgcagaccctgaaggtgagcgtgagcgccgtgaccctgggcctgggcctgatcatcttcagcctgggcgtgatcagctggagaagagccggccacagcagcgacctgatcatcagcctgctgttcatcctgtag

SEQ ID NO: 124780 - DNA, 321 bp, Artificial Sequence
  derived and/or modified sequence
gtggccaagaccacccccttcaacaccagagagcccgtgatgctggcctgctacgtgtggggcttctaccccgccgaggtgaccatcacctggagaaagaacggcaagctggtgatgccccacagcagcgcccacaagaccgcccagcccaacggcgactggacctaccagaccctgagccacctggccctgacccccagctacggcgacacctacacctgcgtggtggagcacaccggcgcccccgagcccatcctgagagactggagctacacccccctgcccggcagcaactacagcgagggctggcacatcagctag

SEQ ID NO: 124781 - DNA, 426 bp, Artificial Sequence
  derived and/or modified sequence
tgaaccagaccccccagcgtgcaggtggccaagaccacccccttcaacaccagagagcccgtgatgctggcctgctacgtgtggggcttctaccccgccgaggtgaccatcacctggagaaagaacggcaagctggtgatgccccacagcagcgcccacaagaccgcccagcccaacggcgactggacctaccagaccctgagccacctggccctgacccccagctacggcgacacctacacctgcgtggtggagcacaccggcgcccccgagcccatcctgagagactggacccccggcctgagccccatgcagaccctgaaggtgagcgtgagcgccgtgaccctgggcctgggcctgatcatcttcagcctgggcgtgatcagctggagaagagccggccacagcagatggcacatcagctag

SEQ ID NO: 124782 - DNA, 528 bp, Artificial Sequence
  derived and/or modified sequence
atgggccacgagcagaaccagggcgccgccctgctgcagatgctgcccctgctgtggctgctgccccacagctgggccgtgcccgaggagcagagcatgatcaccttcctgcccctgctgctgggcctgagcctgggctgcaccggcgccggcggcttcgtggcccacgtggagagcacctgcctgctggacgacgccggcacccccaaggacttcacctactgcatcagcttcaacaaggacctgctgacctgctgggaccccgaggagaacaagatggccccctgcgagttcggcgtgctgaacagcctggccaacgtgctgagccagcacctgaaccagaaggacaccctgatgcagagactgagaaacggcctgcagaactgcgccacccacacccagcccttctggggcagcctgaccaacagaaccagaccccccagcgtgcaggtggccaagaccacccccttcaacaccagagagcccgtgatgctggcctgctacgtgtggggcttctaccccgcctag

SEQ ID NO: 124783 - DNA, 651 bp, Artificial Sequence
  derived and/or modified sequence
atgatcaccttcctgcccctgctgctgggcctgagcctgggctgcaccggcgccggcggcttcgtggcccacgtggagagcacctgcctgctggacgacgccggcacccccaaggacttcacctactgcatcagcttcaacaaggacctgctgacctgctgggaccccgaggagaacaagatggccccctgcgagttcggcgtgctgaacagcctggccaacgtgctgagccagcacctgaaccagaaggacaccctgatgcagagactgagaaacggcctgcagaactgcgccacccacacccagcccttctggggcagcctgaccaacagaaccagaccccccagcgtgcaggtggccaagaccacccccttcaacaccagagagcccgtgatgctggcctgctacgtgtggggcttctaccccgccgaggtgaccatcacctggagaaagaacggcaagctggtgatgccccacagcagcgcccacaagaccgcccagcccaacggcgactggacctaccagaccctgagccacctggccctgacccccagctacggcgacacctacacctgcgtggtggagcacaccggcgcccccgagcccatcctgagagactggagcaagtgcatggccgacggctggaactag

SEQ ID NO: 124784 - DNA, 774 bp, Artificial Sequence
  derived and/or modified sequence
atgatcaccttcctgcccctgctgctgggcctgagcctgggctgcaccggcgccggcggcttcgtggcccacgtggagagcacctgcctgctggacgacgccggcacccccaaggacttcacctactgcatcagcttcaacaaggacctgctgacctgctgggaccccgaggagaacaagatggccccctgcgagttcggcgtgctgaacagcctggccaacgtgctgagccagcacctgaaccagaaggacaccctgatgcagagactgagaaacggcctgcagaactgcgccacccacacccagcccttctggggcagcctgaccaacagaaccagaccccccagcgtgcaggtggccaagaccacccccttcaacaccagagagcccgtgatgctggcctgctacgtgtggggcttctaccccgccgaggtgaccatcacctggagaaagaacggcaagctggtgatgccccacagcagcgcccacaagaccgcccagcccaacggcgactggacctaccagaccctgagccacctggccctgacccccagctacggcgacacctacacctgcgtggtggagcacaccggcgcccccgagcccatcctgagagactggacccccggcctgagccccatgcagaccctgaaggtgagcgtgagcgccgtgaccctgggcctgggcctgatcatcttcagcctgggcgtgatcagctggagaagagccggccacagcagcgacctgatcatcagcctgctgttcatcctgtag

SEQ ID NO: 124785 - DNA, 321 bp, Artificial Sequence
  derived and/or modified sequence
gtggccaagaccacccccttcaacaccagagagcccgtgatgctggcctgctacgtgtggggcttctaccccgccgaggtgaccatcacctggagaaagaacggcaagctggtgatgccccacagcagcgcccacaagaccgcccagcccaacggcgactggacctaccagaccctgagccacctggccctgacccccagctacggcgacacctacacctgcgtggtggagcacatcggcgcccccgagcccatcctgagagactggagctacacccccctgcccggcagcaactacagcgagggctggcacatcagctag

SEQ ID NO: 124786 - DNA, 651 bp, Artificial Sequence
  derived and/or modified sequence
atgatcaccttcctgcccctgctgctgggcctgagcctgggctgcaccggcgccggcggcttcgtggcccacgtggagagcacctgcctgctggacgacgccggcacccccaaggacttcacctactgcatcagcttcaacaaggacctgctgacctgctgggaccccgaggagaacaagatggccccctgcgagttcggcgtgctgaacagcctggccaacgtgctgagccagcacctgaaccagaaggacaccctgatgcagagactgagaaacggcctgcagaactgcgccacccacacccagcccttctggggcagcctgaccaacagaaccagaccccccagcgtgcaggtggccaagaccacccccttcaacaccagagagcccgtgatgctggcctgctacgtgtggggcttctaccccgccgaggtgaccatcacctggagaaagaacggcaagctggtgatgccccacagcagcgcccacaagaccgcccagcccaacggcgactggacctaccagaccctgagccacctggccctgacccccagctacggcgacacctacacctgcgtggtggagcacatcggcgcccccgagcccatcctgagagactggagcaagtgcatggccgacggctggaactag

SEQ ID NO: 124787 - DNA, 171 bp, Artificial Sequence
  derived and/or modified sequence
atgccccacagcagcgcccacaagaccgcccagcccaacggcgactggacctaccagaccctgagccacctggccctgacccccagctacggcgacacctacacctgcgtggtggagcacatcggcgcccccgagcccatcctgagagactggagatggcacatcagctag

SEQ ID NO: 124788 - DNA, 207 bp, Artificial Sequence
  derived and/or modified sequence
atgccccacagcagcgcccacaagaccgcccagcccaacggcgactggacctaccagaccctgagccacctggccctgacccccagctacggcgacacctacacctgcgtggtggagcacatcggcgcccccgagcccatcctgagagactggagctacacccccctgcccggcagcaactacagcgagggctggcacatcagctag

SEQ ID NO: 124789 - DNA, 288 bp, Artificial Sequence
  derived and/or modified sequence
atgccccacagcagcgcccacaagaccgcccagcccaacggcgactggacctaccagaccctgagccacctggccctgacccccagctacggcgacacctacacctgcgtggtggagcacatcggcgcccccgagcccatcctgagagactggacccccggcctgagccccatgcagaccctgaaggtgagcgtgagcgccgtgaccctgggcctgggcctgatcatcttcagcctgggcgtgatcagctggagaagagccggccacagcagatggcacatcagctag

SEQ ID NO: 124790 - DNA, 792 bp, Artificial Sequence
  derived and/or modified sequence
atgattaccttcctgcctctcttgctgggactgtctctgggatgtacaggcgcggggggctttgtagcacacgttgaatccacatgtctgctggatgatgcaggaaccccaaaggacttcacatattgtattagctttaacaaagatcttctgacttgttgggatcccgaggaaaataagatggcaccttgcgagttcggtgttctgaattccctggccaacgtgctttcccagcacctgaatcagaaagacacattgatgcagcggctgcggaacggattgcagaactgcgccacccacacacaacccttctggggctcactgaccaaccgcaccagacctcccagcgttcaggttgcaaagactacaccattcaatacgagggaacccgtgatgcttgcctgctacgtatgggggttttatccggctgaagtaacaataacctggcggaaaaacggcaagttggtgatgcctcattcctccgcgcataagacagcacaaccgaacggagattggacatatcagaccctctcccatctggcccttaccccgagctacggcgacacttatacctgcgtggtcgagcatattggcgcaccagagcctatccttcgggactggactcccggtctcagccccatgcaaaccctgaaggtctccgtatccgcagtgactttaggattggggctaataatattctccctcggagtgatcagctggcgtcgagccggccactcttcgtatacccccctgccggggtccaactatagcgaggggtggcatatttcttag

SEQ ID NO: 124791 - DNA, 792 bp, Artificial Sequence
  derived and/or modified sequence
atgataacatttctcccactgctgctggggttgtccctgggctgcactggggccgggggattcgtggctcacgtcgagtctacatgtctgcttgacgatgccggcacacccaaggatttcacatactgtatctccttcaataaagacctcttgacatgttgggatccagaagagaataaaatggcgccttgtgaattcggcgtgctgaactccctcgctaatgtcctgagccagcacctgaatcaaaaggacactttgatgcaaagacttcgcaacggattgcaaaattgcgccacccatacccagcctttttgggggagtttaacaaacagaactcgccctccgtccgttcaggtggccaaaacgacaccttttaatactcgagagccagtgatgttggcatgctacgtgtggggtttttatcccgctgaagttaccattacttggaggaagaacgggaagctggtgatgccacacagcagcgcccacaaaacggcacagcctaatggtgactggacctaccagacattaagtcatctcgctttgactcccagctacggggatacttatacttgtgtcgtggagcatataggagcacccgaacctattctgcgagactggacccccggtctgagccctatgcaaactctgaaggtgtccgtctcggccgttacactgggcttgggcttgatcattttttctctcggggtcatctcctggcgccgtgcaggacactcatcttacacacccctcccaggcagcaattatagtgagggctggcacatcagttag

SEQ ID NO: 124792 - DNA, 792 bp, Artificial Sequence
  derived and/or modified sequence
atgattacctttctgccgctcctgttaggcctgagtttggggtgcactggagctggaggatttgtcgcacatgtggagagtacttgcctcttggatgatgcaggcacacctaaggacttcacatactgcatcagtttcaataaggatcttctgacctgctgggatccagaggagaacaagatggccccgtgcgagttcggcgttcttaacagtttggctaatgttttgtcacaacatcttaatcagaaggatactcttatgcagcgcctgaggaatggcttacaaaattgtgctacacatacccagcctttttggggcagcctcacaaaccggactaggccacctagcgtgcaagtggctaaaaccaccccgtttaacacacgggagccagtgatgctcgcttgctacgtctggggattttacccggccgaagtgaccattacatggcggaagaatgggaagctcgtcatgccacacagctctgcccataaaacagcacaacctaacggggactggacctatcagactctgtctcacttggctctgacaccttcttacggggatacttacacttgcgtggtcgagcataccggggctcctgaaccgatcttgcgagattggacgccggggcttagtcccatgcaaacattaaaggtgtctgttagcgcagtgacactgggccttggactcatcattttctcattgggtgtcatttcttggagacgggccggtcactccagttatacacccttgcccggatctaattactccgagggatggcatatctcatag

SEQ ID NO: 124793 - DNA, 426 bp, Artificial Sequence
  derived and/or modified sequence
tgaacccgccccccctcagtgcaagtggcaaagactactccgttcaatacacgggagccagtaatgctggcttgctacgtttgggggttttatccagccgaggtgacaatcacctggaggaaaaacgggaagctagtgatgccgcattcctcagcgcacaagaccgcgcaaccaaacggcgactggacctaccagactctgtcccacctcgcgttaacccccagttacggggacacctacacctgtgtcgtcgagcatataggggctcctgagcccattctgcgtgactggacccccggccttagtccaatgcaaactcttaaggtgtcagtcagtgctgtgacgctcggactcggactgataattttttccctaggcgtcatcagctggagacgggccggccatagcaggtggcacatttcctag

SEQ ID NO: 124794 - DNA, 774 bp, Artificial Sequence
  derived and/or modified sequence
atgatcacctttttgccactcctgctcggtctgtccctcggttgtactggcgcgggaggattcgtcgcacatgtggaaagtacctgcctcctcgatgacgcaggcacgccaaaggacttcacatattgtatcagctttaacaaagacctgcttacctgctgggatccagaagagaacaagatggccccctgcgaattcggtgtactgaattccttagcaaacgtactttcccagcatctaaatcagaaggacacgttgatgcagcgattgcggaacggccttcagaattgtgctacccatactcagcccttttggggctcgctgacgaaccgaacccggcctccctcagttcaggtcgccaagactacaccctttaacacccgcgaacctgttatgcttgcttgctacgtttgggggttttaccccgcagaggtgacaatcacctggcgcaaaaatgggaaactcgtgatgccgcatagttctgcacacaagaccgcgcagcccaacggcgactggacttatcagacattgtcgcacctcgcactgaccccatcatatggggacacatatacctgcgtcgtcgaacacatcggtgctcccgaaccaatacttcgagactggaccccaggcctgtccccaatgcagacgctgaaggtgagtgtatcagccgtcaccctggggctgggcctcattattttttccttgggagtaatctcatggcgacgtgcaggacattctagcgatctgattatttctctgctgttcatcctttag

SEQ ID NO: 124795 - DNA, 321 bp, Artificial Sequence
  derived and/or modified sequence
gttgctaagaccacgccctttaatacccgtgagcccgtgatgttagcctgttacgtgtggggcttctaccccgcagaggttacgatcacctggcggaagaatggcaagcttgttatgccacacagctccgcccataaaaccgctcagcctaacggtgattggacctaccagaccctgtcgcacctggcactgaccccgagttatggcgatacctacacatgtgtcgttgagcacactggagcccccgaaccaattcttcgcgactggtcttacacaccacttccggggtcgaactactccgagggatggcatattagctag

SEQ ID NO: 124796 - DNA, 426 bp, Artificial Sequence
  derived and/or modified sequence
tgaactaggccacccagtgtgcaagtcgctaagacaaccccctttaacacccgtgagccagtcatgctcgcgtgctacgtctgggggttctaccctgccgaggtcaccattacgtggcggaaaaatggcaaattagtcatgccacattcctctgcccataagacggcccaacctaacggtgattggacttatcagactctatcccatcttgccctcaccccgagctacggagatacttacacatgtgtggtcgaacacacaggggctcccgagcctattctgcgggattggacccccggtctctccccaatgcaaacactcaaggtgtctgtttccgccgttactctgggtctcgggttgatcatctttagtctgggagtaatctcatggaggcgcgcagggcatagtcgctggcatatctcatag

SEQ ID NO: 124797 - DNA, 528 bp, Artificial Sequence
  derived and/or modified sequence
atgggccacgaacaaaaccagggtgctgccctcctccaaatgcttccgctgctatggctgcttccccactcttgggctgttccagaggaacagtctatgatcacattcctccccctgctcctgggccttagtttaggatgcaccggcgccgggggcttcgtagcccatgtggaatctacatgtctgttagatgatgcaggtactccaaaggacttcacttattgtatctccttcaataaagaccttttgacatgctgggatcctgaagaaaataaaatggctccctgtgaattcggtgtcctcaacagtctggccaatgtgctgtctcagcatctcaaccagaaggacactttaatgcaaagacttaggaacgggcttcagaattgcgcaacacatacacaacccttctggggctcgcttaccaaccgcaccagacccccaagcgtgcaggtggcaaagactactcctttcaacaccagagaacctgtgatgctggcatgttatgtgtggggcttctacccagcatag

SEQ ID NO: 124798 - DNA, 528 bp, Artificial Sequence
  derived and/or modified sequence
atgggtcatgaacaaaatcagggagcagcgctactgcaaatgctccctttgctctggctgctccctcactcctgggcagtaccagaggagcaatccatgataacttttcttccactgctactggggctgagtctcggatgcaccggcgcgggtgggttcgtggcccatgtggagagtacctgcctgctggacgatgcaggcacccccaaagacttcacctattgtattagctttaataaagatctattaacttgttgggatcccgaggagaataaaatggctccatgcgaattcggtgtgctgaattctctagccaatgtgttatctcagcacctcaatcagaaggacactttaatgcagagactgcggaacggactccagaactgtgcaacccatacccagcccttttggggtagccttacaaatcggactcgccctccctccgtacaggttgccaaaacaaccccatttaacacccgcgaaccagttatgctcgcatgttatgtctggggattttaccccgcatag

SEQ ID NO: 124799 - DNA, 651 bp, Artificial Sequence
  derived and/or modified sequence
atgataacattcctgccgctcttactgggcttgtctttgggttgcaccggcgccggtggattcgtggcacacgtagaaagtacgtgccttcttgacgacgccggtacccctaaggactttacttactgtattagtttcaataaagacctcttgacctgctgggacccggaggaaaataagatggccccatgtgagtttggcgtgcttaattccctggccaacgtgctgtcccagcatctcaaccagaaggatactctgatgcaaaggctgagaaatgggctccagaactgcgcaacccacacccaacccttctggggaagcctgactaaccgcactagaccgccctctgtgcaggtcgctaagactacaccgttcaacacccgggagccagtcatgctggcttgttacgtctggggcttctatcctgccgaggtgacaattacgtggcgcaaaaacgggaaactagtgatgcctcacagttccgcgcacaagaccgctcagccaaatggcgattggacataccagacgctctctcacttggcactgacaccctcttatggtgatacatacacatgcgtggtggagcataccggagctcctgaacccattcttcgggattggtctaagtgtatggctgatggatggaactag

SEQ ID NO: 124800 - DNA, 792 bp, Artificial Sequence
  derived and/or modified sequence
atgattacctttctgccactgctcctaggactaagccttggctgcacaggcgctggaggcttcgtggcccatgtcgaatcaacatgtctgctggatgatgccggtactcccaaagacttcacttactgcatctcatttaacaaagacctcctcacatgttgggatccagaggagaataagatggcgccctgcgaatttggcgtgctgaattcactggccaatgtcttgtctcagcacctcaatcaaaaagatacattgatgcagaggcttagaaacggtcttcagaattgtgccacccacacccagcctttttgggggtccctgacaaatagaacccgccctccatctgtgcaggtggcgaagactactccctttaacactcgtgagccagtgatgctggcctgctacgtgtgggggttttaccctgccgaagtaacaatcacctggcggaaaaatggaaagctggttatgccccatagcagcgctcataaaactgcgcaacctaatggagactggacttaccagaccctgtcgcatctcgccctgactccaagctacggggacacctacacttgtgtcgtcgaacacactggcgcccctgaaccaattttgcgtgattggacgcctgggttatcccccatgcagacactgaaggtctctgtgtcagccgttaccttgggtctgggactcatcatcttctctctgggtgtcatttcatggagacgagctggccacagtagctacactcccctacccggatcgaattactccgagggttggcatatcagctag

SEQ ID NO: 124801 - DNA, 774 bp, Artificial Sequence
  derived and/or modified sequence
atgattactttcctgccgctgctactgggtttgtcactgggatgtacaggcgcaggcggcttcgtcgcgcacgttgaaagcacttgcttgctggacgatgcaggaaccccaaaagacttcacttattgtattagttttaacaaggacctgctgacatgctgggatcctgaggaaaataagatggctccatgcgaattcggcgtgttaaatagcctcgcgaacgtgctgtctcagcaccttaaccagaaggataccctgatgcagagattaaggaacgggttacagaattgtgctactcacacgcagccattctgggggagtttgacaaataggacgagaccccctagcgtacaagtcgccaaaacgaccccattcaacactcgggagcctgtgatgctggcctgctatgtgtggggattttatccggccgaggttacgattacctggcggaagaatgggaagctggtgatgccccacagctctgcacacaagacagctcagcccaatggggactggacataccagactctaagccacctggctcttaccccatcttatggagacacttacacctgtgtcgttgagcacacaggtgcaccagagcccatcttgcgtgattggactcccggccttagtcccatgcagactcttaaggtgtctgtttccgctgtgacactgggactcggacttattatcttcagcctgggtgtgatcagttggcggagagcaggtcactccagtgatcttattatatccctcctcttcattctgtag

SEQ ID NO: 124802 - DNA, 321 bp, Artificial Sequence
  derived and/or modified sequence
gtggctaaaacaacaccatttaacacacgggaaccagtcatgctggcatgttatgtctggggattctatcccgctgaggtaaccatcacatggaggaagaacggtaagcttgtgatgccccactccagcgcgcataagaccgctcagcctaatggagactggacataccagaccctctcacatttagcactcacaccatcttacggagatacttatacctgtgtcgtggagcatattggtgcccccgagccaatcctacgagattggagctatactcctctccctggtagcaattacagcgagggctggcatataagttag

SEQ ID NO: 124803 - DNA, 792 bp, Artificial Sequence
  derived and/or modified sequence
atgatcacgtttttgccacttctcttaggactgagtctgggatgcacaggggcgggggggttcgtcgcacacgtggagagcacttgcctgttagatgacgccggaacccccaaggactttacttactgtatatctttcaacaaagatctactgacttgctgggacccagaggagaataaaatggccccctgcgaatttggcgtgctgaactctctcgcaaacgtgttatcccagcacctgaaccagaaggatacgctgatgcaaagactccgtaatggcctgcagaattgtgctacacatacacagccattctggggatccttaaccaaccggacccgccctccgagtgtccaagtggccaagacgacccctttcaacacgcgggagcctgtgatgttggcttgctacgtgtgggggttttatccggccgaggtgacaatcacatggcgaaaaaacggcaagctcgtaatgccacactcaagtgcacacaagaccgcacagcctaatggtgactggacttatcagacactctctcacttggccctgactccttcatacggggatacctatacgtgtgttgtagagcacacaggcgctccagagccaatattgcgcgactggactcctggtctgtcccccatgcagactctgaaggtgtcagtgagcgcagtgaccctgggactcggactcatcattttctccctgggtgtgatctcatggcgccgggccggccactcatcatatactccgctcccgggatccaattattccgagggctggcatatttcctag

SEQ ID NO: 124804 - DNA, 426 bp, Artificial Sequence
  derived and/or modified sequence
tgaactcgtccccctagcgtccaagtcgctaaaactacccccttcaatacacgggagccggtgatgctcgcctgctacgtttggggcttttatccagccgaggtaacaattacctggaggaaaaatggcaaactcgtgatgccccactccagtgctcataagacggcccaacccaacggcgactggacataccaaaccctgtctcaccttgcccttaccccttcctacggcgatacatacacttgtgttgtggaacacacaggcgcgcccgagcccattctacgtgattggacccccggtctcagtcctatgcagactctcaaggtctctgtgagcgccgttacactgggtctcggtctgataatatttagcttgggcgtgatctcctggaggcgcgcaggccacagccgctggcatatctcttag

SEQ ID NO: 124805 - DNA, 792 bp, Artificial Sequence
  derived and/or modified sequence
atgataacttttctcccgctgctgctgggcctctccctgggttgcaccggcgcgggtgggtttgtcgcccacgtagagagcacctgcctgctcgatgacgcaggcactcctaaagatttcacctattgcatatctttcaacaaggacctgctgacgtgttgggatccagaagagaataaaatggcaccctgtgagtttggcgtactgaattctcttgccaatgtacttagccaacacctcaaccagaaggatactctgatgcaacggctgcgcaacggactacagaactgcgcaactcatacacagcccttttggggtagccttaccaaccggacacggccccccagcgtgcaggtggcaaaaacaactcccttcaatacccgcgaacctgtgatgttggcttgctatgtttggggtttttatccggcggaggttactattacttggaggaaaaatggcaagttggtcatgcctcactcctctgcccacaagaccgcacagccaaatggggactggacctaccaaactttaagccatctagcgctgacaccatcttatggagacacctacacatgcgtggtagagcatatcggagcaccagagcctatcctcagggattggaccccaggccttagtcctatgcagacgctgaaagtttccgtgtcagccgttacccttggcttgggcctgattatcttctccctgggtgtcatttcctggaggcgcgccggacattccagctatactcccctccccggcagcaattatagcgagggctggcatatttcttag

SEQ ID NO: 124806 - DNA, 774 bp, Artificial Sequence
  derived and/or modified sequence
atgatcacgttcctgccattgctattgggactgagcctgggttgcaccggagcaggtggcttcgtcgctcacgttgaatctacatgtctactcgacgacgcagggacacctaaggacttcacctattgcatttcctttaataaagatcttctgacgtgctgggatcctgaagaaaataaaatggcaccctgtgagtttggggtgctaaatagcttggctaacgtgctcagccagcacctaaaccagaaggacactcttatgcagagactgcgtaacggcctacaaaattgtgccacacacacgcaacccttttggggttccctgaccaacaggacccgcccgccaagcgtccaggtggccaagacaacaccttttaacacgagagagccagtcatgctcgcatgttacgtctgggggttttatccagccgaggtgactattacatggcggaaaaatgggaagctggtcatgcctcactcaagtgcccacaagaccgcacagcccaacggcgactggacttaccagacccttagtcacctggctctcacaccatcatacggtgacacttacacttgtgtggtggagcacatcggtgctcccgagcccattttgcgcgactggaccccagggcttagccccatgcagacactcaaggtttcagttagcgctgtcaccctgggcttggggctgataatcttttcacttggggtgatctcttggcgcagagccgggcactcatctgatctaatcattagcctgctgttcatcttatag

SEQ ID NO: 124807 - DNA, 528 bp, Artificial Sequence
  derived and/or modified sequence
atggggcacgagcaaaaccaaggagccgccttgctgcaaatgctgccactgctgtggcttctgccacacagctgggccgtgcctgaagaacagagcatgatcacgttcttgcccctgctgctcggactgagtctgggctgcactggtgctggggggttcgtggcacacgtagagagtacatgcctccttgacgacgcagggacgccaaaggactttacctactgcatctcatttaataaagatctgttgacatgctgggaccccgaagagaacaagatggctccttgtgaatttggggttttgaattcgctggctaacgttctgagccagcacttgaaccagaaggatacattgatgcagagactacgtaatggacttcagaactgtgcaacacacacacagcctttttggggaagtttaaccaaccgaactaggccccctagcgttcaggtggccaagaccacccctttcaacactagggagcccgtgatgctcgcttgttacgtgtggggtttttacccagcatag

SEQ ID NO: 124808 - DNA, 528 bp, Artificial Sequence
  derived and/or modified sequence
atgggccatgagcaaaaccagggcgcagctcttcttcagatgctgcccctcttgtggcttctcccgcattcctgggcagttcctgaggaacaatcaatgatcaccttcctccccttactgcttgggctcagcttgggctgcacgggagcaggaggcttcgtggctcacgtcgagtccacctgcttattagacgacgctggcacccccaaagattttacctattgtatcagcttcaataaagatttattaacctgctgggacccagaagagaataagatggccccttgtgaatttggcgtgctcaattctctggccaatgtgctttctcaacaccttaaccaaaaggatactctcatgcagaggttgcgcaatgggctgcagaactgcgcaactcatacccagccattttggggctccctcacgaacaggacccggcctcccagtgtgcaggttgctaagactacaccttttaacacccgagagcctgtgatgctcgcctgctatgtctggggcttctaccccgcgtag

SEQ ID NO: 124809 - DNA, 321 bp, Artificial Sequence
  derived and/or modified sequence
gtcgccaagactaccccttttaatactcgagaaccagttatgcttgcctgctacgtctgggggttctatcctgcggaggtgaccattacttggcggaagaacggcaagctagtgatgcctcattcctctgcacataagaccgcacagcctaacggagactggacctatcagaccctgagtcacctcgctttgactccgagctacggcgatacatatacgtgcgtggtagagcatattggggcccccgagccaatcctacgcgattggtcgtacactccgctgcctgggtccaactacagcgagggctggcacataagctag

SEQ ID NO: 124810 - DNA, 426 bp, Artificial Sequence
  derived and/or modified sequence
tagacgaggcctccttcagttcaggtagctaaaacaacaccgttcaatacgcgggagcccgttatgcttgcttgctatgtttgggggttctatcccgccgaggtgacaattacttggcggaagaatgggaagcttgtaatgcctcacagctccgctcacaagacggcccagcccaacggagattggacatatcaaacattaagccatttggctctgacgccttcatacggggatacatatacatgcgttgttgagcatactggagccccggagcccatcctgagagactggacacccggtctctccccgatgcaaacgctcaaagtgtctgtcagcgctgtcaccctgggactgggcctcatcatcttttctctgggggtcattagctggcgcagagcaggccactctagatggcacatctcctag

SEQ ID NO: 124811 - DNA, 528 bp, Artificial Sequence
  derived and/or modified sequence
atggggcacgagcagaatcagggagctgccctgctgcagatgctgcccctcctctggttacttccgcactcttgggccgtgccagaagagcagtcgatgattacgtttttacccctcttgctgggtctgagcctcggctgcaccggagctggagggtttgtggcccacgtcgagagcacctgcctgcttgatgatgctggcacacccaaagacttcacatattgcatttcctttaacaaggatctgctgacctgttgggacccagaagagaacaagatggccccctgtgaattcggcgtgctaaattcactggcaaatgtcctgagccagcatcttaaccagaaagatacgctgatgcagagacttcgcaacgggctgcaaaactgcgctacccacactcagccattctggggctcactgaccaacagaacaagacccccatccgtccaggttgccaagacaactcccttcaacacaagagagcccgtaatgctagcttgctatgtgtggggcttctatcccgcttag

SEQ ID NO: 124812 - DNA, 321 bp, Artificial Sequence
  derived and/or modified sequence
gtcgccaaaaccactccttttaatacccgcgaacctgtgatgttggcatgctacgtttggggcttttaccctgcagaagtgactatcacatggcgaaaaaatggtaaacttgttatgccccacagcagtgcgcacaagacggctcagccaaatggtgactggacataccagacactcagccatctggcgctaactccatcatacggcgatacttatacatgcgtagtagagcacaccggggcccccgagccgatcctacgggactggagctacacaccactcccgggatctaattactctgaaggatggcatataagttag

SEQ ID NO: 124813 - DNA, 321 bp, Artificial Sequence
  derived and/or modified sequence
gtggctaaaaccactcccttcaataccagggaacccgttatgttggcctgttatgtctggggattttaccccgcagaggtgaccatcacttggcggaagaatgggaaactggtgatgcctcactcttcggcccacaagaccgcacagccaaacggggattggacgtatcagacgctctctcaccttgccctgacccccagttacggggatacttatacatgcgtcgttgaacatattggggcccctgagcctatcttgagggactggtcgtatacacctcttcctggttctaattactcagaaggttggcatatatcatag

SEQ ID NO: 124814 - DNA, 321 bp, Artificial Sequence
  derived and/or modified sequence
gtagctaagaccaccccgttcaacactcgggaacccgtgatgttggcttgctatgtatggggattctaccccgctgaggtgaccattacctggagaaaaaatggaaaactcgtgatgccccactcaagtgcacacaagaccgcacagcccaacggagattggacataccagactctgagccacctggcgcttacaccctcgtatggtgacacttacacttgtgtcgtcgagcacatcggcgcacccgaaccgatcctgcgcgattggagctatacgcctctaccaggctctaactactccgaagggtggcatatctcctag

SEQ ID NO: 124815 - DNA, 426 bp, Artificial Sequence
  derived and/or modified sequence
tagacacgccccccctctgttcaggtcgctaaaactacacctttcaatacgagggaaccagttatgctcgcctgttacgtgtggggcttttaccccgccgaggtgacgattacctggcgcaaaaatggaaaactggttatgccgcacagcagcgcccataaaacagctcagccaaacggggattggacataccagaccctgtctcacctggctctgactccatcatatggtgatacttatacgtgcgttgtggagcatatcggggcaccagagccaattctgagggactggactcctggcctgagtccaatgcagactctgaaggtaagcgtttctgccgtgactctgggactggggctgataatcttttccctgggtgtgatttcctggagaagggcgggtcatagccggtggcatatctcatag

SEQ ID NO: 124816 - DNA, 321 bp, Artificial Sequence
  derived and/or modified sequence
gtcgccaagaccactccatttaacacaagggagcccgtgatgttggcatgctacgtgtggggattttacccggccgaggtgacaattacatggaggaagaacggtaaactggtgatgccacattccagcgcacataaaaccgctcagcctaacggcgactggacataccagaccctgtctcacttggctctgacacctagctacggggacacctacacctgtgtggtggaacacaccggggcccccgaaccaatactgcgcgactggtcgtacacgccactgccgggatccaattattcggagggctggcatatcagctag

SEQ ID NO: 124817 - DNA, 774 bp, Artificial Sequence
  derived and/or modified sequence
atgatcacctttttacccctgctgttgggcttaagcctgggctgcactggcgccggggggttcgtcgcacacgtggaatccacctgtctcctcgacgatgccggcacccctaaggattttacgtactgtatatcctttaacaaggatttgctgacttgttgggaccccgaggaaaacaagatggctccctgcgaatttggagtgcttaactccctggcaaacgtgctgagccaacacctgaatcagaaggataccctgatgcagcgcctgcgaaatggcctgcaaaactgtgccacacacacccaacctttctggggatccttgaccaacagaactcgtcctccctcggtccaggtggcgaagactaccccattcaacactagagagccagtgatgctggcttgctatgtctggggtttctaccctgccgaggtcaccatcacgtggagaaagaacggtaagctggttatgccacacagttcagctcataaaacagcccaacccaatggagactggacctatcagaccctgtcccatctggcgctgacacctagctatggtgatacttatacatgtgtagtcgagcacaccggcgctccagaaccaatcctgcgggactggacccctggtttatcacccatgcagacactgaaagtgagtgtgagtgccgtgaccctcggactgggattaataatattcagtctgggggttatcagttggcggcgtgccggtcactccagtgacttgatcatctcattactgtttatattatag

SEQ ID NO: 124818 - DNA, 792 bp, Artificial Sequence
  derived and/or modified sequence
atgatcacatttctgcctcttctgctggggctatctctgggatgcacaggtgctggaggatttgtggcccacgttgaatccacatgtcttcttgatgacgctgggacccccaaagatttcacatattgcattagctttaataaagacctgctgacctgttgggaccccgaagagaacaagatggcgccgtgtgagttcggggtcttgaattcacttgcaaatgtgctctcgcagcatctaaatcaaaaggacacccttatgcagcggcttaggaatggcctgcagaactgcgcaactcacactcagcccttttggggcagtttgaccaaccgtaccaggcccccttcggtacaggtggcgaagaccacaccctttaatacgcgcgagcctgtcatgctcgcctgttacgtctggggtttctatcctgctgaagtgacaataacctggaggaagaacggcaaattagttatgccgcactcgtctgcccacaagacagctcagccgaatggcgattggacttaccaaactctgtctcacttggcactgaccccaagttacggggacacctatacatgtgtggtcgagcatatcggcgctccagagcccattctgagagactggacgcctggactgtcccctatgcagacacttaaagtgtctgtgagcgccgtgaccctcggtctgggcctgattattttttcactcggcgtcatatcttggaggagagctggacacagcagctacacccccttaccagggagcaactactctgaaggatggcatatatcgtag

SEQ ID NO: 124819 - DNA, 321 bp, Artificial Sequence
  derived and/or modified sequence
gtggcaaagacaacccccttcaatacccgggagcccgtgatgctagcctgttatgtctggggattttatccagcagaagttaccatcacctggcgtaagaacgggaagctggttatgcctcactctagtgcacataaaaccgcccagccaaacggtgactggacttatcagaccttaagccaccttgcactgactcccagctacggcgatacctacacatgcgtggtcgaacacaccggggccccagagccgatccttcgggactggtcatataccccactgcccggatcaaactacagtgaaggttggcatatcagttag

SEQ ID NO: 124820 - DNA, 426 bp, Artificial Sequence
  derived and/or modified sequence
tgaacccggccacccagcgttcaggtggccaaaacaactcccttcaatacccgagagccagtcatgctggcttgctatgtgtggggattttatccagccgaagtaaccatcacttggaggaaaaatggcaaattggtgatgccacactcgtctgcccacaagaccgcacaaccgaatggcgattggacgtatcaaaccctgtcacacctagccctgacaccttcttatggcgacacatacacatgtgtggtggagcataccggcgcccccgagccaattcttcgtgactggacaccgggtctgtctccaatgcagactctgaaagtttccgttagtgcagtcactctgggcctgggactgatcatcttcagtctgggggtgatttcttggcgcagagcgggacattctagatggcacatcagctag

SEQ ID NO: 124821 - DNA, 774 bp, Artificial Sequence
  derived and/or modified sequence
atgattacctttttacccttgctcctcgggctgtccttaggctgcaccggcgctggcgggttcgttgcacatgtggaatctacctgcctgttagatgatgccggtacccctaaggactttacctattgcatctcatttaataaggacctgctcacctgctgggacccagaggagaataaaatggccccatgtgaattcggcgtccttaattccctggcaaacgtcctcagccagcatttgaaccaaaaagatacactgatgcagcggctaaggaacggactccaaaattgtgctactcatacacagcccttttggggcagccttacaaatcgcactcgtcccccgtcagtccaggtggctaaaaccactcctttcaacacaagagagcctgttatgttagcttgttacgtctggggcttctaccctgctgaggttactattacgtggcgcaagaatggaaagttggttatgccacatagtagcgcacataagacagcccaaccaaacggggactggacttatcagactttgtcccacctcgccctgactccatcttacggcgacacgtacacctgtgtggtggagcacaccggcgccccagagccaatactgagggattggacacccggtctgtcaccaatgcaaacacttaaggtgagtgtatcagctgtgacactggggctcggattgataattttcagcctaggagtgatctcttggcgacgggctggacattctagcgatctcataataagccttctatttatcctttag

SEQ ID NO: 124822 - DNA, 774 bp, Artificial Sequence
  derived and/or modified sequence
atgattacttttctccctctgctgctgggcttgtctttgggatgtacgggagccggcgggttcgtggcgcatgtggagagcacctgcttattggatgacgcaggcacaccaaaggactttacctactgtatctcctttaacaaggatttactgacatgctgggaccctgaagaaaacaaaatggccccctgcgagttcggtgtcctgaatagtcttgcaaacgtgctcagccagcatctgaatcagaaagatacccttatgcagcggttgcgaaacgggcttcaaaactgtgcgactcacacccagccattttgggggagccttaccaatcgcactaggccgcccagtgtccaagtcgctaaaacaacgcccttcaacacgagagagcccgtgatgctcgcttgttatgtctgggggttctaccccgctgaagtgactattacctggaggaagaacggcaagctggtgatgcctcactcatccgcgcataagaccgcacagcccaatggagactggacctatcagaccctgtcccacctggcattgacgccgtcttacggagatacctacacttgtgtggtggaacacatcggagctcctgagccgatccttcgagactggacgccagggctgagtccaatgcaaacccttaaggtgtctgtctccgctgtgacactcggtttaggactcatcattttttcgttaggagttatctcctggagacgtgccggccatagcagcgatttgatcatctcactcctgttcatcttatag

SEQ ID NO: 124823 - DNA, 528 bp, Artificial Sequence
  derived and/or modified sequence
atgggacatgagcagaaccagggagcagcattacttcagatgctccctctactttggttgctcccacactcttgggccgttccagaggaacagagcatgattactttcctacccctgctcttagggctgtcccttgggtgcactggcgcaggcggcttcgttgcccacgttgagtcaacctgtctgttggacgatgcgggcacacccaaagatttcacttactgcatttcgtttaacaaggacctcctcacctgctgggatccggaggagaacaagatggccccgtgcgagtttggtgtcctaaactctctggccaatgtattgtcccaacacctcaatcagaaggacaccctcatgcagaggcttagaaacgggctgcaaaactgcgccacccatacccagccattttgggggtcgctaaccaatcgaacccggcctcccagcgtgcaggtggccaagacaacccccttcaatacccgggaaccagttatgctggcttgttatgtgtgggggttttacccagcttag

SEQ ID NO: 124824 - DNA, 426 bp, Artificial Sequence
  derived and/or modified sequence
tgaacaagacccccaagcgtgcaggtggccaagactactccatttaacactcgtgaaccagtcatgctggcctgctatgtgtggggcttttatccagcggaggtgactatcacgtggcggaagaacggaaagctcgtgatgccccattcctctgcacacaaaacagcccaacccaacggcgactggacataccaaacactctcgcacctcgccctcacaccttcctatggggacacatatacctgtgtggtggaacacattggagctccagagccaatactcagagactggacacctgggctgagccctatgcagaccctgaaggtcagcgtgtctgcagtcaccctggggttaggcttgatcatctttagtctgggcgtgatctcctggcgcagggcaggtcatagccgatggcatatcagttag

SEQ ID NO: 124825 - DNA, 528 bp, Artificial Sequence
  derived and/or modified sequence
atgggccacgaacagaaccagggcgctgctctgttacagatgttgcccctgctttggctgctgccccactcctgggcagtccccgaggaacagtcgatgattacttttctccctctgctgctcggactaagcttaggttgtactggcgccgggggctttgtagcccatgttgaatctacgtgtctgctggatgatgcggggacgcctaaagattttacttactgcatctcttttaataaggatcttctcacgtgttgggaccccgaagaaaataaaatggctccttgtgaattcggcgtgttaaactccctggccaacgtgctgtcccagcacctgaaccagaaagatacgcttatgcagaggctacgcaacggactgcagaactgcgctactcatacacagcccttctgggggtctttgaccaatcgcaccagacctccatccgtccaagttgcaaaaaccactccttttaacactcgggaacctgtcatgttagcttgttatgtgtggggattttaccccgcgtag

SEQ ID NO: 124826 - DNA, 528 bp, Artificial Sequence
  derived and/or modified sequence
atgggccacgagcagaatcagggcgcggctctcctccaaatgcttccactcctgtggctgctgcctcactcttgggccgttccagaggaacaatcgatgatcacctttttgcctctgctgctcggcctgtccctgggatgtaccggagctggtgggttcgtggctcatgttgagagcacctgtcttctcgacgatgcaggcaccccaaaggacttcacctattgcatcagtttcaacaaggatctgctcacttgttgggaccccgaggagaacaaaatggctccatgtgagtttggggtcttaaatagcctggcaaatgttttgagccagcacctaaaccagaaagacactttgatgcagaggcttcgcaatggcctacagaattgtgccactcacacacaacctttctggggcagcctaacgaataggactaggcccccttcagtgcaagtggccaaaaccactccctttaacacgcgggagcctgtcatgttggcatgctacgtatggggattctacccagcttag

SEQ ID NO: 124827 - DNA, 792 bp, Artificial Sequence
  derived and/or modified sequence
atgatcacgttcttacccctgttgttaggcctcagcctgggatgcacaggcgccggcggtttcgtggcccacgtcgagtccacctgccttttggacgacgcagggactcctaaggatttcacttattgtatcagcttcaataaggatctgctgacttgctgggaccctgaagagaataagatggccccctgcgagttcggggtactaaactctcttgcgaatgtactctcccagcacctgaaccaaaaggacacactcatgcagagactccggaatggattacagaactgcgccacgcatacccagcctttctggggcagccttacgaacagaactagaccaccctctgttcaggtcgccaagaccacacctttcaataccagggaacctgtgatgctggcatgctacgtgtggggcttttatccggccgaggtaacaattacgtggaggaagaatggtaaactggtcatgccccatagtagtgcgcacaaaacagcacaacctaatggcgactggacataccagactctgtcccatttggctcttaccccttcctatggcgatacctacacatgcgtagtggagcacaccggggcgccagagcctatcctccgtgattggactcctggcctgagtcccatgcaaactctcaaggtgagtgtgtcagctgtgactttaggcctgggcctaatcatcttctctctgggcgtaatctcctggaggcgcgcagggcacagctcatatacccctctgcccggctccaactactccgaaggctggcacattagctag

SEQ ID NO: 124828 - DNA, 426 bp, Artificial Sequence
  derived and/or modified sequence
tgaacccgcccaccctctgtgcaggtcgccaaaactacgcccttcaatacacgcgagcccgtgatgctggcctgttatgtgtggggattctacccagctgaggtgacgatcacatggaggaagaacgggaagttggttatgccccattccagtgctcacaagaccgcccagcccaacggagactggacttatcagacactgagtcatctggctttaacccccagttatggtgacacttacacttgcgtagtggagcacatcggagcacccgaaccgattttgagagattggactcccggcctgtccccaatgcagacgctgaaggtatccgtttctgcagttactctggggctggggctgattattttttccctcggcgtgatttcctggagaagggctggacactccagatggcatatctcttag

SEQ ID NO: 124829 - DNA, 774 bp, Artificial Sequence
  derived and/or modified sequence
atgattaccttccttccactgctgctgggcctgtcattgggatgtactggggctggtgggttcgtcgcacatgtggaaagcacgtgtcttctcgatgacgccggaaccccaaaagacttcacatattgcatctcttttaataaagacttgttgacatgctgggatcctgaggaaaacaaaatggcaccctgtgagttcggtgtgctgaattctctggcaaatgtactaagtcagcatctgaaccagaaggacacactgatgcaaagactgaggaatgggctgcaaaactgcgcgacgcacacccagcctttttgggggtctctgaccaacagaactaggcccccttctgtgcaggtcgccaaaaccacacccttcaacaccagggagcctgtcatgcttgcctgctatgtgtggggattctatcccgcagaggtcacgatcacttggcgtaaaaacggcaagctggtcatgccccattcatctgcacacaaaactgcccagcctaatggcgattggacataccagaccctttctcacctcgcccttaccccatcttatggcgatacctatacttgtgttgtagaacatatcggcgctccagagcctattcttagagactggacccccggcctgagtccgatgcagacactgaaagtcagtgtctccgcagtaacactcgggctgggcctgattatcttcagcctcggcgtgatttcttggcgacgggcgggacatagctcagacttaattatctctctcctgtttattctctag

SEQ ID NO: 124830 - DNA, 774 bp, Artificial Sequence
  derived and/or modified sequence
atgatcacattcctgccactgctactgggactgagtcttggctgcaccggagcgggtggctttgtggcgcatgtggagtctacctgcctacttgacgatgctggtaccccgaaggattttacatactgcatatcatttaacaaggatctcctgacttgctgggatccagaggaaaataagatggctccttgcgagtttggggttttaaatagcctcgctaatgtgttgtctcaacacctgaatcaaaaagatacgctaatgcagcggctgcgcaatggtctccagaattgcgctactcatacccaaccattttgggggagcctcaccaaccggacccggcccccctccgtgcaggtggcaaagaccacaccttttaatactcgagagccagtcatgctcgcttgctacgtgtgggggttctatccggccgaggtgaccataacctggaggaagaatggaaaactcgtgatgccccactcaagcgcgcataagacagcacaaccaaatggagactggacttatcagacgctctcacacctagcgcttaccccttcctacggtgacacgtacacatgtgtagtcgaacatactggcgctcctgaaccaatcctgagagactggacacccggcttgtcacccatgcagacactaaaggtgagtgtgtctgcagttaccctcgggctgggcctgatcatcttttccctcggagtcattagctggaggagggccgggcactcatcagatctgatcatcagcctgttgttcatcctttag

SEQ ID NO: 124831 - DNA, 651 bp, Artificial Sequence
  derived and/or modified sequence
atgatcaccttcttgccgctgctgctggggctgtcactggggtgtactggtgcaggtggatttgtggcacacgtggagtcgacgtgccttctagacgacgcaggtacccctaaggatttcacatactgcatctcctttaacaaggacctgctgacctgctgggatcctgaggagaataagatggctccttgcgagttcggcgtcctgaactctttggccaacgttctgtcacaacacctcaaccaaaaagacacactgatgcagcgattgcggaacggcctgcaaaactgcgcgacccacacccagccgttttggggttcactgacaaacagaacccgccccccaagtgttcaggtagcaaagaccactcctttcaatactcgcgaaccagtgatgctcgcgtgttacgtttggggattctaccccgctgaggtgaccattacttggcgtaagaacggaaagttggtaatgccccatagctctgcacacaagactgcccagccgaatggggattggacctatcagactctgagccacctcgccctcacaccctcctacggagatacatatacctgcgttgtcgaacacattggggcacctgaacccatcctgcgcgactggtctaaatgcatggcggatggttggaactag

SEQ ID NO: 124832 - DNA, 171 bp, Artificial Sequence
  derived and/or modified sequence
atgcctcacagcagcgcacataagaccgctcaacccaacggagattggacatatcagactctatcccacctggcgttgaccccatcttacggggacacttatacgtgtgtggtggagcatatcggtgccccagagcccattctgcgcgattggcggtggcacatcagctag

SEQ ID NO: 124833 - DNA, 171 bp, Artificial Sequence
  derived and/or modified sequence
atgccacacagttccgcgcacaagacagctcaaccaaacggcgactggacgtaccagacactctcacatctcgccctgaccccttcttatggagacacatacacctgcgtggtggagcatattggagcccccgagccaatcttaagggactggcggtggcacatctcatag

SEQ ID NO: 124834 - DNA, 651 bp, Artificial Sequence
  derived and/or modified sequence
atgatcacattcctacctctgctcctgggacttagcttgggctgtaccggggctgggggcttcgtggcacatgtggagagcacgtgcctgctcgatgatgctggcacccctaaggactttacttattgtatatcattcaacaaagatctgcttacatgctgggacccggaggagaataagatggccccctgcgagtttggcgtcctgaactccctcgccaacgtgctatctcagcaccttaatcagaaggacactttgatgcagagactccggaatggccttcagaattgcgccactcacacccagccattttgggggtcgctcactaatcgcacaagacctccttccgtgcaggtcgctaaaaccaccccatttaatacccgagaacctgtcatgctggcatgttacgtctggggcttctacccagccgaggtcacaatcacctggcgtaaaaatggaaagttggtgatgcctcatagctctgcgcacaaaacagcccagccgaatggagactggacttaccagacactcagccacttagctctgaccccttcctacggcgatacatacacctgtgtggttgagcacaccggcgcaccagagcctattctccgggactggagcaagtgtatggctgatggatggaattag

SEQ ID NO: 124835 - DNA, 207 bp, Artificial Sequence
  derived and/or modified sequence
atgccacacagcagcgctcacaagactgcccagcctaacggcgactggacgtaccagaccttgagtcacctggcactcacacctagctatggagacacctatacctgcgtggtcgaacacattggggctccagaaccaatactgcgagactggagctatactcccctgcccgggagcaattactctgaaggctggcacatctcctag

SEQ ID NO: 124836 - DNA, 171 bp, Artificial Sequence
  derived and/or modified sequence
atgccccattcaagtgcccataaaaccgcccaacctaatggcgactggacataccagacactgagccacctggctttaaccccctcgtacggcgatacctatacctgcgtcgtagagcatattggcgctcccgaacctattctaagggattggcggtggcacatcagctag

SEQ ID NO: 124837 - DNA, 288 bp, Artificial Sequence
  derived and/or modified sequence
atgccccattctagcgctcacaaaacagctcaacctaacggggactggacctaccagactctgtcccatctagccttaacgccctcatatggagacacctacacctgcgtagtagagcacatcggggcacctgaacccattctcagggattggacgcccggactctcccccatgcagacactcaaagtgagcgtgtccgcagtgactctcggactcggcctgatcattttctccctgggagtgatctcttggcggcgtgctggccactcgaggtggcacatctcctag

SEQ ID NO: 124838 - DNA, 207 bp, Artificial Sequence
  derived and/or modified sequence
atgccacactcctccgcccataagactgcccagcctaacggcgattggacataccaaacactcagccatctggcgcttacaccttcatatggagatacttacacttgtgttgttgaacacatcggcgcccccgagcctattcttcgcgactggtcttatacccctctgcccgggagtaattacagcgaaggatggcatatctcttag

SEQ ID NO: 124839 - DNA, 207 bp, Artificial Sequence
  derived and/or modified sequence
atgcctcacagttcagctcacaagacggcccagcctaacggtgactggacttaccagacacttagccacctggccttgactccctcctacggagacacttacacgtgtgtggtggagcatatcggcgcgcccgagcccatccttagagattggtcttacacccccctgcccggttctaactactccgaaggttggcacatttcctag

SEQ ID NO: 124840 - DNA, 288 bp, Artificial Sequence
  derived and/or modified sequence
atgcctcactccagcgcacacaagactgcgcagccgaatggggattggacctaccagactctttcacacctggctctgacgcccagctacggggacacgtatacatgcgttgtggagcacatcggcgcccccgagccaatactacgcgactggacccctggcctgtcacctatgcaaaccttaaaagtatcggtctctgcagtcaccctggggcttggcctgatcatcttctcccttggcgtcattagctggcgacgtgccgggcattcgaggtggcacatatcatag

SEQ ID NO: 124841 - DNA, 651 bp, Artificial Sequence
  derived and/or modified sequence
atgatcacctttctgccactgctgctgggacttagcctaggctgtaccggagccggagggtttgtcgcccacgtcgaaagcacctgcctgcttgatgatgctggaacccccaaagattttacttattgtatcagctttaataaggatctactcacatgttgggaccctgaggaaaacaaaatggccccttgtgaattcggcgtgctcaatagcctcgccaatgttctctcccagcacctgaaccaaaaagacacccttatgcagcggttgaggaacgggctgcagaactgcgcaacacatacccaaccattttggggatctctaacgaatagaacgcgtcccccctccgtgcaagtggctaagacgaccccgtttaacaccagagaacctgttatgcttgcctgctatgtgtggggtttctatccagcagaggtgacgatcacatggcgtaagaatgggaaactggtcatgcctcacagctctgctcacaagactgcccagccaaacggtgactggacttaccaaacattgagccacctggcgctgacacctagttacggggatacctatacatgcgtagtggagcacattggcgctccagagcccatcctccgcgactggagtaagtgcatggctgacggctggaattag

SEQ ID NO: 124842 - DNA, 207 bp, Artificial Sequence
  derived and/or modified sequence
atgcctcacagctcggctcacaaaacagcgcagccaaacggggattggacataccagaccctgtcccacctggccctgactccttcctacggcgatacatacacctgcgtcgtggagcatatcggggccccggagcctatcttacgggattggagctatacaccgctgcccggatctaattacagtgaaggctggcacataagctag

SEQ ID NO: 124843 - DNA, 651 bp, Artificial Sequence
  derived and/or modified sequence
atgattacatttttgccgctcctgttgggattatcgttaggatgtacgggtgcagggggatttgttgcccatgttgagagcacctgcctcctagatgatgccggcacccctaaagatttcacttactgcattagcttcaataaagatctcttgacatgttgggatcccgaggaaaataaaatggccccttgtgagttcggcgtcctcaattccctggccaacgtcctctcacagcacctgaatcagaaggacaccctgatgcagagactgaggaacggcttgcagaactgtgctacacatactcagcccttttgggggtcattgacaaatcggaccagaccgcctagtgttcaggtcgctaaaaccaccccgttcaacaccagggaaccagttatgcttgcttgttacgtatggggattctaccctgcagaagttactattacatggagaaagaatggaaaactggtgatgccacacagttctgcccacaagacggcgcaaccaaacggagactggacctatcagaccctgagtcacttagccttgactccttcttacggggacacttatacatgtgtagtcgaacatactggcgctccggaacccatcctgcgcgactggtcaaaatgtatggcagacgggtggaactag

SEQ ID NO: 124844 - DNA, 651 bp, Artificial Sequence
  derived and/or modified sequence
atgattacattccttcctctgttgctgggtctgtccctgggctgtacgggcgctggagggtttgtggctcacgtcgaaagcacatgcctcctcgatgatgctgggacccccaaggacttcacgtattgcattagtttcaataaggacttgttaacctgttgggatcccgaagagaacaaaatggccccttgcgagtttggcgttctgaacagcttggccaacgttctctcacagcatctgaatcagaaggacacactaatgcagcggttgaggaatggcctgcaaaactgcgccactcacacccagcccttctggggctccctgactaaccgtacaagaccgccatccgtgcaggtggctaagacaacaccattcaacacccgagagcccgtgatgctggcctgttacgtgtgggggttctatcccgccgaggtgaccattacatggcggaagaatgggaagttagttatgcctcattcctcagctcacaaaaccgcccagcccaatggggattggacctaccagactttgtcccacctggccttgactccctcatatggtgacacctatacctgcgtggttgaacacacaggtgcccctgagccaattttacgggactggagcaagtgtatggcggacgggtggaactag

SEQ ID NO: 124845 - DNA, 171 bp, Artificial Sequence
  derived and/or modified sequence
atgcctcatagctctgcgcacaaaacagctcagccaaatggcgattggacataccagactctttcccacctggcactgacacccagttacggcgatacttacacgtgcgtggtggaacacattggcgctcccgaacccatcttaagagattggagatggcacatttcttag

SEQ ID NO: 124846 - DNA, 651 bp, Artificial Sequence
  derived and/or modified sequence
atgattacttttctacccctgctactcggattatccctgggttgtactggagccggtggtttcgttgctcacgtcgagtcaacatgtctactggacgacgcaggtacccctaaggacttcacttactgtatttctttcaacaaagatcttctgacatgctgggacccagaggaaaataaaatggccccctgcgagttcggcgtactgaactccctggctaatgtattgtctcagcatctgaaccagaaggacacattaatgcagagactgcggaacggcttgcaaaactgtgctacacacacacagcccttctggggctcattgacaaaccggacacgccccccaagtgtgcaggtagccaaaaccacaccctttaacaccagggaaccagtgatgctggcatgttatgtatggggtttttaccctgcagaagtcaccataacatggagaaaaaatggcaagctcgtgatgcctcatagcagcgcccataagaccgcccagcccaacggggactggacctatcaaaccctcagccacttggcccttactccctcgtacggggacacctacacttgcgtggtggaacatataggagcccctgagccgatcttaagggactggtcgaagtgtatggccgacgggtggaactag

SEQ ID NO: 124847 - DNA, 288 bp, Artificial Sequence
  derived and/or modified sequence
atgccacacagttccgcacacaaaactgcgcaacccaacggggactggacgtatcagaccctatctcaccttgccctcacaccatcctatggcgacacatatacatgtgtcgttgagcatattggtgcacctgagcctatcctgcgggactggacacccgggctctcccccatgcagactttgaaggtgagcgtgagcgccgtgacccttggacttggcttgattattttcagtttgggcgtcatctcttggcgacgggcgggacactctcgttggcatatcagctag

SEQ ID NO: 124848 - DNA, 288 bp, Artificial Sequence
  derived and/or modified sequence
atgccccattcgagtgctcacaagactgcacaacctaatggagactggacatatcaaacgttgtcacacctagcactcactccctcatacggagatacttatacttgcgtcgtggagcacatcggggcgccagaacctatcctgagagattggacaccgggtctctctccaatgcagaccctgaaagtgtcagtgagcgcagttacactcggactcggccttatcattttctcacttggtgtgatttcgtggcgccgcgctggccacagcaggtggcacatctcctag

SEQ ID NO: 124849 - DNA, 651 bp, Artificial Sequence
  derived and/or modified sequence
atgataaccttcctaccgctcctgctcggcctgagtctcggatgcaccggtgccggcggatttgtggcgcatgtcgagtccacctgcttgcttgatgacgctggaacaccaaaggattttacttattgtatctccttcaacaaagatcttctcacctgctgggaccctgaagaaaacaagatggccccatgcgagtttggagtcttgaactcccttgccaatgttcttagccagcatctgaaccagaaagacacactgatgcaacggcttcgcaatgggttacagaattgtgccacacacacccagcccttttggggtagtctaactaatcgcacgcgaccccctagcgtccaggtggctaaaaccacccctttcaatacacgggagcctgtgatgcttgcctgctatgtgtggggattttacccagccgaagtgacaatcacctggagaaagaacggaaagctcgtgatgccacactcctccgctcacaagacggcccagcctaatggcgattggacatatcagactttgtcacacttagcacttactccatcatacggggacacgtacacctgcgtcgtggagcatatcggtgccccagaacccattctgcgggattggtctaaatgcatggccgatggatggaactag

SEQ ID NO: 124850 - DNA, 1397 bp, Artificial Sequence
  derived and/or modified sequence
atttgtccctgcctacctagccaatctgtccctgtttgggacactggactcccgtgagctggaaggaacagatttaatatctaggggctgggtatccccacatcactcatttggggggtcaagggacccgggcaatatagtattctgctcagtgtctggagatcatctacccaggctggggcttctgggacaggcgaggacccacggaccctggaagagctggtccaggggactgaactcccggcatctttacagagcagagcatgatcacattcctgccgctgctgctggggctcagcctgggctgcacaggagcaggtggcttcgtggcccatgtggaaagcacctgtctgttggatgatgctgggactccaaaggatttcacatactgcatctccttcaacaaggatctgctgacctgctgggatccagaggagaataagatggccccttgcgaatttggggtgctgaatagcttggcgaatgtcctctcacagcacctcaaccaaaaagacaccctgatgcagcgcttgcgcaatgggcttcagaattgtgccacacacacccagcccttctggggatcactgaccaacaggacacggccaccatctgtgcaagtagccaaaaccactccttttaacacgagggagcctgtgatgctggcctgctatgtgtggggcttctatccagcagaagtgactatcacgtggaggaagaacgggaagcttgtcatgcctcacagcagtgcgcacaagactgcccagcccaatggagactggacataccagaccctctcccatttagccttaaccccctcttacggggacacttacacctgtgtggtagagcacattggggctcctgagcccatccttcgggactggacacctgggctgtcccccatgcagaccctgaaggtttctgtgtctgcagtgactctgggcctgggcctcatcatcttctctcttggtgtgatcagctggcggagagctggccactctagttacactcctcttcctgggtccaattattcagaaggatggcacatttcctagaggcagaatcctacaacttccactccaagtgagaaggagattcaaactcaatgatgctaccatgcctctccaacatcttcaaccccctgacattatcttggatcctatggtttctccatccaattctttgaatttcccagtctcccctatgtaaaacttagcaacttgggggacctcattcctgggactatgctgtaaccaaattattgtccaaggctatatttctgggatgaatataatctgaggaagggagttaaagaccctcctggggctctcagtgtgccatagaggacagcaactggtgattgtttcagagaaataaactttggtggaaatattgtt

SEQ ID NO: 124851 - DNA, 1397 bp, Artificial Sequence
  derived and/or modified sequence
atttgtccctgcctacctagccaatctgtccctgtttgggacactggactcccgtgagctggaaggaacagatttaatatctaggggctgggtatccccacatcactcatttggggggtcaagggacccgggcaatatagtattctgctcagtgtctggagatcatctacccaggctggggcttctgggacaggcgaggacccacggaccctggaagagctggtccaggggactgaactcccggcatctttacagagcagagcatgatcacattcctgccgctgctgctggggctcagcctgggctgcacaggagcaggtggcttcgtggcccatgtggaaagcacctgtctgttggatgatgctgggactccaaaggatttcacatactgcatctccttcaacaaggatctgctgacctgctgggatccagaggagaataagatggccccttgcgaatttggggtgctgaatagcttggcgaatgtcctctcacagcacctcaaccaaaaagacaccctgatgcagcgcttgcgcaatgggcttcagaattgtgccacacacacccagcccttctggggatcactgaccaacaggacacggccaccatctgtgcaagtagccaaaaccactccttttaacacgagggagcctgtgatgctggcctgctatgtgtggggcttctatccagcagaagtgactatcacgtggaggaagaacgggaagcttgtcatgcctcacagcagtgcgcacaagactgcccagcccaatggagactggacataccagaccctctcccatttagccttaaccccctcttacggggacacttacacctgtgtggtagagcacattggggctcctgagcccatccttcgggactggacacctgggctgtcccccatgcagaccctgaaggtttctgtgtctgcagtgactctgggcctgggcctcatcatcttctctcttggtgtgatcagctggcggagagctggccactctagttacactcctcttcctgggtccaattattcagaaggatggcacatttcctagaggcagaatcctacaacttccactccaagtgagaaggagattcaaactcaatgatgctaccatgcctctccaacatcttcaaccccctgacattatcttggatcctatggtttctccatccaattctttgaatttcccagtctcccctatgtaaaacttagcaatttgggggacctcattcctgggactatgctgtaaccaaattattgtccaaggctatatttctgggatgaatataatctgaggaagggagttaaagaccctcctggggctctcagtgtgccatagaggacagcaactggtgattgtttcagagaaataaactttggtggaaatattgtt

SEQ ID NO: 124852 - DNA, 1397 bp, Artificial Sequence
  derived and/or modified sequence
atttgtccctgcctacctagccaatctgtccctgtttgggacactggactcccgtgagctggaaggaacagatttaatatctaggggctgggtatccccacatcactcatttggggggtcaagggacccgggcaatatagtattctgctcagtgtctggagatcatctacccaggctggggcttctgggacaggcgaggacccacggaccctggaagagctggtccaggggactgaactcccggcatctttacagagcagagcatgatcacattcctgccgctgctgctggggctcagcctgggctgcacaggagcaggtggcttcgtggcccatgtggaaagcacctgtctgttggatgatgctgggactccaaaggatttcacatactgcatctccttcaacaaggatctgctgacctgctgggatccagaggagaataagatggccccttgcgaatttggggtgctgaatagcttggcgaatgtcctctcacagcacctcaaccaaaaagacaccctgatgcagcgcttgcgcaatgggcttcagaattgtgccacacacacccagcccttctggggatcactgaccaacaggacacggccaccatctgtgcaagtagccaaaaccactccttttaacacgagggagcctgtgatgctggcctgctatgtgtggggcttctatccagcagaagtgactatcacgtggaggaagaacgggaagcttgtcatgcctcacagcagtgcgcacaagactgcccagcccaatggagactggacataccagaccctctcccatttagccttaaccccctcttacggggacacttacacctgtgtggtagagcacactggggctcctgagcccatccttcgggactggacacctgggctgtcccccatgcagaccctgaaggtttctgtgtctgcagtgactctgggcctgggcctcatcatcttctctcttggtgtgatcagctggcggagagctggccactctagttacactcctcttcctgggtccaattattcagaaggatggcacatttcctagaggcagaatcctacaacttccactccaagtgagaaggagattcaaactcaatgatgctaccatgcctctccaacatcttcaaccccctgacattatcttggatcctatggtttctccatccaattctttgaatttcccagtctcccctatgtaaaacttagcaacttgggggacctcattcctgggactatgctgtaaccaaattattgtccaaggctatatttctgggatgaatataatctgaggaagggagttaaagaccctcctggggctctcagtgtgccatagaggacagcaactggtgattgtttcagagaaataaactttggtggaaatattgtt

SEQ ID NO: 124853 - DNA, 766 bp, Artificial Sequence
  derived and/or modified sequence
gacacggccaccatctgtgcaagtagccaaaaccactccttttaacacgagggagcctgtgatgctggcctgctatgtgtggggcttctatccagcagaagtgactatcacgtggaggaagaacgggaagcttgtcatgcctcacagcagtgcgcacaagactgcccagcccaatggagactggacataccagaccctctcccatttagccttaaccccctcttacggggacacttacacctgtgtggtagagcacattggggctcctgagcccatccttcgggactggacacctgggctgtcccccatgcagaccctgaaggtttctgtgtctgcagtgactctgggcctgggcctcatcatcttctctcttggtgtgatcagctggcggagagctggccactctagatggcacatttcctagaggcagaatcctacaacttccactccaagtgagaaggagattcaaactcaatgatgctaccatgcctctccaacatcttcaaccccctgacattatcttggatcctatggtttctccatccaattctttgaatttcccagtctcccctatgtaaaacttagcaacttgggggacctcattcctgggactatgctgtaaccaaattattgtccaaggctatatttctgggatgaatataatctgaggaagggagttaaagaccctcctggggctctcagtgtgccatagaggacagcaactggtgattgtttcagagaaataaactttggtggaaatattgtt

SEQ ID NO: 124854 - DNA, 1347 bp, Artificial Sequence
  derived and/or modified sequence
tcccgtgagctggaaggaacagatttaatatctaggggctgggtatccccacatcactcatttggggggtcaagggacccgggcaatatagtattctgctcagtgtctggagatcatctacccaggctggggcttctgggacaggcgaggacccacggaccctggaagagctggtccaggggactgaactcccggcatctttacagagcagagcatgatcacattcctgccgctgctgctggggctcagcctgggctgcacaggagcaggtggcttcgtggcccatgtggaaagcacctgtctgttggatgatgctgggactccaaaggatttcacatactgcatctccttcaacaaggatctgctgacctgctgggatccagaggagaataagatggccccttgcgaatttggggtgctgaatagcttggcgaatgtcctctcacagcacctcaaccaaaaagacaccctgatgcagcgcttgcgcaatgggcttcagaattgtgccacacacacccagcccttctggggatcactgaccaacaggacacggccaccatctgtgcaagtagccaaaaccactccttttaacacgagggagcctgtgatgctggcctgctatgtgtggggcttctatccagcagaagtgactatcacgtggaggaagaacgggaagcttgtcatgcctcacagcagtgcgcacaagactgcccagcccaatggagactggacataccagaccctctcccatttagccttaaccccctcttacggggacacttacacctgtgtggtagagcacattggggctcctgagcccatccttcgggactggacacctgggctgtcccccatgcagaccctgaaggtttctgtgtctgcagtgactctgggcctgggcctcatcatcttctctcttggtgtgatcagctggcggagagctggccactctagtgacctcattatctcccttttatttattctgtaggatggcacatttcctagaggcagaatcctacaacttccactccaagtgagaaggagattcaaactcaatgatgctaccatgcctctccaacatcttcaaccccctgacattatcttggatcctatggtttctccatccaattctttgaatttcccagtctcccctatgtaaaacttagcaatttgggggacctcattcctgggactatgctgtaaccaaattattgtccaaggctatatttctgggatgaatataatctgaggaagggagttaaagaccctcctggggctctcagtgtgccatagaggacagcaactggtgattgtttcagagaaataaactttggtggaaatattgtt

SEQ ID NO: 124855 - DNA, 663 bp, Artificial Sequence
  derived and/or modified sequence
gtagccaaaaccactccttttaacacgagggagcctgtgatgctggcctgctatgtgtggggcttctatccagcagaagtgactatcacgtggaggaagaacgggaagcttgtcatgcctcacagcagtgcgcacaagactgcccagcccaatggagactggacataccagaccctctcccatttagccttaaccccctcttacggggacacttacacctgtgtggtagagcacactggggctcctgagcccatccttcgggactggagttacactcctcttcctgggtccaattattcagaaggatggcacatttcctagaggcagaatcctacaacttccactccaagtgagaaggagattcaaactcaatgatgctaccatgcctctccaacatcttcaaccccctgacattatcttggatcctatggtttctccatccaattctttgaatttcccagtctcccctatgtaaaacttagcaacttgggggacctcattcctgggactatgctgtaaccaaattattgtccaaggctatatttctgggatgaatataatctgaggaagggagttaaagaccctcctggggctctcagtgtgccatagaggacagcaactggtgattgtttcagagaaataaactttggtggaaatattgtt

SEQ ID NO: 124856 - DNA, 766 bp, Artificial Sequence
  derived and/or modified sequence
gacacggccaccatctgtgcaagtagccaaaaccactccttttaacacgagggagcctgtgatgctggcctgctatgtgtggggcttctatccagcagaagtgactatcacgtggaggaagaacgggaagcttgtcatgcctcacagcagtgcgcacaagactgcccagcccaatggagactggacataccagaccctctcccatttagccttaaccccctcttacggggacacttacacctgtgtggtagagcacactggggctcctgagcccatccttcgggactggacacctgggctgtcccccatgcagaccctgaaggtttctgtgtctgcagtgactctgggcctgggcctcatcatcttctctcttggtgtgatcagctggcggagagctggccactctagatggcacatttcctagaggcagaatcctacaacttccactccaagtgagaaggagattcaaactcaatgatgctaccatgcctctccaacatcttcaaccccctgacattatcttggatcctatggtttctccatccaattctttgaatttcccagtctcccctatgtaaaacttagcaacttgggggacctcattcctgggactatgctgtaaccaaattattgtccaaggctatatttctgggatgaatataatctgaggaagggagttaaagaccctcctggggctctcagtgtgccatagaggacagcaactggtgattgtttcagagaaataaactttggtggaaatattgtt

SEQ ID NO: 124857 - DNA, 612 bp, Artificial Sequence
  derived and/or modified sequence
gatctaaggccaccctctcggggagggagttggggaagctgggttggctgggttggtagctcctacctactgtgtggcaagaaggtatgggtcatgaacagaaccaaggagctgcgctgctacagatgttaccacttctgtggctgctaccccactcctgggccgtccctgaagagcagagcatgatcacattcctgccgctgctgctggggctcagcctgggctgcacaggagcaggtggcttcgtggcccatgtggaaagcacctgtctgttggatgatgctgggactccaaaggatttcacatactgcatctccttcaacaaggatctgctgacctgctgggatccagaggagaataagatggccccttgcgaatttggggtgctgaatagcttggcgaatgtcctctcacagcacctcaaccaaaaagacaccctgatgcagcgcttgcgcaatgggcttcagaattgtgccacacacacccagcccttctggggatcactgaccaacaggacacggccaccatctgtgcaagtagccaaaaccactccttttaacacgagggagcctgtgatgctggcctgctatgtgtggggcttctatccagcag

SEQ ID NO: 124858 - DNA, 1425 bp, Artificial Sequence
  derived and/or modified sequence
cagatttaatatctaggggctgggtatccccacatcactcatttggggggtcaagggacccgggcaatatagtattctgctcagtgtctggagatcatctacccaggctggggcttctgggacaggcgaggacccacggaccctggaagagctggtccaggggactgaactcccggcatctttacagagcagagcatgatcacattcctgccgctgctgctggggctcagcctgggctgcacaggagcaggtggcttcgtggcccatgtggaaagcacctgtctgttggatgatgctgggactccaaaggatttcacatactgcatctccttcaacaaggatctgctgacctgctgggatccagaggagaataagatggccccttgcgaatttggggtgctgaatagcttggcgaatgtcctctcacagcacctcaaccaaaaagacaccctgatgcagcgcttgcgcaatgggcttcagaattgtgccacacacacccagcccttctggggatcactgaccaacaggacacggccaccatctgtgcaagtagccaaaaccactccttttaacacgagggagcctgtgatgctggcctgctatgtgtggggcttctatccagcagaagtgactatcacgtggaggaagaacgggaagcttgtcatgcctcacagcagtgcgcacaagactgcccagcccaatggagactggacataccagaccctctcccatttagccttaaccccctcttacggggacacttacacctgtgtggtagagcacactggggctcctgagcccatccttcgggactggagtaagtgtatggcagatggatggaattagggtcaaagcagagaaaatgagatgtggatcgatacatggtacatggtagacagcgaagtgctgaaaatggggactgagtctggaggaacttacggggggcttaggaccagaatggggaaatgggataaagaaatggaaatatttaggttggtgcaaaagtaattgcagtttttgccattactttcagtggcaaaaaccgcaattacttttgcaccagtttaatatttagtctgtgctattgctgctctggtggtgtggctgatgttgctgcgtctatgtttgagggtgagaggggagcgtgcttgctttgaaatgaggctgtaaatttggcaatcatattttcagaaccccaaattgtaatacactattctagcctccttagatttcaactattctggtgccagaagcagatgggagctgaaggaatgatgaaggttgaagaaggggggcttttcttggtgtggggcagtactgcatttggcctgctctaccaagcatacgggagtagtaaagccacggctggcagaccatttggcatgcatgctcaggggccagtggataaagaattacttacagttc

SEQ ID NO: 124859 - DNA, 1347 bp, Artificial Sequence
  derived and/or modified sequence
tcccgtgagctggaaggaacagatttaatatctaggggctgggtattcccacatcactcatttggggggtcaagggacccgggcaatatagtattctgctcagtgtctggagatcatctacccaggctggggcttctgggacaggcgaggacccacggaccctggaagagctggtccaggggactgaactcccggcatctttacagagcagagcatgatcacattcctgccgctgctgctggggctcagcctgggctgcacaggagcaggtggcttcgtggcccatgtggaaagcacctgtctgttggatgatgctgggactccaaaggatttcacatactgcatctccttcaacaaggatctgctgacctgctgggatccagaggagaataagatggccccttgcgaatttggggtgctgaatagcttggcgaatgtcctctcacagcacctcaaccaaaaagacaccctgatgcagcgcttgcgcaatgggcttcagaattgtgccacacacacccagcccttctggggatcactgaccaacaggacacggccaccatctgtgcaagtagccaaaaccactccttttaacacgagggagcctgtgatgctggcctgctatgtgtggggcttctatccagcagaagtgactatcacgtggaggaagaacgggaagcttgtcatgcctcacagcagtgcgcacaagactgcccagcccaatggagactggacataccagaccctctcccatttagccttaaccccctcttacggggacacttacacctgtgtggtagagcacactggggctcctgagcccatccttcgggactggacacctgggctgtcccccatgcagaccctgaaggtttctgtgtctgcagtgactctgggcctgggcctcatcatcttctctcttggtgtgatcagctggcggagagctggccactctagtgacctcattatctcccttttatttattctgtaggatggcacatttcctagaggcagaatcctacaacttccactccaagtgagaaggagattcaaactcaatgatgctaccatgcctctccaatatcttcaaccccctgacattatcttggatcctatggtttctccatccaattctttgaatttcccagtctcccctatgtaaaacttagcaatttgggggacctcattcctgggactatgctgtaaccaaattattgtccaaggctatatttctgggatgaatataatctgaggaagggagttaaagaccctcctggggctctcagtgtgccatagaggacagcaactggtgattgtttcagagaaataaactttggtggaaatattgtt

SEQ ID NO: 124860 - DNA, 663 bp, Artificial Sequence
  derived and/or modified sequence
gtagccaaaaccactccttttaacacgagggagcctgtgatgctggcctgctatgtgtggggcttctatccagcagaagtgactatcacgtggaggaagaacgggaagcttgtcatgcctcacagcagtgcgcacaagactgcccagcccaatggagactggacataccagaccctctcccatttagccttaaccccctcttacggggacacttacacctgtgtggtagagcacattggggctcctgagcccatccttcgggactggagttacactcctcttcctgggtccaattattcagaaggatggcacatttcctagaggcagaatcctacaacttccactccaagtgagaaggagattcaaactcaatgatgctaccatgcctctccaacatcttcaaccccctgacattatcttggatcctatggtttctccatccaattctttgaatttcccagtctcccctatgtaaaacttagcaacttgggggacctcattcctgggactatgctgtaaccaaattattgtccaaggctatatttctgggatgaatataatctgaggaagggagttaaagaccctcctggggctctcagtgtgccatagaggacagcaactggtgattgtttcagagaaataaactttggtggaaatattgtt

SEQ ID NO: 124861 - DNA, 1397 bp, Artificial Sequence
  derived and/or modified sequence
atttgtccctgcctacctagccaatctgtccctgtttgggacactggactcccgtgagctggaaggaacagatttaatatctaggggctgggtattcccacatcactcatttggggggtcaagggacccgggcaatatagtattctgctcagtgtctggagatcatctacccaggctggggcttctgggacaggcgaggacccacggaccctggaagagctggtccaggggactgaactcccggcatctttacagagcagagcatgatcacattcctgccgctgctgctggggctcagcctgggctgcacaggagcaggtggcttcgtggcccatgtggaaagcacctgtctgttggatgatgctgggactccaaaggatttcacatactgcatctccttcaacaaggatctgctgacctgctgggatccagaggagaataagatggccccttgcgaatttggggtgctgaatagcttggcgaatgtcctctcacagcacctcaaccaaaaagacaccctgatgcagcgcttgcgcaatgggcttcagaattgtgccacacacacccagcccttctggggatcactgaccaacaggacacggccaccatctgtgcaagtagccaaaaccactccttttaacacgagggagcctgtgatgctggcctgctatgtgtggggcttctatccagcagaagtgactatcacgtggaggaagaacgggaagcttgtcatgcctcacagcagtgcgcacaagactgcccagcccaatggagactggacataccagaccctctcccatttagccttaaccccctcttacggggacacttacacctgtgtggtagagcacactggggctcctgagcccatccttcgggactggacacctgggctgtcccccatgcagaccctgaaggtttctgtgtctgcagtgactctgggcctgggcctcatcatcttctctcttggtgtgatcagctggcggagagctggccactctagttacactcctcttcctgggtccaattattcagaaggatggcacatttcctagaggcagaatcctacaacttccactccaagtgagaaggagattcaaactcaatgatgctaccatgcctctccaatatcttcaaccccctgacattatcttggatcctatggtttctccatccaattctttgaatttcccagtctcccctatgtaaaacttagcaatttgggggacctcattcctgggactatgctgtaaccaaattattgtccaaggctatatttctgggatgaatataatctgaggaagggagttaaagaccctcctggggctctcagtgtgccatagaggacagcaactggtgattgtttcagagaaataaactttggtggaaatattgtt

SEQ ID NO: 124862 - DNA, 1347 bp, Artificial Sequence
  derived and/or modified sequence
tcccgtgagctggaaggaacagatttaatatctaggggctgggtatccccacatcactcatttggggggtcaagggacccgggcaatatagtattctgctcagtgtctggagatcatctacccaggctggggcttctgggacaggcgaggacccacggaccctggaagagctggtccaggggactgaactcccggcatctttacagagcagagcatgatcacattcctgccgctgctgctggggctcagcctgggctgcacaggagcaggtggcttcgtggcccatgtggaaagcacctgtctgttggatgatgctgggactccaaaggatttcacatactgcatctccttcaacaaggatctgctgacctgctgggatccagaggagaataagatggccccttgcgaatttggggtgctgaatagcttggcgaatgtcctctcacagcacctcaaccaaaaagacaccctgatgcagcgcttgcgcaatgggcttcagaattgtgccacacacacccagcccttctggggatcactgaccaacaggacacggccaccatctgtgcaagtagccaaaaccactccttttaacacgagggagcctgtgatgctggcctgctatgtgtggggcttctatccagcagaagtgactatcacgtggaggaagaacgggaagcttgtcatgcctcacagcagtgcgcacaagactgcccagcccaatggagactggacataccagaccctctcccatttagccttaaccccctcttacggggacacttacacctgtgtggtagagcacattggggctcctgagcccatccttcgggactggacacctgggctgtcccccatgcagaccctgaaggtttctgtgtctgcagtgactctgggcctgggcctcatcatcttctctcttggtgtgatcagctggcggagagctggccactctagtgacctcattatctcccttttatttattctgtaggatggcacatttcctagaggcagaatcctacaacttccactccaagtgagaaggagattcaaactcaatgatgctaccatgcctctccaacatcttcaaccccctgacattatcttggatcctatggtttctccatccaattctttgaatttcccagtctcccctatgtaaaacttagcaacttgggggacctcattcctgggactatgctgtaaccaaattattgtccaaggctatatttctgggatgaatataatctgaggaagggagttaaagaccctcctggggctctcagtgtgccatagaggacagcaactggtgattgtttcagagaaataaactttggtggaaatattgtt

SEQ ID NO: 124863 - DNA, 663 bp, Artificial Sequence
  derived and/or modified sequence
gtagccaaaaccactccttttaacacgagggagcctgtgatgctggcctgctatgtgtggggcttctatccagcagaagtgactatcacgtggaggaagaacgggaagcttgtcatgcctcacagcagtgcgcacaagactgcccagcccaatggagactggacataccagaccctctcccatttagccttaaccccctcttacggggacacttacacctgtgtggtagagcacactggggctcctgagcccatccttcgggactggagttacactcctcttcctgggtccaattattcagaaggatggcacatttcctagaggcagaatcctacaacttccactccaagtgagaaggagattcaaactcaatgatgctaccatgcctctccaatatcttcaaccccctgacattatcttggatcctatggtttctccatccaattctttgaatttcccagtctcccctatgtaaaacttagcaatttgggggacctcattcctgggactatgctgtaaccaaattattgtccaaggctatatttctgggatgaatataatctgaggaagggagttaaagaccctcctggggctctcagtgtgccatagaggacagcaactggtgattgtttcagagaaataaactttggtggaaatattgtt

SEQ ID NO: 124864 - DNA, 663 bp, Artificial Sequence
  derived and/or modified sequence
gtagccaaaaccactccttttaacacgagggagcctgtgatgctggcctgctatgtgtggggcttctatccagcagaagtgactatcacgtggaggaagaacgggaagcttgtcatgcctcacagcagtgcgcacaagactgcccagcccaatggagactggacataccagaccctctcccatttagccttaaccccctcttacggggacacttacacctgtgtggtagagcacattggggctcctgagcccatccttcgggactggagttacactcctcttcctgggtccaattattcagaaggatggcacatttcctagaggcagaatcctacaacttccactccaagtgagaaggagattcaaactcaatgatgctaccatgcctctccaacatcttcaaccccctgacattatcttggatcctatggtttctccatccaattctttgaatttcccagtctcccctatgtaaaacttagcaatttgggggacctcattcctgggactatgctgtaaccaaattattgtccaaggctatatttctgggatgaatataatctgaggaagggagttaaagaccctcctggggctctcagtgtgccatagaggacagcaactggtgattgtttcagagaaataaactttggtggaaatattgtt

SEQ ID NO: 124865 - DNA, 1347 bp, Artificial Sequence
  derived and/or modified sequence
tcccgtgagctggaaggaacagatttaatatctaggggctgggtatccccacatcactcatttggggggtcaagggacccgggcaatatagtattctgctcagtgtctggagatcatctacccaggctggggcttctgggacaggcgaggacccacggaccctggaagagctggtccaggggactgaactcccggcatctttacagagcagagcatgatcacattcctgccgctgctgctggggctcagcctgggctgcacaggagcaggtggcttcgtggcccatgtggaaagcacctgtctgttggatgatgctgggactccaaaggatttcacatactgcatctccttcaacaaggatctgctgacctgctgggatccagaggagaataagatggccccttgcgaatttggggtgctgaatagcttggcgaatgtcctctcacagcacctcaaccaaaaagacaccctgatgcagcgcttgcgcaatgggcttcagaattgtgccacacacacccagcccttctggggatcactgaccaacaggacacggccaccatctgtgcaagtagccaaaaccactccttttaacacgagggagcctgtgatgctggcctgctatgtgtggggcttctatccagcagaagtgactatcacgtggaggaagaacgggaagcttgtcatgcctcacagcagtgcgcacaagactgcccagcccaatggagactggacataccagaccctctcccatttagccttaaccccctcttacggggacacttacacctgtgtggtagagcacactggggctcctgagcccatccttcgggactggacacctgggctgtcccccatgcagaccctgaaggtttctgtgtctgcagtgactctgggcctgggcctcatcatcttctctcttggtgtgatcagctggcggagagctggccactctagtgacctcattatctcccttttatttattctgtaggatggcacatttcctagaggcagaatcctacaacttccactccaagtgagaaggagattcaaactcaatgatgctaccatgcctctccaacatcttcaaccccctgacattatcttggatcctatggtttctccatccaattctttgaatttcccagtctcccctatgtaaaacttagcaacttgggggacctcattcctgggactatgctgtaaccaaattattgtccaaggctatatttctgggatgaatataatctgaggaagggagttaaagaccctcctggggctctcagtgtgccatagaggacagcaactggtgattgtttcagagaaataaactttggtggaaatattgtt

SEQ ID NO: 124866 - DNA, 792 bp, Artificial Sequence
  derived and/or modified sequence
atgatcaccttcctgcccctgctgctgggcctgagcctgggctgcaccggggccggcggctttgtggcccacgtggagagcacctgcctgctggatgatgctggcacccccaaggacttcacctactgcatctccttcaacaaggacctgctgacctgctgggaccctgaggagaacaagatggccccctgtgaatttggagtgctgaacagcctggccaacgtgctgagccagcacctgaaccagaaggacaccctgatgcagaggctgagaaatggcctgcagaactgtgccacccacacccagcccttctggggcagcctgaccaacagaacccggccccccagcgtgcaggtggccaagaccacccccttcaacacccgggagcctgtgatgctggcctgctacgtgtggggcttctacccagctgaggtgaccatcacctggaggaagaatggcaagctggtgatgccccacagcagcgcccacaagacagcccagcccaatggagactggacctaccagaccctgagccacctggccctgacccccagctatggagacacctacacctgtgtggtggagcacatcggggcccctgagcccatcctgcgggactggaccccaggcctgagccccatgcagaccctgaaggtgtctgtgtctgctgtgaccctgggcctgggcctcatcatcttcagcctgggcgtcatctcctggaggagagctggccacagcagctacacccccctgcccggcagcaactacagcgagggctggcacatctcctag

SEQ ID NO: 124867 - DNA, 766 bp, Artificial Sequence
  derived and/or modified sequence
gacacggccaccatctgtgcaagtagccaaaaccactccttttaacacgagggagcctgtgatgctggcctgctatgtgtggggcttctatccagcagaagtgactatcacgtggaggaagaacgggaagcttgtcatgcctcacagcagtgcgcacaagactgcccagcccaatggagactggacataccagaccctctcccatttagccttaaccccctcttacggggacacttacacctgtgtggtagagcacactggggctcctgagcccatccttcgggactggacacctgggctgtcccccatgcagaccctgaaggtttctgtgtctgcagtgactctgggcctgggcctcatcatcttctctcttggtgtgatcagctggcggagagctggccactctagatggcacatttcctagaggcagaatcctacaacttccactccaagtgagaaggagattcaaactcaatgatgctaccatgcctctccaatatcttcaaccccctgacattatcttggatcctatggtttctccatccaattctttgaatttcccagtctcccctatgtaaaacttagcaatttgggggacctcattcctgggactatgctgtaaccaaattattgtccaaggctatatttctgggatgaatataatctgaggaagggagttaaagaccctcctggggctctcagtgtgccatagaggacagcaactggtgattgtttcagagaaataaactttggtggaaatattgtt

SEQ ID NO: 124868 - DNA, 792 bp, Artificial Sequence
  derived and/or modified sequence
atgatcaccttcctgcccctgctgctgggcctgagcctgggctgcaccggggccggcggctttgtggcccacgtggagagcacctgcctgctggatgatgctggcacccccaaggacttcacctactgcatctccttcaacaaggacctgctgacctgctgggaccctgaggagaacaagatggccccctgtgaatttggagtgctgaacagcctggccaacgtgctgagccagcacctgaaccagaaggacaccctgatgcagaggctgagaaatggcctgcagaactgtgccacccacacccagcccttctggggcagcctgaccaacagaacccggccccccagcgtgcaggtggccaagaccacccccttcaacacccgggagcctgtgatgctggcctgctacgtgtggggcttctacccagctgaggtgaccatcacctggaggaagaatggcaagctggtgatgccccacagcagcgcccacaagacagcccagcccaatggagactggacctaccagaccctgagccacctggccctgacccccagctatggagacacctacacctgtgtggtggagcacactggagcccctgagcccatcctgcgggactggaccccaggcctgagccccatgcagaccctgaaggtgtctgtgtctgctgtgaccctgggcctgggcctcatcatcttcagcctgggcgtcatctcctggaggagagctggccacagcagctacacccccctgcccggcagcaactacagcgagggctggcacatctcctag

SEQ ID NO: 124869 - DNA, 426 bp, Artificial Sequence
  derived and/or modified sequence
tgaacacggccccccagcgtgcaggtggccaagaccacccccttcaacacccgggagcctgtgatgctggcctgctacgtgtggggcttctacccagctgaggtgaccatcacctggaggaagaatggcaagctggtgatgccccacagcagcgcccacaagacagcccagcccaatggagactggacctaccagaccctgagccacctggccctgacccccagctatggagacacctacacctgtgtggtggagcacatcggggcccctgagcccatcctgcgggactggaccccaggcctgagccccatgcagaccctgaaggtgtctgtgtctgctgtgaccctgggcctgggcctcatcatcttcagcctgggcgtcatctcctggaggagagctggccacagccgctggcacatctcctag

SEQ ID NO: 124870 - DNA, 774 bp, Artificial Sequence
  derived and/or modified sequence
atgatcaccttcctgcccctgctgctgggcctgagcctgggctgcaccggggccggcggctttgtggcccacgtggagagcacctgcctgctggatgatgctggcacccccaaggacttcacctactgcatctccttcaacaaggacctgctgacctgctgggaccctgaggagaacaagatggccccctgtgaatttggagtgctgaacagcctggccaacgtgctgagccagcacctgaaccagaaggacaccctgatgcagaggctgagaaatggcctgcagaactgtgccacccacacccagcccttctggggcagcctgaccaacagaacccggccccccagcgtgcaggtggccaagaccacccccttcaacacccgggagcctgtgatgctggcctgctacgtgtggggcttctacccagctgaggtgaccatcacctggaggaagaatggcaagctggtgatgccccacagcagcgcccacaagacagcccagcccaatggagactggacctaccagaccctgagccacctggccctgacccccagctatggagacacctacacctgtgtggtggagcacatcggggcccctgagcccatcctgcgggactggaccccaggcctgagccccatgcagaccctgaaggtgtctgtgtctgctgtgaccctgggcctgggcctcatcatcttcagcctgggcgtcatctcctggaggagagctggccacagcagtgacctgatcatcagcctgctcttcatcctgtag

SEQ ID NO: 124871 - DNA, 321 bp, Artificial Sequence
  derived and/or modified sequence
gtggccaagaccacccccttcaacacccgggagcctgtgatgctggcctgctacgtgtggggcttctacccagctgaggtgaccatcacctggaggaagaatggcaagctggtgatgccccacagcagcgcccacaagacagcccagcccaatggagactggacctaccagaccctgagccacctggccctgacccccagctatggagacacctacacctgtgtggtggagcacactggagcccctgagcccatcctgcgggactggagctacacccccctgcccggcagcaactacagcgagggctggcacatctcctag

SEQ ID NO: 124872 - DNA, 426 bp, Artificial Sequence
  derived and/or modified sequence
tgaacacggccccccagcgtgcaggtggccaagaccacccccttcaacacccgggagcctgtgatgctggcctgctacgtgtggggcttctacccagctgaggtgaccatcacctggaggaagaatggcaagctggtgatgccccacagcagcgcccacaagacagcccagcccaatggagactggacctaccagaccctgagccacctggccctgacccccagctatggagacacctacacctgtgtggtggagcacactggagcccctgagcccatcctgcgggactggaccccaggcctgagccccatgcagaccctgaaggtgtctgtgtctgctgtgaccctgggcctgggcctcatcatcttcagcctgggcgtcatctcctggaggagagctggccacagccgctggcacatctcctag

SEQ ID NO: 124873 - DNA, 528 bp, Artificial Sequence
  derived and/or modified sequence
atgggccacgagcagaaccagggcgccgccctgctgcagatgctgcccctgctgtggctgctgccccacagctgggccgtgcctgaggagcagagcatgatcaccttcctgcccctgctgctgggcctgagcctgggctgcaccggggccggcggctttgtggcccacgtggagagcacctgcctgctggatgatgctggcacccccaaggacttcacctactgcatctccttcaacaaggacctgctgacctgctgggaccctgaggagaacaagatggccccctgtgaatttggagtgctgaacagcctggccaacgtgctgagccagcacctgaaccagaaggacaccctgatgcagaggctgagaaatggcctgcagaactgtgccacccacacccagcccttctggggcagcctgaccaacagaacccggccccccagcgtgcaggtggccaagaccacccccttcaacacccgggagcctgtgatgctggcctgctacgtgtggggcttctacccagcctag

SEQ ID NO: 124874 - DNA, 651 bp, Artificial Sequence
  derived and/or modified sequence
atgatcaccttcctgcccctgctgctgggcctgagcctgggctgcaccggggccggcggctttgtggcccacgtggagagcacctgcctgctggatgatgctggcacccccaaggacttcacctactgcatctccttcaacaaggacctgctgacctgctgggaccctgaggagaacaagatggccccctgtgaatttggagtgctgaacagcctggccaacgtgctgagccagcacctgaaccagaaggacaccctgatgcagaggctgagaaatggcctgcagaactgtgccacccacacccagcccttctggggcagcctgaccaacagaacccggccccccagcgtgcaggtggccaagaccacccccttcaacacccgggagcctgtgatgctggcctgctacgtgtggggcttctacccagctgaggtgaccatcacctggaggaagaatggcaagctggtgatgccccacagcagcgcccacaagacagcccagcccaatggagactggacctaccagaccctgagccacctggccctgacccccagctatggagacacctacacctgtgtggtggagcacactggagcccctgagcccatcctgcgggactggagcaagtgcatggctgatggctggaactag

SEQ ID NO: 124875 - DNA, 774 bp, Artificial Sequence
  derived and/or modified sequence
atgatcaccttcctgcccctgctgctgggcctgagcctgggctgcaccggggccggcggctttgtggcccacgtggagagcacctgcctgctggatgatgctggcacccccaaggacttcacctactgcatctccttcaacaaggacctgctgacctgctgggaccctgaggagaacaagatggccccctgtgaatttggagtgctgaacagcctggccaacgtgctgagccagcacctgaaccagaaggacaccctgatgcagaggctgagaaatggcctgcagaactgtgccacccacacccagcccttctggggcagcctgaccaacagaacccggccccccagcgtgcaggtggccaagaccacccccttcaacacccgggagcctgtgatgctggcctgctacgtgtggggcttctacccagctgaggtgaccatcacctggaggaagaatggcaagctggtgatgccccacagcagcgcccacaagacagcccagcccaatggagactggacctaccagaccctgagccacctggccctgacccccagctatggagacacctacacctgtgtggtggagcacactggagcccctgagcccatcctgcgggactggaccccaggcctgagccccatgcagaccctgaaggtgtctgtgtctgctgtgaccctgggcctgggcctcatcatcttcagcctgggcgtcatctcctggaggagagctggccacagcagtgacctgatcatcagcctgctcttcatcctgtag

SEQ ID NO: 124876 - DNA, 321 bp, Artificial Sequence
  derived and/or modified sequence
gtggccaagaccacccccttcaacacccgggagcctgtgatgctggcctgctacgtgtggggcttctacccagctgaggtgaccatcacctggaggaagaatggcaagctggtgatgccccacagcagcgcccacaagacagcccagcccaatggagactggacctaccagaccctgagccacctggccctgacccccagctatggagacacctacacctgtgtggtggagcacatcggggcccctgagcccatcctgcgggactggagctacacccccctgcccggcagcaactacagcgagggctggcacatctcctag

SEQ ID NO: 124877 - DNA, 651 bp, Artificial Sequence
  derived and/or modified sequence
atgatcaccttcctgcccctgctgctgggcctgagcctgggctgcaccggggccggcggctttgtggcccacgtggagagcacctgcctgctggatgatgctggcacccccaaggacttcacctactgcatctccttcaacaaggacctgctgacctgctgggaccctgaggagaacaagatggccccctgtgaatttggagtgctgaacagcctggccaacgtgctgagccagcacctgaaccagaaggacaccctgatgcagaggctgagaaatggcctgcagaactgtgccacccacacccagcccttctggggcagcctgaccaacagaacccggccccccagcgtgcaggtggccaagaccacccccttcaacacccgggagcctgtgatgctggcctgctacgtgtggggcttctacccagctgaggtgaccatcacctggaggaagaatggcaagctggtgatgccccacagcagcgcccacaagacagcccagcccaatggagactggacctaccagaccctgagccacctggccctgacccccagctatggagacacctacacctgtgtggtggagcacatcggggcccctgagcccatcctgcgggactggagcaagtgcatggctgatggctggaactag

SEQ ID NO: 124878 - DNA, 171 bp, Artificial Sequence
  derived and/or modified sequence
atgccccacagcagcgcccacaagacagcccagcccaatggagactggacctaccagaccctgagccacctggccctgacccccagctatggagacacctacacctgtgtggtggagcacatcggggcccctgagcccatcctgcgggactggcgctggcacatctcctag

SEQ ID NO: 124879 - DNA, 207 bp, Artificial Sequence
  derived and/or modified sequence
atgccccacagcagcgcccacaagacagcccagcccaatggagactggacctaccagaccctgagccacctggccctgacccccagctatggagacacctacacctgtgtggtggagcacatcggggcccctgagcccatcctgcgggactggagctacacccccctgcccggcagcaactacagcgagggctggcacatctcctag

SEQ ID NO: 124880 - DNA, 288 bp, Artificial Sequence
  derived and/or modified sequence
atgccccacagcagcgcccacaagacagcccagcccaatggagactggacctaccagaccctgagccacctggccctgacccccagctatggagacacctacacctgtgtggtggagcacatcggggcccctgagcccatcctgcgggactggaccccaggcctgagccccatgcagaccctgaaggtgtctgtgtctgctgtgaccctgggcctgggcctcatcatcttcagcctgggcgtcatctcctggaggagagctggccacagccgctggcacatctcctag

SEQ ID NO: 124881 - DNA, 766 bp, Artificial Sequence
  derived and/or modified sequence
gacacggccaccatctgtgcaagtagccaaaaccactccttttaacacgagggagcctgtgatgctggcctgctatgtgtggggcttctatccagcagaagtgactatcacgtggaggaagaacgggaagcttgtcatgcctcacagcagtgcgcacaagactgcccagcccaatggagactggacataccagaccctctcccatttagccttaaccccctcttacggggacacttacacctgtgtggtagagcacattggggctcctgagcccatccttcgggactggacacctgggctgtcccccatgcagaccctgaaggtttctgtgtctgcagtgactctgggcctgggcctcatcatcttctctcttggtgtgatcagctggcggagagctggccactctagatggcacatttcctagaggcagaatcctacaacttccactccaagtgagaaggagattcaaactcaatgatgctaccatgcctctccaacatcttcaaccccctgacattatcttggatcctatggtttctccatccaattctttgaatttcccagtctcccctatgtaaaacttagcaatttgggggacctcattcctgggactatgctgtaaccaaattattgtccaaggctatatttctgggatgaatataatctgaggaagggagttaaagaccctcctggggctctcagtgtgccatagaggacagcaactggtgattgtttcagagaaataaactttggtggaaatattgtt

SEQ ID NO: 124882 - DNA, 1425 bp, Artificial Sequence
  derived and/or modified sequence
cagatttaatatctaggggctgggtatccccacatcactcatttggggggtcaagggacccgggcaatatagtattctgctcagtgtctggagatcatctacccaggctggggcttctgggacaggcgaggacccacggaccctggaagagctggtccaggggactgaactcccggcatctttacagagcagagcatgatcacattcctgccgctgctgctggggctcagcctgggctgcacaggagcaggtggcttcgtggcccatgtggaaagcacctgtctgttggatgatgctgggactccaaaggatttcacatactgcatctccttcaacaaggatctgctgacctgctgggatccagaggagaataagatggccccttgcgaatttggggtgctgaatagcttggcgaatgtcctctcacagcacctcaaccaaaaagacaccctgatgcagcgcttgcgcaatgggcttcagaattgtgccacacacacccagcccttctggggatcactgaccaacaggacacggccaccatctgtgcaagtagccaaaaccactccttttaacacgagggagcctgtgatgctggcctgctatgtgtggggcttctatccagcagaagtgactatcacgtggaggaagaacgggaagcttgtcatgcctcacagcagtgcgcacaagactgcccagcccaatggagactggacataccagaccctctcccatttagccttaaccccctcttacggggacacttacacctgtgtggtagagcacattggggctcctgagcccatccttcgggactggagtaagtgtatggcagatggatggaattagggtcaaagcagagaaaatgagatgtggatcgatacatggtacatggtagacagcgaagtgctgaaaatggggactgagtctggaggaacttacggggggcttaggaccagaatggggaaatgggataaagaaatggaaatatttaggttggtgcaaaagtaattgcagtttttgccattactttcagtggcaaaaaccgcaattacttttgcaccagtttaatatttagtctgtgctattgctgctctggtggtgtggttgatgttgctgcgtctatgtttgagggtgagaggggagcgtgcttgctttgaaatgaggatgtaaatttggcaatcatattttcagaaccccaaattgtaatacactattctagcctccttagatttcaactattctggtgccagaagcagatgggagctgaaggaatgatgaaggttgaagaaggggggcttttcttggtgtggggcagtactgcatttggcctgctctaccaagcatacgggagtagtaaagccacggctggcagaccatttggcatgcatgctcaggggccagtggataaagaattacttacagttc

SEQ ID NO: 124883 - DNA, 639 bp, Artificial Sequence
  derived and/or modified sequence
atgatcacattcctgccgctgctgctggggctcagcctgggctgcacaggagcaggtggcttcgtggcccatgtggaaagcacctgtctgttggatgatgctgggactccaaaggatttcacatactgcatctccttcaacaaggatctgctgacctgctgggatccagaggagaataagatggccccttgcgaatttggggtgctgaatagcttggcgaatgtcctctcacagcacctcaaccaaaaagacaccctgatgcagcgcttgcgcaatgggcttcagaattgtgccacacacacccagcccttctggggatcactgaccaacaggacacggccaccatctgtgcaagtagccaaaaccactccttttaacacgagggagcctgtgatgctggcctgctatgtgtggggcttctatccagcagaagtgactatcacgtggaggaagaacgggaagcttgtcatgcctcacagcagtgcgcacaagactgcccagcccaatggagactggacataccagaccctctcccatttagccttaaccccctcttacggggacacttacacctgtgtggtagagcacattggggctcctgagcccatccttcgggactggagatggcacatttcctag

SEQ ID NO: 124884 - DNA, 1241 bp, Artificial Sequence
  derived and/or modified sequence
cctgtttgggacactggactcccgtgagctggaaggaacagatttaatatctaggggctgggtatccccacatcactcatttggggggtcaagggacccgggcaatatagtattctgctcagtgtctggagatcatctacccaggctggggcttctgggacaggcgaggacccacggaccctggaagagctggtccaggggactgaactcccggcatctttacagagcagagcatgatcacattcctgccgctgctgctggggctcagcctgggctgcacaggagcaggtggcttcgtggcccatgtggaaagcacctgtctgttggatgatgctgggactccaaaggatttcacatactgcatctccttcaacaaggatctgctgacctgctgggatccagaggagaataagatggccccttgcgaatttggggtgctgaatagcttggcgaatgtcctctcacagcacctcaaccaaaaagacaccctgatgcagcgcttgcgcaatgggcttcagaattgtgccacacacacccagcccttctggggatcactgaccaacaggacacggccaccatctgtgcaagtagccaaaaccactccttttaacacgagggagcctgtgatgctggcctgctatgtgtggggcttctatccagcagaagtgactatcacgtggaggaagaacgggaagcttgtcatgcctcacagcagtgcgcacaagactgcccagcccaatggagactggacataccagaccctctcccatttagccttaaccccctcttacggggacacttacacctgtgtggtagagcacattggggctcctgagcccatccttcgggactggagttacactcctcttcctgggtccaattattcagaaggatggcacatttcctagaggcagaatcctacaacttccactccaagtgagaaggagattcaaactcaatgatgctaccatgcctctccaacatcttcaaccccctgacattatcttggatcctatggtttctccatccaattctttgaatttcccagtctcccctatgtaaaacttagcaacttgggggacctcattcctgggactatgctgtaaccaaattattgtccaaggctatatttctgggatgaatataatctgaggaagggagttaaagaccctcctggggctctcagtgtgccatagaggacagcaactggtgattgtttcagagaaataaactttggtgga

SEQ ID NO: 124885 - DNA, 1322 bp, Artificial Sequence
  derived and/or modified sequence
cctgtttgggacactggactcccgtgagctggaaggaacagatttaatatctaggggctgggtatccccacatcactcatttggggggtcaagggacccgggcaatatagtattctgctcagtgtctggagatcatctacccaggctggggcttctgggacaggcgaggacccacggaccctggaagagctggtccaggggactgaactcccggcatctttacagagcagagcatgatcacattcctgccgctgctgctggggctcagcctgggctgcacaggagcaggtggcttcgtggcccatgtggaaagcacctgtctgttggatgatgctgggactccaaaggatttcacatactgcatctccttcaacaaggatctgctgacctgctgggatccagaggagaataagatggccccttgcgaatttggggtgctgaatagcttggcgaatgtcctctcacagcacctcaaccaaaaagacaccctgatgcagcgcttgcgcaatgggcttcagaattgtgccacacacacccagcccttctggggatcactgaccaacaggacacggccaccatctgtgcaagtagccaaaaccactccttttaacacgagggagcctgtgatgctggcctgctatgtgtggggcttctatccagcagaagtgactatcacgtggaggaagaacgggaagcttgtcatgcctcacagcagtgcgcacaagactgcccagcccaatggagactggacataccagaccctctcccatttagccttaaccccctcttacggggacacttacacctgtgtggtagagcacattggggctcctgagcccatccttcgggactggacacctgggctgtcccccatgcagaccctgaaggtttctgtgtctgcagtgactctgggcctgggcctcatcatcttctctcttggtgtgatcagctggcggagagctggccactctagatggcacatttcctagaggcagaatcctacaacttccactccaagtgagaaggagattcaaactcaatgatgctaccatgcctctccaacatcttcaaccccctgacattatcttggatcctatggtttctccatccaattctttgaatttcccagtctcccctatgtaaaacttagcaacttgggggacctcattcctgggactatgctgtaaccaaattattgtccaaggctatatttctgggatgaatataatctgaggaagggagttaaagaccctcctggggctctcagtgtgccatagaggacagcaactggtgattgtttcagagaaataaactttggtgga

SEQ ID NO: 124886 - DNA, 1241 bp, Artificial Sequence
  derived and/or modified sequence
cctgtttgggacactggactcccgtgagctggaaggaacagatttaatatctaggggctgggtatccccacatcactcatttggggggtcaagggacccgggcaatatagtattctgctcagtgtctggagatcatctacccaggctggggcttctgggacaggcgaggacccacggaccctggaagagctggtccaggggactgaactcccggcatctttacagagcagagcatgatcacattcctgccgctgctgctggggctcagcctgggctgcacaggagcaggtggcttcgtggcccatgtggaaagcacctgtctgttggatgatgctgggactccaaaggatttcacatactgcatctccttcaacaaggatctgctgacctgctgggatccagaggagaataagatggccccttgcgaatttggggtgctgaatagcttggcgaatgtcctctcacagcacctcaaccaaaaagacaccctgatgcagcgcttgcgcaatgggcttcagaattgtgccacacacacccagcccttctggggatcactgaccaacaggacacggccaccatctgtgcaagtagccaaaaccactccttttaacacgagggagcctgtgatgctggcctgctatgtgtggggcttctatccagcagaagtgactatcacgtggaggaagaacgggaagcttgtcatgcctcacagcagtgcgcacaagactgcccagcccaatggagactggacataccagaccctctcccatttagccttaaccccctcttacggggacacttacacctgtgtggtagagcacattggggctcctgagcccatccttcgggactggagttacactcctcttcctgggtccaattattcagaaggatggcacatttcctagaggcagaatcctacaacttccactccaagtgagaaggagattcaaactcaatgatgctaccatgcctctccaacatcttcaaccccctgacattatcttggatcctatggtttctccatccaattctttgaatttcccagtctcccctatgtaaaacttagcaatttgggggacctcattcctgggactatgctgtaaccaaattattgtccaaggctatatttctgggatgaatataatctgaggaagggagttaaagaccctcctggggctctcagtgtgccatagaggacagcaactggtgattgtttcagagaaataaactttggtgga

SEQ ID NO: 124887 - DNA, 1425 bp, Artificial Sequence
  derived and/or modified sequence
cagatttaatatctaggggctgggtatccccacatcactcatttggggggtcaagggacccgggcaatatagtattctgctcagtgtctggagatcatctacccaggctggggcttctgggacaggcgaggacccacggaccctggaagagctggtccaggggactgaactcccggcatctttacagagcagagcatgatcacattcctgccgctgctgctggggctcagcctgggctgcacaggagcaggtggcttcgtggcccatgtggaaagcacctgtctgttggatgatgctgggactccaaaggatttcacatactgcatctccttcaacaaggatctgctgacctgctgggatccagaggagaataagatggccccttgcgaatttggggtgctgaatagcttggcgaatgtcctctcacagcacctcaaccaaaaagacaccctgatgcagcgcttgcgcaatgggcttcagaattgtgccacacacacccagcccttctggggatcactgaccaacaggacacggccaccatctgtgcaagtagccaaaaccactccttttaacacgagggagcctgtgatgctggcctgctatgtgtggggcttctatccagcagaagtgactatcacgtggaggaagaacgggaagcttgtcatgcctcacagcagtgcgcacaagactgcccagcccaatggagactggacataccagaccctctcccatttagccttaaccccctcttacggggacacttacacctgtgtggtagagcacattggggctcctgagcccatccttcgggactggagtaagtgtatggcagatggatggaattagggtcaaagcagagaaaatgagatgtggatcgatacatggtacatggtagacagcgaagtgctgaaaatggggactgagtctggaggaacttacggggggcttaggaccagaatggggaaatgggataaagaaatggaaatatttaggttggtgcaaaagtaattgcagtttttgccattactttcagtggcaaaaaccgcaattacttttgcaccagtttaatatttagtctgtgctattgctgctctggtggtgtggctgatgttgctgcgtctatgtttgagggtgagaggggagcgtgcttgctttgaaatgaggctgtaaatttggcaatcatattttcagaaccccaaattgtaatacactattctagcctccttagatttcaactattctggtgccagaagcagatgggagctgaaggaatgatgaaggttgaagaaggggggcttttcttggtgtggggcagtactgcatttggcctgctctaccaagcatacgggagtagtaaagccacggctggcagaccatttggcatgcatgctcaggggccagtggataaagaattacttacagttc

SEQ ID NO: 124888 - DNA, 1425 bp, Artificial Sequence
  derived and/or modified sequence
cagatttaatatctaggggctgggtattcccacatcactcatttggggggtcaagggacccgggcaatatagtattctgctcagtgtctggagatcatctacccaggctggggcttctgggacaggcgaggacccacggaccctggaagagctggtccaggggactgaactcccggcatctttacagagcagagcatgatcacattcctgccgctgctgctggggctcagcctgggctgcacaggagcaggtggcttcgtggcccatgtggaaagcacctgtctgttggatgatgctgggactccaaaggatttcacatactgcatctccttcaacaaggatctgctgacctgctgggatccagaggagaataagatggccccttgcgaatttggggtgctgaatagcttggcgaatgtcctctcacagcacctcaaccaaaaagacaccctgatgcagcgcttgcgcaatgggcttcagaattgtgccacacacacccagcccttctggggatcactgaccaacaggacacggccaccatctgtgcaagtagccaaaaccactccttttaacacgagggagcctgtgatgctggcctgctatgtgtggggcttctatccagcagaagtgactatcacgtggaggaagaacgggaagcttgtcatgcctcacagcagtgcgcacaagactgcccagcccaatggagactggacataccagaccctctcccatttagccttaaccccctcttacggggacacttacacctgtgtggtagagcacactggggctcctgagcccatccttcgggactggagtaagtgtatggcagatggatggaattagggtcaaagcagagaaaatgagatgtggatcgatacatggtacatggtagacagcgaagtgctgaaaatggggactgagtctggaggaacttacggggggcttaggaccagaatggggaaatgggataaagaaatggaaatatttaggttggtgcaaaagtaattgcagtttttgccattactttcagtggcaaaaaccgcaattacttttgcaccagtttaatatttagtctgtgctattgctgctctggtggtgtggctgatgttgctgcgtctatgtttgagggtgagaggggagcgtgcttgctttgaaatgaggctgtaaatttggcaatcatattttcagaaccccaaattgtaatacactattctagcctccttagatttcaactattctggtgccagaagcagatgggagctgaaggaatgatgaaggttgaagaaggggggcttttcttggtgtggggcagtactgcatttggcctgctctaccaagcatacgggagtagtaaagccacggctggcagaccatttggcatgcatgctcaggggccagtggataaagaattacttacagttc

SEQ ID NO: 124889 - DNA, 1425 bp, Artificial Sequence
  derived and/or modified sequence
cagatttaatatctaggggctgggtatccccacatcactcatttggggggtcaagggacccgggcaatatagtattctgctcagtgtctggagatcatctacccaggctggggcttctgggacaggcgaggacccacggaccctggaagagctggtccaggggactgaactcccggcatctttacagagcagagcatgatcacattcctgccgctgctgctggggctcagcctgggctgcacaggagcaggtggcttcgtggcccatgtggaaagcacctgtctgttggatgatgctgggactccaaaggatttcacatactgcatctccttcaacaaggatctgctgacctgctgggatccagaggagaataagatggccccttgcgaatttggggtgctgaatagcttggcgaatgtcctctcacagcacctcaaccaaaaagacaccctgatgcagcgcttgcgcaatgggcttcagaattgtgccacacacacccagcccttctggggatcactgaccaacaggacacggccaccatctgtgcaagtagccaaaaccactccttttaacacgagggagcctgtgatgctggcctgctatgtgtggggcttctatccagcagaagtgactatcacgtggaggaagaacgggaagcttgtcatgcctcacagcagtgcgcacaagactgcccagcccaatggagactggacataccagaccctctcccatttagccttaaccccctcttacggggacacttacacctgtgtggtagagcacattggggctcctgagcccatccttcgggactggagtaagtgtatggcagatggatggaattagggtcaaagcagagaaaatgagatgtggatcgatacatggtacatggtagacagcgaagtgctgaaaatggggactgagtctggaggaacttacggggggcttaggaccagaatggggaaatgggataaagaaatggaaatatttaggttggtgcaaaagtaattgcagtttttgccattactttcagtggcaaaaaccgcaattacttttgcaccagtttaatatttagtctgtgctattgctgctctggtggtgtggctgatgttgctgcgtctatgtttgagggtgagaggggagcgtgcttgctttgaaatgaggatgtaaatttggcaatcatattttcagaaccccaaattgtaatacactattctagcctccttagatttcaactattctggtgccagaagcagatgggagctgaaggaatgatgaaggttgaagaaggggggcttttcttggtgtggggcagtactgcatttggcctgctctaccaagcatacgggagtagtaaagccacggctggcagaccatttggcatgcatgctcaggggccagtggataaagaattacttacagttc

SEQ ID NO: 124890 - DNA, 1322 bp, Artificial Sequence
  derived and/or modified sequence
cctgtttgggacactggactcccgtgagctggaaggaacagatttaatatctaggggctgggtatccccacatcactcatttggggggtcaagggacccgggcaatatagtattctgctcagtgtctggagatcatctacccaggctggggcttctgggacaggcgaggacccacggaccctggaagagctggtccaggggactgaactcccggcatctttacagagcagagcatgatcacattcctgccgctgctgctggggctcagcctgggctgcacaggagcaggtggcttcgtggcccatgtggaaagcacctgtctgttggatgatgctgggactccaaaggatttcacatactgcatctccttcaacaaggatctgctgacctgctgggatccagaggagaataagatggccccttgcgaatttggggtgctgaatagcttggcgaatgtcctctcacagcacctcaaccaaaaagacaccctgatgcagcgcttgcgcaatgggcttcagaattgtgccacacacacccagcccttctggggatcactgaccaacaggacacggccaccatctgtgcaagtagccaaaaccactccttttaacacgagggagcctgtgatgctggcctgctatgtgtggggcttctatccagcagaagtgactatcacgtggaggaagaacgggaagcttgtcatgcctcacagcagtgcgcacaagactgcccagcccaatggagactggacataccagaccctctcccatttagccttaaccccctcttacggggacacttacacctgtgtggtagagcacattggggctcctgagcccatccttcgggactggacacctgggctgtcccccatgcagaccctgaaggtttctgtgtctgcagtgactctgggcctgggcctcatcatcttctctcttggtgtgatcagctggcggagagctggccactctagatggcacatttcctagaggcagaatcctacaacttccactccaagtgagaaggagattcaaactcaatgatgctaccatgcctctccaacatcttcaaccccctgacattatcttggatcctatggtttctccatccaattctttgaatttcccagtctcccctatgtaaaacttagcaatttgggggacctcattcctgggactatgctgtaaccaaattattgtccaaggctatatttctgggatgaatataatctgaggaagggagttaaagaccctcctggggctctcagtgtgccatagaggacagcaactggtgattgtttcagagaaataaactttggtgga

SEQ ID NO: 124891 - DNA, 792 bp, Artificial Sequence
  derived and/or modified sequence
atgatcaccttcctgcccctgctgctgggcctgagcctgggctgcacaggggccggtggcttcgtggctcacgttgagagcacatgcctgctcgatgatgccgggacacccaaagactttacatactgtatcagcttcaataaggatcttctgacgtgttgggaccccgaagagaataagatggccccatgcgagttcggagtactcaattcacttgcaaacgttctgagccaacacctcaaccagaaagatactctgatgcagcgccttagaaacggactccaaaactgcgcaactcacactcagcctttttggggatctcttacgaacagaacccgtccaccaagcgtacaagtggcgaaaaccacacctttcaatacacgagaaccagtgatgctcgcctgctacgtgtggggattttatcccgccgaggttacaatcacctggcgcaagaacggtaagctggtgatgccacactcctccgcacacaagacagcccagcccaatggggattggacataccagactctgagccacctggctttgacccccagctatggcgacacttacacctgcgtagtagagcacattggggctcctgagcccatactgagggactggaccccgggactgtccccaatgcagaccctgaaggtatccgtgtctgccgttactctgggactgggactgatcatcttctcccttggcgtcatctcctggcgcagggccggacatagcagctacactcccctgcctggtagtaattattccgaggggtggcacataagctag

SEQ ID NO: 124892 - DNA, 792 bp, Artificial Sequence
  derived and/or modified sequence
atgatcaccttcctgcccctgctgctgggcctgagcctgggctgcaccggtgccggtggctttgtggcacatgtggaatcgacctgccttctagacgatgcagggacacctaaagacttcacttattgcattagcttcaacaaagatcttctgacatgttgggaccctgaggagaataagatggccccctgcgagttcggcgtgttgaacagcttagccaatgtgctaagccagcatctgaaccagaaggatacattaatgcagcgcctgcggaatgggctgcagaactgcgccacacacacgcagccattctggggctccctgactaaccgcactcgccccccctcagtgcaggttgcaaagacaactccattcaatacaagggagcccgttatgctggcctgttacgtgtgggggttttacccagctgaagtaacaattacctggagaaagaatggaaaattggtgatgcctcacagcagtgcccataagaccgcacaacctaatggcgattggacctatcaaaccctcagtcatctggccctcactccgagttacggagatacctacacctgcgtcgtggaacacataggggccccagaacctattcttcgggattggacacctggcctatcacccatgcagacgttaaaagtctccgtaagcgcagtaactctgggtctgggtctcatcatcttttcactgggggtgatttcctggcgaagagcagggcacagcagctatacccccctgccaggttccaattactccgaaggctggcacatctcgtag

SEQ ID NO: 124893 - DNA, 792 bp, Artificial Sequence
  derived and/or modified sequence
atgatcaccttcctgcccctgctgctgggcctgagcctgggctgcacaggggccggggggttcgtagcccacgtcgaatcaacctgtctactcgatgacgctggcactcctaaggattttacatactgcatcagcttcaacaaagacctcctcacttgctgggacccagaagaaaataagatggctccctgcgaatttggcgtgctcaattctctcgccaacgtgcttagccaacatctgaaccagaaggatacattaatgcagcgactgcggaacggtctccagaactgtgctacacatacacagcctttctggggctccctgaccaataggacccggcccccttcagtgcaagtcgcgaagactactccttttaacactagagaacccgtgatgctagcctgctatgtgtggggattctatcccgcagaggtcaccataacctggcgcaagaacggcaagctggtgatgccccatagctccgcccataagaccgctcagcctaacggggattggacatatcagactctgagccatctagcccttactcctagctacggcgacacttatacttgtgtagtggaacacaccggagctcccgaacctatcttgagagattggactcctgggctgtcgcccatgcagactttgaaagtgtccgtctctgccgtgacgctgggtctcggactcattattttctctctcggtgtcatctcgtggaggagagccggtcactcctcatacacacccctgccgggatcaaactacagtgaaggatggcacatttcatag

SEQ ID NO: 124894 - DNA, 426 bp, Artificial Sequence
  derived and/or modified sequence
tgaacccggccccccagcgtgcaggtggccaagaccacccccttcaacactcgtgaacctgttatgctcgcctgctacgtgtgggggttctaccccgccgaggtgaccatcacctggcgcaaaaacggtaaacttgtgatgcctcattcttctgctcacaagaccgcccagcctaacggtgactggacttaccagacactgagccacctggcacttacaccaagctacggggatacatacacatgtgttgtggaacacatcggagcccctgaacctatcctacgagattggacgcccggtctgagccccatgcagaccctgaaagtatctgtgtccgcggtgaccctaggcttagggttgatcatcttctctctcggagtgatttcatggcggcgtgcaggacatagccggtggcacatttcatag

SEQ ID NO: 124895 - DNA, 774 bp, Artificial Sequence
  derived and/or modified sequence
atgatcaccttcctgcccctgctgctgggcctgagcctgggctgcaccggcgccggcggatttgtggcacatgtcgagtccacgtgcctgctcgacgatgcagggactcccaaggattttacctattgtatcagtttcaacaaggatttgctcacatgttgggacccagaggaaaacaaaatggctccgtgcgagttcggggtcctgaactccctcgctaacgtcctgagccagcacctcaaccagaaggatacgctcatgcagcgcctccgcaatgggctgcagaattgcgcgactcacacacagccattctggggctctctcactaataggacacggccgccttcagtccaggtggccaagaccacaccattcaatacgcgagaacccgtgatgcttgcttgttatgtctggggtttttaccctgccgaagtgaccataacgtggagaaagaatgggaagttggtcatgccacatagtagcgcccacaagactgcgcaaccaaacggggactggacataccagaccctgtcgcatctggcccttacaccatcgtacggcgatacctacacctgtgtggtagaacatatcggcgcgcccgagcctatcctgagggactggacgccaggactgagtcccatgcagaccctgaaggttagcgtgtccgccgtgacccttggcctcggcctgatcatctttagtctgggcgtgatttcttggcgacgtgcaggacattcctcagatcttattatatctctgctgtttatcctttag

SEQ ID NO: 124896 - DNA, 321 bp, Artificial Sequence
  derived and/or modified sequence
gtggccaagaccacccccttcaacacccgggagcccgtgatgctggcgtgctatgtgtggggattttatcctgctgaggttacaattacctggcggaaaaatggaaagctggtcatgccccacagcagtgcccacaagactgctcagccgaatggtgactggacgtaccaaacattgtctcatctggccctcaccccaagttatggagatacatatacatgcgttgtggagcacacaggtgctccggagcctatactgagggactggtcttacacccctttacctgggtccaactactcagagggatggcatatctcttag

SEQ ID NO: 124897 - DNA, 426 bp, Artificial Sequence
  derived and/or modified sequence
tgaacccggccccccagcgtgcaggtggccaagaccacccccttcaacactagagagccagtgatgctggcttgctacgtgtgggggttttaccctgcagaagtaacaatcacttggcgtaagaacgggaaactcgtgatgccacatagcagtgctcacaaaacagcacagcctaacggagactggacttaccagactctgtcccatctggccttaaccccaagctatggagacacttacacatgtgtcgtagagcataccggcgcccctgagcctatcttgagagattggactcctgggttgtcacccatgcagaccttgaaagtgagtgtgtctgccgttacactgggattaggccttatcatcttttcactgggagttatcagttggaggcgcgctggacactcccgctggcatatctcatag

SEQ ID NO: 124898 - DNA, 528 bp, Artificial Sequence
  derived and/or modified sequence
atgggccacgagcagaaccagggcgccgccctgctgcagatgctgccgcttttgtggttattgccacacagctgggcagtgccagaggaacagtccatgatcacttttcttccattgctgctcgggctgtccctgggctgcaccggtgcggggggcttcgtggcacatgtggagtccacctgtctactagatgacgccggcacgcccaaggatttcacgtactgcatttcctttaataaggacctactgacatgctgggacccagaggaaaacaaaatggccccctgcgagtttggtgtgcttaacagtttggccaatgttctgtcacaacacctcaaccaaaaggacaccttaatgcaaaggctccggaacggcctccagaattgcgcgacgcacacccagccgttttggggatctctgaccaaccggactagacccccaagtgtccaggtggctaaaactacaccatttaacacaagggaaccagtaatgttggcctgctatgtgtggggcttctaccccgcttag

SEQ ID NO: 124899 - DNA, 528 bp, Artificial Sequence
  derived and/or modified sequence
atgggccacgagcagaaccagggcgccgccctgctgcagatgctgccccttttgtggttactcccccacagttgggcagtccccgaggagcagagcatgatcacatttctgccactgttgctcggactctctctcggctgtacaggggcgggggggttcgtcgcacatgtggaaagcacctgtttactcgacgacgcagggacacccaaggactttacctattgtattagttttaataaggatcttttgacctgttgggatcctgaagaaaacaagatggccccttgtgaattcggggttctcaattcgctagcaaatgtgctcagccagcacctcaatcagaaggacacacttatgcaacggttgcggaacgggctacagaactgtgcaacccacacgcagccgttctggggatcactgacaaacaggacaagaccgccctcggtgcaagtcgcaaagactactccctttaatacacgggagcctgtgatgctggcctgctatgtatgggggttttatcctgcctag

SEQ ID NO: 124900 - DNA, 651 bp, Artificial Sequence
  derived and/or modified sequence
atgatcaccttcctgcccctgctgctgggcctgagcctgggctgcactggagctggcgggttcgtagcacacgtcgagagcacctgcctcctggatgacgcaggcactccaaaagattttacctattgtatctcttttaacaaggacctgctcacctgttgggacccagaagagaataagatggccccttgtgaattcggagtgttaaactcattggcaaatgtcctatcccagcaccttaaccaaaaagatacccttatgcagaggctgcgcaatggcctccagaattgcgccactcacacccagcctttctgggggagcctgactaaccgaactcgcccacctagtgtacaggtcgccaagacgacgccctttaataccagagaaccggtcatgctggcttgttatgtctggggcttctatccggctgaggttacgatcacttggcgaaaaaatggtaaactcgtcatgccacattcatccgctcataagactgcacagccgaatggagattggacttaccagaccctcagccacctcgctctcacaccttcctacggtgacacttacacatgcgtggttgaacatacaggcgcacctgaaccgatcttgcgcgattggtctaagtgtatggccgatggttggaattag

SEQ ID NO: 124901 - DNA, 792 bp, Artificial Sequence
  derived and/or modified sequence
atgatcaccttcctgcccctgctgctgggcctgagcctgggctgcacaggtgccggcggttttgtcgcacacgtggagtctacttgtctgctcgatgacgctggcactcctaaggattttacgtactgtatcagcttcaacaaggacctgctgacatgctgggatccagaggaaaataagatggcaccctgcgaatttggggtattaaacagcttggccaatgtccttagccagcacctgaatcagaaagacactctgatgcagcgccttaggaatggcttgcagaattgcgctacgcacactcagccattttggggctccttaaccaaccgaacccgtccaccctcagtgcaggtggcaaagactacaccctttaacacccgcgaaccagtgatgttggcttgttatgtgtgggggttttaccccgcggaagtgactattacatggcggaagaacggaaagctcgtcatgcctcatagtagcgctcacaagacggcccaacctaacggtgattggacctaccaaaccctatcacacttagctcttacaccatcttatggagacacttatacatgcgtagtagagcacactggcgccccagagcctatcctgcgagactggaccccagggctgtcccctatgcagactctgaaggtgtccgtgagcgcagtcaccctggggcttgggctcatcatcttttctctcggggtgattagttggcgaagagctggccactcttcttacacccccctcccaggcagtaactattctgagggctggcatatttcgtag

SEQ ID NO: 124902 - DNA, 774 bp, Artificial Sequence
  derived and/or modified sequence
atgatcaccttcctgcccctgctgctgggcctgagcctgggctgcacaggagctggaggatttgtggcacacgtggaaagcacttgcctgctggacgacgcaggcactccaaaggacttcacatactgtatttcctttaataaagaccttctgacatgctgggaccctgaggaaaataagatggctccctgcgagttcggagtcttgaactcactagcgaacgtgctctctcaacacttgaatcagaaggacacactgatgcagcgcctcaggaacggcctgcaaaactgtgcgacgcacacacagcccttctggggttctctaacaaaccgcacaagaccacctagcgttcaagtggccaaaacaacacccttcaatacacgggaaccagtgatgttagcctgctacgtttggggcttttatcctgctgaagtcacaattacctggcggaagaatgggaagcttgtaatgccgcacagttctgctcacaaaacagcccagccaaacggagactggacatatcagactttatcacacttagcactcactccctcgtacggggacacctatacatgcgtggtcgagcatacaggagcacctgaaccgattcttcgagactggacgccaggactgagcccaatgcagactttaaaagttagtgtgagcgcagtgactcttgggcttggattgataatcttttctctgggagtaatctcatggcggagagcgggccactcctcagatctgatcattagcttgttattcatcctttag

SEQ ID NO: 124903 - DNA, 321 bp, Artificial Sequence
  derived and/or modified sequence
gtggccaagaccacccccttcaacacccgggagcccgtgatgctggcctgttacgtgtggggcttctatcctgctgaggtaacgattacctggagaaaaaacggcaaacttgttatgccccattctagtgcccacaaaaccgcccagcccaacggcgactggacgtatcagactctttcccacctggcccttaccccgagctacggtgacacgtatacttgtgtagtggaacacattggcgcacctgaaccaatcttacgggactggagttataccccgctgcctggcagtaactactctgagggatggcacatctcttag

SEQ ID NO: 124904 - DNA, 792 bp, Artificial Sequence
  derived and/or modified sequence
atgatcaccttcctgcccctgctgctgggcctgagcctgggctgcaccggggctggtggcttcgtagcccacgtggaaagcacttgcctgctagatgacgctggaacacccaaagactttacatactgcattagctttaacaaagacctgctcacctgttgggatccggaggaaaacaaaatggccccgtgcgaatttggcgtattgaacagcctggccaacgtgctgagtcagcatcttaaccagaaggacactctcatgcagcgtctgagaaacgggctccagaactgcgcgacacatacccagcccttctgggggtccttaaccaaccgcacccgtccacccagcgttcaagttgccaaaaccacgccttttaacacacgcgaacctgtgatgctcgcctgctatgtgtgggggttttatcctgcggaggtgacaataacctggcggaaaaatgggaaactggtgatgccgcactcaagtgcccacaagaccgctcagcctaatggcgactggacgtaccagaccctcagtcaccttgcgctgacaccatcgtatggagatacctatacgtgcgtggtcgagcatacgggcgcccctgagcccatcctgcgcgactggacccccggactgtcaccaatgcaaactctcaaggtgagtgtgagcgccgtcaccctggggttaggattaatcattttcagcttgggcgttataagttggcggcgggctggccacagttcttataccccccttccaggctctaattattcagagggatggcatatcagctag

SEQ ID NO: 124905 - DNA, 426 bp, Artificial Sequence
  derived and/or modified sequence
tgaacccggccccccagcgtgcaggtggccaagaccacccccttcaacactcgcgaaccagtgatgctggcctgctacgtgtgggggttctatcccgccgaggttacaatcacctggaggaaaaatggaaagctggtcatgccccactcctccgcccacaaaaccgcacagcctaatggcgactggacataccagaccctgagtcatcttgctctgaccccatcctatggggacacgtacacctgcgtcgtggagcacacgggtgccccagagcctatattgcgcgattggacaccaggcctttctccgatgcaaaccctgaaggtgagcgtgtcagcagtgacactcgggctgggcttgatcatcttctccctgggagtaatctcttggcgccgcgctggacacagtcgttggcatatctcttag

SEQ ID NO: 124906 - DNA, 792 bp, Artificial Sequence
  derived and/or modified sequence
atgatcaccttcctgcccctgctgctgggcctgagcctgggctgcaccggagcaggcggctttgtggctcacgttgaatcgacatgcttgctggacgacgcaggaaccccaaaggattttacttactgtattagctttaacaaagacctgctcacctgctgggacccagaggagaataagatggctccctgcgagtttggtgtgcttaactcactggccaatgtgttatcccagcacctgaaccagaaggatactctcatgcaaaggcttcggaacggtctccagaattgcgcaactcacacacagcctttctggggctccctcaccaatcggactcggccacctagcgtacaggtagcgaaaacgacgccattcaacactcgcgaacccgtcatgttggcctgttacgtgtggggcttctatcccgccgaggtgacaatcacctggcgaaaaaatggtaagctggtgatgccacattcatctgcccacaagacagcccaacccaatggtgactggacctatcagaccctcagccatcttgccctcactcctagttacggcgacacctacacgtgtgtggtggaacacatcggggcacctgaaccaatcctgagagattggacccctggcctgtcacccatgcaaacactcaaagtcagcgtcagtgccgtgacattgggcctcggtttgataattttcagtttgggcgtgatctcttggcgtcgggctggtcactcatcctatacacctcttcccggctcaaattactccgaaggctggcacatcagttag

SEQ ID NO: 124907 - DNA, 774 bp, Artificial Sequence
  derived and/or modified sequence
atgatcaccttcctgcccctgctgctgggcctgagcctgggctgcacaggagcaggcggatttgtggctcacgtggaatcaacgtgtcttcttgatgatgctggtactccaaaggacttcacgtactgtattagctttaataaagatttgcttacatgttgggatccagaagaaaataagatggcaccttgtgagttcggagttctgaacagtctggccaacgtcctgtcacaacacttgaaccagaaagataccttgatgcagcggctcagaaacggacttcagaattgcgcgacccatacacaaccgttttggggatcactgaccaaccggacacggcccccaagcgtacaagtggccaagacaactccatttaacacccgcgagcctgtgatgctggcgtgctacgtgtggggtttttacccagctgaggtcaccatcacctggcgaaagaacgggaaactggtgatgcctcactcttcagctcacaaaacagcgcagccaaatggcgactggacttaccagacgctgtctcacctagctctgacaccaagctatggagatacatatacatgtgttgttgagcacatcggggcacccgagcccatacttcgggattggacccccggtctttcgcccatgcagaccctgaaggtcagcgtctcagccgtgaccctggggctgggcctgatcatattttccctgggagtgatctcctggcgacgggccggacacagttcggacttgatcatcagccttctgtttatattatag

SEQ ID NO: 124908 - DNA, 528 bp, Artificial Sequence
  derived and/or modified sequence
atgggccacgagcagaaccagggcgccgccctgctgcagatgctgcctctgctttggctgctgccacactcatgggccgtgcccgaggagcaaagcatgattacattcctgcccctgcttcttgggttatccctcggatgtaccggtgcaggaggtttcgtcgcccatgttgagagcacttgtcttttagatgacgcaggaacccccaaggattttacatactgtatcagtttcaacaaagatctgttaacttgttgggaccctgaggagaacaaaatggcgccatgcgaatttggagtgctgaatagcctggccaatgtcctatcacagcacctaaaccagaaggacacacttatgcagcggctccggaacggtctacagaattgcgctacccatacacaaccattctgggggagcctcacaaaccgtactcggcccccaagtgtgcaggttgccaagacaaccccctttaataccagagagccagtgatgctggcatgctatgtgtggggcttttatcccgcctag

SEQ ID NO: 124909 - DNA, 528 bp, Artificial Sequence
  derived and/or modified sequence
atgggccacgagcagaaccagggcgccgccctgctgcagatgctgccactcctctggctcctgccacattcatgggcagttccggaagagcagtccatgatcacattcttgcccctgctgctggggctgtcactcggatgtactggcgcgggcggttttgtagcacacgtagaatctacctgccttctggatgacgccggtacacccaaagactttacctactgtatcagtttcaataaagatcttcttacatgttgggaccccgaggagaataaaatggccccctgtgagtttggcgtcctcaactcattagcaaacgttctgagccagcacttgaatcagaaggatacacttatgcagcgcttgcgaaatggccttcagaattgcgccacccacacccagccattttggggctcgttaaccaataggacccggcccccctcagtccaggtcgctaagaccactccatttaatacgcgcgaacccgtaatgctggcctgctatgtgtggggattttatcccgcatag

SEQ ID NO: 124910 - DNA, 321 bp, Artificial Sequence
  derived and/or modified sequence
gtggccaagaccacccccttcaacacccgggagcccgtgatgctggcatgctacgtatggggattttatcctgccgaagtgacgatcacctggcgaaaaaatggcaaactggtgatgcctcactcatcagctcacaaaacggcacagccgaacggtgactggacttatcagaccttgtcccatctcgcactgacccctagttacggagacacgtatacatgtgtggtagagcatattggggccccagagccaattttacgcgactggagctacacccctctgcccggaagcaattactcagaaggctggcacatatcctag

SEQ ID NO: 124911 - DNA, 426 bp, Artificial Sequence
  derived and/or modified sequence
tgaacccggccccccagcgtgcaggtggccaagaccacccccttcaacacaagagaacctgtgatgctggcctgttacgtgtgggggttctacccagccgaggtaaccatcacctggcgaaaaaatggcaagttggtcatgccccatagtagcgcacacaaaacagctcagccgaacggcgattggacataccaaaccctctcacatttagcattgactccgagctatggtgatacctacacctgcgttgtcgaacacaccggcgctcctgaacccattttgcgggattggacccctggcctgtctccgatgcagactcttaaggtttccgtctccgccgtcacacttggtttagggctcataattttctctcttggggtaatttcctggcggcgtgctgggcattccaggtggcatatctcatag

SEQ ID NO: 124912 - DNA, 528 bp, Artificial Sequence
  derived and/or modified sequence
atgggccacgagcagaaccagggcgccgccctgctgcagatgctgccactgctttggctgctgccccactcgtgggctgtaccagaggagcagagcatgatcacattcctgcccctcctacttggcctttccctgggttgcaccggcgcaggtggcttcgtggcacatgtggaatcgacctgtcttctggacgatgctgggacacccaaggactttacctactgtatcagctttaacaaggacctcctgacctgttgggacccggaggagaacaagatggccccttgcgaatttggtgtcctgaattccttggccaacgtgctgagccaacacctgaaccagaaagacacactcatgcagaggcttagaaacgggctccagaactgtgccactcacacacagccgttctggggatcgctgacaaacagaactcgccctccctctgtgcaggtggcaaaaacaactccatttaataccagggaaccagttatgttggcctgttacgtctggggcttctatcccgcctag

SEQ ID NO: 124913 - DNA, 321 bp, Artificial Sequence
  derived and/or modified sequence
gtggccaagaccacccccttcaacacccgggagcccgtgatgctggcgtgttatgtctgggggttttaccccgccgaggtgacaatcacctggcgaaagaacggtaagctggttatgccgcactcatccgcacacaaaaccgcacagcctaacggggactggacataccaaaccctgagtcacctcgcactgaccccctcctacggcgacacctacacatgcgtcgtcgaacacacgggcgctccggagcctatcttacgggactggagttacactcctttacctggttcaaactacagcgagggctggcacattagttag

SEQ ID NO: 124914 - DNA, 321 bp, Artificial Sequence
  derived and/or modified sequence
gtggccaagaccacccccttcaacacccgggagcccgtgatgctggcttgctacgtttggggcttctacccagcagaggtcaccatcacttggcgcaagaacggcaagttggtgatgccacatagttccgcccataaaactgcccagcctaatggtgattggacctaccagactctgtcacatttagctttgacacctagttatggtgatacgtatacgtgcgtcgtggaacacatcggtgcacccgagcccatcctccgggactggtcttatacacccctccccgggtcaaactatagcgagggctggcacataagctag

SEQ ID NO: 124915 - DNA, 321 bp, Artificial Sequence
  derived and/or modified sequence
gtggccaagaccacccccttcaacacccgggagcccgtgatgctggcctgctatgtgtggggattttaccccgcggaggtcacaatcacttggcggaagaacggaaaactggtgatgccgcactcatctgctcacaagacagcccaaccgaacggcgattggacctatcagacactgtcacacctggcactgacccccagctatggcgacacttatacctgtgtagtggagcacatcggcgcacccgaacccatcctccgcgactggtcctacacgcctctgcccggatctaactattccgagggctggcatattagttag

SEQ ID NO: 124916 - DNA, 426 bp, Artificial Sequence
  derived and/or modified sequence
tgaacccggccccccagcgtgcaggtggccaagaccacccccttcaatacaagggagccagtcatgctcgcctgttacgtgtgggggttttatccagccgaggtgactatcacctggagaaaaaacggaaagctggttatgccgcacagcagcgcccataagaccgcccagccgaatggcgactggacatatcagacactttcacatctggccttaactccctcttatggggacacctacacttgcgtcgtggagcacattggcgctcccgagcctattctaagagattggacaccaggcctgagtcccatgcaaactctgaaagtaagcgtttccgcggtgacactgggtctaggcctgatcatctttagcctgggagtcattagttggcggcgcgcgggtcatagccggtggcacatctcgtag

SEQ ID NO: 124917 - DNA, 321 bp, Artificial Sequence
  derived and/or modified sequence
gtggccaagaccacccccttcaacacccgggagcccgtgatgctggcgtgttacgtttggggtttctacccggccgaagttaccattacatggaggaaaaatggaaaactagtgatgccccacagtagtgcccacaaaactgcacagcctaacggggactggacataccagacactgagccacctggctcttacgcccagctatggagatacctacacctgcgttgtggagcataccggtgcaccagagcccatactgcgcgattggtcctacactcctctgccgggttctaactactccgaaggctggcatatctcgtag

SEQ ID NO: 124918 - DNA, 774 bp, Artificial Sequence
  derived and/or modified sequence
atgatcaccttcctgcccctgctgctgggcctgagcctgggctgcaccggtgcaggcggattcgtcgcgcatgttgaatccacctgtttgctcgacgacgccggaactcccaaggacttcacttactgcatttccttcaacaaagacctgcttacatgctgggaccctgaggaaaacaaaatggccccctgcgagtttggggtccttaattcactggcgaacgtgctaagccagcacttgaaccagaaggatactctcatgcagcgcctccggaatggtctccagaactgtgccactcatacccagcccttttggggatcacttactaacagaactagacctccaagcgtgcaggttgctaagacgacaccatttaatacccgagaaccagtcatgctggcgtgctatgtctgggggttctatcctgccgaagtcaccatcacgtggcgcaaaaacggaaaactggtcatgccacatagtagcgctcacaaaactgctcaacccaatggggattggacatatcagaccctttcccacctcgcattaacccccagctacggcgacacctacacctgtgtggttgaacacactggcgcccccgaacctatcctccgcgattggaccccaggcttgtccccaatgcagactcttaaagtatccgtcagcgccgtgactttgggactggggctgatcatattctctttgggggtaatttcctggcgccgcgccggacactcctctgacttgatcatctcactcctgttcatcttgtag

SEQ ID NO: 124919 - DNA, 792 bp, Artificial Sequence
  derived and/or modified sequence
atgatcaccttcctgcccctgctgctgggcctgagcctgggctgcacaggcgcagggggattcgttgcccacgtggagtctacatgcctgctggacgacgccgggactcctaaagattttacttactgtatctccttcaataaggacctgctaacctgctgggatcccgaggagaataaaatggcgccctgtgagtttggtgtgctcaactctttagctaatgtactgagtcagcatctcaaccagaaggacacccttatgcagcgtctgcgcaatggcctccaaaactgtgccacgcacacacagccgttttggggctctctgacaaatcgaactcgtcccccctctgttcaagtcgcgaaaactaccccgttcaatacccgtgagccagtgatgctcgcctgttatgtatggggcttctaccctgccgaagtgacaatcacgtggagaaagaatggcaagttggttatgccacatagcagtgcacacaaaacggcccagccaaacggggattggacgtaccaaacgctatctcacctggccttgactccttcctatggggacacctacacttgcgtcgtagagcacatcggcgctcccgagcccatccttcgcgactggaccccaggtctcagtccaatgcagaccctgaaagtttcagttagcgccgtaaccctgggactgggtttgatcatcttctccctgggtgtgatcagctggcgccgcgccgggcattcttcttacacacctttaccaggctcaaattactccgagggttggcatataagctag

SEQ ID NO: 124920 - DNA, 321 bp, Artificial Sequence
  derived and/or modified sequence
gtggccaagaccacccccttcaacacccgggagcccgtgatgctggcttgctacgtttgggggttctacccagccgaggttaccataacttggaggaagaacggtaagttagttatgccccatagctctgctcacaagacagcccagccaaacggcgattggacctaccaaactctgagccacttagccctgacaccctcctacggggacacatatacatgtgtggtcgaacacaccggcgctcccgaacctattcttcgcgactggagttatacccctctgcccggcagtaattacagtgaaggctggcacatctcttag

SEQ ID NO: 124921 - DNA, 426 bp, Artificial Sequence
  derived and/or modified sequence
tgaacccggccccccagcgtgcaggtggccaagaccacccccttcaatacccgtgagccggtaatgctggcctgctatgtctgggggttctatccagctgaggtaaccattacatggaggaagaatggaaaacttgtaatgccacacagcagcgcccacaagaccgcgcagccaaatggcgactggacctaccagacgctgagccatctcgcgctgacaccatcctatggggatacatacacctgtgtggtggaacataccggggcccctgagcccatcttgagggattggacccctggtctatcaccaatgcagacacttaaggtcagtgtcagcgccgtcacactggggctgggtctgatcatcttctccctgggagttatttcatggaggcgcgccggccacagcaggtggcatatctcttag

SEQ ID NO: 124922 - DNA, 774 bp, Artificial Sequence
  derived and/or modified sequence
atgatcaccttcctgcccctgctgctgggcctgagcctgggctgcacaggtgccggtggattcgtggctcacgtggagtccacttgcctcctggatgacgctggaacaccaaaggattttacatattgtatctcgtttaataaagacctgttaacgtgctgggatcccgaggagaacaaaatggctccgtgcgagtttggcgttttgaactcacttgctaacgtgctgtcccagcacctcaaccagaaggacaccttaatgcaacggcttcggaacggcctgcagaactgtgccacccacactcagcccttctgggggtccctgaccaatagaacccgaccgccgtccgtgcaagttgccaaaaccaccccctttaacacgagagagcctgtgatgctagcgtgttatgtatggggattctatccagctgaagtcaccatcacctggcgtaaaaatggaaaattggttatgccccacagctcagcccacaagaccgcacagcctaatggcgactggacctatcaaacattgtcccacctcgcactgaccccaagctacggcgacacatatacctgtgtggtcgagcacacaggggcgcccgagcccatcctaagagattggacccccggcttgagcccaatgcagacgctcaaggtttctgtgtccgccgtgaccctgggtctagggctgatcatcttttccctcggcgtcatcagttggcggcgggctggccatagctccgatcttataatttccctgctgttcattctctag

SEQ ID NO: 124923 - DNA, 774 bp, Artificial Sequence
  derived and/or modified sequence
atgatcaccttcctgcccctgctgctgggcctgagcctgggctgcaccggggctgggggcttcgtagcccatgtggagtccacgtgcctactcgacgatgccggaactcccaaggatttcacgtattgtatcagcttcaataaagatctactcacatgctgggatccagaggaaaacaaaatggccccgtgtgagtttggagtactcaatagtctggccaatgtcttatctcagcacttgaatcagaaggacacactgatgcagagattacgcaatgggctgcaaaattgtgctacccacacccagcctttctggggctccctgacgaatcgtacgaggcctcccagtgtgcaggtggctaaaacaacaccatttaacacaagggaaccagtgatgctggcctgctatgtttggggcttctaccccgcagaggtgactataacctggagaaagaacggtaagttggtgatgccccacagctccgctcataagaccgcccagcctaacggagattggacttatcagacattgtctcatctcgccttaacgccttcgtacggagatacttatacttgcgtggtggagcacatcggcgctcctgagcctatactacgcgactggacccctggactttcccctatgcagactctgaaagtgagcgtgtcggctgttaccctaggactggggctgattatcttttcccttggggtcataagctggcggagagccggccattccagtgatttaattatttcactcttatttatactttag

SEQ ID NO: 124924 - DNA, 528 bp, Artificial Sequence
  derived and/or modified sequence
atgggccacgagcagaaccagggcgccgccctgctgcagatgctgccactgctttggcttctgccccacagctgggctgtgcctgaagaacagtccatgattacgtttttgcctcttctcctggggctcagtctgggatgtaccggcgctggcggtttcgtagcccacgtggagagtacctgcctgttagatgatgctggcactccaaaagacttcacttattgcatctccttcaataaagatctcctcacgtgttgggacccagaggagaacaagatggccccttgcgagtttggggtgttgaattcccttgccaatgttctatcccagcacctcaaccagaaggacacgctgatgcagcggctgcgaaacggcctgcagaactgcgcaacacacactcagccgttctggggttcgcttacaaatcgtactcgccctcccagcgtccaggtggccaaaactactcctttcaacactcgggagccagtgatgctggcatgttacgtgtggggcttctatcctgcttag

SEQ ID NO: 124925 - DNA, 426 bp, Artificial Sequence
  derived and/or modified sequence
tgaacccggccccccagcgtgcaggtggccaagaccacccccttcaatacgcgcgaacccgtaatgctggcgtgctatgtatggggcttttatccagccgaggtcaccataacctggaggaagaacggcaaactggtgatgccccacagctctgcccacaagacagcacagccaaacggcgactggacctatcagaccctgtcacatcttgcactcaccccttcttatggcgacacctacacatgcgtggtcgaacatattggtgctccagaaccaattttgcgtgattggacccccgggctctcccccatgcagactctgaaggtgtctgtgtccgcagtaaccttaggactgggattaattatttttagtcttggggttatttcctggaggcgtgcaggtcactctcggtggcatataagctag

SEQ ID NO: 124926 - DNA, 528 bp, Artificial Sequence
  derived and/or modified sequence
atgggccacgagcagaaccagggcgccgccctgctgcagatgctgcccctcctctggctcctcccgcactcatgggcagtgcctgaagagcaaagcatgataacattcctacccttactgctgggcctgagcctcggttgcaccggggccggcggattcgtagcgcacgtggagagcacttgtttgctggatgatgccggaacaccgaaagacttcacgtactgcataagctttaacaaggatttgcttacatgttgggacccagaagagaacaagatggccccctgtgagtttggggtcctaaacagtcttgcgaatgtgctttctcagcaccttaaccagaaggatacgttgatgcagcggctccggaacggtttgcagaattgcgctacccacacacagccattttggggtagcctaaccaaccggacgaggccccccagcgtccaggtcgcaaagaccaccccatttaacacaagggaacctgtaatgctcgcttgctacgtgtggggattttatccagcctag

SEQ ID NO: 124927 - DNA, 528 bp, Artificial Sequence
  derived and/or modified sequence
atgggccacgagcagaaccagggcgccgccctgctgcagatgctgcctctgttgtggcttctgccacactcatgggccgtcccggaggaacaatcaatgataacgtttctccctttactgcttgggctctctctgggttgtaccggcgctggcgggttcgtggctcacgttgagagcacatgcttgctggacgacgcaggaacccccaaggatttcacctattgcatctcattcaataaggatctcctgacttgttgggacccggaggagaataaaatggctccatgcgaattcggagtgctgaactcactggcaaacgtcctgagccagcaccttaaccagaaagataccttaatgcagagattgcgaaacggcctgcaaaattgtgcaacgcatacccagcccttttggggatctctgacaaatcggacgagaccaccaagtgtgcaggttgccaagactacacccttcaacaccagggaacctgtgatgctggcctgttacgtctggggtttctatccggcctag

SEQ ID NO: 124928 - DNA, 792 bp, Artificial Sequence
  derived and/or modified sequence
atgatcaccttcctgcccctgctgctgggcctgagcctgggctgcacgggggccggcggttttgtggcccatgtggagtcaacatgcttactagatgatgccggaacacctaaggacttcacctattgtatctccttcaacaaggaccttctgacatgctgggacccagaggaaaacaagatggcaccatgtgaattcggagttcttaatagcctggccaacgttctgagtcagcacttgaaccagaaggacaccctgatgcagagattgcgcaatggactgcagaactgcgcaacccacactcagccgttctggggctccctgaccaaccgcactagacccccaagcgtacaggtggcaaagacgaccccattcaatacccgagagccagtcatgttggcctgctatgtttggggcttttaccctgctgaagtaactatcacttggcggaagaacgggaagcttgtgatgcctcatagtagcgctcataaaactgctcagccaaacggggattggacctatcagacactgtctcaccttgcgttgaccccatcctatggagatacctacacatgcgtcgtggagcatactggcgctcctgagcctatcttacgcgactggaccccgggcctgtcaccaatgcagacgttgaaggtaagcgtgagtgctgtgactcttgggctggggctcattatcttttctcttggcgtcattagctggagaagggccggccacagttcatatacccccctgcctggcagtaactatagcgagggctggcatatctcttag

SEQ ID NO: 124929 - DNA, 426 bp, Artificial Sequence
  derived and/or modified sequence
tgaacccggccccccagcgtgcaggtggccaagaccacccccttcaacactcgagagcctgtgatgctggcctgttatgtgtggggtttttaccccgccgaggtgaccatcacatggcggaaaaatggcaagcttgttatgcctcactcttcggcccataagaccgctcaaccgaatggagattggacataccagaccttgagtcatttggccttaactcccagctatggcgacacatatacgtgcgtggtggaacatattggtgctccggagcctattctccgggattggacaccagggttgtctcccatgcagaccctcaaagtgagcgtgtctgctgtgacccttgggctaggactgattattttcagcctgggcgtcatatcttggcggcgggccgggcattctcggtggcacattagttag

SEQ ID NO: 124930 - DNA, 774 bp, Artificial Sequence
  derived and/or modified sequence
atgatcaccttcctgcccctgctgctgggcctgagcctgggctgcacaggtgcagggggctttgtcgctcacgtagagagtacctgtctgttagatgacgcaggaactccgaaagattttacatactgtatatcttttaacaaggatctactgacatgctgggacccggaagaaaataaaatggctccctgtgagtttggggtcttgaattcactggcgaacgtgcttagtcaacatctgaaccaaaaggacacgctgatgcagcggctgaggaacgggctgcagaactgcgccacccacacacagcctttttggggctccttaaccaacagaacacgccctcctagcgtgcaggttgccaagacaacaccgttcaacacacgggagcccgttatgttggcgtgctacgtctggggcttttaccccgctgaggtcacgataacgtggaggaaaaatggaaagctcgtgatgccccatagtagtgcgcacaagactgcgcagccaaatggggattggacataccagaccctgtcgcacttggctttgacaccaagctacggcgacacctatacatgcgtcgtggaacacattggcgctccagagcccatactcagagactggacacctggcctgagcccgatgcagacattgaaggtgtccgtgagtgctgtaactctgggattggggctcattatcttctccctgggagttattagctggcgcagggcaggccactcctctgacctgattatctctctacttttcattttgtag

SEQ ID NO: 124931 - DNA, 774 bp, Artificial Sequence
  derived and/or modified sequence
atgatcaccttcctgcccctgctgctgggcctgagcctgggctgcacgggtgcagggggattcgtggcccacgtggagagtacatgtctacttgacgatgcagggacacctaaggatttcacctactgcataagctttaataaggatctgctcacctgttgggatcccgaagagaacaaaatggcaccttgcgaattcggcgttcttaacagtcttgccaacgtgctgagccaacaccttaatcaaaaagatacccttatgcaaagattgaggaacggcctccagaattgcgcgactcacacacaaccgttttgggggagtttgaccaaccgcacgagaccaccatcggtgcaggttgccaaaactacccctttcaacacacgggagcccgtgatgctggcctgttacgtatggggattttatccagccgaagtgacaattacctggaggaagaatggcaagctggtgatgccacactcctcagcacacaagaccgctcagcccaatggcgactggacttaccagacattgtctcatctggcactcacaccttcctacggagatacttatacgtgcgtggtggagcatactggtgcccccgaacccatactacgggactggaccccaggcctcagccccatgcagaccctgaaagtctcagtcagtgccgttaccctggggctggggctgattatcttctcccttggagtgatttcttggcggcgggccggccactcctctgacctcatcattagcctcttgttcatactgtag

SEQ ID NO: 124932 - DNA, 651 bp, Artificial Sequence
  derived and/or modified sequence
atgatcaccttcctgcccctgctgctgggcctgagcctgggctgcacgggagctggcggatttgtagctcacgtcgagagcacgtgcttgttagatgatgctgggacacctaaggatttcacctactgcatctctttcaataaggacctgctcacctgttgggatccagaggagaataaaatggcaccctgtgaattcggcgtactcaattccttagctaacgttctgtcacagcatttgaaccagaaggacactctgatgcagcggctccggaatggattacagaactgtgcgacccatactcagcccttctgggggagcctgactaatagaacgcgccccccatctgtacaagttgcaaagaccacaccgtttaacaccagggagcctgtgatgctcgcttgttacgtttgggggttttatccagctgaagtgactataacatggcgcaagaacggcaagctggtcatgccccactcgagcgcacataaaactgcccagcctaacggcgattggacctaccagaccctgtcccaccttgccctgactccctcatacggcgatacttacacatgcgtggttgaacacatcggcgccccagagccaattttgagagactggagcaaatgtatggccgatggctggaactag

SEQ ID NO: 124933 - DNA, 171 bp, Artificial Sequence
  derived and/or modified sequence
atgccccacagcagcgcccacaagaccgcccagcccaacggcgactggacctatcaaactttatctcatcttgccctcacaccatcctatggagacacctacacatgtgtcgtggagcacataggtgcccctgaacccatcctgcgagactggaggtggcatatttcttag

SEQ ID NO: 124934 - DNA, 171 bp, Artificial Sequence
  derived and/or modified sequence
atgccccacagcagcgcccacaagaccgcccagcccaacggcgactggacataccagactctaagtcatttggcactcactccatcctatggggatacatacacatgtgtcgtggagcacataggcgcccctgaacccatcttgcgggactggcggtggcatatcagctag

SEQ ID NO: 124935 - DNA, 651 bp, Artificial Sequence
  derived and/or modified sequence
atgatcaccttcctgcccctgctgctgggcctgagcctgggctgcacgggggccggcggctttgtagcccatgtggagtccacctgtttgcttgacgacgcaggcacccctaaggacttcacgtactgcattagctttaacaaggacttgcttacttgctgggatccggaagagaacaagatggctccttgcgagttcggcgtactcaacagcctagccaatgtgctgagccagcatcttaaccagaaagataccttgatgcagaggcttcggaatggactgcagaactgtgccactcacacccaacccttttggggttctctcacaaatcggacccgtcccccctcagtgcaagtggctaagaccaccccattcaatacgagggagcctgttatgctcgcttgctacgtttgggggttttatcccgccgaggtgactatcacatggcgtaaaaacggcaagttagtcatgcctcactcatctgcacacaagactgcacagccgaatggggactggacttatcagacactctcacatttggccctcacaccttcctacggcgacacctacacttgcgtggttgagcacactggtgccccggaacccatcctgagagactggtctaagtgtatggctgacggatggaactag

SEQ ID NO: 124936 - DNA, 207 bp, Artificial Sequence
  derived and/or modified sequence
atgccccacagcagcgcccacaagaccgcccagcccaacggcgactggacataccagaccttgagtcacttagcactcaccccgtcatatggcgacacctatacttgtgtagtggaacacattggcgccccagagcctatattgcgcgattggtcatacacccccttacctggcagtaactactctgaggggtggcacatctcttag

SEQ ID NO: 124937 - DNA, 171 bp, Artificial Sequence
  derived and/or modified sequence
atgccccacagcagcgcccacaagaccgcccagcccaacggcgactggacatatcagaccctgtcccacctggctctaactccctcttacggcgatacttacacttgcgtggtggagcacattggggcccctgaacccattctccgggactggcgctggcatatttcctag

SEQ ID NO: 124938 - DNA, 288 bp, Artificial Sequence
  derived and/or modified sequence
atgccccacagcagcgcccacaagaccgcccagcccaacggcgactggacttaccagacactgagccacttggctcttactcctagttacggagatacttatacctgtgttgtggaacacattggcgcaccggagccaattctccgcgactggacccccggactgtcgccaatgcaaacactcaaagtgtcagtctccgccgtgacactgggcttgggtctgattatattttccctgggtgtgatctcttggagaagagcgggccactccaggtggcatatcagttag

SEQ ID NO: 124939 - DNA, 207 bp, Artificial Sequence
  derived and/or modified sequence
atgccccacagcagcgcccacaagaccgcccagcccaacggcgactggacatatcagacactgtcgcatttggccttgacaccgtcttacggagatacttatacttgcgtggtagagcacattggagcacccgagccgatcctaagagactggtcatacaccccactgcctggctcaaactattcagagggctggcatatatcatag

SEQ ID NO: 124940 - DNA, 207 bp, Artificial Sequence
  derived and/or modified sequence
atgccccacagcagcgcccacaagaccgcccagcccaacggcgactggacataccagactctctctcatcttgcacttacacctagctatggggacacttatacatgcgtcgtcgaacacattggagcaccagagccaatccttagagactggtcttataccccgttgcccggctcaaattatagcgagggatggcacatcagctag

SEQ ID NO: 124941 - DNA, 288 bp, Artificial Sequence
  derived and/or modified sequence
atgccccacagcagcgcccacaagaccgcccagcccaacggcgactggacataccagaccctttctcacttagccctgacaccttcctatggggatacatatacttgcgtcgttgaacacataggcgcccccgaacctatactgcgcgattggacaccaggcctgagccccatgcagacactaaaggtctccgtttctgcggtgaccctgggcctcgggctaatcatcttctctttgggagtcatctcatggaggagagctggccacagtcgatggcacatatcttag

SEQ ID NO: 124942 - DNA, 651 bp, Artificial Sequence
  derived and/or modified sequence
atgatcaccttcctgcccctgctgctgggcctgagcctgggctgcaccggagcggggggatttgttgcccatgtcgaatctacttgcttgcttgacgacgctggtactcctaaggacttcacctactgcattagcttcaataaggacctcctcacctgctgggatcctgaggagaacaagatggctccctgtgagttcggggtactcaatagcttggcgaatgtactttcccagcatctgaatcagaaagacactctgatgcagcgactacggaacggccttcagaactgcgcaacccatacccagcctttctggggcagtttgacaaaccggacccgcccaccctccgtgcaagtggcaaaaaccactcccttcaataccagagagcccgtcatgctggcctgctacgtgtggggcttttatcctgcagaggtgacaataacctggcggaagaatggcaagcttgtgatgccccacagctccgcccataaaaccgcccagcctaacggggattggacctatcagaccctgtcccatttagccctgacccccagttacggggacacatatacttgcgtggtggagcacataggggcccctgaaccaatactgagagattggtctaagtgtatggcggacggctggaactag

SEQ ID NO: 124943 - DNA, 207 bp, Artificial Sequence
  derived and/or modified sequence
atgccccacagcagcgcccacaagaccgcccagcccaacggcgactggacctatcagaccctctctcacctggcgctcaccccgtcatatggcgatacatatacctgcgttgtggagcacatcggtgctcctgagcctattctcagagactggtcttatacccccctccccggttccaattacagcgaaggctggcacataagttag

SEQ ID NO: 124944 - DNA, 651 bp, Artificial Sequence
  derived and/or modified sequence
atgatcaccttcctgcccctgctgctgggcctgagcctgggctgcacaggtgccggtgggttcgttgctcatgtggagtccacttgtctgcttgatgatgccggaacacccaaggactttacatattgtatctcctttaataaagacctactcacttgctgggatccagaagagaacaaaatggccccctgcgaattcggggtgctcaatagcttagctaacgtgctcagccagcacctgaaccagaaggacacactcatgcaaagactgaggaacggactgcaaaactgtgccactcatactcaacccttttggggcagcctgacaaaccgcacacgcccaccttcagtccaggtcgccaaaaccacaccctttaatacccgtgagcctgtgatgctagcctgttatgtgtggggcttctatccagctgaagtcacaatcacttggagaaagaatggaaaattagttatgccacacagcagtgcccacaagacagctcagcccaacggcgactggacttaccagactctctctcacctggcactgacaccatcttatggagatacatacacctgcgtcgtcgaacacactggcgccccagagcctattctgagagactggtcaaaatgcatggctgatggctggaactag

SEQ ID NO: 124945 - DNA, 651 bp, Artificial Sequence
  derived and/or modified sequence
atgatcaccttcctgcccctgctgctgggcctgagcctgggctgcaccggcgccggcggatttgttgctcatgtggaaagtacctgcttgcttgatgatgccggcactccaaaggattttacatactgcatctcgttcaacaaggatttgttgacctgttgggatccagaggagaataaaatggccccctgcgagttcggtgtgttgaactcgctcgccaatgtgctgtcccagcatcttaatcaaaaggacaccctcatgcagagactgcgcaacggcttgcaaaactgtgccacccatactcaaccgttttggggcagcctcactaacaggacacgacctcccagtgtacaagttgccaagactaccccttttaatacccgggaaccagtgatgctcgcctgctatgtgtggggtttctatcccgcagaggtcacgataacctggcgaaagaatgggaagttggtgatgccacacagtagtgcccacaagacagcacagcccaacggggattggacctaccagacccttagccacctagccctcacaccttcatatggggacacttatacatgtgtcgttgagcacacaggagccccagagcctatcctgagagactggagcaagtgtatggcagacggctggaactag

SEQ ID NO: 124946 - DNA, 171 bp, Artificial Sequence
  derived and/or modified sequence
atgccccacagcagcgcccacaagaccgcccagcccaacggcgactggacttatcagactctgagccacctggcacttaccccctcttacggagacacttatacctgcgtagtggaacacattggggctccggaaccaatcctaagggactggcgatggcatatttcgtag

SEQ ID NO: 124947 - DNA, 651 bp, Artificial Sequence
  derived and/or modified sequence
atgatcaccttcctgcccctgctgctgggcctgagcctgggctgcaccggtgctgggggattcgtcgcacacgttgaatctacgtgcttgctggatgatgcgggcactccaaaggatttcacctattgcatatccttcaataaagacctcctcacttgttgggatcccgaagagaataagatggctccctgcgagttcggcgtcctgaactctttagccaatgtgttatctcaacatctgaatcagaaggacaccctaatgcagaggctgcgcaatggccttcagaactgtgcgactcatacacagccgttttggggcagcctgactaatcgtacccggcccccttctgttcaagtggcgaaaacaacaccctttaatactagggagccggttatgctagcatgctacgtctggggcttttaccctgctgaagtcaccataacatggaggaagaacggaaagctcgtgatgccacacagctccgcacacaagaccgcccagccaaatggagattggacatatcagaccctttctcacttggcgcttactcctagctatggggacacctatacctgtgttgttgaacatattggtgctcccgaacccattttacgcgactggtccaaatgcatggctgacggctggaactag

SEQ ID NO: 124948 - DNA, 288 bp, Artificial Sequence
  derived and/or modified sequence
atgccccacagcagcgcccacaagaccgcccagcccaacggcgactggacatatcagacattgtcccacctcgctctcacccccagctacggcgatacttatacctgtgttgttgagcacattggagctccggagcctatcttgcgggattggacccccggcttgagcccaatgcagacgctgaaagtgtccgtgagtgccgtgaccctggggctgggccttatcatcttctcactgggagtaatcagttggcgccgagctggccattcacgttggcacatatcatag

SEQ ID NO: 124949 - DNA, 288 bp, Artificial Sequence
  derived and/or modified sequence
atgccccacagcagcgcccacaagaccgcccagcccaacggcgactggacctatcagactttgtcccatctggctcttaccccctcttacggcgatacatacacatgtgtcgtggaacacattggcgctcccgagcccattctgagagactggacacctggcctctctcccatgcagacactgaaagtgtcagtttccgctgtcaccctcggtttagggctcattatatttagcctcggagtcattagctggagaagagcaggacacagcaggtggcatattagctag

SEQ ID NO: 124950 - DNA, 651 bp, Artificial Sequence
  derived and/or modified sequence
atgatcaccttcctgcccctgctgctgggcctgagcctgggctgcacgggcgctggggggtttgtggcccacgtggagtccacctgcttgttggatgacgcagggactcctaaggactttacttactgcatcagctttaataaagatctgttaacatgctgggatcctgaagagaacaagatggccccctgcgaatttggtgtgttgaacagcctggcgaacgtgctgtctcagcatctaaaccagaaagacaccctaatgcagcggctgcgtaacgggctccagaattgtgcaactcacacccaacccttttgggggtcccttaccaatcgtacacggcctccgtcagttcaggtcgccaaaacaacaccattcaacacacgggagccagttatgctcgcctgttacgtgtggggtttctaccctgctgaggtgaccatcacctggcgaaagaacggcaagttggtcatgccccattcatccgctcataagactgcacaaccaaacggggattggacatatcaaaccctatcccacctggcgttgaccccgagctacggagacacctatacctgcgtggtggaacacataggagcccccgagccaattttgagagattggagcaaatgtatggcagacggctggaattag

SEQ ID NO: 124951 - DNA, 792 bp, Artificial Sequence
  derived and/or modified sequence
atgatcacatttttgcctctgcttcttggtttatcacttgggtgcacgggcgcagggggatttgtggctcacgtagaaagtacatgcctactcgatgatgccggtacacccaaagattttacgtattgtatctcgttcaataaggatctcctcacctgctgggaccccgaagaaaataagatggctccctgtgagttcggggtgttgaattctctagcaaatgttctgtcacaacaccttaaccagaaagacacactgatgcagaggctgcgaaatggactacagaactgcgctacgcatactcagcctttctggggaagccttacgaatcgcactaggcctccgtctgtgcaggttgctaaaacgaccccgtttaacactcgcgaacctgtaatgttagcctgctatgtttgggggttttaccccgctgaagtgacaatcacctggagaaagaatgggaaactggtaatgccccacagctccgcccacaagaccgcacaacccaacggcgattggacatatcagaccctgagccatctggctttgacgcccagctacggggacacatatacatgcgtggtggagcacattggtgctccagagcccatacttcgagattggacacccggactgtcgcccatgcaaacactgaaagtatctgtgtccgcggtcacccttggtctcgggctgattatattctcactgggtgtgatttcctggagaagggctgggcactcttcctacactcctcttcctggttcaaactacagcgagggctggcatatcagctag

SEQ ID NO: 124952 - DNA, 792 bp, Artificial Sequence
  derived and/or modified sequence
atgatcacattcttgccgctgctgctcggcctgagccttggctgtactggcgctggaggattcgtggcccatgtcgagtccacttgtctgctggacgacgctggcacacctaaagacttcacctactgtattagctttaacaaggacctgctgacctgttgggacccggaggagaacaagatggccccatgcgaattcggggttttgaacagcctcgctaatgtgctgtctcagcacctcaaccagaaagacacactgatgcagcggttgcgaaacggtctccagaattgcgcaacacatacccaaccgttctggggaagcctcacaaatcggacccgccctccaagtgtccaggtcgccaagacaaccccttttaacactagagaacctgtcatgctggcatgctatgtttggggtttttatccagctgaagttacgatcacgtggagaaaaaatggaaaactcgtaatgccccatagctccgcccacaagactgcccagcccaacggagactggacctaccagactctgtcccatctcgctctgacgccctcatatggcgatacatacacatgcgtagtggaacatattggggctcccgaacctatcctccgggactggactccaggattatcccctatgcaaactctgaaagtctctgtgtccgccgtgacactgggactggggttaataatcttcagtctgggcgttatctcctggcggcgagctgggcacagcagttataccccgctccctggatccaattactctgaggggtggcacatctcttag

SEQ ID NO: 124953 - DNA, 792 bp, Artificial Sequence
  derived and/or modified sequence
atgattacattcttgccactgttactggggctgagcctaggctgcacgggcgctggagggtttgtggcacacgttgaaagtacttgccttctggacgatgcagggacacccaaggattttacctactgcattagcttcaacaaagatctccttacctgttgggacccagaagaaaacaagatggctccctgtgagtttggagtgttgaacagcttagctaacgtcctgtctcagcacctcaaccagaaggacactcttatgcaaaggttgagaaacggcctgcagaactgcgcaacgcatacccagccattttggggaagtctgacgaatcgcacaagacctccgtcagtacaggtggccaaaacgactcctttcaatacccgggaacccgtgatgttggcttgctatgtgtgggggttttatccggctgaagtcacgataacatggaggaagaacggcaagctcgtcatgccccactcttctgctcacaaaaccgcgcagccgaacggtgattggacataccaaacgttgagccacctcgcactcaccccctcttacggtgatacatacacatgtgtggtggaacacaccggggcacccgaaccaattttaagggactggacacctggactcagcccaatgcagacactgaaggtttccgtctcagccgtcaccctaggtttgggactgatcatattttcattaggggtgattagctggagaagggctggccattcttcctatactcccctgccaggctcaaactatagcgaaggttggcacatttcttag

SEQ ID NO: 124954 - DNA, 426 bp, Artificial Sequence
  derived and/or modified sequence
tgaacgcgccctccctctgtacaggtggcaaagaccacaccgtttaatacccgagaacccgtgatgcttgcgtgctatgtatggggattttaccctgctgaagttactatcacttggcggaaaaatgggaaacttgtcatgccacactctagtgcgcacaagacagctcagcccaacggagattggacatatcagactctgtcacacttagctctcacgccgtcctatggcgatacgtacacctgtgtggtcgaacatataggtgcccctgagccaatacttagggactggacacctggcttatcccctatgcaaaccttaaaagttagtgtcagcgccgttacccttggcctaggtcttattattttctccctgggtgtcatctcctggagacgggcaggacactcccggtggcacatcagctag

SEQ ID NO: 124955 - DNA, 774 bp, Artificial Sequence
  derived and/or modified sequence
atgatcaccttcctaccactcctgctcgggctgtccctgggatgcactggcgctggaggattcgtggcccacgtcgaaagcacctgcctcctcgatgacgccggaaccccaaaggacttcacttactgcataagttttaataaggaccttctgacatgttgggacccggaagagaataagatggcaccatgtgagttcggtgtcttaaattctctggccaacgttctgtcacagcatctaaaccagaaggataccctcatgcagaggctgcggaatgggctccagaactgcgctacccacacccagccgttctggggctctctcaccaacagaaccaggccccctagcgttcaggtggcaaaaacaacacccttcaatacaagagagcccgtgatgctcgcctgctatgtttgggggttttatccagctgaggtgaccattacctggagaaagaacgggaaactcgtaatgccacattcctcagcacataaaaccgcacagcctaacggcgactggacctatcagaccctgtcacatttagccctgacaccgagttatggtgacacctacacctgtgtcgtcgagcacattggagcccctgaacccattctgcgggattggacccctggcttgtcccctatgcagaccttaaaggtctctgtaagcgccgtgaccctggggctcggtctgatcatattcagcttgggagtgatctcatggcgtagagctggacattcatcggacctgataatctccctgctcttcatcctatag

SEQ ID NO: 124956 - DNA, 321 bp, Artificial Sequence
  derived and/or modified sequence
gtggccaaaactaccccttttaatacccgcgaacccgtcatgctcgcatgttacgtctgggggttttatccagccgaagtgacaataacttggagaaaaaacggaaaattggtgatgccccacagcagtgcacacaagactgcccagccgaacggtgactggacatatcagaccctgagtcacctggcgcttaccccctcatacggggatacgtatacctgcgtagtggaacatacaggggcacccgagcccatactgagagattggtcttatacacctctgcctggctccaattactcagaaggatggcacatctcctag

SEQ ID NO: 124957 - DNA, 426 bp, Artificial Sequence
  derived and/or modified sequence
tgaacccgccctcccagcgtccaggtggctaaaacgacgccgttcaatacccgtgagccggtcatgctggcatgctatgtgtggggtttctaccccgctgaggtgactattacttggcgaaagaatgggaaattagttatgccgcactcatccgcccacaaaacggcacaacccaatggcgactggacataccagaccctctcgcatctcgcactcactccctcctatggggacacatatacctgcgtcgtggaacatacaggggctccagagcccatcctgcgagactggactcctggcctgagcccaatgcagaccctcaaggtcagtgtgagcgcagtcaccctaggactgggccttattatcttctcactaggtgtgatttcttggaggagagccggacattcccgctggcacatctcatag

SEQ ID NO: 124958 - DNA, 528 bp, Artificial Sequence
  derived and/or modified sequence
atggggcatgagcagaatcagggcgcagccctgctgcaaatgctgccactactttggctgctgcctcacagttgggccgtgcctgaagaacaatccatgattacgtttttgcccctcctgctgggcctgagcctgggttgtactggcgcaggcggtttcgtcgcccacgtggagagcacttgtctcctcgatgacgctggaacaccaaaggactttacctactgcattagcttcaataaagatctattaacatgctgggatccagaggagaataagatggctccctgcgagttcggtgtgctgaacagtctggcgaatgtgttgtcccagcatttgaaccaaaaagatacattaatgcagcggctgagaaatgggctgcagaactgcgccacacacacccaacctttctggggctccctcacaaatcggacgaggcccccatctgtgcaggtggccaagaccaccccatttaatacgcgagagccagtaatgcttgcttgctacgtctggggtttttacccggcttag

SEQ ID NO: 124959 - DNA, 528 bp, Artificial Sequence
  derived and/or modified sequence
atgggtcatgaacagaaccaaggcgctgctctcctccaaatgttaccacttctgtggctcctcccccactcatgggcggtgcccgaagagcagtcaatgataacatttttaccattactcctcggattgagtctggggtgcacaggggctggaggtttcgtggcccatgtggaatccacatgtctgctggacgatgcaggaactccaaaagacttcacttattgcatttctttcaataaggacctcctgacgtgctgggacccggaggagaacaagatggctccctgcgaattcggtgtgctgaattccctggccaacgtgctttcacaacatttaaatcagaaggataccctgatgcagcggctgaggaatggactacaaaattgcgccacccacactcagccattttggggttctctcaccaatcgtacccgccctccttcagtacaggtggccaaaactacaccatttaacactagagagcccgtcatgctggcgtgctacgtgtggggcttctatcctgcttag

SEQ ID NO: 124960 - DNA, 651 bp, Artificial Sequence
  derived and/or modified sequence
atgatcaccttcttacccctgcttctgggccttagcctcgggtgcacaggcgctggaggatttgtagctcatgtggaaagcacctgccttctcgacgatgccggtaccccaaaggactttacctactgtatctcttttaacaaagacctccttacttgctgggatccggaggaaaacaaaatggcgccttgtgagtttggtgtccttaattctctagcaaatgtgctgagtcaacatcttaaccagaaggatacattaatgcagcgtctgcggaacggcctgcagaactgcgctactcacactcagccattttggggctcactcacaaaccggaccaggcccccatctgtgcaggtggcaaaaactaccccattcaatacgcgggaacccgttatgcttgcttgctatgtttgggggttctatcctgccgaagtgactatcacctggagaaagaacggcaaactggtaatgccacattcatctgcccacaagacggcccaacctaacggagactggacctatcagacgttgtctcatttggcccttaccccaagctacggagacacgtatacctgtgtggtggaacatacaggcgcaccagaaccaatactcagagattggagcaagtgcatggctgacggctggaactag

SEQ ID NO: 124961 - DNA, 792 bp, Artificial Sequence
  derived and/or modified sequence
atgataacttttctgcccctgttgctgggcctgagccttggatgcaccggggcagggggattcgtcgcacacgtggaaagcacttgccttctggacgacgcgggtaccccaaaagatttcacatactgtatttctttcaataaagatctgctgacgtgctgggacccggaagagaataaaatggcaccatgcgaatttggagttctcaattcactcgccaacgttctgagccagcatctgaatcagaaggacaccttaatgcaacgactacggaacggactacaaaattgtgcaactcacacacagcctttctggggtagtctgacaaaccgaacacgacctccctctgtacaagttgctaagactacccccttcaatactagagagcctgtcatgctggcatgctacgtgtgggggttctacccggcagaggtcaccattacctggcggaagaacggaaaactggtgatgcctcatagcagtgcccacaagacagctcagcccaatggcgattggacataccagaccttatcccatcttgcactcaccccgagttacggtgatacctatacctgtgtcgtggaacacacaggcgctccagaacctatattacgagattggactcctggcctctcaccaatgcagactctgaaggtttctgtgagcgctgttactctcgggctgggtcttatcatattttctctgggagttatttcctggcggagggccggacatagctcttacactcctcttccaggatcgaattactcagaaggctggcacatctcatag

SEQ ID NO: 124962 - DNA, 774 bp, Artificial Sequence
  derived and/or modified sequence
atgatcactttcctgccgttgttgctgggactcagcctgggctgcactggagctggcggtttcgtagcacacgttgagagtacatgtttactggatgacgccggaacacccaaagactttacctactgcatttcgtttaacaaagacctgttaacctgttgggatcccgaggaaaataagatggctccttgtgagtttggagtgcttaactcactggctaatgtgctttcccaacacctgaatcagaaggacaccctaatgcagagactgagaaatggactgcaaaattgtgctacccatacccagcccttctggggaagtctgacgaaccgtacccggcctccaagtgtacaggtagccaaaacaactcccttcaacacgcgggaacccgttatgctcgcctgctacgtgtggggattctacccggctgaggttacaattacctggagaaagaacggaaagctcgttatgccccattccagcgcacacaaaaccgcccaacccaatggcgattggacctatcaaactttaagccatcttgccctcactcctagctatggcgatacatatacctgcgtagtggaacatactggtgcccctgaacctatactccgtgattggacgcccggactgtcacccatgcagaccctcaaggtctctgtgagcgccgttactttggggctgggtctgattatctttagtctaggcgtcatttcctggaggagggcgggacatagctccgacctcatcatctccttgctatttatcctttag

SEQ ID NO: 124963 - DNA, 321 bp, Artificial Sequence
  derived and/or modified sequence
gtggccaaaaccaccccctttaacacccgcgaacccgtgatgttggcatgttatgtttgggggttttaccccgctgaagtgacgatcacttggaggaaaaatggcaagctggtaatgccccattcatcagcgcacaagacggcccagcctaacggcgactggacatatcaaaccctgagtcacctcgccttgaccccaagctatggggacacgtacacttgtgtcgttgaacacattggggcaccggagcccatcttacgcgattggtcatataccccgctcccagggtctaattatagtgaaggctggcacatctcctag

SEQ ID NO: 124964 - DNA, 792 bp, Artificial Sequence
  derived and/or modified sequence
atgatcaccttcctcccccttctcctggggctttcgcttgggtgcacgggagccggagggtttgtcgcccacgtggaaagcacatgcctgctggacgacgcgggaactccaaaagattttacatattgtatcagctttaacaaagatttattaacttgctgggacccagaagaaaataagatggcgccatgcgagttcggggtgttaaattcgctggcgaatgtcctatcccagcacctgaatcagaaggacacactgatgcagagactcagaaacggactccagaattgtgccactcatacccagcccttctgggggagtcttacaaatcgtaccagaccaccttccgttcaggtggcgaagactaccccattcaacacccgagagcccgtcatgctcgcttgttatgtgtggggcttctatccggctgaggtgacgataacctggcgaaagaacggcaagcttgtcatgccccactcttccgcacataaaaccgcacagcccaacggcgattggacctaccaaacactgtcccatctggcgttgaccccctcctatggggatacttatacttgtgtggtggagcataccggcgctcccgagccaatcctccgggactggacacctgggctctcccccatgcagacactgaaagtatcagtctctgccgtgacattagggctgggcctcattatctttagcctgggagttatctcatggcgtagagccggtcacagttcctatactcctttacccggatcaaactatagcgaaggctggcacatttcctag

SEQ ID NO: 124965 - DNA, 426 bp, Artificial Sequence
  derived and/or modified sequence
tagacccgccctcctagcgtgcaggttgccaagacaacaccttttaacactcgggaaccagtgatgctggcctgctatgtttggggtttctaccccgctgaggtgacgattacatggagaaagaatggtaaactggtgatgccccattcctccgctcataagacagcccaacctaatggggattggacctatcagacactaagccatctggccctaactccatcatacggagatacctatacctgtgtagtcgaacatactggcgctccagaacccatcctgcgggactggacccccggtctgagccctatgcagacgctgaaagtgtcagtatccgctgtgactctgggacttggactgattattttttcactaggggtcataagctggcgcagggcaggacatagcaggtggcatattagttag

SEQ ID NO: 124966 - DNA, 792 bp, Artificial Sequence
  derived and/or modified sequence
atgataactttcctcccattactgcttggacttagcctgggttgtacaggagccggaggcttcgtggcccacgtcgagagcacatgtctgctggatgacgcaggtactcctaaggatttcacatattgtatttcgttcaacaaggatctcttgacgtgctgggatccagaggaaaataaaatggcgccatgtgaattcggcgtactgaacagtctggccaatgtcctttcccagcacctgaaccaaaaagacacgctgatgcaaagactgcgtaacgggctccaaaactgtgccacacacacgcagcctttttggggcagtctaacaaacagaacacggccaccttcagtgcaggttgcgaagactactcctttcaataccagagaacctgtaatgctggcatgttatgtttggggtttctatcccgcagaggtcacaataacatggaggaaaaatgggaagcttgtgatgccgcattccagtgcccacaagaccgcccaaccgaatggtgactggacatatcagaccctgagccacctggctctgaccccaagctacggcgatacatacacctgcgtggtggagcatattggcgctcctgagcctattctgagagactggacccccggtctgagtccaatgcaaaccctgaaagtgtcagtgagtgcagtcacattgggcctgggtttaataatatttagtctgggcgtcatcagctggaggcgagcaggccactcttcatatacccctctgcccggttccaactacagcgagggttggcacatatcttag

SEQ ID NO: 124967 - DNA, 774 bp, Artificial Sequence
  derived and/or modified sequence
atgatcacttttctgccactgctactgggcctgagcctgggatgtaccggggctggcggttttgtcgcacacgtggaaagcacctgtctgctggacgacgcagggacacctaaggactttacctattgcatcagtttcaataaggacctcctgacttgctgggaccctgaagagaacaagatggccccttgtgagttcggtgtgctgaattctctcgccaacgtcttgtcccaacatctgaaccagaaagacacattgatgcagagactgcggaacggtctgcaaaattgcgccactcacactcagcccttttggggctctctcactaacaggactagacccccatcagtacaggtcgccaagacaactccctttaatacacgcgagccagtgatgttggcctgttacgtctgggggttttaccccgctgaggttactattacatggcgaaaaaacgggaagctagtcatgccccactcctctgctcacaaaaccgcccagcccaatggggactggacctaccagactttgtctcatcttgcacttacacctagctacggcgacacatacacgtgcgtcgtggagcacatcggggcacccgagcccattctgagggattggactcccggacttagtccaatgcagacactaaaggtctctgtgagcgccgtcacccttgggcttgggctgatcattttttccctgggcgtgatttcatggagacgcgctggccactcttccgaccttatcatcagtttactgttcattctgtag

SEQ ID NO: 124968 - DNA, 528 bp, Artificial Sequence
  derived and/or modified sequence
atgggacacgaacagaatcagggtgccgctttactgcagatgctacctctgttatggctcctcccccactcttgggctgttcccgaggagcagtctatgataaccttcttgcccctgctgctcgggctcagcctgggatgtacgggcgcaggcggattcgtagcacacgtggagtccacatgcctgctggatgacgccggaactccaaaagattttacatactgcattagtttcaataaggacctcctcacatgttgggatcccgaggaaaacaaaatggctccctgcgaatttggagttctgaacagcttagctaacgtgctgagccagcatctgaatcagaaagatacactaatgcaaagactaaggaatggcctgcaaaattgcgcaacccatacacagcccttttggggctcccttactaatcggacccggcctccttcagtgcaggttgccaaaacaaccccgttcaacactcgggagccagtgatgctggcatgctatgtgtgggggttttatcccgcatag

SEQ ID NO: 124969 - DNA, 528 bp, Artificial Sequence
  derived and/or modified sequence
atgggccacgagcaaaatcagggtgccgctcttctacagatgctcccactactgtggctgctaccgcactcttgggccgtacccgaagagcaaagtatgattacttttcttcccctcttgctgggcctcagcctgggctgcaccggcgctggaggattcgtggcacatgtggagagcacatgtctgctggacgacgcaggaacgcccaaggactttacatactgcattagctttaataaggacctgttgacctgttgggatccggaggagaataaaatggcaccgtgcgaattcggagtcctcaatagcctggcgaacgtactgagccaacacctgaaccagaaggatacactaatgcagcgactacgcaacggccttcagaactgcgctacacatacacaaccattctggggatctctgaccaacagaactcggccaccgagtgtgcaagtggccaagacaactccttttaacacccgcgagccagtgatgctggcctgttatgtctggggtttttatccagcatag

SEQ ID NO: 124970 - DNA, 321 bp, Artificial Sequence
  derived and/or modified sequence
gtggcgaagactacaccttttaacacacgtgagccagtgatgttggcatgttacgtatggggtttttaccctgctgaagtgaccatcacttggcggaagaacggcaaacttgtcatgccacactctagcgcccacaaaacagcacaacccaatggtgattggacttaccagaccctgagccatctcgctttaacgccatcttacggggatacatatacatgcgtggtggagcacatcggtgccccagagcctattctccgggattggagttacacgcccttgcccggatccaactactcagagggatggcatataagttag

SEQ ID NO: 124971 - DNA, 426 bp, Artificial Sequence
  derived and/or modified sequence
taaacacgaccaccctctgtgcaggttgccaagaccaccccatttaatactcgcgagccagtgatgctcgcatgttatgtgtggggcttctatccagcagaggtgactatcacctggcgtaagaatggcaaactggttatgccccattctagtgcccataaaacggcccagcccaatggcgattggacatatcagacgctcagtcatttagccttgacacctagttacggggacacttacacctgcgtggtcgaacacaccggagcacctgagccaatcttgcgagactggactcctggcctctctccgatgcagactctgaaggtgtctgtgtccgccgtcacgttaggcctggggcttatcattttctcgctcggcgtaatctcgtggcgtagagccggacactcaagatggcatatctcctag

SEQ ID NO: 124972 - DNA, 528 bp, Artificial Sequence
  derived and/or modified sequence
atgggacacgaacagaatcagggcgcagccttgctccaaatgctgcctttactttggcttctgcctcactcttgggcagtccccgaagaacagtctatgattacttttctccccctgctgctgggactgtcgctgggctgtaccggcgctggcggtttcgtggcacatgtcgagtctacgtgtctgttggatgatgcaggcactcccaaagacttcacttattgcatttcctttaataaggatctgctgacttgttgggaccctgaagagaataagatggctccttgcgaatttggagtgttaaattccctggccaatgtcctgtcacagcacctgaatcaaaaggatacactcatgcaaaggctgcggaatggtctgcagaactgcgcaacccacacacagcccttctggggttctcttacgaatagaactcgccctccctccgtacaagtagcaaaaacaacgccatttaacacccgagagcccgttatgctcgcttgttatgtgtggggcttctaccctgcctag

SEQ ID NO: 124973 - DNA, 321 bp, Artificial Sequence
  derived and/or modified sequence
gtggccaagacaactccatttaacacacgggaaccagtcatgctggcctgttacgtgtggggcttttaccctgctgaggttaccattacctggcgcaaaaatggtaagttggtcatgccacacagttctgcacacaagacagcccaacccaacggcgactggacatatcagactctcagtcatttggcacttactccttcctacggcgacacgtatacatgcgtggtagagcacaccggcgcaccggagcctattctgcgcgactggtcatacaccccccttccagggtcaaattactctgagggttggcatattagctag

SEQ ID NO: 124974 - DNA, 321 bp, Artificial Sequence
  derived and/or modified sequence
gtagccaaaacaactccgttcaacactcgagaacccgttatgctcgcctgttacgtatggggtttctacccagcggaagtaaccatcacatggcgaaaaaatggtaaactggttatgccccactcttctgcgcacaagaccgcacagcctaacggcgattggacataccagacgttgagccacctggcactgaccccatcttacggggatacctacacctgcgttgtggaacacatcggagcccctgagcccatactccgggattggtcatacaccccgctacccggaagcaattactcagaaggttggcatatatcatag

SEQ ID NO: 124975 - DNA, 321 bp, Artificial Sequence
  derived and/or modified sequence
gttgccaaaaccacaccgtttaatacaagggaaccagtgatgcttgcgtgttatgtgtggggattttacccagccgaggtgacgatcacttggcgaaagaatggtaaacttgtgatgccacacagtagcgcacacaaaaccgcccagccaaatggcgactggacttatcaaacgctcagccatctcgctctgacaccatcctacggagatacttatacttgcgttgtcgaacacatcggggctcccgaacccatcctgcgagactggtcctacaccccactaccgggttccaattattctgaaggctggcacatctcatag

SEQ ID NO: 124976 - DNA, 426 bp, Artificial Sequence
  derived and/or modified sequence
tagacacgaccaccttcagtacaggtagcgaaaaccactcctttcaataccagggaacctgttatgcttgcctgctacgtgtgggggttttatcccgctgaggtaacaatcacctggagaaagaatgggaagctcgtcatgccccacagctcagcacacaaaactgctcagcccaatggggactggacataccaaactctgagccacctcgctctcaccccatcatatggcgacacttacacctgcgtggtcgaacatattggggcacctgaaccaatacttcgggattggaccccaggcctgtctcctatgcagaccttgaaggtgtccgtgagcgccgtcaccttaggcctggggctcatcatcttcagcctgggcgttatatcttggaggcgtgccggtcatagccggtggcatatctcatag

SEQ ID NO: 124977 - DNA, 321 bp, Artificial Sequence
  derived and/or modified sequence
gtcgctaaaactacaccctttaatacacgggaaccagtcatgctggcctgttacgtctggggattttatcctgccgaagtgactattacttggaggaaaaacggcaagctagtgatgcctcattcaagcgcacataaaacggcccagcccaacggcgactggacctatcagaccctgagccacctcgctctgacaccatcctatggcgacacttatacctgcgtggtggaacataccggagctccagaacccatactgagggactggagctacactcccctacctggaagcaactactctgaaggatggcacatttcttag

SEQ ID NO: 124978 - DNA, 774 bp, Artificial Sequence
  derived and/or modified sequence
atgatcacattcttacctttgttgcttggactttctcttggctgcaccggagcaggcggtttcgtcgcccatgtagagagtacctgcctcctggacgatgcaggaacccccaaagactttacttactgcataagcttcaataaagacctgttaacttgttgggaccccgaggaaaataaaatggctccttgtgaatttggggttctgaattcactggcgaacgtgctctctcagcacctgaaccaaaaggacactttaatgcaacgtctgcggaacggcttgcagaattgtgctacccacacacagcctttttggggtagcctcaccaataggacaaggcctcccagcgtccaggtggctaaaacgacccctttcaacacacgggaacccgtgatgctcgcatgctacgtgtggggcttctatcctgctgaggtgactatcacttggcgtaaaaacggcaaacttgtcatgccacattcctcagcacataaaacagctcagccgaatggggattggacctatcagacgctgtctcacctcgcgctgaccccatcctatggcgacacttatacatgcgtggtcgagcacaccggggcacctgagcccatcctacgcgactggacacccggtctgtcacccatgcagaccctgaaagtgtccgtctccgctgtcacattggggctggggctgattatcttctcactgggggtaatttcttggcggagggccggacactccagtgatctgatcatcagtttgctcttcatactgtag

SEQ ID NO: 124979 - DNA, 792 bp, Artificial Sequence
  derived and/or modified sequence
atgattacctttttacctttgctgctaggtctgtcactcggctgtactggcgctggcggatttgtggcccacgtggagtctacatgtcttctggatgacgccggtactcccaaggattttacatactgcattagcttcaataaggaccttctgacttgttgggacccagaagaaaacaaaatggcaccgtgcgaatttggcgtcctaaactccctcgccaatgtcctctctcagcacctgaatcagaaggacactctcatgcaacggctgagaaacggtttgcagaactgcgccacgcacacgcagccgttttggggctcccttactaacaggacccggccaccctctgtgcaagtggctaagaccaccccattcaacacccgggaacctgtcatgctggcgtgctacgtctggggcttttacccagcagaggtgactatcacctggcgcaaaaacggcaagctggtgatgccgcactcttctgcccacaagactgcccagcccaacggagactggacataccagaccctttctcacctggccctcaccccatcttacggcgatacgtatacttgtgttgttgagcacataggcgctccggaacctattctgcgagactggacgccaggattgtcacctatgcagacgctgaaggtgtctgttagcgccgtgactctggggctggggttgatcatcttcagtctgggcgttatctcctggcgaagagcgggacattctagctacaccccgctgccaggctcgaactattccgaaggatggcatatttcctag

SEQ ID NO: 124980 - DNA, 321 bp, Artificial Sequence
  derived and/or modified sequence
gtcgccaagacaaccccctttaatacccgagagcctgtgatgcttgcatgttatgtctggggcttctatcctgccgaggtcacaatcacatggcggaaaaatggaaagctcgttatgccacactctagcgcgcacaaaaccgctcagccaaatggggactggacgtatcaaaccctgtcacacctggccctgacccctagctacggcgatacctatacctgcgtggtcgagcatacaggggcaccggaacccattctgcgggattggagttatacaccactgcctgggtccaattactcagaaggctggcatatcagttag

SEQ ID NO: 124981 - DNA, 426 bp, Artificial Sequence
  derived and/or modified sequence
tagactcggcctccctccgtgcaggtcgccaagaccacgccctttaacactcgcgagcccgtgatgctggcctgctatgtttgggggttctaccctgcagaggtaaccatcacgtggcggaagaatggaaagttagtgatgccccattcatccgctcataagaccgcacagccaaatggagattggacataccagacactctctcacctggccttaaccccgtcttatggagacacctatacctgcgtggtggagcacaccggtgccccagaacctattctgcgcgactggactccgggattatcgccaatgcaaacccttaaggtcagtgtctccgccgtcacacttggcctgggacttattatattctcgctcggcgtgatctcttggagacgcgctgggcacagccgctggcacatcagttag

SEQ ID NO: 124982 - DNA, 774 bp, Artificial Sequence
  derived and/or modified sequence
atgatcacgttcctccccttgcttctgggcttatcactgggctgcaccggggcaggcggttttgtggcccatgttgagagcacctgccttcttgatgatgccggaactcccaaagacttcacgtactgtatatctttcaataaagacttattgacctgctgggaccctgaggagaacaagatggccccttgcgaatttggagtcctgaactctcttgccaatgtgctgagccaacatctcaaccagaaggacactcttatgcagagattgagaaacggactgcagaactgcgctacacacacccagcctttctggggaagcctgactaatagaacaaggccacccagtgtgcaggttgccaaaaccacgcctttcaacacccgcgaaccggtgatgctggcctgctatgtatgggggttctatcctgccgaagtcactattacgtggcgcaagaacgggaagctggtcatgccccactccagtgctcacaaaacggcccagcccaacggcgattggacttaccagacactcagtcatcttgcgcttacaccttcctatggggatacgtatacttgcgttgtagagcacacaggcgcacctgagcccatactgcgcgattggacgcccggactctccccaatgcagaccttgaaggtttcagttagtgcagtgacccttggcctgggattaatcatattctccttaggtgtgatatcttggaggagagccggtcattcctctgatcttatcatctcgctgctttttattctgtag

SEQ ID NO: 124983 - DNA, 774 bp, Artificial Sequence
  derived and/or modified sequence
atgatcacatttcttcccctgctgttgggcctgagccttggctgcaccggcgcagggggatttgtcgcgcatgtggagagcacctgcctgctagatgatgctggcactcctaaagacttcacttactgcatcagttttaacaaggaccttctcacttgttgggatccagaggaaaacaagatggctccgtgcgagttcggagttcttaattctttggcaaacgtcctgagccagcatctgaatcaaaaggataccctgatgcaacgcctccgcaacggcctgcagaactgcgccactcacacccaaccattctggggcagcttaactaaccggaccagaccgccaagtgtgcaggtcgccaaaacaaccccctttaacactagagagcctgtgatgctggcgtgttatgtatggggcttttatcccgcagaagtgacaataacctggaggaaaaacggcaagctggtgatgccccactcctcagcccataagaccgctcagccaaatggggattggacttaccaaaccttaagccacctggcactgaccccaagctacggggatacttacacctgtgttgtcgagcatattggcgcacctgagccaatcctgcgtgactggaccccagggctgagccccatgcagactctgaaagtctccgtgtccgccgtgacactgggcctggggctcataattttttccctcggcgttatttcgtggagacgtgcgggtcattccagtgatttgatcattagcctgctgtttatactgtag

SEQ ID NO: 124984 - DNA, 528 bp, Artificial Sequence
  derived and/or modified sequence
atggggcacgaacaaaaccagggggcagctcttttgcaaatgctacctttattgtggctccttccccatagctgggccgttcccgaggagcaatctatgattacattccttcctctgctgcttggcctgtctctgggatgtaccggagccggagggtttgttgcccacgtcgagtccacctgcttattggacgatgcaggcactccgaaagactttacctactgcatttccttcaataaagatctacttacctgctgggaccccgaagagaataaaatggccccttgcgagtttggggtgttaaactctctggctaacgtactctcgcagcaccttaaccagaaagacaccctcatgcagagactacggaacggcctccagaactgtgcaactcatacacaacccttttggggatctctgacgaatcgcacccggcctccatccgtgcaggtggcaaaaaccaccccgtttaacacacgggaaccggtgatgctcgcctgttacgtttgggggttttaccctgcctag

SEQ ID NO: 124985 - DNA, 426 bp, Artificial Sequence
  derived and/or modified sequence
tagaccaggcctccgtctgtccaggtagccaaaacgactccctttaatacacgcgaaccggtgatgctggcctgttatgtctgggggttctaccccgctgaggtcaccatcacatggcggaagaatggtaagctggtgatgccccactcttctgcccacaaaaccgcccagcctaatggagattggacgtaccagacactgtctcatctggctcttaccccatcatacggggatacatatacatgcgtcgtggaacacattggagcaccagaaccaatcttgagggattggacgccgggactatctccaatgcagacactgaaggtctctgtgagtgctgtgaccctgggcctcggcctaatcatatttagtcttggcgtgatttcttggcggcgagctggccacagcagatggcacatctcctag

SEQ ID NO: 124986 - DNA, 528 bp, Artificial Sequence
  derived and/or modified sequence
atggggcatgagcaaaaccagggagctgcccttctgcagatgctgcctttgctctggttacttccccattcttgggccgttcctgaggagcagtctatgatcacattcttgccactcttgctcggactctctttgggatgcacaggtgctggcggattcgtcgcacacgtcgaaagcacttgcctgctggacgatgccggaacaccaaaggactttacgtattgcatttcttttaacaaagatttgctgacctgttgggatcccgaagagaacaagatggctccctgcgaattcggggttctgaattctctcgcgaacgtccttagccagcatctgaaccagaaggacaccttgatgcagaggctgcgcaacggtttgcaaaattgtgccacgcacactcagcctttctgggggagtctgactaatcgcacaagaccaccatccgtccaggtcgcaaagaccaccccctttaataccagggagccggtgatgctcgcatgttacgtctggggattttatcctgcatag

SEQ ID NO: 124987 - DNA, 528 bp, Artificial Sequence
  derived and/or modified sequence
atgggccacgagcaaaaccaaggcgcagctttgcttcagatgctcccactgttgtggctcctcccacacagctgggctgtgcccgaagaacaaagcatgatcactttcctgcctttgctgctcgggttatctctgggctgcacgggcgcagggggttttgtggcccacgtggaatccacctgcctgctggatgacgcaggaactcccaaggactttacctactgtatctccttcaataaggacttgctgacctgttgggatcctgaagagaataaaatggctccctgcgaatttggggtgctaaatagcctggcaaatgtactgagccaacacctgaatcagaaagatactctaatgcagcgcctcaggaatgggcttcagaattgcgctactcatacccaacctttctgggggtctcttacaaataggacaaggccgccaagcgtgcaggttgccaaaaccacaccatttaacaccagagagcccgtaatgttggcctgctacgtgtgggggttctaccccgcttag

SEQ ID NO: 124988 - DNA, 792 bp, Artificial Sequence
  derived and/or modified sequence
atgatcacctttcttccactgctgctggggctaagcctcggctgcacaggtgccggtggattcgtggcccatgtggaatccacctgcctgcttgacgatgctggaacccctaaggattttacctactgcatctcttttaataaagatctgctgacttgctgggatcctgaagagaataagatggccccatgtgaattcggcgtgttgaacagcctagccaacgttctgagccagcatcttaaccagaaagatacgcttatgcaacgtctccgcaatggtctccagaactgtgctactcatacccaaccattctggggaagcctgacgaacagaaccaggccaccttctgtccaggtagcaaagaccacacctttcaatacgagggaacccgttatgctggcctgttatgtgtggggattttatccggcagaagtcaccattacctggcgcaaaaatggcaagttggttatgcctcattcctctgcccacaagaccgcccagcccaacggcgattggacctatcaaacgttatcccatctcgcacttactccttcctatggagatacttatacttgtgtggtggaacacaccggcgctccagagccgatcctgagagattggactcctggactcagtcccatgcaaacactgaaggtgtcggtgagcgccgtgaccttaggactaggtctgattatcttttccctgggcgttatctcctggcggagagccggacactcgtcttatactccgctgcctggtagtaactactctgagggatggcacatctcctag

SEQ ID NO: 124989 - DNA, 426 bp, Artificial Sequence
  derived and/or modified sequence
tgaacccgccctccctccgtccaggtggcaaagactaccccctttaacacaagagagcccgttatgctggcttgttacgtgtggggtttttaccctgccgaagtcacgatcacctggagaaaaaacggaaaactagttatgcctcacagtagcgctcacaagacggctcagccgaatggggactggacctatcaaacattgtctcatctagccctgacaccctcttatggagatacctacacatgtgtggtggaacatatcggagcacccgaaccgatcctccgggactggacaccagggctatctccaatgcaaaccctgaaagtgtccgtgtcagccgttaccctgggccttggtcttatcattttctctctgggggttatcagctggcggagagccggacattcccggtggcatattagttag

SEQ ID NO: 124990 - DNA, 774 bp, Artificial Sequence
  derived and/or modified sequence
atgatcacatttcttcccctactgttggggctgtccttaggttgtacaggagctggcggatttgttgctcacgtcgagagcacctgcctgctggacgatgccggaacccctaaagactttacatactgtatctcattcaataaggacctgctcacttgttgggatcccgaagaaaacaagatggccccatgcgagtttggcgtgttaaatagcttggctaatgtgctgtctcagcacctgaaccagaaggacacactgatgcagcggctccgcaacggccttcagaactgcgccacccacacacagccattttggggcagcttaactaaccggactagacctccttctgtgcaagtcgccaaaacaaccccattcaacacccgggaaccggttatgctggcatgctatgtgtggggcttttaccccgcagaagtgacaatcacatggcggaaaaatggaaagttagtgatgccgcactcaagtgctcacaagaccgctcagcccaatggggattggacgtatcagacgctctctcatctggcactgactccttcatatggagatacatacacgtgcgtggtagagcacatcggggctccagagcccattttgagagattggacacctggactcagtcctatgcagaccctgaaggtctctgtatctgccgtcacactcggcttgggtctgattatctttagcttaggtgttatctcatggcgcagggccggtcacagttccgacctcattatcagcctgctgtttatcctgtag

SEQ ID NO: 124991 - DNA, 774 bp, Artificial Sequence
  derived and/or modified sequence
atgataactttcctccctttgctgctgggtctgagcttggggtgtactggagcaggcggtttcgtggcccatgttgagagcacctgtcttctggacgatgccggtacgcctaaagacttcacttattgcatatctttcaataaagatttgctgacctgctgggaccctgaggaaaataaaatggcaccatgcgaatttggagtactgaacagcctggctaacgtgttaagtcagcacctgaaccagaaggacacccttatgcagagattaaggaatggcctacagaactgtgctactcatactcaacccttttggggaagtctcaccaaccggacaaggcccccatccgtgcaggtagccaagaccaccccttttaatactagggaacctgtgatgctcgcttgctatgtgtggggattttatcccgcagaagtgactataacttggcgaaagaacgggaagctcgtgatgccccactctagtgcacataagactgcacagccaaacggcgactggacatatcaaactttgtcgcatctggccctcacaccttcctacggcgacacctatacttgcgtggttgaacatactggagcccctgagcctatcctcagagattggacgccaggcctctctcctatgcagacgctgaaggtgagtgtttccgctgtgactctgggtttgggcctcattatcttctcgttgggcgtcatctcctggcgaagagccggtcactcctctgacctgatcatcagtcttctttttatcctgtag

SEQ ID NO: 124992 - DNA, 651 bp, Artificial Sequence
  derived and/or modified sequence
atgatcacctttttgccgctgctgctaggacttagtctgggatgcacaggcgctggcggatttgtggcacatgtcgaaagcacatgtctgctggacgacgctggcacccctaaagactttacctactgtatcagcttcaacaaggacctcttgacttgttgggacccagaggaaaacaaaatggcaccatgcgagttcggcgtactgaatagtctagccaatgtgctcagccagcatctgaaccagaaagataccctcatgcagcgtctgagaaacggactccaaaactgcgctacacacacgcaacctttctggggtagtctcacgaacagaacgaggccccctagcgtgcaagttgccaaaacgactccatttaatacccgagaaccggtaatgcttgcttgctacgtttgggggttttatccagctgaagtcaccattacctggaggaagaacgggaagctcgtgatgccccacagcagcgcccataagaccgcccagccaaatggcgactggacataccagaccctttctcacctggcgttgacaccatcttacggagatacgtacacgtgtgtggtagagcacatcggcgctccagagccaattctgcgagattggtccaagtgcatggctgatgggtggaactag

SEQ ID NO: 124993 - DNA, 171 bp, Artificial Sequence
  derived and/or modified sequence
atgccccactcatcagcccacaaaaccgcacaaccaaacggggattggacttaccagaccctctctcacctggcactgacaccttcgtatggggacacctatacgtgtgtggtggaacatattggagcacctgagcctatccttcgtgactggcgctggcacattagttag

SEQ ID NO: 124994 - DNA, 171 bp, Artificial Sequence
  derived and/or modified sequence
atgcctcacagtagcgcccataaaacggcccagcctaacggtgactggacataccagactctatcccaccttgctctgacccctagttatggggatacctatacctgtgtagtggaacacattggggcacccgagcctatactcagggattggcgatggcacatctcgtag

SEQ ID NO: 124995 - DNA, 651 bp, Artificial Sequence
  derived and/or modified sequence
atgattacattcttgcctctgctcctcggcctgagtcttggatgcacgggcgctgggggattcgtagcgcatgtggagtcaacctgtctgctggatgacgccggaaccccaaaggattttacctattgcattagcttcaataaagacctccttacttgctgggacccagaggaaaataagatggcgccatgcgagttcggggttcttaacagtctcgccaatgtgctctcacagcatctcaaccagaaggacactcttatgcagaggcttagaaacggcctacagaactgcgccacgcatacgcagcccttttggggctctctgactaacaggacaagacccccatccgttcaggtggcgaagaccaccccctttaatacaagagaacccgtcatgcttgcgtgctatgtgtggggtttctaccccgcagaggtaaccatcacatggaggaagaacggtaagctggtgatgccgcatagttcagcacataaaactgctcagcctaatggggattggacgtaccagaccctgtctcatttggccttaaccccaagttacggcgacacatacacctgcgtagtcgagcacacaggggctcccgaacctattctgcgcgactggtccaaatgcatggctgacggctggaactag

SEQ ID NO: 124996 - DNA, 207 bp, Artificial Sequence
  derived and/or modified sequence
atgccacactcttccgctcataagaccgcccagcctaacggcgattggacataccagaccctgagtcatctcgcccttacgcctagttacggcgacacatatacatgcgtggtggaacacatcggagccccagaacctatcctgcgggactggagttatacccctcttcctggatcaaattatagcgagggatggcatatctcatag

SEQ ID NO: 124997 - DNA, 171 bp, Artificial Sequence
  derived and/or modified sequence
atgccacacagtagcgcccacaagacggcacagcccaatggtgactggacttaccagactttgtctcaccttgctctgacccccagctatggtgacacctatacatgtgtcgtggaacatatcggcgctcctgagccaatccttcgagactggagatggcacatctcttag

SEQ ID NO: 124998 - DNA, 288 bp, Artificial Sequence
  derived and/or modified sequence
atgccccactcctccgcacacaaaacagcacagcccaatggggattggacttatcagactctgtctcacctggccctgacccccagttacggagatacatacacctgtgttgtggagcatattggggctcccgagccaattctgagagactggactccgggtctcagtccaatgcagaccctcaaagtgagcgtctctgcagtcacgttgggcctcgggttgatcatattttcgttgggtgtgatctcgtggcgcagggccggtcactctcggtggcacataagctag

SEQ ID NO: 124999 - DNA, 207 bp, Artificial Sequence
  derived and/or modified sequence
atgccacacagctctgcacacaaaaccgcccagccgaatggtgactggacttatcagacactgagccacctggcacttacaccttcatatggtgatacatatacgtgtgttgtggaacacattggagcaccagaacctatcctcagagattggagctacacgcccttacctggtagcaattactctgaaggttggcatataagctag

SEQ ID NO: 125000 - DNA, 207 bp, Artificial Sequence
  derived and/or modified sequence
atgccacatagttcagcccataagacagcacagcccaacggcgattggacctaccagacactgtcccatctcgccctcaccccgagttatggcgacacctatacgtgcgttgtggaacacattggggcacccgagcccatcctgagggattggtcatacacacctttaccaggctccaactactcggaaggatggcatatctcctag

SEQ ID NO: 125001 - DNA, 288 bp, Artificial Sequence
  derived and/or modified sequence
atgccgcactccagtgcccacaagacagctcagcccaacggtgattggacctaccaaacactctctcaccttgcacttacaccttcttacggtgatacctatacctgcgtggtggaacacatcggcgctcctgaaccaatattaagggattggacacctggactgagtccaatgcagactctgaaagtatccgtcagtgccgttaccttgggactggggctgattatattttccctcggggtgatctcctggagaagagccggacactcacgatggcatatctcctag

SEQ ID NO: 125002 - DNA, 651 bp, Artificial Sequence
  derived and/or modified sequence
atgattacttttctccccctattactcggactatcacttggatgcacgggcgcaggcggtttcgttgctcacgtggagtctacatgtttgctagacgatgccggaaccccaaaggacttcacttactgcatctcctttaacaaagatctccttacatgctgggaccctgaagagaataagatggctccctgtgagtttggggtgttaaactcccttgcaaacgttctctcccagcacctcaaccagaaagacacactgatgcagagattacggaatggactccagaattgtgcaactcatacccaaccattttggggatccctaacaaatagaaccagacctccttcagtgcaggtagccaagactacccccttcaatactcgggagcccgtgatgttggcctgctatgtgtggggattttatcccgctgaggtaaccatcacctggcgaaagaatggaaaattagtgatgccccattcctctgcccataaaacagcccaaccgaacggggactggacctatcagacgctgtcccatttagcactgacacccagttacggggacacttacacttgcgtggtggagcacattggggctcccgagcccatccttagggattggagtaaatgcatggccgatggttggaactag

SEQ ID NO: 125003 - DNA, 207 bp, Artificial Sequence
  derived and/or modified sequence
atgcctcattcttcagctcacaagacagcgcagcccaatggcgactggacctatcagaccctgtctcacttagcgctgaccccatcatacggcgacacatatacttgcgtggtagaacatatcggcgctccagagccaatcctcagagactggtcgtacacacccttgcccggaagtaattattccgagggttggcacataagttag

SEQ ID NO: 125004 - DNA, 651 bp, Artificial Sequence
  derived and/or modified sequence
atgatcacctttctgcccctgttgctgggcttgtcattaggatgcaccggtgccggaggttttgttgcccacgtggagtccacttgtctgttggatgacgctggtacaccaaaggattttacgtattgcattagctttaataaggatctgctgacatgttgggatccggaggagaacaaaatggccccttgcgaatttggggttttgaactcacttgcgaatgtgctgtcgcaacacctgaaccagaaagatactttgatgcaacgcctgcgtaacggtctgcagaactgtgctacacacacacagccgttctggggctctttgacaaataggacacgccctccctctgtacaggtagccaagaccacaccgttcaacacacgggagcctgtaatgctggcctgctacgtgtggggcttctatcctgccgaagtgactattacatggagaaaaaacggtaagctcgtgatgcctcacagctctgcccacaagacggcccagcccaatggtgattggacctaccagactctgagccacttagcacttaccccaagctacggggatacatacacttgcgtggttgaacataccggcgcaccagaaccaatccttagagattggtccaaatgtatggccgatggatggaattag

SEQ ID NO: 125005 - DNA, 651 bp, Artificial Sequence
  derived and/or modified sequence
atgatcaccttcctccctctgctgctaggcctatcactgggctgcaccggcgcaggcggatttgttgcacatgtggagtcgacttgcctgcttgatgacgccggtaccccgaaggatttcacttactgtatcagtttcaataaggatctgctcacttgttgggacccagaggagaacaagatggctccttgcgaattcggagttctaaatagcttggccaacgtgctctcacagcaccttaatcagaaggatacattgatgcagcggcttaggaacggactgcagaactgcgccactcatacccagcccttttggggctccctgacgaaccgaactcgcccaccgtctgtgcaggtggcgaagaccactccattcaacacaagggagccggtaatgctggcctgttacgtctggggcttctatcccgcagaggtgaccatcacctggagaaagaatggaaaactggtcatgcctcactcatcagcacacaaaacggcccagccaaatggcgactggacctaccaaactttatcgcatctggcactcactccgagttacggagatacttatacttgtgttgtcgagcatacaggcgcacctgagccaatcctccgagattggtctaagtgcatggcagacggatggaactag

SEQ ID NO: 125006 - DNA, 171 bp, Artificial Sequence
  derived and/or modified sequence
atgccccattcttccgcacataagactgcgcagccgaacggtgactggacataccaaactctttctcacttggccctaacccccagttatggagacacatatacctgcgtggtggaacatattggcgctcctgagccaatacttcgggattggcggtggcacataagctag

SEQ ID NO: 125007 - DNA, 651 bp, Artificial Sequence
  derived and/or modified sequence
atgattacattcctacctctcttactgggtctgagtcttggatgtacaggcgctggcggttttgtagctcatgtggagtccacctgcttgctcgatgacgccggtacccccaaagattttacctattgtatatcgttcaataaggatctcctcacatgctgggatccagaggaaaacaagatggcgccttgcgagtttggggtgcttaatagcctggccaatgtgctgagccagcatctgaatcaaaaggacactctgatgcagcgtcttcggaacgggctccagaactgtgcgactcacactcagcccttctgggggtcattaaccaacagaactcggcctcctagcgtgcaggtggccaaaactacaccatttaatactagggagccggtaatgctggcttgctatgtctgggggttctacccagcagaagtgacaatcacttggcgcaagaatggcaagctggttatgccgcatagctccgcccataaaaccgctcagcctaatggagactggacttaccagactctgtcccacttggctttgacacccagctacggtgatacatatacctgcgttgtcgagcacattggggcaccggagcccatcttgcgagattggagtaagtgcatggccgatgggtggaactag

SEQ ID NO: 125008 - DNA, 288 bp, Artificial Sequence
  derived and/or modified sequence
atgccccacagtagcgctcacaaaacagcacagcccaacggggattggacataccagactctgtcccatttggcattgacgccttcatacggagacacgtacacttgcgttgtggaacatatcggtgctccagagccaattctgcgggattggacacctgggttgagtcccatgcagactcttaaagtgtcagtatctgccgtgacgctcggactgggtctgatcattttcagtctgggcgtgatttcatggagacgcgcaggccattccagatggcacatttcctag

SEQ ID NO: 125009 - DNA, 288 bp, Artificial Sequence
  derived and/or modified sequence
atgccccatagttctgcccacaaaaccgcccagcctaacggcgactggacctatcaaacattgtctcacctggccctcactccctcttacggggacacttacacatgtgtagtcgagcatattggggcacctgaacccattcttagggactggacccccggtctatctccaatgcagactctcaaagtgtccgtaagtgccgtaacactcggtctgggcctcattattttctctttgggtgtaatttcatggcggagagccggtcattcccgctggcatatcagctag

SEQ ID NO: 125010 - DNA, 651 bp, Artificial Sequence
  derived and/or modified sequence
atgatcacgttcttaccactgctcttagggctatcgttgggctgtaccggggcaggcggattcgtagcccatgtggaaagcacctgcctactggacgatgctggaacgccaaaggattttacatattgcatttccttcaataaggatttattgacttgctgggacccagaagagaataaaatggctccctgtgagttcggagtgctaaattcactggcaaatgtgctgtcccagcacttgaatcaaaaggatacactcatgcagcgcctcagaaacggcctgcagaactgtgccactcatactcagccgttttggggatccttgaccaataggacccgccctccctcagttcaggttgccaaaaccactcctttcaatactagggaacctgtgatgctggcatgttacgtttggggattttaccctgccgaggtgacaattacttggcggaaaaatggcaagctagtgatgcctcactctagcgcacataagacggctcagccgaatggcgactggacctaccagactctgagccaccttgcgctcacaccatcctatggagacacatatacatgcgttgtagagcacataggggctcccgaacccatcctaagggactggagcaagtgcatggcagatggatggaactag

SEQ ID NO: 125011 - DNA, 1412 bp, Artificial Sequence
  derived and/or modified sequence
atttgtccctgcctacctagccaatctgtccctgtttgggacactggactcccgtgagctggaaggaacagatttaatatctaggggctgggtatccccacatcactcatttggggggtcaagggacccgggcaatatagtattctgctcagtgtctggagatcatctacccaggctggggcttctgggacaggcgaggacccacggaccctggaagagctggtccaggggactgaactcccggcatctttacagagcagagcatgatcacattcctgccgctgctgctggggctcagcctgggctgcacaggagcaggtggcttcgtggcccatgtggaaagcacctgtctgttggatgatgctgggactccaaaggatttcacatactgcatctccttcaacaaggatctgctgacctgctgggatccagaggagaataagatggccccttgcgaatttggggtgctgaatagcttggcgaatgtcctctcacagcacctcaaccaaaaagacaccctgatgcagcgcttgcgcaatgggcttcagaattgtgccacacacacccagcccttctggggatcactgaccaacaggacacggccaccatctgtgcaagtagccaaaaccactccttttaacacgagggagcctgtgatgctggcctgctatgtgtggggcttctatccagcagaagtgactatcacgtggaggaagaacgggaagcttgtcatgcctcacagcagtgcgcacaagactgcccagcccaatggagactggacataccagaccctctcccatttagccttaaccccctcttacggggacacttacacctgtgtggtagagcacactggggctcctgagcccatccttcgggactggacacctgggctgtcccccatgcagaccctgaaggtttctgtgtctgcagtgactctgggcctgggcctcatcatcttctctcttggtgtgatcagctggcggagagctggccactctagttacactcctcttcctgggtccaattattcagaaggatggcacatttcctagaggcagaatcctacaacttccactccaagtgagaaggagattcaaactcaatgatgctaccatgcctctccaacatcttcaaccccctgacattatcttggatcctatggtttctccatccaattctttgaatttcccagtctcccctatgtaaaacttagcaacttgggggacctcattcctgggactatgctgtaaccaaattattgtccaaggctatatttctgggatgaatataatctgaggaagggagttaaagaccctcctggggctctcagtgtgccatagaggacagcaactggtgattgtttcagagaaataaactttggtggaaatattgttaaaaaaaaaaaaaaa

SEQ ID NO: 125012 - protein, 250 aa, Artificial Sequence
  derived and/or modified sequence
MALRAGLVLGFHTLMTLLSPQEAGATKADHMGSYGPAFYQSYGASGQFTHEFDEEQLFSVDLKKSEAVWRLPEFGDFARFDPQGGLAGIAAIKAHLDILVERSNRSRAINVPPRVTVLPKSRVELGQPNILICIVDNIFPPVINITWLRNGQTVTEGVAQTSFYSQPDHLFRKFHYLPFVPSAEDVYDCQVEHWGLDAPLLRHWELQVPIPPPDAMETLVCALGLAIGLVGFLVGTVLIIMGTYVSSVPR

SEQ ID NO: 125013 - DNA, 753 bp, Artificial Sequence
  derived and/or modified sequence
atggccctgagagccggcctggtgctgggcttccacaccctgatgaccctgctgagcccccaggaggccggcgccaccaaggccgaccacatgggcagctacggccccgccttctaccagagctacggcgccagcggccagttcacccacgagttcgacgaggagcagctgttcagcgtggacctgaagaagagcgaggccgtgtggagactgcccgagttcggcgacttcgccagattcgacccccagggcggcctggccggcatcgccgccatcaaggcccacctggacatcctggtggagagaagcaacagaagcagagccatcaacgtgccccccagagtgaccgtgctgcccaagagcagagtggagctgggccagcccaacatcctgatctgcatcgtggacaacatcttcccccccgtgatcaacatcacctggctgagaaacggccagaccgtgaccgagggcgtggcccagaccagcttctacagccagcccgaccacctgttcagaaagttccactacctgcccttcgtgcccagcgccgaggacgtgtacgactgccaggtggagcactggggcctggacgcccccctgctgagacactgggagctgcaggtgcccatccccccccccgacgccatggagaccctggtgtgcgccctgggcctggccatcggcctggtgggcttcctggtgggcaccgtgctgatcatcatgggcacctacgtgagcagcgtgcccagatag

SEQ ID NO: 125014 - DNA, 753 bp, Artificial Sequence
  derived and/or modified sequence
atggcactccgagctggtctggtcctggggttccacaccctcatgacattattgtcaccgcaggaggcaggcgccaccaaagctgatcacatgggctcttatggtccagcattctaccagagttacggggcctcaggtcagtttacacacgagttcgacgaggagcagctttttagtgttgacctcaagaagagcgaggcagtctggaggctcccagagttcggggattttgcccgctttgacccacagggcgggttggccggaatagctgcaattaaagcccatctggatatcctcgtggagcgctcaaatcgctcgcgcgcgattaacgtgccgccgcgagtaacagtgctgccaaagagcagagtggagctgggacagcccaacattctgatctgcatcgtcgataacatattcccccctgttatcaacattacttggcttcgaaacggacagaccgttaccgagggagttgcccagacctctttttactctcagccagatcacctgttcaggaaattccactacctaccattcgtgccctccgccgaggacgtgtacgactgtcaggtggagcactggggactggatgcaccactgctgaggcattgggagctacaggtgccaatcccacctcccgacgctatggagactcttgtgtgcgccctcggcttggcaatcggtctcgtcgggtttctagtgggaacagtgctgatcatcatgggcacatacgtgtcctcggtcccaaggtag

SEQ ID NO: 125015 - DNA, 753 bp, Artificial Sequence
  derived and/or modified sequence
atggcattaagggcaggtctggtcttgggatttcatactctgatgaccctgttgagcccccaggaagccggtgctacgaaggccgatcacatgggcagctacggtcccgctttttatcagtcctatggcgcaagtggacagtttacccacgagttcgacgaagagcaattattctcagtcgacttaaagaagtctgaagctgtgtggaggttgcctgagtttggcgacttcgcccggtttgatccccagggcggcctggccgggattgcagcaatcaaggcacacttggacatattagttgagagaagcaaccgcagcagggcaatcaacgtgccgcctagggtcactgtgcttccgaagtctcgtgtggagttaggccaaccaaatattctgatatgcattgtcgacaatattttcccacctgtcattaatattacatggctgcgcaacggtcagacagtgaccgagggggtggctcagacctctttttattcacagccggaccacctgttccgtaaattccattacctcccattcgtgccaagcgctgaggacgtctatgactgtcaggtggagcattggggccttgatgcaccgctcttgcgccattgggaactgcaggttcccatcccaccccctgatgccatggagacgctggtgtgtgccctgggtctcgccatcggtcttgttggcttcctggttgggaccgtcctcatcattatgggaacatatgtgtcgtctgtcccccgctag

SEQ ID NO: 125016 - DNA, 753 bp, Artificial Sequence
  derived and/or modified sequence
atggcactccgggccggacttgtgcttgggtttcacaccctgatgaccctgttgtccccacaggaggcaggagctaccaaggccgaccacatgggctcttatgggccagccttctatcagtcttatggcgcttccggccagtttacccacgaattcgatgaagagcagctgttctcagtggatcttaaaaagtccgaagcagtttggaggctcccagaattcggagatttcgcccggtttgacccccagggcggccttgccggaattgccgccatcaaagcacacctggacattttagtggaaaggagcaacaggagtagggcaattaatgttcctccaagggtgacagtcctgcctaagagccgggtggaattgggacagccgaacattctcatctgtatcgtggataatattttcccgccagtcattaatatcacatggctacgcaatggccaaacggtgacggagggtgtcgcgcagacttcgttctactcacaaccagaccatctatttcgaaaattccactatctacctttcgtgccctccgcagaggatgtttacgattgccaggtggaacattggggactggatgccccacttcttagacattgggaactgcaggtgcctatccctccacctgacgctatggagactctggtttgtgccttgggcctcgcaatcggactggtgggcttcctggtggggaccgttcttatcattatgggtacgtacgtcagtagcgttcccagatag

SEQ ID NO: 125017 - DNA, 753 bp, Artificial Sequence
  derived and/or modified sequence
atggccctgagagctggcctggtgcttggcttccacactctaatgacactgctgtctccccaggaagcaggtgccaccaaggccgatcacatgggcagttacggtccagcattttatcagtcatatggagctagtggccagtttacgcacgagtttgatgaggagcagcttttcagtgtggatctgaaaaaatccgaagccgtgtggaggctgccagagtttggtgatttcgccagatttgatccacagggggggcttgccggtatagcagccatcaaggcacacttggacattctggtggaacgttctaaccgcagtcgggctatcaacgtccctccgcgcgtgactgtcctgcctaaatctagagtggaactgggacaacccaacatacttatctgcattgttgacaacattttccccccagtgattaacattacttggctccggaatggacaaaccgtcaccgaaggagtggctcagacctcattttacagtcagcccgaccacctgtttaggaagtttcactacctccccttcgtcccgtccgctgaggacgtttacgattgtcaggtcgagcactggggcctcgacgcccctctgctgagacattgggagctgcaggtgccaattccaccgcccgacgcgatggagacgctggtctgtgctctgggcctggccattgggttggtgggcttcctggttggcaccgttttaattattatggggacatacgtgtcatcagtgccccggtag

SEQ ID NO: 125018 - DNA, 753 bp, Artificial Sequence
  derived and/or modified sequence
atggccttgagagccggcctagtccttggatttcacacactgatgactctgctttcaccacaagaggctggggccacgaaggccgaccacatggggagttacggacccgccttctatcagtcatatggggcaagtggccagttcactcacgagtttgatgaagaacagctctttagcgtcgatctcaaaaaaagcgaagccgtctggcgcctgccggagttcggagattttgccaggttcgacccccagggcggactcgcagggattgctgccatcaaagcccacttagatatcctggtggaacgtagcaaccggtcccgtgccattaatgtgcccccgagggttacagtcctcccaaagagtcgcgtggaactggggcagccaaacattctgatttgcattgtggacaacatctttccacctgtgattaatatcacatggctgcgaaacggacagactgtgactgaaggggtcgctcagacatcgttctactctcaacctgaccacctgtttcgtaaatttcactatttacctttcgttccttcagcagaggatgtgtacgactgccaggtcgagcactggggactggacgcacctctcctgcgccactgggagctccaggtgcctatcccccccccagacgccatggagacactagtttgcgcgttgggccttgcgataggcctggtggggtttcttgtcggaaccgtgctcataatcatgggtacttacgtgtcatcagtgccgagatag

SEQ ID NO: 125019 - DNA, 753 bp, Artificial Sequence
  derived and/or modified sequence
atggcccttagggccggccttgttctcggcttccacaccctgatgacgctcctcagtccacaggaagccggagctacaaaagcagaccacatgggctcttatggacccgccttctaccaatcatacggagcatccggccagtttactcacgaattcgacgaggaacagctgttcagtgtggacctgaagaaatcagaggctgtatggaggttaccagaatttggcgacttcgcccggttcgacccacagggggggctggctggtatcgctgctataaaggcccacctggatatcttagtggaacggtccaacaggtcaagggcaatcaatgtacccccacgagtaacagtcctgcccaaaagtagggtcgagttgggacagcccaatatcctcatctgcatcgtggataacatatttcctccggtcattaacatcacctggttacgcaatgggcaaaccgttactgagggagtggctcagacgagtttctattcccagcccgatcacttgttccgcaagttccattacctgccgtttgtaccatcggcggaggatgtatacgattgtcaggtggaacactggggcctggacgcaccgttgctacgacactgggagctgcaagtacccatccctccccccgatgccatggagaccctcgtgtgcgcgctggggcttgcaataggcctagtcgggtttttggtgggtaccgtactgataattatgggcacctatgtaagctccgttccacggtag

SEQ ID NO: 125020 - DNA, 753 bp, Artificial Sequence
  derived and/or modified sequence
atggccctgcgggccggcctggtgctgggcttccacaccctgatgaccctgctgagcccccaggaggccggggccaccaaggctgaccacatgggcagctatggccctgccttctaccagagctatggagccagcggccagttcacccatgaatttgatgaggagcagctgttctctgtggacctgaagaagtctgaggccgtgtggaggctgcctgagtttggagactttgccaggtttgacccccagggcggcctggccggcattgctgccatcaaggcccacctggacatcctggtggagaggagcaacagaagccgggccatcaacgtgcccccccgggtgacagtgctgcccaagagccgggtggagctgggccagcccaacatcctgatctgcatcgtggacaacatcttcccccctgtgatcaacatcacctggctgagaaatggccagacagtgacagaaggagtggcccagaccagcttctacagccagcctgaccacctgttcaggaagttccactacctgccctttgtgcccagcgcagaagatgtgtatgactgccaggtggagcactggggcctggatgcccccctgctgcggcactgggagctgcaggtgcccatccccccaccagatgccatggagaccctggtgtgtgccctgggcctggccatcggcctggtgggcttcctggtgggcaccgtgctgatcatcatgggcacctacgtgtcctctgtgcccaggtag

SEQ ID NO: 125021 - DNA, 3489 bp, Artificial Sequence
  derived and/or modified sequence
cttcttctttacctccgccttgttcctgtcctcaccacacggactgagactgatttgattaaagcaccagagtgtaatggccctcagagcagggctggtcctggggttccacaccctgatgaccctcctgagcccgcaggaggcaggggccaccaaggctgaccacatgggctcctacggacccgccttctaccagtcttacggcgcctcgggccagttcacccatgaatttgatgaggaacagctgttctctgtggacctgaagaaaagcgaggccgtgtggcgtctgcctgagtttggtgactttgcccgctttgacccgcagggcgggctggccggcatcgccgcaatcaaagcccatctggacatcctggtggagcgctccaaccgcagcagagccatcaacgtgcctccacgggtgaccgtgctccccaagtctcgggtggagctgggccagcccaacatcctcatctgcatcgtggacaacatcttcccccctgtgatcaatatcacctggctgcgcaacggccaaactgtcactgagggagtggcccagaccagcttctattcccagcctgaccatttgttccgcaagttccactacctgcccttcgtgccctcagccgaggacgtctatgactgccaggtggagcactggggcctggatgcgccactcctcaggcattgggagctccaggtgcctattccaccaccagatgccatggagaccctggtctgtgccctgggcctggccatcggcctggtgggcttcctcgtgggcaccgtcctcatcatcatgggcacatatgtgtccagtgtccccaggtaatgatccttctgagagaaatgacttgtgggagacaccctgcagatcctcatgggtttgtgacagcccctgcgtgctcagtgccctttaagtgcatcccgctgtgctgactttgagtgggatcaacatctgtcctacgggtcccctcttttttggccccagtattcatggcagggtttgttggacacctactagcttcccttcccattcaacacacacacacattcttgctctacccaaagctctggctggcagcactaaatgctttggtggtgtttgcactgtgtcctttccaggccttggccagttcttccaggggtgaggcatgtggtgctggggattggcagccatcctggggcccacacaggtgtgtcttgctccatttggcccattgtgtgttactttgtgaatgagccatttcacatggacttcatgaaatttgcctcctgagttcaggtttaccctgaaagggatgcagattatcctgttcctcacgaccccctcagctaacaacagttctgaagggtgctgggacaggacaggctcatggggactccactcctgcctgggtttactctgtatgaagaggccactggtatcctgccatgatgttatctcctttttctacttttccctagagtcccatgcatgataaagagaggcccaaggcttggataaggtggccacttccctcagtggagtcagtcatgttaggtaggaggtggtagagtcggtctgcgaggtatctcgtaagaggggaggtccacctagacacactctaaatatgtggcctagaagattttggtctacttttctgtgaacagaatttaaaacatacaaagagataaatcaccataccacatagtttatgtcaggaccaaaatgagcaatacagattacggttttcaaaccagaatgcacataagaactgcttgggatccttttaaaagtacaggcattggcctggtgcagtggctcattcctgtaatcccagcactttgggaggccaaggggacaggactgcttgaggccaagaggtggaaaccatcttgggctacatagagagaccccatctctacaaagaaagatttaaaaattaaccaggcatggtggctcgcacctgtattcccagccactggggaggctgaggccggaggagtgcttgagcccaggagttcaaggctgcagtgagccaagattgcgccactgcactccagcctaggtgacagagtgagaccctgtctctaaataaataaataaataaaatataaaaataacagtcatcacccagacctactgaattagaatctcgggagtgcagggggcagcaacagggaggctgtcttttctgagatggggtctcactctgtcaccaggctggagtgccatggcatgatctcagctcactgcaacctccacctcctgagttcaagccattctcctgcctcagcctcctgagtagctgggactacaggtgtgcgccactacactcagctaatttttgtattttaagtagagacggggtttcatcatgttggccaggatggcctccatctcttgacctcgtgatccacccaccttccctcccaaagtactggaattacaggcattagccactgtgcccagccgaggctgtcatttttaaccggctctggatgactctgatgcagccatcctggaccttggctgtggtctggtaactggaacccagtgacgtaatcaggtgccatcgggggtcatgggaaagggggatccccaaggtctgaggtggactaggaaggctttctgaagaacctgggtctgttagggcatcagccaatcaaggtacaagtaaatagaggcaaaatgagggtttgaactgtgagcagttggtcctggaaaagaaagaaaccaagagattatggggactcaatgggcttcttaagagagaataagttgaaatcaatgaccagaagaccctgatggaagtggaggagaatcatctcaggcaaactttttgtgtgccagtaacagaaaccctctttgtgtgatcacatgcaaagtataggatatttgcaatatagccatggggaggagtgcagggcccaagggtagattttagccaggcctcccaggaacagaactcggatccgaaaagcccagagaagctagagctgcccctccaacactctcggatccacatggtctgtgttctctagacccccctgcatgttagcggtgttctctctctgtggactgactgtccttctcagtgaacatgtccacccgacagctcctgagtttatatcatctcaaccctcacaacccacagaggctgtgtctcctagtcacagctttaaattactggaaaaataaatgactggccaaacttggagcaggtgtccatcccagccctgtgtagttagagcaggaatcaagatctcaacacaaatgtggctgccaagcactcagccccggggcgaggggtcaagttcttctcagagaaagaggaataagttggttctcagaagacatcacaagatacgtgtgtacccaacaatctctgatctctgctgatcttttgcttagacgttaacttgatgcatcattggaaaggtgtttctctcatctctgtcctaaggcttgataaagtcattaaaattgtgttcttttgactaaagaaa

SEQ ID NO: 125022 - DNA, 3489 bp, Artificial Sequence
  derived and/or modified sequence
cttcttctttacctccgccttgttcctgtcctcaccacacggactgagactgatttgattaaagcaccagagtgtaatggccctcagagcagggctggtcctggggttccacaccctgatgaccctcctgagcccgcaggaggcaggggccaccaaggctgaccacatgggctcctacggacccgccttctaccagtcttacggcgcctcgggccagttcacccatgaatttgatgaggaacagctgttctctgtggacctgaagaaaagcgaggccgtgtggcgtctgcctgagtttggtgactttgcccgctttgacccgcagggcgggctggccggcatcgccgcaatcaaagcccatctggacatcctggtggagcgctccaaccgcagcagagccatcaacgtgcctccacgggtgaccgtgctccccaagtctcgggtggagctgggccagcccaacatcctcatctgcatcgtggacaacatcttcccccctgtgatcaatatcacctggctgcgcaacggccaaactgtcactgagggagtggcccagaccagcttctattcccagcctgaccatttgttccgcaagttccactacctgcccttcgtgccctcagccgaggacgtctatgactgccaggtggagcactggggcctggatgcgccactcctcaggcattgggagctccaggtgcctattccaccaccagatgccatggagaccctggtctgtgccctgggcctggccatcggcctggtgggcttcctcgtgggcaccgtcctcatcatcatgggcacatatgtgtccagtgtccccaggtaatgatccttctgagagaaatgacttgtgggagacaccctgcagatcctcatgggtttgtgacagcccctgcgtgctcagtgccctttaagtgcatcccgctgtgctgactttgagtgggatcaacatctgtcctacgggtcccctcttttttggccccagtattcatggcagggtttgttggacacctactagcttcccttcccattcaacacaaacacacattcttgctctacccaaagctctggctggcagcactaaatgctttggtggtgtttgcactgtgtcctttccaggccttggccagttcttccaggggtgaggcatgtggtgctggggattggcagccatcctggggcccacacaggtgtgtcttgctccatttggcccattgtgtgttactttgtgaatgagccatttcacatggacttcatgaaatttgcctcctgagttcaggtttaccctgaaagggatgcagattatcctgttcctcacgaccccctcagctaacaacagttctgaagggtgctgggacaggacaggctcatggggactccactcctgcctgggtttactctgtatgaagaggccactggtatcctgccatgatgttatctcctttttctacttttccctagagtcccatgcatgataaagagaggcccaaggcttggataaggtggccacttccctcagtggagtcagtcatgttaggtaggaggtggtagagtcggtctgcaaggtatctcgtaagaggggaggtccacctagacacactctaaatatgtggcctagaagattttggtctacttttctgtgaacagaatttaaaacatacaaagagataaatcaccataccacatagtttatgtcaagaccaaaatgagcaatacagattacggttttcaaaccagaatgcacataagaactgcttgggatccttttaaaagtacaggcattggcctggtgcagtggctcattcctgtaatcccagcactttgggaggccaaggggacaggactgcttgaggccaagaggtggaaaccatcttgggctacatagagagaccccatctctacaaagaaagatttaaaaattaaccagccatggtggctcgcacctgtattcccagccactggggaggctgaggccggaggagtgcttgagcccaggagttcaaggctgcagtgagccaagattgcgccactgcactccagcctaggtgacagagtgagaccctgtctctaaataaataaataaataaaatataaaaataacagtcatcacccagacctactgaattagaatctcgggagtgcagggggcagcaacagggaggctgtcttttctgagaaggggtctcactctgtcaccaggctggagtgccatggcatgatctcagctcactgcaacctccacctcctgagttcaagccattctcctgcctcagcctcctgagtagctgggactacaggtgtgcgccactacactcagctaatttttgtattttaagtagagacggggtttcatcatgttggccaggatggcctccatctcttgacctcgtgatccacccaccttccctcccaaagtactggaattacaggcattagccactgtgcccagccgaggctgtcatttttaaccggctctggatgactctgatgcagccatcctggaccttggctgtggtctggtaactggaacccagtgacgtaatcaggtgccattgggggtcatgggaaagggggatccccaaggtctgaggtggactaggaaggctttctgaagaacctgggtctgttagggcatcagccaatcaaggtacaagtaaatagaggcaaaatgagggtttgaactgtgagcagttggtcctggaaaagaaagaaaccaagagattatggggactcaatgggcttcttaagagagaataagttgaaatcaatgaccagaagaccctgatggaagtggaggagaatcatctcaggcaaactttttgtgtgccagtaacagaaaccctctttgtgtgatcacatgcaaagtataggatatttgcaatatagccatggggaggagtgcagggcccaagggtagattttagccaggcctcccaggaacagaactcggatccgaaaagcccagagaagctagagctgcccctccaacactctcggatccacatggtctgtgttctctagacccccctgcatgttggcggtgttctctctctgtggactgactgtccttctcagtgaacatgtccacccgacagctcctgagtttatatcatctcaaccctcacaacccacagaggctgtgtctcctagtcacagctttaaattactggaaaaataaatgactggccaaacttggagcaggtgtccatcccagccctgtgtagttagagcagaaatcaagatctcaacacaaatgtggctgccaagcactcagccctggggcgaggggtcaagttcttctcagagaaagaggaataagttggttctcagaagacatcacaagatacgtgtgtacccaacaatctctgatctctgctgatcttttgcttagacgttaacttgatgcatcattggaaaggtgtttctctcatctctgtcctaaggcttgataaagtcattaaaattgtgttcttttgactaaagaaa

SEQ ID NO: 125023 - DNA, 3488 bp, Artificial Sequence
  derived and/or modified sequence
cttcttctttacctccgccttgttcctgtcctcaccacacggactgagactgatttgattaaagcaccagagtgtaatggccctcagagcagggctggtcctggggttccacaccctgatgaccctcctgagcccgcaggaggcaggggccaccaaggctgaccacatgggctcctacggacccgccttctaccagtcttacggcgcctcgggccagttcacccatgaatttgatgaggaacagctgttctctgtggacctgaagaaaagcgaggccgtgtggcgtctgcctgagtttggtgactttgcccgctttgacccgcagggtgggctggccggcatcgccgcaatcaaagcccatctggacatcctggtggagcgctccaaccgcagcagagccatcaacgtgcctccacgggtgaccgtgctccccaagtctcgggtggagctgggccagcccaacatcctcatctgcatcgtggacaacatcttcccccctgtgatcaatatcacctggctacgcaacggccaaactgtcactgagggagtggcccagaccagcttctattcccagcctgaccatttgttccgcaagttccactacctgcccttcgtgccctcagccgaggacgtctatgactgccaggtggagcactggggcctggatgcgccactcctcaggcattgggagctccaggtgcctattccaccaccagatgccatggagaccctggtctgtgccctgggtctggccatcggcctggtgggcttcctcgtgggcaccgtcctcatcatcatgggcacatatgtgtccagtgtccccaggtaatgatccttctgagagaaatgacttgtgggagacaccctgcagatcctcatgggtttgtgacagcccctgcgtgctcagtgccctttaagtgcatcccgctgtgctgactttgagtgggatcaacatctgtcctacgggtcccctcttttttggccccagtattcatggcagggtttgttggacacctactagcttcccttcccattcaacacaaacacacattcttgctctacccaaagctctggctggcagcactaaatgctttggtggtgtttgcactgtgtcctttccaggccttggccagttcttccaggggtgaggcatgtggtgctggggattggcagccgtcctggggcccacacaggtgtgtcttgctccatttggcccattgtgtgttactttgtgaatgagccatttcacatggacttcatgaaatttgcctcctgagttcaggtttaccctgaaagggatgcagattatcctgttcctcacgaccccctcagctaacaacagttctgaagggtgctgggacaagacaggctcatggggactccactcctgcctgggtttactctgtatgaagaggccactggtatcctgccatgatgttatctcctttttctactttccctagagtcccatgcatgataaagagaggcccaaggcttggataaggtggccacttccctcagtggagtcagtcatgttaggtaggaggtggtagagtcggtctgcaaggtatctcgtaagaggggaggtccacctagacacactctaaatatgtggcctagaagattttggtctacttttctgtgaacagaatttaaaacatacaaagagataaatcaccataccacatagtttatgtcaagaccaaaatgagcaatacagattacggttttcaaaccagaatgcacataagaactgcttgggatccttttaaaagtacaggcattggcctggtgcagtggctcattcctgtaatcccagcactttgggaggccaaggggacaggactgcttgaggccaagaggtggaaaccatcttgggctacatagagagaccccatctctacaaagaaagatttaaaaattaaccaggcatggtggctcgcacctgtattcccagccactggggaggctgaggccggaggagtgcttgagcccaggagttcaaggctgcagtgagccaagattgcgccactgcactccagcctaggtgacagagtgagaccctgtctctaaataaataaataaataaaatataaaaataacagtcatcacccagacctactgaattagaatctcgggagtgcagggggcagcaacaggggggctgtcttttctgagaaggggtctcactctgtcaccaggctggagtgccatggcatgatctcagctcactgcaacctccacctcctgagttcaagccattctcctgcctcagcctcctgagtagctgggactacaggtgtgcgccactacactcagctaatttttgtattttaagtagagacggggtttcatcatgttggccaggatggcctccatctcttgacctcgtgatccacccaccttccctcccaaagtactggaattacaggcattagccactgtgcccagccgaggctgtcatttttaaccggctctggatgactctgatgcagccatcctggaccttggctgtggtctggtaactggaacccagtgacgtaatcaggtgccatcgggggtcatgggaaagggggatccccaaggtctgaggtggactaggaaggctttctgaagaacctgggtctgttagggcatcagccaatcaaggtacaagtaaatagaggcaaaatgagggtttgaactgtgagcagttggtcctggaaaagaaagaaaccaagagattatggggactcaatgggcttcttaagagagaataagttgaaatcaatgaccagaagaccctgatggaagtggaggagaatcatctcaggcaaactttttgtgtgccagtaacagaaaccctctttgtgtgatcacatgcaaagtataggatatttgcaatatagccatggggaggagtgcagggcccaagggtagattttagccaggcctcccaggaacagaactcggatccgaaaagcccagagaagctagagctgcccctccaacactctcggatccacatggtctgtgttctctagacccccctgcatgttagcggtgttctctctctgtggactgactgtccttctcagtgaacatgtccacccgacagctcctgagtttatatcatctcaaccctcacaacccacagaggctgtgtctcctagtcacagctttaaattactggaaaaataaatgactggccaaacttggagcaggtgtccatcccagccctgtgtagttagagcaggaatcaagatctcaacacaaatgtggctgccaagcactcagccccggggcgaggggtcaagttcttctcagagaaagaggaataagttggttctcagaagacatcacaagatacgtgtgtacccaacaatctctgatctctgctgatcttttgcttagacgttaacttgatgcatcattggaaaggtgtttctctcatctctgtcctaaggcttgataaagtcattaaaattgtgttcttttgactaaagaaa

SEQ ID NO: 125024 - DNA, 3488 bp, Artificial Sequence
  derived and/or modified sequence
cttcttctttacctccgccttgttcctgtcctcaccacacggactgagactgatttgattaaagcaccagagtgtaatggccctcagagcagggctggtcctggggttccacaccctgatgaccctcctgagcccgcaggaggcaggggccaccaaggctgaccacatgggctcctacggacccgccttctaccagtcttacggcgcctcgggccagttcacccatgaatttgatgaggaacagctgttctctgtggacctgaagaaaagcgaggccgtgtggcgtctgcctgagtttggtgactttgcccgctttgacccgcagggcgggctggccggcatcgccgcaatcaaagcccatctggacatcctggtggagcgctccaaccgcagcagagccatcaacgtgcctccacgggtgaccgtgctccccaagtctcgggtggagctgggccagcccaacatcctcatctgcatcgtggacaacatcttcccccctgtgatcaatatcacctggctacgcaacggccaaactgtcactgagggagtggcccagaccagcttctattcccagcctgaccatttgttccgcaagttccactacctgcccttcgtgccctcagccgaggacgtctatgactgccaggtggagcactggggcctggatgcgccactcctcaggcattgggagctccaggtgcctattccaccaccagatgccatggagaccctggtctgtgccctgggcctggccatcggcctggtgggcttcctcgtgggcaccgtcctcatcatcatgggcacatatgtgtccagtgtccccaggtaatgatccttctgagagaaatgacttgtgggagacaccctgcagatcctcatgggtttgtgacagcccctgcgtgctcagtgccctttaagtgcatcccgctgtgctgactttgagtgggatcaacatctgtcctacgggtcccctcttttttggccccagtattcatggcagggtttgttggacacctactagcttcccttcccattcaacacaaacacacattcttgctctacccaaagctctggctggcagcactaaatgctttggtggtgtttgcactgtgtcctttccaggccttggccagttcttccaggggtgaggcatgtggtgctggggattggcagccgtcctggggcccacacaggtgtgtcttgctccatttggcccattgtgtgttactttgtgaatgagccatttcacatggacttcatgaaatttgcctcctgagttcaggtttaccctgaaagggatgcagattatcctgttcctcacgaccccctcagctaacaacagttctgaagggtgctgggacaagacaggctcatggggactccactcctgcctgggtttactctgtatgaagaggccactggtatcctgccatgatgttatctcctttttctactttccctagagtcccatgcatgataaagagaggcccaaggcttggataaggtggccacttccctcagtggagtcagtcatgttaggtaggaggtggtagagtcggtctgcaaggtatctcgtaagaggggaggtccacctagacacattctaaatatgtggcctagaagattttggtctacttttctgtgaacaaaatttaaaacatacaaagagataaatcaccataccacatagtttatgtcaagaccaaaatgagcaatacagattacggttttcaaaccagaatgcacataagaactgcttgggatccttttaaaagtacaggcattggcctggtgcagtggctcattcctgtaatcccagcactttgggaggccaaggggacagaactgcttgaggccaagaggtggaaaccatcttgggctacatagagagaccccatctctacaaagaaagatttaaaaattaaccagccatggtggctcgcacctgtattcccagccactggggaggctgaggccggaggagtgcttgagcccaggagttcaaggctgcagtgagccaagattgcgccactgcactccagcctaggtgacagagtgagaccctgtctctaaataaataaataaataaaatataaaaataacagtcatcacccagacctactgaattagaatctcgggagtgcagggggcagcaacaggggggctgtcttttctgagaaggggtctcactctgtcaccaggctggagtgccatggcatgatctcagctcactgcaacctccacctcctgagttcaagccattctcctgcctcagcctcctgagtagctgggactacaggtgtgcgccactacactcagctaatttttgtattttaagtagagacggggtttcatcatgttggccaggatggcctccatctcttgacctcgtgatccacccaccttccctcccaaagtactggaattacaggcattagccactgtgcccagccgaggctgtcatttttaaccggctctggatgactctgatgcagccatcctggaccttggctgtggtctggtaactggaacccagtgacgtaatcaggtgccatcgggggtcatgggaaagggggatccccaaggtctgaggtggactaggaaggctttctgaagaacctgggtctgttagggcatcagccaatcaaggtacaagtaaatagaggcaaaatgagggtttgaactgtgagcagttggtcctggaaaagaaagaaaccaagagattatggggactcaatgggcttcttaagagggaataagttgaaatcaatgaccagaagaccctgatggaagtggaggaaaatcatctcaggcaaactttttgtgtgccagtaacagaaaccctctttgtgtgatcacatgcaaagtataggatatttgcaatatagccatggggaggagtgcagggcccaagggtagattttagccaggcctcccaggaacagaactcggatccgaaaagcccagagaagctagagctgcccctccaacactctcggatccacatggtctgtgttctctagacccccctgcatgttagcggtgttctctctctgtggactgactgtccttctcagtgaacatgtccacccgacagctcctgagtttatatcatctcaaccctcacaacccacagaggctgtgtctcctagtcacagctttaaattactggaaaaataaatgactggccaaacttggagcaggtgtccatcccagccctgtgtagttagagcaggaatcaagatctcaacacaaatgtggctgccaagcactcagccccggggcgaggggtcaagttcttctcagagaaagaggaataagttggttctcagaagacatcacaagatacgtgtgtacccaacaatctctgatctctgctgatcttttgcttagacgttaacttgatgcatcattggaaaggtgtttctctcatctctgtcctaaggcttgataaagtcattaaaattgtgttcttttgactaaagaaa

SEQ ID NO: 125025 - DNA, 3489 bp, Artificial Sequence
  derived and/or modified sequence
cttcttctttacctccgccttgttcctgtcctcaccacacggactgagactgatttgattaaagcaccagagtgcaatggccctcagagcagggctggtcctggggttccacaccctgatgaccctcctgagcccgcaggaggcaggggccaccaaggctgaccacatgggctcctacggacccgccttctaccagtcttacggcgcctcgggccagttcacccatgaatttgatgaggaacagctgttctctgtggacctgaagaaaagcgaggccgtgtggcgtctgcctgagtttggcgactttgcccgctttgacccgcagggcgggctggccggcatcgccgcaatcaaagcccatctggacatcctggtggagcgctccaaccgcagcagagccatcaacgtgcctccacgggtgaccgtgctccccaagtctcgggtggagctgggccagcccaacatcctcatctgcatcgtggacaacatcttcccccctgtgatcaatatcacctggctgcgcaacggccaaactgtcactgagggagtggcccagaccagcttctattcccagcctgaccatttgttccgcaagttccactacctgcccttcgtgccctcagccgaggacgtctatgactgccaggtggagcactggggcctggatgcgccactcctcaggcattgggagctccaggtgcctattccaccaccagatgccatggagaccctggtctgtgccctgggcctggccatcggcctggtgggcttcctcgtgggcaccgtcctcatcatcatgggcacatatgtgtccagtgtccccaggtaatgatccttctgagagaaatgacttgtgggagacaccctgcagatcctcatgggtttgtgacagcccctgcgtgctcagtgccctttaagtgcatcccgctgtgctgactttgagtgggatcaacatctgtcctacgggtcccctcttttttggccccagtattcatggcagggtttgttggacacctactagcttcccttcccattcaacacacacacacattcttgctctacccaaagctctggctggcagcactaaatgctttggtggtatttgcactgtgtcctttccaggccttggccagttcttccaggggtgaggcatgtggtgctggggattggcagccatcctggggcccacacaggtgtgtcttgctccatttggcccattgtgtgttactttgtgaatgagccatttcacatggacttcatgaaatttgcctcctgagttcaggtttaccctgaaagggatgcagattatcctgttcctcacgaccccctcagctaacaacagttctgaagggtgctgggacaggacaggctcatggggactccactcctgcctgggtttactctgtatgaagaggccactggtatcctgccatgatgttatctcctttttctacttttccctagagtcccatgcatgataaagagaggcccaaggcttggataaggtggccacttccctcagtggagtcagtcatgttaggtaggaggtggtagagtcggtctgcaaggtatctcgtaagaggggaggtccacctagacacactctaaatatgtggcctagaagattttggtctacttttctgtgaacagaatttaaaacatacaaagagataaatcaccataccacatagtttatgtcaagaccaaaatgagcaatacagattacggttttcaaaccagaatgcacataagaactgcttgggatccttttaaaagtacaggcattggcctggtgcagtggctcattcctgtaatcccagcactttgggaggccaaggggacaggactgcttgaggccaagaggtggaaaccatcttgggctacatagagagaccccatctctacaaagaaagatttaaaaattaaccagccatggtggctcgcacctgtattcccagccactggggaggctgaggccggaggagtgcttgagcccaggagttcaaggctgcagtgagccaagattgcgccactgcactccagcctaggtgacagagtgagaccctgtctctaaataaataaataaataaaatataaaaataacagtcatcacccagacctactgaattagaatctcgggagtgcagggggcagcaacagggaggctgtcttttctgagaaggagtctcactctgtcaccaggctggagtgccatggcatgatctcagctcactgcaacctccacctcctgagttcaagccattctcctgcctcagcctcctgagtagctgggactacaggtgtgcgccactacactcagctaatttttgtattttaagtagagacggggtttcatcatgttggccaggatggcctccatctcttgacctcgtgatccacccaccttccctcccaaagtactggaattacaggcattagccactgtgcccagccgaggctgtcatttttaaccggctctggatgactctgatgcagccatcctggaccttggctgtggtctggtaactggaacccagtgacgtaatcaggtgccatcgggggtcatgggaaagggggatccccaaggtctgaggtggactaggaaggctttctgaagaacctgggtctgttagggcatcagccaatcaaggtacaagtaaatagaggcaaaatgagggtttgaactgtgagcagttggtcctggaaaagaaagaaaccaagagattatggggactcaatgggcttcttaagagagaataagttgaaatcaatgaccagaagaccctgatggaagtggaggagaatcatctcaggcaaactttttgtgtgccagtaacagaaaccctctttgtgtgatcacatgcaaagtataggatatttgcaatatagccatggggaggagtgcagggcccaagggtagattttagccaggcctcccaggaacagaactcggatccgaaaagcccagagaagctagagctgcccctccaacactctcggatccacatggtctgtgttctctagacccccctgcatgttagcggtgttctctctctgtggactgactgtccttctcagtgaacatgtccacccgacagctcctgagtttatatcatctcaaccctcacaacccacagaggctgtgtctcctagtcacagctttaaattactggaaaaataaatgactggccaaacttggagcaggtgtccatcccagccctgtgtagttagagcaggaatcaagatctcaacacaaatgtggctgccaagcactcagccccggggcgaggggtcaagttcttctcagagaaagaggaataagttggttctcagaagacatcacaagatacgtgtgtacccaacaatctctgatctctgctgatcttttgcttagacgttaacttgatgcatcattggaaaggtgtttctctcatctctgtcctaaggcttgataaagtcattaaaattgtgttcttttgactaaagaaa

SEQ ID NO: 125026 - DNA, 753 bp, Artificial Sequence
  derived and/or modified sequence
atggccctgcgggccggcctggtgctgggcttccacaccctgatgacattgctcagccctcaggaagcaggagccactaaggcggaccatatggggtcctacgggcctgccttctatcagtcttacggcgccagtggacagttcactcacgaatttgacgaggagcagctgttctcagtggatttaaagaagtcagaagccgtctggcgcttgcctgaatttggggactttgcccgcttcgacccacagggtggactcgcagggattgccgccattaaggctcacctggacattctcgtggagaggtctaatcgcagccgcgctattaatgtgccgccgcgggttaccgtgttaccgaaaagccgggtggagttggggcagccaaacatcttgatatgtattgtcgataacatctttcctccagtgataaacattacatggctcagaaatgggcagacggtgacagaaggagtcgctcagactagcttttatagccagcctgaccatttgttccgaaagttccattacctacctttcgtgccatccgccgaagatgtttacgattgccaggttgaacattgggggttggacgcgcccctcctgagacactgggaacttcaggttccaatcccgccccctgatgcaatggagaccctggtctgtgccttggggcttgctattggattggtcggctttctggttggaacagtccttattatcatgggcacttacgtcagtagcgtcccaaggtag

SEQ ID NO: 125027 - DNA, 753 bp, Artificial Sequence
  derived and/or modified sequence
atggccctgcgggccggcctggtgctgggcttccacaccctgatgacacttctgtcaccccaggaggccggcgccaccaaggcagatcatatgggatcttatggaccagcattctaccaaagttatggtgctagtggtcagtttacacacgagttcgacgaagagcagctgttcagtgtggacctgaaaaaatccgaagccgtatggcgcctgcccgaattcggggacttcgcacgttttgatcctcagggagggctggctggcattgcagccatcaaggcccacctggatatcctggtcgaaagatccaaccgctcacgggctattaacgtgcctcctagagtgaccgtgcttcccaagtctcgcgtggagttgggacaacccaatatactgatttgtatcgttgacaacatcttcccaccggttatcaatatcacatggctgaggaacggtcaaacagtgacagagggcgtggctcagactagtttttattctcagcccgaccacttgttcagaaagttccattacttgcccttcgttccgtctgccgaagacgtgtacgactgtcaggtagaacattgggggctggatgccccactgctgagacactgggagttgcaggttcctatccctccacctgatgcaatggagacacttgtttgtgctctgggattagctatcggactggtgggcttcttagttggtactgtgcttatcattatgggcacatacgttagctcagtacccaggtag

SEQ ID NO: 125028 - DNA, 753 bp, Artificial Sequence
  derived and/or modified sequence
atggccctgcgggccggcctggtgctgggcttccacaccctgatgaccctattgagcccgcaggaggccggcgcgacgaaagccgaccacatgggctcttatggccctgcattttatcaatcctatggcgcctcgggacagtttacccacgagtttgatgaggagcaactcttttccgttgatctgaagaagagcgaggccgtgtggcgactacctgagttcggggacttcgcccggttcgacccacaggggggattggcaggaattgccgccattaaagcgcatctggatatcctggttgagcgatccaacagaagccgcgccatcaacgttccacctcgtgtgacagttctgcccaagagtagagtggagctgggacagccaaatatccttatatgtatcgtcgacaatatcttccctcctgtgattaatataacttggttaagaaatggacagactgtaaccgagggagtggcgcaaacctctttttactcacagccggatcatctgtttcggaagtttcattacctgcctttcgttccgagcgccgaggacgtatatgattgccaagtagaacattggggtctggacgccccgttactgcggcactgggaattgcaggtacccatacccccacccgacgccatggaaacgctagtgtgcgcacttgggcttgcgatagggctggttggctttttagtgggaactgtgctgatcattatgggcacgtatgtgagcagtgtgcctaggtag

SEQ ID NO: 125029 - DNA, 753 bp, Artificial Sequence
  derived and/or modified sequence
atggccctgcgggccggcctggtgctgggcttccacaccctgatgaccctactctcaccccaagaggctggcgccaccaaggcagatcacatgggctcatatggaccagccttttaccagagctacggggctagcgggcagtttacccacgagtttgacgaagaacagctttttagtgtggacctcaaaaagagtgaggccgtttggagactccccgaatttggagacttcgcaagatttgatccgcagggcggcctggccgggatcgccgcaataaaggctcatttggatatcttggttgaacgctctaaccgctccagggctattaacgtgccccccagggtcactgtgctccccaagtccagagtggagctgggccagccgaatatcctcatatgcatcgtagataacatttttcccccagtaatcaacatcacctggctgcgcaacggtcaaacagtgaccgaaggagtggcccagacctcattctactcgcagccggaccatctcttcaggaagttccactatctgccatttgtaccttccgctgaggatgtttatgattgccaggttgaacactggggactggacgcccctctcttgcgccactgggagctgcaggtccccataccccctcctgatgccatggagacactggtgtgcgcactcggtctggccattggtctggtcggtttcctggtgggaacagttctcatcatcatgggaacatacgtgtcctctgtcccccggtag

SEQ ID NO: 125030 - DNA, 753 bp, Artificial Sequence
  derived and/or modified sequence
atggccctgcgggccggcctggtgctgggcttccacaccctgatgacgctattgagcccccaggaagcaggggccaccaaggctgaccatatgggctcatatggaccggccttttaccagagctacggtgcatctggtcagtttacccacgagtttgatgaagaacagttgttctctgtggatttgaaaaaatcagaggccgtgtggcgcctgcccgagtttggagattttgcccgatttgaccctcagggcggactggccggcattgccgcaataaaggcacatcttgatatactggtcgagcggtctaaccgtagcagggctattaatgtgccaccacgagtcacggtgctccctaagagcagggtcgaattagggcaacccaacattttgatctgcatcgtggacaatatcttccctccggtgattaatataacatggttaaggaacggccagaccgttaccgagggcgtcgctcagaccagcttttattctcagccggatcacctgtttcgcaagtttcactatctaccgttcgtgccttccgcggaggatgtgtacgactgccaggtggaacattgggggctggatgctccccttctgcggcactgggagctgcaagttcccattcccccacctgatgccatggaaacactggtgtgtgcactaggcctggctattgggctagtgggtttcctggtgggaactgtcctaattatcatgggaacctacgtatcctcagttccaagatag

SEQ ID NO: 125031 - DNA, 753 bp, Artificial Sequence
  derived and/or modified sequence
atggccctgcgggccggcctggtgctgggcttccacaccctgatgactctcttgagtccccaggaggccggcgccacaaaggccgaccacatgggatcctacggtccagctttttaccagagctatggagccagcggtcaatttactcatgaattcgatgaagaacaactgttttctgtggacttgaagaagtctgaggcagtctggcggctgcccgagtttggggatttcgctagatttgacccccagggtggcctggcagggattgcagcgatcaaggcccatctcgacatacttgtcgagcgctcaaataggtccagggccatcaatgtgccccctcgggtgacagtgctgccaaagtctagggtagaactaggacagccaaatattcttatatgtatagtcgacaacatcttcccaccagtgatcaacatcacatggttgcggaacggtcagaccgtcacagagggcgttgcccaaacgtctttttatagtcagcccgaccacttgttcagaaaatttcactacttgcccttcgtgccctctgctgaggacgtctatgattgccaagtggagcactggggccttgacgcccccctcctgaggcattgggagttgcaagttccaatcccccctccagatgccatggaaacgctggtgtgtgccctcggtctggcaatagggctagtgggcttcttagtcggaaccgtcctgattataatgggaacctatgtgtccagtgtccctaggtag

SEQ ID NO: 125032 - DNA, 753 bp, Artificial Sequence
  derived and/or modified sequence
atggcactaagagccggactcgtcctaggattccacacgctcatgaccctgctgtctcctcaggaagcaggcgctacgaaagcggatcatatgggtagctacggccctgcattttaccagagctacggggcttcggggcagttcacccacgaatttgacgaagagcagctcttctcagtagacctcaagaaatcagaggccgtttggcggctgcctgagttcggcgactttgctcggttcgacccacagggtggacttgccggaatcgcggcaatcaaagctcacttagacatcctggtggaaagaagcaatagatccagggccatcaacgtcccacccagggtgaccgttctcccaaaaagccgggtggagcttggccaacccaatattttgatctgtattgtggataacatttttcctccagtgatcaacatcacttggctccggaacggccaaacagtaactgagggcgtggcacagacatcattttactcacaaccagaccacctctttaggaaattccactatcttcctttcgtgcccagtgctgaagatgtgtatgactgccaggtggagcattggggtctggacgcgccactcttaagacattgggagcttcaggtccctattcctcctcccgacgcaatggaaactctagtttgtgcgctgggcctcgcaatcggcctggttggattcttggttggaaccgtcctaattatcatgggcacctatgtatccagtgtcccaagatag

SEQ ID NO: 125033 - DNA, 753 bp, Artificial Sequence
  derived and/or modified sequence
atggcccttagggccggtttggtgcttggcttccacactctgatgactctcctcagcccccaggaggcaggggcaaccaaggccgaccacatgggcagttatggcccagcattttatcagtcatacggagcatctggccaatttactcacgagttcgatgaagaacagcttttttcggtcgatctgaaaaagtcagaagctgtctggaggttgcccgagttcggggactttgctcgatttgacccccaaggaggattggccggtatcgcagctattaaggctcatttagacatcttagtggaaaggtctaacaggtcacgagctattaatgtgccccctcgggttaccgtccttccaaagtcaagagtggagttgggtcagcctaacatccttatctgtatcgtcgacaacattttccccccagtgatcaacatcacctggctgagaaacggtcagaccgtgacggagggcgtagctcagacgtcattctatagtcaacccgatcacctgtttcgtaagttccactatctgccctttgttccctctgctgaggatgtgtacgattgtcaagtcgagcactggggtctagacgctcccctgctgaggcattgggagctgcaggtccctatccccccacccgacgccatggagactcttgtttgtgcccttggcctggcaatcggcctcgtgggcttccttgtgggcacagttcttattatcatggggacctatgtatcatctgtaccgagatag

SEQ ID NO: 125034 - DNA, 753 bp, Artificial Sequence
  derived and/or modified sequence
atggctctgagggcaggcctggtgctcggtttccacacccttatgacactgctgtcccctcaggaagcaggagctacgaaagccgaccatatgggttcgtatgggccagccttttaccagtcatatggagccagtgggcagtttacccacgagttcgatgaagagcaactcttttctgtggacctcaaaaagtcggaggcggtttggcggctgcctgaattcggcgattttgctcgctttgacccgcagggtggactcgcaggaatcgccgctatcaaggcacatctggacattctggttgagcgtagcaataggtcccgggctatcaacgtgccaccaagggtcacagtgctgcctaaaagtcgagtcgagctcgggcagccaaacattcttatatgtatcgtcgacaacattttcccgccagttatcaatattacctggttgcggaacgggcagacggtcaccgaaggcgtcgctcagaccagtttctattctcagcccgaccatttattccgtaaatttcactatctgccatttgtgcccagcgcagaggacgtctacgactgccaggtggagcattgggggctcgacgctccactgctgcgtcactgggagctgcaagttcccatccctccgccagacgcgatggaaaccctcgtgtgcgcactcggcctcgccatcggtcttgtgggtttccttgtcggtacagtgctgatcatcatgggcacgtatgtcagctccgttcccagatag

SEQ ID NO: 125035 - DNA, 753 bp, Artificial Sequence
  derived and/or modified sequence
atggcactacgggctggcctggtattgggattccataccttgatgacgctgctgtctccacaagaagccggagcgacaaaggccgatcacatgggatcttatggacctgccttctaccagtcatacggtgcctctggacagttcacacacgaatttgatgaagagcaactgtttagtgttgatctgaagaaaagcgaggcggtgtggaggctgccagagtttggcgattttgcaagattcgacccccagggcggtctggcagggatagccgcaattaaagcgcatttggatatcctggtggagaggtcaaaccgctcgcgtgcaattaacgtcccaccccgagtgacagtccttccaaaaagccgtgtcgaacttgggcagcccaatatcttgatctgtatcgtggataacattttccccccagttataaacattacttggttgagaaatggtcagactgtcacagaaggagtggctcagactagcttctactcacaaccggatcatctcttcagaaaatttcattacctcccattcgtcccaagcgccgaagacgtctatgactgccaggtggaacactgggggctcgacgcccctcttctgcgacactgggagctgcaggtgccgattcctccccctgatgccatggagactctggtctgcgccctggggctggccataggcctggtcggttttttggtcggtacagtcttaatcataatgggaacctacgtttcttctgttccgcgttag

SEQ ID NO: 125036 - DNA, 753 bp, Artificial Sequence
  derived and/or modified sequence
atggcactgagggcaggactggtgcttggatttcacactctgatgaccctgttatcccctcaggaagctggcgcaactaaggcggatcatatgggatcctatggcccagcgttttaccagtcatacggcgctagcggacaatttacacacgagtttgacgaagaacagctgttctcagtcgatttgaaaaagtctgaggccgtctggagactgcccgaattcggggacttcgctcgttttgatccacagggaggcttggccggaatcgctgcaataaaggctcacttggacatcctcgttgagaggtcaaacagatcgagagccataaacgtgcctccccgagtgactgttctgcccaagtcacgggtagagctgggacaaccgaatatcttgatctgcatcgtggacaacatctttccccctgtgattaacattacctggttaagaaatggccaaaccgttacggaaggcgtggctcaaactagtttctattcccagcctgatcatctgttccgcaagtttcactatctgccttttgtgccaagcgcagaggatgtgtatgattgccaggtcgagcattggggactggacgctcctctgttgaggcactgggagcttcaagttcccatacccccaccagacgcgatggaaaccctagtgtgcgccttgggactggctatcggtcttgtgggcttcctcgtagggacagtgcttatcataatgggcacttacgtctcatccgtgcctcgctag

SEQ ID NO: 125037 - DNA, 753 bp, Artificial Sequence
  derived and/or modified sequence
atggctcttagggctggactggtgttaggcttccacacactgatgacgctgctctcgccccaggaggcaggggctacaaaagcagaccacatgggttcatacggaccggcattttatcagtcttacggagcctccggacagtttacccacgagttcgacgaggagcagctcttctccgtagacttgaaaaaaagcgaagccgtgtggcgactccccgagtttggggacttcgccagatttgaccctcagggcggtcttgcgggtatcgctgccattaaagcacacctagacatccttgtggaacgctcgaaccggagtagggccataaacgtgccccctagggttactgtactgcccaaatctcgcgttgaacttggtcagcctaatatcctgatatgcatcgtggacaatatattccctccagtcattaacatcacctggctcagaaacggccagactgtgaccgaaggcgttgctcagacatctttctatagccagccagaccacctgttccgtaaattccactacctgccctttgttccatctgcagaagacgtgtatgattgtcaagttgagcactggggtctggatgcacccctgctgcgacactgggaactccaggtcccgatcccgccacctgacgccatggagaccctggtgtgtgcactgggtttggcgatcggcctagtcggatttctggtggggacagttctgataattatgggtacttacgtctccagcgtcccaagatag

SEQ ID NO: 125038 - DNA, 753 bp, Artificial Sequence
  derived and/or modified sequence
atggctttaagggctggccttgtgttgggatttcacacacttatgacgctgttgagcccacaagaggccggggctactaaagctgaccatatggggtcatacggcccagccttttatcaaagctatggagcaagtggccagtttactcacgagttcgacgaagagcagctgttttccgtggacttaaagaaaagcgaggctgtgtggcgattgccagagttcggagacttcgcccgatttgacccccaggggggtctggccggtatcgcagccattaaagcccatttagacatcctggttgagcgctctaaccggagcagagcaataaatgtccctcccagagtcacggtcctcccaaaatcacgtgtcgagcttggtcagcccaacattctcatttgtattgtcgacaacatatttcctccagtcatcaacatcacatggttaaggaacggccagactgtcacggagggcgtcgcccagaccagcttttactcacagccagatcatctgtttaggaagtttcattacctgcccttcgttcctagcgccgaagacgtatacgactgtcaggtggagcattggggccttgacgcccccctgttgaggcattgggaacttcaagtccctatcccccctcctgacgctatggagacactggtttgtgccttagggctggccatcggcctggtcggcttcctggttggcacagtgcttataatcatgggcacttacgtaagcagtgtgccccgctag

SEQ ID NO: 125039 - DNA, 753 bp, Artificial Sequence
  derived and/or modified sequence
atggccctgcgggccggcctggtgctgggcttccacaccctgatgactttactgtctccacaggaggccggtgcaaccaaagctgatcatatgggatcctacggccccgctttttatcaatcctacggcgcctcaggacagttcactcacgagttcgatgaggaacagctgttcagtgtggatctaaagaagagcgaggcagtgtggcgattgccggaatttggcgacttcgctcggtttgatccacaaggcgggctggctggcatcgctgctatcaaagcccatcttgacattctcgtagaacgatctaacagaagccgtgcgataaacgttcctcccagagtcacagtgctgcctaagagtcgggtggagctgggccagcccaacatcctcatttgcattgttgataatatcttcccaccagtgattaacataacctggctccggaatggccagaccgtgacggagggcgttgcccaaactagcttctattcgcagccagatcacctgtttaggaagtttcactatctgccttttgtgccctcggctgaggatgtgtatgactgccaggtggagcattggggtctagatgcaccccttctccggcactgggagctgcaagtgcccattcccccaccagacgctatggaaaccttggtgtgtgccctcggcctagctattggcctggtgggatttctcgtgggcaccgtgctcatcatcatgggaacatacgtcagctccgtaccacgctag

SEQ ID NO: 125040 - DNA, 753 bp, Artificial Sequence
  derived and/or modified sequence
atggcactgcgcgcaggcctggttctggggttccacacacttatgacactcctctcacctcaagaggccggtgctactaaggctgatcatatgggctcgtacggcccagctttctaccaaagttacggcgcatcagggcagttcactcacgaattcgatgaggagcagctcttcagcgtagatctgaaaaaaagcgaggccgtgtggcgtctgcctgagttcggggacttcgcacgttttgatccacagggcggtcttgcgggaattgcagcaataaaagcacacctcgacatactggtagaaaggtctaacaggagccgcgcaatcaatgttcccccaagagtgactgtgctcccaaaatcacgcgttgagctcggacagcccaacattttgatctgcattgtcgataacattttcccacctgtgattaacattacatggctgcgcaatgggcaaacagtcactgaaggcgtcgcacagacatccttctacagtcagccagatcacctcttccgcaagttccattatctgccattcgttccctctgcagaggatgtatacgactgccaggtggaacactgggggctggatgcacctctactgagacattgggaactgcaggtgcccataccacctccggacgctatggagaccctggtgtgcgccctgggactggctattggtctagtcggttttttggttggaacagtcctgatcataatgggaacttatgtgtcatctgtgcccaggtag

SEQ ID NO: 125041 - DNA, 3485 bp, Artificial Sequence
  derived and/or modified sequence
cttcttctttacctccgccttgttcctgtcctcaccacacggactgagactgatttgattaaagcaccagagtgtaatggccctcagagcagggctggtcctggggttccacaccctgatgaccctcctgagcccgcaggaggcaggggccaccaaggctgaccacatgggctcctacggacccgccttctaccagtcttacggcgcctcgggccagttcacccatgaatttgatgaggaacagctgttctctgtggacctgaagaaaagcgaggccgtgtggcgtctgcctgagtttggtgactttgcccgctttgacccgcagggcgggctggccggcatcgccgcaatcaaagcccatctggacatcctggtggagcgctccaaccgcagcagagccatcaacgtgcctccacgggtgaccgtgctccccaagtctcgggtggagctgggccagcccaacatcctcatctgcatcgtggacaacatcttcccccctgtgatcaatatcacctggctgcgcaacggccaaactgtcactgagggagtggcccagaccagcttctattcccagcctgaccatttgttccgcaagttccactacctgcccttcgtgccctcagccgaggacgtctatgactgccaggtggagcactggggcctggatgcgccactcctcaggcattgggagctccaggtgcctattccaccaccagatgccatggagaccctggtctgtgccctgggcctggccatcggcctggtgggcttcctcgtgggcaccgtcctcatcatcatgggcacatatgtgtccagtgtccccaggtaatgatccttctgagagaaatgacttgtgggagacaccctgcagatcctcatgggtttgtgacagcccctgcgtgctcagtgccctttaagtgcatcccgctgtgctgactttgagtgggatcaacatctgtcctacgggtcccctcttttttggccccagtattcatggcagggtttgttggacacctactagcttcccttcccattcaacacacacacacattcttgctctacccaaagctctggctggcagcactaaatgctttggtggtgtttgcactgtgtcctttccaggccttggccagttcttccaggggtgaggcatgtggtgctggggattggcagccatcctggggcccacacaggtgtgtcttgctccatttggcccattgtgtgttactttgtgaatgagccatttcacatggacttcatgaaatttgcctcctgagttcaggtttaccctgaaagggatgcagattatcctgttcctcacgaccccctcagctaacaacagttctgaagggtgctgggacaggacaggctcatggggactccactcctgcctgggtttactctgtatgaagaggccactggtatcctgccatgatgttatctcctttttctacttttccctagagtcccatgcatgataaagagaggcccaaggcttggataaggtggccacttccctcagtggagtcagtcatgttaggtaggaggtggtagagtcggtctgcgaggtatctcgtaagaggggaggtccacctagacacactctaaatatgtggcctagaagattttggtctacttttctgtgaacagaatttaaaacatacaaagagataaatcaccataccacatagtttatgtcaggaccaaaatgagcaatacagattacggttttcaaaccagaatgcacataagaactgcttgggatccttttaaaagtacaggcattggcctggtgcagtggctcattcctgtaatcccagcactttgggaggccaaggggacaggactgcttgaggccaagaggtggaaaccatcttgggctacatagagagaccccatctctacaaagaaagatttaaaaattaaccaggcatggtggctcgcacctgtattcccagccactggggaggctgaggccggaggagtgcttgagcccaggagttcaaggctgcagtgagccaagattgcgccactgcactccagcctaggtgacagagtgagaccctgtctctaaataaataaataaataaaatataaaaataacagtcatcacccagacctactgaattagaatctcgggagtgcagggggcagcaacagggaggctgtcttttctgagatggggtctcactctgtcaccaggctggagtgccatggcatgatctcagctcactgcaacctccacctcctgagttcaagccattctcctgcctcagcctcctgagtagctgggactacaggtgtgcgccactacactcagctaatttttgtattttaagtagagacggggtttcatcatgttggccaggatggcctccatctcttgacctcgtgatccacccaccttccctcccaaagtactggaattacaggcattagccactgtgcccagccgaggctgtcatttttaaccggctctggatgactctgatgcagccatcctggaccttggctgtggtctggtaactggaacccagtgacgtaatcaggtgccatcgggggtcatgggaaagggggatccccaaggtctgaggtggactaggaaggctttctgaagaacctgggtctgttagggcatcagccaatcaaggtacaagtaaatagaggcaaaatgagggtttgaactgtgagcagttggtcctggaaaagaaagaaaccaagagattatggggactcaatgggcttcttaagagagaataagttgaaatcaatgaccagaagaccctgatggaagtggaggagaatcatctcaggcaaactttttgtgtgccagtaacagaaaccctctttgtgtgatcacatgcaaagtataggatatttgcaatatagccatggggaggagtgcagggcccaagggtagattttagccaggcctcccaggaacagaactcggatccgaaaagcccagagaagctagagctgcccctccaacactctcggatccacatggtctgtgttctctagacccccctgcatgttagcggtgttctctctctgtggactgactgtccttctcagtgaacatgtccacccgacagctcctgagtttatatcatctcaaccctcacaacccacagaggctgtgtctcctagtcacagctttaaattactggaaaaataaatgactggccaaacttggagcaggtgtccatcccagccctgtgtagttagagcaggaatcaagatctcaacacaaatgtggctgccaagcactcagccccggggcgaggggtcaagttcttctcagagaaagaggaataagttggttctcagaagacatcacaagatacgtgtgtacccaacaatctctgatctctgctgatcttttgcttagacgttaacttgatgcatcattggaaaggtgtttctctcatctctgtcctaaggcttgataaagtcattaaaattgtgttcttttgactaaa

SEQ ID NO: 125042 - protein, 182 aa, Artificial Sequence
  derived and/or modified sequence
  misc_feature (1)..(1): Xaa can be any naturally occurring amino acid
XNLTRLDSSMTQGTDSPEDFVIQAKADCYFTNGTEKVQFVVRFIFNLEEYVRFDSDVGMFVALTKLGQPDAEQWNSRLDLLERSRQAVDGVCRHNYRLGAPFTVGRKEVTVYPERTPLLHQHNLLHCSVTGFYPGDIKIKWFLNGQEERAGVMSTGPIRNGDWTFQTVVMLEMTPELGHVYT

SEQ ID NO: 125043 - protein, 273 aa, Artificial Sequence
  derived and/or modified sequence
MGSGWVPWVVALLVNLTRLDSSMTQGTDSPEDFVIQAKADCYFTNGTEKVQFVVRFIFNLEEYVRFDSDVGMFVALTKLGQPDAEQWNSRLDLLERSRQAVDGVCRHNYRLGAPFTVGRKVQPEVTVYPERTPLLHQHNLLHCSVTGFYPGDIKIKWFLNGQEERAGVMSTGPIRNGDWTFQTVVMLEMTPELGHVYTCLVDHSSLLSPVSVEWRAQSEYSWRKMLSGIAAFLLGLIFLLVGIVIQLRAQKGYVRTQMSGNEVSRAVLLPQSC

SEQ ID NO: 125044 - protein, 273 aa, Artificial Sequence
  derived and/or modified sequence
MGSGWVPWVVALLVNLTRLDSSMTQGTDSPEDFVIQAKADCYFTNGTEKVQFVVRFIFNLEEYVRFDSDVGMFVALTKLGQPDAEQWNSRLDLLERSRQAVDGVCRHNYRLGAPFTVGRKVQPEVTVYPERTPLLHQHNLLHCSVTGFYPGDIKIKWFLNGQEERAGVMSTGPIRNGDWTFQTVVMLEMTPELGHVYTCLVDHSSLLSPISVEWRAQSEYSWRKMLSGIAAFLLGLIFLLVGIVIQLRAQKGYVRTQMSGNEVSRAVLLPQSC

SEQ ID NO: 125045 - DNA, 549 bp, Artificial Sequence
  derived and/or modified sequence
tgaaacctgaccagactggacagcagcatgacccagggcaccgacagccccgaggacttcgtgatccaggccaaggccgactgctacttcaccaacggcaccgagaaggtgcagttcgtggtgagattcatcttcaacctggaggagtacgtgagattcgacagcgacgtgggcatgttcgtggccctgaccaagctgggccagcccgacgccgagcagtggaacagcagactggacctgctggagagaagcagacaggccgtggacggcgtgtgcagacacaactacagactgggcgcccccttcaccgtgggcagaaaggaggtgaccgtgtaccccgagagaacccccctgctgcaccagcacaacctgctgcactgcagcgtgaccggcttctaccccggcgacatcaagatcaagtggttcctgaacggccaggaggagagagccggcgtgatgagcaccggccccatcagaaacggcgactggaccttccagaccgtggtgatgctggagatgacccccgagctgggccacgtgtacacctag

SEQ ID NO: 125046 - DNA, 822 bp, Artificial Sequence
  derived and/or modified sequence
atgggcagcggctgggtgccctgggtggtggccctgctggtgaacctgaccagactggacagcagcatgacccagggcaccgacagccccgaggacttcgtgatccaggccaaggccgactgctacttcaccaacggcaccgagaaggtgcagttcgtggtgagattcatcttcaacctggaggagtacgtgagattcgacagcgacgtgggcatgttcgtggccctgaccaagctgggccagcccgacgccgagcagtggaacagcagactggacctgctggagagaagcagacaggccgtggacggcgtgtgcagacacaactacagactgggcgcccccttcaccgtgggcagaaaggtgcagcccgaggtgaccgtgtaccccgagagaacccccctgctgcaccagcacaacctgctgcactgcagcgtgaccggcttctaccccggcgacatcaagatcaagtggttcctgaacggccaggaggagagagccggcgtgatgagcaccggccccatcagaaacggcgactggaccttccagaccgtggtgatgctggagatgacccccgagctgggccacgtgtacacctgcctggtggaccacagcagcctgctgagccccgtgagcgtggagtggagagcccagagcgagtacagctggagaaagatgctgagcggcatcgccgccttcctgctgggcctgatcttcctgctggtgggcatcgtgatccagctgagagcccagaagggctacgtgagaacccagatgagcggcaacgaggtgagcagagccgtgctgctgccccagagctgctag

SEQ ID NO: 125047 - DNA, 822 bp, Artificial Sequence
  derived and/or modified sequence
atgggcagcggctgggtgccctgggtggtggccctgctggtgaacctgaccagactggacagcagcatgacccagggcaccgacagccccgaggacttcgtgatccaggccaaggccgactgctacttcaccaacggcaccgagaaggtgcagttcgtggtgagattcatcttcaacctggaggagtacgtgagattcgacagcgacgtgggcatgttcgtggccctgaccaagctgggccagcccgacgccgagcagtggaacagcagactggacctgctggagagaagcagacaggccgtggacggcgtgtgcagacacaactacagactgggcgcccccttcaccgtgggcagaaaggtgcagcccgaggtgaccgtgtaccccgagagaacccccctgctgcaccagcacaacctgctgcactgcagcgtgaccggcttctaccccggcgacatcaagatcaagtggttcctgaacggccaggaggagagagccggcgtgatgagcaccggccccatcagaaacggcgactggaccttccagaccgtggtgatgctggagatgacccccgagctgggccacgtgtacacctgcctggtggaccacagcagcctgctgagccccatcagcgtggagtggagagcccagagcgagtacagctggagaaagatgctgagcggcatcgccgccttcctgctgggcctgatcttcctgctggtgggcatcgtgatccagctgagagcccagaagggctacgtgagaacccagatgagcggcaacgaggtgagcagagccgtgctgctgccccagagctgctag

SEQ ID NO: 125048 - DNA, 549 bp, Artificial Sequence
  derived and/or modified sequence
taaaaccttacacggctggacagcagcatgacccaggggaccgattccccagaggactttgtcattcaggctaaagcagattgctactttacaaacggcacagaaaaggtacagtttgtggtacgtttcatcttcaacttggaggaatacgtgcggtttgactccgacgtgggaatgttcgtcgcccttacaaagctgggccagcctgacgcagaacagtggaactcgcgccttgacctgctggaacggtcgcggcaggcagtcgacggcgtgtgccgacacaactatcgcctgggagcgccatttaccgtgggccgaaaggaagtgacagtgtacccagaacgtacaccactgctacaccagcataatttgctgcactgttccgtaactgggttttacccgggcgacataaagataaaatggttcttaaacgggcaagaggagcgagcaggggttatgtccacgggccccatccgcaacggggactggactttccagacggttgtgatgctcgagatgacgcctgagctgggtcacgtttacacttag

SEQ ID NO: 125049 - DNA, 822 bp, Artificial Sequence
  derived and/or modified sequence
atgggctctgggtgggtcccttgggttgtggccctgctggtgaacctcactcgactggactcctctatgactcaggggaccgactctcccgaagacttcgtgatacaagccaaagcagattgctactttaccaacgggacagagaaagtccaattcgtggtgaggtttattttcaatctggaggagtacgttcgttttgacagcgacgtaggtatgtttgtggctcttaccaagctgggccagccggacgccgagcagtggaactcaaggctggatctactcgagagaagcagacaagccgttgatggcgtgtgcaggcataactatcgtctgggagccccctttaccgtgggtcggaaagtgcagcctgaggtgacagtgtatccagagcgtacaccccttctccatcagcacaatttacttcactgctccgttactggcttctacccgggggatatcaaaataaagtggtttttaaacggacaagaggaaagagcaggggtgatgagtacagggcccattcgcaatggcgactggacttttcagacagttgtaatgctcgaaatgaccccggaactggggcatgtgtatacctgcctggtcgaccacagtagcttgctctcacctgtcagtgtcgagtggagggctcagagcgagtactcttggcgtaaaatgttgtccggaattgctgccttcttactggggttgatctttcttctggtaggtatagtgatccaattaagagcacagaagggctatgtgagaacccagatgagcggcaacgaggtcagccgagccgtcttgttgccacagagctgctag

SEQ ID NO: 125050 - DNA, 822 bp, Artificial Sequence
  derived and/or modified sequence
atgggctccggatgggtaccatgggtggttgcactacttgtgaacttaacgaggctcgactctagtatgacacaaggcacagactcccctgaggactttgtaattcaggctaaggccgactgttattttacaaatggcacagaaaaagtgcagtttgtggttcggtttatcttcaatctggaggagtatgttagattcgacagtgacgtagggatgttcgtagctctaacaaagctcgggcagccagacgcggagcagtggaacagcaggttagatctcctagagagaagcaggcaggcggtggacggagtgtgtcgccataactacaggctgggcgctccattcaccgtgggcagaaaagtccagcctgaggtcaccgtgtacccagaacggacacctctgctgcaccagcataacctgctgcattgtagcgtgaccggcttctatcctggggatattaaaatcaagtggtttctcaacggccaagaagaacgggccggcgtgatgtcaaccggaccgatccggaatggcgactggacatttcaaaccgtggtcatgctcgagatgactccggaactggggcatgtgtacacctgtctggtcgatcacagctcactgttgtcaccggtttccgtcgagtggagagcacagtctgagtactcttggcgaaagatgctgagcggcatcgctgcattcctactgggtctcattttcctcctcgtaggaattgttatccagcttcgggcacagaagggctacgttcgaacacagatgagtgggaatgaagtttcccgggctgtgttactgccccagtcatgctag

SEQ ID NO: 125051 - DNA, 549 bp, Artificial Sequence
  derived and/or modified sequence
tgaaacttgaccagactggatagctcaatgacacagggtacagatagtcctgaggactttgtgatccaggcaaaggcggattgctattttacaaatgggacggagaaggtgcagtttgtggtcaggtttatttttaatctggaggaatacgtgcgcttcgacagcgacgtgggaatgtttgtcgcacttacaaagcttgggcagcctgacgctgagcagtggaactccagactcgatcttctggagcgctccaggcaggcagtagatggagtatgtagacacaattacagacttggagcccctttcaccgttgggcggaaagaagtcacagtttatcctgagcggacacctctgcttcatcaacataacctgcttcactgcagcgtgactggcttctatcctggcgatatcaaaatcaaatggtttctcaacggccaagaagagagggccggagtgatgtcaactgggcccatccgaaacggtgactggacatttcagacggtggtgatgctggagatgacacccgagctgggacacgtatatacttag

SEQ ID NO: 125052 - DNA, 822 bp, Artificial Sequence
  derived and/or modified sequence
atggggagtggctgggtgccgtgggtggtcgccctgcttgtaaacttaactagactggactcctcgatgacccagggtaccgattctcctgaggactttgtgattcaagctaaggccgattgctactttacaaatgggactgagaaggtccagtttgtggtccggttcatcttcaatttagaagagtatgtgcgctttgattctgatgtgggcatgttcgtcgcccttacaaaattgggtcagcccgacgccgagcagtggaattcccggttggatctactggaacggagccggcaggctgtggatggggtgtgtcggcataattaccggttgggggcgccattcaccgtcggtcgaaaagttcaaccggaagtgacagtgtacccggaacgcacacctctgctacaccaacataatttgctccattgcagtgtaacgggcttctatcccggcgatatcaagatcaaatggtttcttaacggtcaggaagaaagagccggggtcatgagcactggccctattaggaatggggattggacattccagaccgtggtaatgctggaaatgaccccggagctcggccatgtatacacatgcctggtggaccactcctccctgttaagccctgtctccgtcgaatggcgggcacagtcagaatatagctggcgcaagatgctttctggtattgccgctttcctcctgggcctgatctttctgttggtcggaatagtgattcaacttagagcacagaaggggtacgtgcgaacgcaaatgtccgggaatgaggtgtcccgggctgtcttgttgccgcagagctgctag

SEQ ID NO: 125053 - DNA, 549 bp, Artificial Sequence
  derived and/or modified sequence
tgaaacctgacacggttggactcctctatgacgcaggggacagactccccggaagactttgtgatccaagctaaagcggattgctattttactaatggaaccgagaaggtgcagtttgtggtccggttcatcttcaacctggaggagtatgtccgcttcgactcagatgtggggatgttcgtcgcattgacgaaactaggccaacccgacgcggagcagtggaatagccgcctcgatttattggagcgaagtagacaggccgtagatggggtgtgcagacacaactacaggttaggggcgccctttaccgtaggacgcaaagaggttacagtatatcccgagaggacacccctcctacaccagcacaatttgctccactgctcagtgacagggttctatcctggtgatattaagattaagtggttcctgaatggacaggaagagagggccggcgtgatgagcaccgggcctatccggaatggagactggaccttccagaccgtcgtaatgctggagatgacaccagaactggggcatgtgtatacttag

SEQ ID NO: 125054 - DNA, 549 bp, Artificial Sequence
  derived and/or modified sequence
tgaaatctcacccggctggatagctctatgacgcaggggactgactcccccgaagactttgtgatccaggcaaaggccgactgctatttcaccaatggcactgagaaggtgcagttcgttgtgcggtttatcttcaacctggaggagtatgttcgcttcgattccgacgtggggatgttcgttgccctaacaaagctgggacaacctgacgccgagcagtggaactccaggcttgatcttctcgagcgttctcggcaagccgtcgacggcgtgtgcagacataattaccggctcggtgccccatttaccgtaggccgaaaggaggtgaccgtctaccctgaacgcacacccttgcttcaccaacataacctgttacattgttctgtcactggattctatcctggggatataaagatcaaatggtttctgaatggccaagaggaaagggccggggtgatgtccactgggcccattaggaacggagattggacatttcagacagtcgtgatgctcgagatgacaccagaactggggcatgtgtacacatag

SEQ ID NO: 125055 - DNA, 549 bp, Artificial Sequence
  derived and/or modified sequence
tgaaacttaactaggctagattcttctatgacccagggcactgattctccggaagactttgtgattcaggcgaaggccgactgttacttcaccaatgggactgagaaagttcagtttgtggtgagatttatctttaatctggaggagtatgtgcgattcgattcagacgtgggcatgttcgtggccttgacaaagcttggccagccggacgctgaacagtggaattctaggcttgacctcctcgagcgcagccggcaggccgtagacggggtgtgcagacataattacaggctcggagcgccattcaccgttgggcgcaaggaggtcaccgtgtaccccgagcggacacctttgcttcatcagcacaacttgctgcattgcagcgtcacaggcttttatccaggcgatataaaaatcaagtggtttctgaatgggcaggaggagcgggccggcgtcatgagtacgggacctatcagaaacggagactggaccttccagaccgtagtcatgctggaaatgactcctgaactgggtcacgtgtatacttag

SEQ ID NO: 125056 - DNA, 822 bp, Artificial Sequence
  derived and/or modified sequence
atgggctctggctgggtcccttgggtggtcgccctactggtgaatctgactaggctggatagctctatgacacaaggcacggactcccctgaggattttgttatccaagctaaggcggattgctatttcacaaacggcacagagaaggtgcagtttgttgtacggttcatattcaatctcgaggagtacgtcagattcgacagtgatgtcgggatgtttgtcgccttgactaaactgggccagcccgacgctgagcagtggaattctaggttagaccttctcgagcgaagtcggcaggccgtggatggtgtatgccggcacaactatagactcggggccccattcacagtcggccggaaagtccagcccgaggtcacagtctaccccgagagaacacctctcctacaccaacataacctcctgcactgtagtgtgacaggcttttatccgggcgacatcaagatcaagtggttcctgaacggccaggaggaacgtgccggcgtaatgtccacggggccaatacgcaatggtgattggacttttcagaccgtcgtgatgctggagatgacccccgagctcggccacgtctacacatgccttgttgaccactcatcattgctgtctcccatcagcgtcgaatggagagcgcagtctgagtatagctggcggaagatgctgagcgggatcgcagcgtttctgctggggttaatctttcttttggtcggcattgtcattcaattaagggctcagaaggggtacgttaggacccagatgagcggcaacgaggtgtctcgcgccgtgttgttgcctcaatcttgttag

SEQ ID NO: 125057 - DNA, 822 bp, Artificial Sequence
  derived and/or modified sequence
atggggtctgggtgggtcccttgggtggtcgctcttcttgtgaatttgacacgcctggatagcagtatgacacaagggaccgatagtcccgaggacttcgtaatccaggccaaagccgactgctacttcactaacgggaccgaaaaggtgcagttcgtagtcaggttcatattcaacctcgaggagtacgtccgttttgacagtgacgtcggcatgttcgttgcccttacaaaacttggccagcctgacgctgaacagtggaactcacgcttggacctgctggagcggtcacgccaggcggtagatggagtgtgcagacacaactatagactcggagccccattcactgtgggcagaaaagttcagcctgaggtgactgtctaccccgaaagaacaccgcttttgcaccagcataatctgctccactgttctgtcacaggcttctaccctggagacatcaagataaagtggtttttgaatggccaggaagaacgcgccggcgtgatgagtaccggcccaattcggaatggagattggacattccagacagtggtaatgctggagatgacaccagaacttggacacgtgtacacctgcttagtggaccacagcagccttcttagcccagtgagcgttgagtggcgcgcccagtctgaatactcttggcgaaagatgctctctggcattgcagcgttcctgctggggctaatctttttattggttggcatagtcattcaattacgggctcaaaaaggttatgttagaactcagatgagcggtaatgaggtgtcccgtgccgtcctcctgcctcaaagttgttag

SEQ ID NO: 125058 - DNA, 549 bp, Artificial Sequence
  derived and/or modified sequence
tgaaacctcactaggctcgattctagtatgacccagggaacagatagccctgaagatttcgtcatccaagccaaagcagattgttactttacaaatggcactgaaaaggttcagttcgtcgtacggtttattttcaacctagaagagtatgtgagattcgattccgatgtggggatgttcgtcgccttaacaaagttaggccaacccgatgcggagcagtggaactcccgcctggatctgctggagcgaagtcggcaggccgttgatggggtctgccgacacaactacagactgggcgccccatttaccgttgggagaaaagaagtgaccgtttaccctgagaggacgccactgctgcaccagcacaaccttctccactgcagtgtgaccggattttatcctggggacataaagattaagtggtttctgaacggacaggaagagcgcgcgggcgtcatgagtaccggacctattagaaacggtgactggacttttcagaccgtggtaatgttggaaatgactcccgagcttgggcatgtctacacttag

SEQ ID NO: 125059 - DNA, 822 bp, Artificial Sequence
  derived and/or modified sequence
atggggtctggatgggtaccctgggtcgttgcgctcctggtgaacctcactcgcctggacagttcgatgacccaaggcacggattcccccgaggatttcgtgatccaagccaaggccgattgttatttcactaatggaacagagaaagtacagtttgttgtgcggttcatctttaatctggaggagtacgtgaggtttgactccgacgtaggcatgttcgtcgcgctgacgaagctcgggcagcccgatgcggaacaatggaattccaggctggacctgcttgaacgctcacgtcaggccgtggatggtgtgtgccggcataactacaggctgggcgctcccttcaccgtcggtaggaaagtccagcccgaagtgaccgtgtacccggaacgtaccccccttctccaccagcacaatctgctgcattgctctgtgaccgggttctacccgggggatatcaaaatcaagtggtttcttaacggccaggaggagagggccggggttatgagtacggggccgatccgaaatggagactggaccttccaaacagtagtgatgctggagatgacaccagagcttggacacgtctacacatgcctggtcgaccacagcagccttttgtcccccgttagcgtggaatggagggcacagtctgaatattcttggagaaagatgctgtcaggaattgccgcttttcttttgggcctaatattcctgctagtggggatcgtcatacagcttcgggctcagaaggggtacgttagaacccagatgagtgggaacgaggtgtccagagctgtgctgctcccacaaagctgctag

SEQ ID NO: 125060 - DNA, 549 bp, Artificial Sequence
  derived and/or modified sequence
tgaaacctgacccggctggacagctccatgacccagggcacagacagccctgaggactttgtgatccaggccaaggctgactgctacttcaccaacggcacagagaaggtgcagtttgtggtgcgcttcatcttcaacctggaggagtatgtgcgctttgacagtgatgtgggcatgtttgtggccctgaccaagctgggccagccagatgctgagcagtggaacagccggctggacctgctggagaggagccggcaggccgtggatggagtgtgccgccacaactaccgcctgggcgcccccttcaccgtgggcaggaaggaggtgacagtgtacccagagaggacccccctgctgcaccagcacaacctgctgcactgcagcgtgacaggcttctacccaggggacatcaagatcaagtggttcctgaatggccaggaggagcgggccggcgtgatgagcacaggccccatcagaaatggagactggaccttccagacagtggtgatgctggagatgaccccagagctgggccacgtgtacacctag

SEQ ID NO: 125061 - DNA, 822 bp, Artificial Sequence
  derived and/or modified sequence
atgggcagcggctgggtgccctgggtggtggccctgctggtgaacctgacccggctggacagctccatgacccagggcacagacagcccagaagattttgtgatccaggccaaggctgactgctacttcaccaatggaacagagaaggtgcagtttgtggtgcgcttcatcttcaacctggaggagtatgtgcgctttgacagtgatgtgggcatgtttgtggccctgaccaagctgggccagccagatgctgagcagtggaacagccggctggacctgctggagaggagccggcaggccgtggatggagtgtgccgccacaactaccgcctgggcgcccccttcaccgtgggcaggaaggtgcagcctgaggtgacagtgtacccagagaggacccccctgctgcaccagcacaacctgctgcactgcagcgtgacaggcttctacccaggggacatcaagatcaagtggttcctgaatggccaggaggagcgggccggcgtgatgagcacaggccccatcagaaatggagactggaccttccagacagtggtgatgctggagatgaccccagagctgggccacgtgtacacctgcctggtggaccacagcagcctgctgagccctgtgtctgtggagtggagggcccagagcgagtacagctggaggaagatgctgtctggaattgctgccttcctgctgggcctcatcttcctgctggtgggcatcgtcatccagctgcgggcccagaagggctacgtgaggacccagatgtctggaaatgaggtgtccagagctgtgctgctgccccagagctgctag

SEQ ID NO: 125062 - DNA, 822 bp, Artificial Sequence
  derived and/or modified sequence
atgggcagcggctgggtgccctgggtggtggccctgctggtgaacctgacccggctggacagctccatgacccagggcacagacagcccagaagattttgtgatccaggccaaggctgactgctacttcaccaatggaacagagaaggtgcagtttgtggtgcgcttcatcttcaacctggaggagtatgtgcgctttgacagtgatgtgggcatgtttgtggccctgaccaagctgggccagccagatgctgagcagtggaacagccggctggacctgctggagaggagccggcaggccgtggatggagtgtgccgccacaactaccgcctgggcgcccccttcaccgtgggcaggaaggtgcagcctgaggtgacagtgtacccagagaggacccccctgctgcaccagcacaacctgctgcactgcagcgtgacaggcttctacccaggggacatcaagatcaagtggttcctgaatggccaggaggagcgggccggcgtgatgagcacaggccccatcagaaatggagactggaccttccagacagtggtgatgctggagatgaccccagagctgggccacgtgtacacctgcctggtggaccacagcagcctgctgagccccatctctgtggagtggagggcccagagcgagtacagctggaggaagatgctgtctggaattgctgccttcctgctgggcctcatcttcctgctggtgggcatcgtcatccagctgcgggcccagaagggctacgtgaggacccagatgtctggaaatgaggtgtccagagctgtgctgctgccccagagctgctag

SEQ ID NO: 125063 - DNA, 543 bp, Artificial Sequence
  derived and/or modified sequence
gaatctgacccgactggattcctccatgactcaaggcacagactctccagaagattttgtgattcaggcaaaggctgactgttacttcaccaacgggacagaaaaggtgcagtttgtggtcagattcatctttaacttggaggagtatgtacgtttcgacagtgatgtggggatgtttgtggcattgaccaagctggggcagccagatgctgagcagtggaacagccggctggatctcttggagaggagcagacaggccgtggatggggtctgtagacacaactacaggctgggcgcacccttcactgtggggagaaaagaggtgacagtgtacccagagaggaccccactcctgcaccagcataatctgctgcactgctctgtgacaggcttctatccaggggatatcaagatcaagtggttcctgaatgggcaggaggagagagctggggtcatgtccactggccctatcaggaatggagactggacctttcagactgtggtgatgctagaaatgactcctgaacttggacatgtctacac

SEQ ID NO: 125064 - DNA, 1372 bp, Artificial Sequence
  derived and/or modified sequence
gatttatactcttaatgggtactttctgactgaattttatgaactcattctgaagaggctgacgattttactgtctcatttttttcctttctccagaatgggttctgggtgggtcccctgggtggtggctctgctagtgaatctgacccgactggattcctccatgactcaaggcacagactctccagaagattttgtgattcaggcaaaggctgactgttacttcaccaacgggacagaaaaggtgcagtttgtggtcagattcatctttaacttggaggagtatgtacgtttcgacagtgatgtggggatgtttgtggcattgaccaagctggggcagccagatgctgagcagtggaacagccggctggatctcttggagaggagcagacaggccgtggatggggtctgtagacacaactacaggctgggcgcacccttcactgtggggagaaaagtgcaaccagaggtgacagtgtacccagagaggaccccactcctgcaccagcataatctgctgcactgctctgtgacaggcttctatccaggggatatcaagatcaagtggttcctgaatgggcaggaggagagagctggggtcatgtccactggccctatcaggaatggagactggacctttcagactgtggtgatgctagaaatgactcctgaacttggacatgtctacacctgccttgtcgatcactccagcctgctgagccctgtttctgtggagtggagagctcagtctgaatattcttggagaaagatgctgagtggcattgcagccttcctacttgggctaatcttccttctggtgggaatcgtcatccagctaagggctcagaaaggatatgtgaggacgcagatgtctggtaatgaggtctcaagagctgttctgctccctcagtcatgctaaggtcctcactgaagcttctctctctggagcctgaagtagtgatgagtagtctgggccctgggtgaggtaaaggacattcatgaggtcaatgttctgggaataactctcttccctgatccttggaggagcccgaactgattctggagctctgtgttctgagatcatgcatctcccacccatctgcccttctcccttctacgtgtacatcattaatccccattgccaagggcattgtccagaaactcccctgagaccttactccttccagccccaaatcatttacttttctgtggtccagccctactcctataagtcatgatctccaaagctttctgtcttccaactgcagtctccacagtcttcagaagacaaatgctcaggtagtcactgtttccttttcactgtttttaaaaaccttttattgtcaaataaaatggagatacaaaaaatgta

SEQ ID NO: 125065 - DNA, 1372 bp, Artificial Sequence
  derived and/or modified sequence
gatttatactcttaatgggtactttctgactgaattttatgagctcattctgaagaggctgacgattttactatctcatttttttcctttctccagaatgggttctgggtgggtcccctgggtggtggctctgctagtgaatctgacccgactggattcctccatgactcaaggcacagactctccagaagattttgtgattcaggcaaaggctgactgttacttcaccaacgggacagaaaaggtgcagtttgtggtcagattcatctttaacttggaggagtatgtacgtttcgacagtgatgtggggatgtttgtggcattgaccaagctggggcagccagatgctgagcagtggaacagccggctggatctcttggagaggagcagacaggccgtggatggggtctgtagacacaactacaggctgggcgcacccttcactgtggggagaaaagtgcaaccagaggtgacagtgtacccagagaggaccccactcctgcaccagcataatctgctgcactgctctgtgacaggcttctatccaggggatatcaagatcaagtggttcctgaatgggcaggaggagagagctggggtcatgtccactggccctatcaggaatggagactggacctttcagactgtggtgatgctagaaatgactcctgaacttggacatgtctacacctgccttgtcgatcactccagcctgctgagccctgtttctgtggagtggagagctcagtctgaatattcttggagaaagatgctgagtggcattgcagccttcctacttgggctaatcttccttctggtgggaatcgtcatccagctaagggctcagaaaggatatgtgaggacgcagatgtctggtaatgaggtctcaagagctgttctgctccctcagtcatgctaaggtcctcactgaagcttctctctctggagcctgaagtagtgatgagtagtctgggccctgggtgaggtaaaggacattcatgaggtcaatgttctgggaataactctcttccctgatccttggaggagcccgaactgattctggagctctgtgttctgagatcatgcatctcccacccatctgcccttctcccttctacgtgtacatcattaatccccattgccaagggcattgtccagaaactcccctgagaccttactccttccagccccaaatcatttacttttctgtggtccagccctactcctataagtcatgatctccaaagctttctgtcttccaactgcagtctccacagtcttcagaagacaaatgctcaggtagtcactgtttccttttcactgtttttaaaaaccttttattgtcaaataaaatggagatacaaaaaatgta

SEQ ID NO: 125066 - DNA, 543 bp, Artificial Sequence
  derived and/or modified sequence
gaatctgacccgactggattcctccatgactcaaggcacagactctccagaagactttgtgattcaggcaaaggctgactgttacttcaccaacgggacagaaaaggtgcagtttgtggtcagattcatctttaacttggaggagtatgtacgtttcgacagtgatgtggggatgtttgtggcattgaccaagctggggcagccagatgctgagcagtggaacagccggctggatctcttggagaggagcagacaggccgtggatggggtctgtagacacaactacaggctgggcgcacccttcactgtggggagaaaagaggtgacagtgtacccagagaggaccccactcctgcaccagcataatctgctgcactgctctgtgacaggcttctatccaggggatatcaagatcaagtggttcctgaatgggcaggaggagagagctggggtcatgtccactggccctatcaggaatggagactggacctttcagactgtggtgatgctagaaatgactcctgaacttggacatgtctacac

SEQ ID NO: 125067 - DNA, 1372 bp, Artificial Sequence
  derived and/or modified sequence
gatttatactcttaatgggtactttctgactgaattttatgagctcattctgaagaggctgacgattttactatctcatttttttcctttctccagaatgggttctgggtgggtcccctgggtggtggctctgctagtgaatctgacccgactggattcctccatgactcaaggcacagactctccagaagactttgtgattcaggcaaaggctgactgttacttcaccaacgggacagaaaaggtgcagtttgtggtcagattcatctttaacttggaggagtatgtacgtttcgacagtgatgtggggatgtttgtggcattgaccaagctggggcagccagatgctgagcagtggaacagccggctggatctcttggagaggagcagacaggccgtggatggggtctgtagacacaactacaggctgggcgcacccttcactgtggggagaaaagtgcaaccagaggtgacagtgtacccagagaggaccccactcctgcaccagcataatctgctgcactgctctgtgacaggcttctatccaggggatatcaagatcaagtggttcctgaatgggcaggaggagagagctggggtcatgtccactggccctatcaggaatggagactggacctttcagactgtggtgatgctagaaatgactcctgaacttggacatgtctacacctgccttgtcgatcactccagcctgctgagccctgtttctgtggagtggagagctcagtctgaatattcttggagaaagatgctgagtggcattgcagccttcctacttgggctaatcttccttctggtgggaatcgtcatccagctaagggctcagaaaggatatgtgaggacgcagatgtctggtaatgaggtctcaagagctgttctgctccctcagtcatgctaaggtcctcactgaagcttctctctctggagcctgaagtagtgatgagtagtctgggccctgggtgaggtaaaggacattcatgaggtcaatgttctgggaataactctcttccctgatccttggaggagcccgaactgattctggagctctgtgttctgagatcatgcatctcccacccatctgcccttctcccttctacgtgtacatcattaatccccattgccaagggcattgtccagaaactcccctgagaccttactccttccagtcccaaatcatttacttttctgtggtccagccctactcctataagtcatgatctccaaagctttctgtcttccaactgcagtctccacagtcttcagaagacaaatgctcaggtagtcactgtttccttttcactgtttttaaaaaccttttattgtcaaataaaatggagatacaaaaaatgta

SEQ ID NO: 125068 - DNA, 1372 bp, Artificial Sequence
  derived and/or modified sequence
gatttatactcttaatgggtactttctgactgaattttatgaactcattctgaagaggctgacgattttactgtctcatttttttcctttctccagaatgggttctgggtgggtcccctgggtggtggctctgctagtgaatctgacccgactggattcctccatgactcaaggcacagactctccagaagattttgtgattcaggcaaaggctgactgttacttcaccaacgggacagaaaaggtgcagtttgtggtcagattcatctttaacttggaggagtatgtacgtttcgacagtgatgtggggatgtttgtggcattgaccaagctggggcagccagatgctgagcagtggaacagccggctggatctcttggagaggagcagacaggccgtggatggggtctgtagacacaactacaggctgggcgcacccttcactgtggggagaaaagtgcaaccagaggtgacagtgtacccagagaggaccccactcctgcaccagcataatctgctgcactgctctgtgacaggcttctatccaggggatatcaagatcaagtggttcctgaatgggcaggaggagagagctggggtcatgtccactggccctatcaggaatggagactggacctttcagactgtggtgatgctagaaatgactcctgaacttggacatgtctacacctgccttgtcgatcactccagcctgctgagccctatttctgtggagtggagagctcagtctgaatattcttggagaaagatgctgagtggcattgcagccttcctacttgggctaatcttccttctggtgggaatcgtcatccagctaagggctcagaaaggatatgtgaggacgcagatgtctggtaatgaggtctcaagagctgttctgctccctcagtcatgctaaggtcctcactgaagcttctctctctggagcctgaagtagtgatgagtagtctgggccctgggtgaggtaaaggacattcatgaggtcaatgttctgggaataactctcttccctgatccttggaggagcccgaactgattctggagctctgtgttctgagatcatgcatctcccacccatctgcccttctcccttctacgtgtacatcattaatccccattgccaagggcattgtccagaaactcccctgagaccttactccttccagccccaaatcatttacttttctgtggtccagccctactcctataagtcatgatctccaaagctttctgtcttccaactgcagtctccacagtcttcagaagacaaatgctcaggtagtcactgtttccttttcactgtttttaaaaaccttttattgtcaaataaaatggagatacaaaaaatgta

SEQ ID NO: 125069 - DNA, 1372 bp, Artificial Sequence
  derived and/or modified sequence
gatttatactcttaatgggtactttctgactgaattttatgagctcattctgaagaggctgacgattttactatctcatttttttcctttctccagaatgggttctgggtgggtcccctgggtggtggctctgctagtgaatctgacccgactggattcctccatgactcaaggcacagactctccagaagattttgtgattcaggcaaaggctgactgttacttcaccaacgggacagaaaaggtgcagtttgtggtcagattcatctttaacttggaggagtatgtacgtttcgacagtgatgtggggatgtttgtggcattgaccaagctggggcagccagatgctgagcagtggaacagccggctggatctcttggagaggagcagacaggccgtggatggggtctgtagacacaactacaggctgggcgcacccttcactgtggggagaaaagtgcaaccagaggtgacagtgtacccagagaggaccccactcctgcaccagcataatctgctgcactgctctgtgacaggcttctatccaggggatatcaagatcaagtggttcctgaatgggcaggaggagagagctggggtcatgtccactggccctatcaggaatggagactggacctttcagactgtggtgatgctagaaatgactcctgaacttggacatgtctacacctgccttgtcgatcactccagcctgctgagccctgtttctgtggagtggagagctcagtctgaatattcttggagaaagatgctgagtggcattgcagccttcctacttgggctaatcttccttctggtgggaatcgtcatccagctaagggctcagaaaggatatgtgaggacgcagatgtctggtaatgaggtctcaagagctgttctgctccctcagtcatgctaaggtcctcactgaagcttctctctctggagcctgaaatagtgatgagtagtctgggccctgggtgaggtaaaggacattcatgaggtcaatgttctgggaataactctcttccctgatccttggaggagcccgaactgattctggagctctgtgttctgagatcatgcatctcccacccatctgcccttctcccttctacgtgtacatcattaatccccattgccaagggcattgtccagaaactcccctgagaccttactccttccagccccaaatcatttacttttctgtggtccagccctactcctataagtcatgatctccaaagctttctgtcttccaactgcagtctccacagtcttcagaagacaaatgctcaggtagtcactgtttccttttcactgtttttaaaaaccttttattgtcaaataaaatggagatacaaaaaatgta

SEQ ID NO: 125070 - DNA, 549 bp, Artificial Sequence
  derived and/or modified sequence
tgaaacctgacccggctggacagcagcatgacccagggcaccgactctcccgaagacttcgtgatacaggccaaggctgactgttatttcacaaacgggaccgaaaaagtccagtttgttgtgcgctttatcttcaacctggaggagtacgttcggtttgactcagacgtcggcatgttcgtcgctctaactaaactcggacagccggacgccgagcaatggaattccaggctggatttgctcgagaggtcaagacaggccgtggacggggtctgtaggcacaactaccggctgggagctccattcacagtaggacgaaaggaggtgacagtgtatccagaacgaacccctctgcttcaccagcacaatcttctgcactgctccgtgaccgggttctatcctggcgacatcaagatcaaatggtttttgaatgggcaggaggagagagcgggcgtgatgtctacgggccctatacgcaatggtgattggacttttcaaaccgttgtcatgctggaaatgactcctgaactgggtcacgtgtatacctag

SEQ ID NO: 125071 - DNA, 822 bp, Artificial Sequence
  derived and/or modified sequence
atgggcagcggctgggtgccctgggtggtggccctgctggtgaacctgacgaggctggactcctctatgacacagggaaccgactcaccagaagatttcgtaatccaggctaaagccgactgctatttcacaaacggaaccgaaaaagttcaatttgtagtgcgattcatctttaatctggaggaatacgtgagattcgacagtgacgtgggaatgttcgttgccctaaccaagctgggacagccggacgcagaacagtggaattctcgtcttgatctcctcgagaggtctcggcaagccgtggatggtgtgtgccggcacaattacaggttaggcgcccctttcacagtcggtaggaaggtgcagcctgaggtgacagtctatccagagcgaactcctctgctccatcaacacaacctgctgcattgctcagtgaccgggttctatcctggtgacattaaaattaagtggttcctgaatggacaggaggaaagagccggcgtgatgagcacaggccccataagaaacggcgattggacctttcagacagtcgtgatgttggagatgaccccagaactcggtcacgtctatacatgcctcgttgatcattccagcttactgtccccagtgagcgtcgaatggcgggctcagtcagaatacagctggcggaagatgctgtccggaatcgccgctttcttactcggcctgatttttctcctggtcggtattgtcatccagctgagggcacagaaggggtatgtcagaacccagatgtcgggcaatgaagtttctcgggccgtccttctgccccagtcatgctag

SEQ ID NO: 125072 - DNA, 822 bp, Artificial Sequence
  derived and/or modified sequence
atgggcagcggctgggtgccctgggtggtggccctgctggtgaacctgactagactcgattccagtatgacacaagggaccgacagtcccgaagactttgtgatccaagctaaagccgactgctacttcactaacgggacagaaaaagtacagtttgtggtgcggttcatctttaatctggaagagtacgtgagatttgacagcgacgtgggcatgttcgttgctctcacgaaacttggccaaccggacgcagaacagtggaactcccggctggatttgcttgaaaggagccggcaggcagtagatggagtctgccgccataactaccgtttaggagctccttttaccgtgggaagaaaagtgcagccggaagtgacagtctacccagaacggacacctctgctacatcagcacaatctgttacactgctccgtgaccggattctatcccggggacataaagataaaatggttcttgaacggtcaagaggagcgggccggagtgatgtcaacagggcccatcagaaacggtgactggacattccagaccgtggtgatgctcgaaatgacccccgaactggggcacgtgtacacctgtctggttgatcactcctcccttctgtcccctgtttctgtggagtggagggcacaaagtgagtatagctggagaaagatgctcagcggcatcgccgcattcctgctgggactgatcttcctactagtgggtatagtgatccagctcagagcacagaagggctatgtcaggacccagatgagcggaaacgaagtttccagggcagtgctgctacctcagtcttgctag

SEQ ID NO: 125073 - DNA, 549 bp, Artificial Sequence
  derived and/or modified sequence
tgaaacctgacccggctggacagcagcatgacccagggcaccgacagtcccgaggacttcgtaatacaggctaaggccgattgttatttcacaaacgggaccgagaaggtgcaattcgtagtcaggtttatttttaatctcgaggagtatgttagattcgattcagatgtcggaatgtttgtagccctcactaagctggggcaacctgacgccgagcaatggaatagccgacttgacctgctcgagaggagccgtcaggccgtggacggagtttgtagacataactacagactcggggcacctttcactgtggggcggaaggaggtgacagtttaccctgagagaacacccctgctacaccagcacaacctactgcattgctctgtcacaggattttatccaggcgatatcaagattaagtggtttttaaatggtcaggaggagagggccggtgtaatgtccactggtcctatccgtaatggagactggacattccaaacagtcgtaatgctggagatgaccccagagctaggccatgtatacacatag

SEQ ID NO: 125074 - DNA, 822 bp, Artificial Sequence
  derived and/or modified sequence
atgggcagcggctgggtgccctgggtggtggccctgctggtgaacctgaccagattagactctagcatgacccagggtacagacagtccagaggatttcgttatacaagccaaggccgattgctacttcactaacggcaccgaaaaagtacagttcgtggtgagattcatcttcaacttagaggaatacgtccgcttcgacagcgatgtgggtatgtttgtcgctcttacaaaactaggacagccggatgccgaacagtggaactctcgattggacttgctggaacggtcaagacaggcagtagatggagtgtgcaggcataattaccgtctgggcgcccccttcaccgtcggcaggaaagtgcagccagaggtgacagtgtatccagagaggactcctctgctgcatcagcacaatctcttgcattgttcggtgactggtttctacccaggagacataaaaatcaaatggttcctcaatggccaggaggagagggccggagttatgagtactggccctatccgcaacggcgactggaccttccagaccgtagtgatgcttgaaatgacgcctgaactagggcacgtgtacacttgtcttgtggatcatagttctctgttgagtccagtgagcgtggagtggagagctcaaagcgagtacagctggcgcaagatgctttcaggtatcgccgcgtttctcctggggctaatcttcctgcttgtaggcatcgtcatccaactgcgagctcagaagggttatgtgagaacgcagatgtctgggaacgaagtttccagggccgtcttactgccccagagctgctag

SEQ ID NO: 125075 - DNA, 549 bp, Artificial Sequence
  derived and/or modified sequence
tgaaacctgacccggctggacagcagcatgacccagggcaccgactccccggaggactttgttattcaggcaaaggccgactgctactttacaaatggtactgagaaggtgcagtttgtggtgagattcatttttaatttggaagagtatgttcgattcgatagcgacgttggcatgtttgttgcactgaccaaactgggccagccagatgccgaacagtggaactcgaggcttgacttgctggagcgcagtcgtcaggccgtggatggagtttgccgccacaactacagattgggcgcaccttttacagtagggcggaaggaggtgacggtttaccccgagagaactcccttgctgcaccagcataatcttcttcactgctccgttacgggcttttacccaggggatatcaagatcaaatggtttcttaatgggcaagaggagcgggctggcgtgatgagcactggcccaattcgtaacggcgattggacctttcagaccgtcgtgatgctcgagatgactccggaacttggacatgtgtacacttag

SEQ ID NO: 125076 - DNA, 549 bp, Artificial Sequence
  derived and/or modified sequence
tgaaacctgacccggctggacagcagcatgacccagggcaccgacagtccagaagactttgtgatacaggctaaagcggattgctattttactaatggcacagagaaagtgcaatttgtagtgagattcatttttaatttggaggaatatgttcggtttgatagcgacgttggaatgttcgtggctctaacaaaactcgggcagccagacgctgaacaatggaatagtagactagatctgttagaacggtcaaggcaggcggtagatggcgtgtgcaggcacaactaccgcctgggagctccatttactgtgggaaggaaggaggtgacagtataccccgagagaacgcctcttctacatcaacacaacctgctgcattgttcagtgactgggttttatcctggagacatcaagatcaaatggttcctcaatggtcaggaggagcgggctggcgtgatgagcaccggccctattcgcaatggggattggaccttccaaacagtggtaatgctcgagatgacacccgaactggggcacgtctacacctag

SEQ ID NO: 125077 - DNA, 549 bp, Artificial Sequence
  derived and/or modified sequence
tgaaacctgacccggctggacagcagcatgacccagggcaccgactcccctgaggacttcgtgatccaagcaaaggcggactgctacttcactaatggaaccgagaaggttcagttcgtggttaggtttattttcaacctggaggagtacgtccgcttcgatagtgatgttgggatgtttgttgctctaacaaagctgggacagccagacgcagagcagtggaatagcaggctcgacctgctggaaagatccagacaggctgtggacggtgtctgcaggcataactacagacttggagcccctttcacggtaggtagaaaggaagtgactgtataccccgaaaggactcccctgctgcaccagcataatctgctgcattgcagcgtcacgggcttttaccctggagatattaagatcaaatggttcctaaatggccaagaggagagagccggggtaatgagcacgggccccatcaggaacggagattggactttccagacagttgtaatgttggaaatgacaccagaactggggcatgtgtacacctag

SEQ ID NO: 125078 - DNA, 822 bp, Artificial Sequence
  derived and/or modified sequence
atgggcagcggctgggtgccctgggtggtggccctgctggtgaacctgactcgtttagattcaagtatgacacagggcacagattcccccgaggacttcgtgatacaggcaaaggccgactgctattttacaaacggaactgaaaaagtccagttcgtggtcaggtttatttttaatttggaggagtatgtcagatttgattcagacgttgggatgttcgtggcactcaccaaattgggccaacctgacgccgaacagtggaatagccgcctggacctgcttgaacgcagcagacaggccgtggatggagtttgcagacacaactataggctgggcgctccctttacagtaggaagaaaagtgcaaccagaggtaacggtttaccccgagaggactcctttgctccatcagcacaatctgctccattgcagtgtgaccggattctatccaggagatataaagattaaatggttcctaaatggacaggaggagcgagccggcgtcatgagcacaggtcctataagaaacggcgactggaccttccaaaccgtagtgatgctggaaatgacccctgagctgggacacgtgtacacctgccttgtggatcattcgagcctactctctcccatttcagttgagtggagagcccagtcggagtactcatggagaaaaatgctatctgggatcgccgccttcctgctgggactgattttcctgctcgtgggaattgtgatccaactccgggcccagaaagggtatgtgaggacccagatgtctggcaacgaggtgagccgggccgttcttctcccacagagttgctag

SEQ ID NO: 125079 - DNA, 822 bp, Artificial Sequence
  derived and/or modified sequence
atgggcagcggctgggtgccctgggtggtggccctgctggtgaacctgacaaggctcgattcttcaatgacacaaggcaccgatagccctgaggactttgtgatccaggccaaagctgattgttatttcacaaatggaactgaaaaagtgcaattcgtcgtcaggtttattttcaacctagaagaatatgttcgctttgattcggatgtagggatgttcgtagcgctgaccaaactcggacagccagatgcagagcagtggaacagcaggctggacctgctggagcggagtcgacaggcggtggacggcgtctgtagacacaactacagactgggcgccccattcaccgtcggtcgaaaagtgcagcccgaagtgaccgtctacccggagagaacaccccttctccaccaacataatctgctgcactgctctgttaccggattttatccaggagatatcaaaattaagtggtttcttaacggtcaggaggagcgcgccggggtgatgtccacaggtcctataagaaatggcgactggacatttcaaacagtggtaatgctggagatgacgcccgaactgggacacgtttacacgtgcctggtggaccacagctcacttctgtccccagtctctgtggagtggagagcccagtcagaatactcttggagaaagatgcttagcggcatcgcagcattcttgctggggctgatattccttctggtcgggattgtgatccaattgagggcacaaaaaggctatgtacgcactcaaatgtcaggcaacgaagttagcagagccgtgttactgccccagtcctgctag

SEQ ID NO: 125080 - DNA, 549 bp, Artificial Sequence
  derived and/or modified sequence
tgaaacctgacccggctggacagcagcatgacccagggcaccgacagtccagaggacttcgttattcaagccaaagctgattgttattttaccaacgggactgagaaggtccagttcgtggttaggttcatatttaacttggaggagtacgtaaggtttgacagcgacgtgggaatgtttgtggcgttgacaaagctcgggcagccggatgccgagcagtggaactcccggctggacttgctcgagaggtcccggcaggccgtggacggcgtttgtaggcataattataggctgggcgccccgttcaccgtaggccggaaagaggttacggtatatccggaaaggacgccattactgcatcagcataatctgctgcactgtagtgtgacaggattctaccccggcgacataaagatcaaatggttcttgaatgggcaggaggaaagggcaggcgtgatgagcacaggtcctattagaaacggcgactggactttccagaccgttgtgatgttggagatgacacccgagctcggacacgtctacacctag

SEQ ID NO: 125081 - DNA, 822 bp, Artificial Sequence
  derived and/or modified sequence
atgggcagcggctgggtgccctgggtggtggccctgctggtgaacttgacacgcctcgactctagcatgactcaggggactgatagtccggaagatttcgtgattcaggccaaagcggattgctacttcacgaatggtaccgagaaggtacaatttgtcgttcgcttcattttcaatcttgaggaatacgtgagatttgattccgacgtcggcatgtttgttgccctcacaaaactgggacaaccggatgcagagcagtggaatagtcgtctggacctccttgagaggagccggcaagccgtagatggggtatgcagacataattatagactgggtgcgcctttcactgtgggccgcaaggtgcaacccgaggttaccgtgtatccggagcggacccccctgctacaccagcacaatctgttacactgcagtgtcacaggtttctatcccggagacatcaagatcaaatggttcctgaacggccaggaagaacgggccggcgtgatgtccaccgggcccattaggaatggcgactggaccttccagaccgttgtgatgcttgaaatgacgcctgagttgggacacgtctacacgtgcctggtggaccactcctccctgttatcaccggtgagcgtcgaatggcgcgcccagagtgaatattcctggcgcaagatgcttagcggaattgccgctttcctcctggggctaatttttctcctagtcgggatcgtgatccaattgagagctcagaaaggctatgtgcgcacacagatgagtggaaacgaagtgtcccgcgccgtcctattgcctcagtcttgctag

SEQ ID NO: 125082 - DNA, 549 bp, Artificial Sequence
  derived and/or modified sequence
taaaacctcacaaggctggacagcagcatgacgcagggtacagattccccagaggacttcgtcatccaagccaaggctgattgctacttcaccaacgggactgagaaggtgcagttcgtagtccgctttatctttaatttggaggaatacgtgagattcgattcagatgtgggaatgtttgtcgccctcacaaagctgggacagccggacgccgagcagtggaactctcgtctcgacctgttagagaggtctaggcaagccgtcgatggtgtgtgtcggcataattatcggctcggagctcccttcacagtgggccgaaaagaagtgacagtatatcctgaacgtaccccactgttacaccagcataacctgcttcactgttcagtcacagggttctacccaggggatattaagattaaatggtttcttaacgggcaggaagagagggctggcgtgatgtccaccggtccaattcgaaacggagactggacattccagactgtggtgatgttagaaatgacccctgaactgggccacgtctatacatag

SEQ ID NO: 125083 - DNA, 822 bp, Artificial Sequence
  derived and/or modified sequence
atggggtccggttgggtgccctgggtcgttgccctgttggttaacctgacccgtctggacagttcgatgactcaggggactgattccccagaagattttgtcatacaggcaaaagccgactgttacttcactaacggtacagaaaaggtacagttcgtggtccgatttattttcaatttagaggaatatgttcgttttgatagcgacgtaggaatgttcgtggcgttgacaaagctggggcagccggacgctgagcaatggaatagccggctggacctgctggaacgttctcgccaagccgtcgacggggtgtgtagacacaattataggcttggggcacccttcacggtgggcaggaaagtgcagccagaagtgaccgtttatcctgagcggacacctcttctgcatcagcacaacctgctgcactgttccgtgacgggattttatcctggtgacatcaaaattaaatggttcctaaacgggcaagaggagcgcgcaggagtaatgagcaccggcccaattcgaaatggtgactggacatttcagaccgttgtcatgctcgaaatgactccagagctaggccacgtctacacctgtttagtcgaccatagcagtttgctaagtcccgtgtcggtggagtggcgcgctcagtccgagtactcatggcggaagatgttgagtggtatagccgctttcttgctcgggcttatttttctattagtagggatcgtgatacagctgagggcccaaaaggggtatgtccgaactcagatgtctggcaatgaagttagcagagccgttctgctgccccaaagctgctag

SEQ ID NO: 125084 - DNA, 822 bp, Artificial Sequence
  derived and/or modified sequence
atgggcagtggctgggtgccgtgggtggttgccctattggtgaacttaacgcggctggacagcagcatgacccagggtaccgacagtcctgaagacttcgttattcaggccaaggctgattgttacttcactaatggaaccgagaaggtgcagtttgtggttcggtttatattcaacctcgaggagtacgtgagattcgactcggacgttgggatgtttgtggctctaactaaactgggacagccagacgctgaacagtggaatagtcgactggatctcctggagcgctccaggcaggccgtggatggcgtgtgcagacacaactaccgacttggtgctccatttactgttggcagaaaggtacagccggaggtgacagtctatcccgagaggactcccctgctccaccaacataatctgctgcactgttcagtcacaggattttaccctggggacattaagattaagtggttcttaaacggacaagaggagcgtgcgggtgtgatgagcactggcccaatccgaaacggagactggaccttccagaccgtggtgatgttggagatgacgcctgagctcggacacgtgtacacatgcttagttgatcattcctccctgctctcacccgtctccgtggagtggcgcgctcagtctgagtactcttggcggaagatgttgtctggcatagctgccttcttgctgggcctcatctttctgctggtggggatcgttattcagctcagggctcagaaaggatatgtgaggactcaaatgagcggtaatgaggtctcccgcgcagtcctactgcctcagagctgttag

SEQ ID NO: 125085 - DNA, 549 bp, Artificial Sequence
  derived and/or modified sequence
taaaatctgacaagactggattcaagcatgacacagggcactgactcccccgaggactttgttatccaggctaaagcagattgttattttacgaatggaacagaaaaagttcagttcgtggtcaggtttatattcaatctggaagagtatgtgagatttgattccgacgtgggcatgttcgttgctctgaccaaactggggcagcccgacgccgagcagtggaattccaggctggatttgttggagcggtcccgccaggccgtcgatggagtgtgtcgacataattatagactgggggctccctttactgtcggacggaaggaagtgacagtctacccagaaaggacacccctgcttcaccagcacaatctgctgcattgctctgtgacaggattttaccccggagacataaagattaaatggtttctaaacggccaagaggaaagggctggcgtgatgagcacgggacctatccgcaatggagactggacattccagacagttgttatgctggagatgactcccgagctgggacacgtgtatacatag

SEQ ID NO: 125086 - DNA, 822 bp, Artificial Sequence
  derived and/or modified sequence
atgggatcagggtgggtaccttgggtcgtggcgttactggtcaatctgaccaggctagatagcagcatgacacaggggaccgacagccccgaagacttcgtgatacaggccaaagctgattgctattttactaacggcacagagaaagtgcagttcgtcgtgcgattcatatttaatctggaagagtatgtgcgattcgattctgacgtcggaatgtttgtcgccctcaccaaactcgggcagcccgatgctgagcaatggaactcaaggctggaccttctcgagcggagtcgccaggctgttgacggcgtatgcagacataactacagactcggtgcaccctttactgtcgggcgtaaagtgcaacccgaggtgaccgtatatccagaaaggacaccactgctgcaccaacacaatttactgcactgttcagtaactggtttctatcccggtgatataaaaatcaagtggtttctcaacggccaggaagagagggctggtgtcatgagcactggccctattagaaacggcgattggacatttcagaccgtcgtcatgctggaaatgactcctgagttagggcacgtatatacttgcctggtggatcactcgagcctattgtcccccgtgtctgtcgagtggcgggctcagtccgagtatagttggagaaaaatgctgtccggaatagctgcttttctgctcggtctcatatttctgctggtgggcatcgtgatccaattacgcgcacagaagggatacgtgaggacccaaatgtccggcaatgaggtgagccgggctgtactgctgccccagtcgtgttag

SEQ ID NO: 125087 - DNA, 549 bp, Artificial Sequence
  derived and/or modified sequence
tgaaacctgactcgactggatagttctatgactcaggggaccgacagccctgaggacttcgtcattcaagccaaagcagattgctatttcacgaatggcaccgagaaggtccagttcgtggtgcggttcatttttaacctggaagagtatgtgcgatttgactctgacgtggggatgtttgttgccttaactaaactgggacagccagacgccgaacagtggaattcaaggcttgatttgctggagaggagcaggcaggctgtggatggcgtctgccgccataactaccggctcggagcacctttcaccgttggccgtaaggaggtgaccgtctatcctgagcggacacctcttctgcaccagcacaacctcctgcactgtagtgtgacaggcttctaccctggagacatcaagataaagtggtttctcaatggtcaggaggaacgcgctggggtcatgtccaccggcccaattcgcaatggggattggaccttccagaccgtggttatgttagaaatgacacccgaattaggccacgtgtacacctag

SEQ ID NO: 125088 - DNA, 549 bp, Artificial Sequence
  derived and/or modified sequence
tgaaacctgaccaggctcgactcttcaatgacccaggggactgactccccagaggatttcgtgatccaagccaaagcggactgctactttacaaatgggacggagaaggttcagtttgtagtcaggttcatcttcaatcttgaggagtacgtgagatttgatagcgatgtgggaatgtttgttgcactcacgaagttaggtcagcctgacgcggaacagtggaattctcgcctcgatttactcgagagatcccgacaagccgtcgatggcgtgtgcaggcacaactatagactaggcgcaccctttaccgtgggtcggaaagaggtaactgtgtatcccgagcgcactcctctgctgcaccagcacaatctgcttcattgctccgtgaccggattctaccccggagacatcaagatcaagtggttcttgaacggccaggaagagagggccggagtcatgtccaccggcccaatcagaaacggcgactggacctttcagacagtggtgatgctagaaatgactcccgaattaggtcacgtctacacatag

SEQ ID NO: 125089 - DNA, 549 bp, Artificial Sequence
  derived and/or modified sequence
tgaaacctgacacggttagattcctctatgacccagggcactgacagccccgaagatttcgtgatccaggctaaggccgactgttatttcacaaatgggactgaaaaggtgcagttcgtggttcgcttcatatttaaccttgaggaatacgtgagattcgactctgatgttggtatgtttgtagccctaaccaagctgggacagcctgacgcggagcagtggaatagccggctggatctgctggagagatctaggcaggccgtcgatggcgtatgccgtcacaattatcgtctaggggcaccctttaccgtcgggaggaaagaggtaactgtttatcccgaacgtaccccgctgttacatcagcacaatctactgcattgcagcgtgaccggcttctacccgggagatataaaaattaagtggtttttgaatggtcaggaggaacgggctggagttatgtctacaggcccaattcgcaacggcgactggacctttcagacagttgtgatgttagaaatgactccggaattgggacacgtttatacatag

SEQ ID NO: 125090 - DNA, 822 bp, Artificial Sequence
  derived and/or modified sequence
atgggtagcgggtgggtaccttgggtggtagctttgctagtgaatctgacccggctggatagctccatgactcaagggaccgacagtcctgaagacttcgtgatacaggccaaggcggactgttatttcactaacggaactgaaaaggtgcaattcgtggtgagattcatctttaacctggaggaatatgtccggtttgattctgacgtaggtatgttcgtcgctctgacaaaactgggacagccagatgccgaacagtggaacagtcgcctggatcttctagagcgctcaagacaagccgtagacggagtctgccgccacaattatagactcggggctccatttactgttggacggaaggtacaacctgaagtgacggtgtatccggagcgaactccgctgctgcaccagcacaatctgcttcactgcagcgtgactggtttctatcccggtgacattaagatcaagtggttcctgaatgggcaagaagagcgtgcgggagtgatgagcacaggtccaattcgaaacggcgattggacatttcagactgtggtgatgttggagatgacccccgagctgggtcatgtttacacgtgcctcgtggaccatagctccctgctctcacctattagcgtggagtggagggctcaatccgagtacagctggaggaagatgctgagcggcatcgcagcattcttactgggattgatattcctgctggtgggcatcgtgatacagctccgcgctcagaaaggctacgtgagaactcaaatgagtggaaacgaggtgagtagggctgtactgctgcctcaatcctgttag

SEQ ID NO: 125091 - DNA, 822 bp, Artificial Sequence
  derived and/or modified sequence
atgggaagcgggtgggtgccctgggtggtggcccttctagttaatttgacccgcctggatagtagcatgactcaggggacagatagccccgaggatttcgtgatacaggctaaagcagactgttacttcaccaatggaactgaaaaggtccagttcgtggtgaggtttattttcaatctcgaagaatatgtccgcttcgactctgatgtcggcatgttcgtcgctttgaccaagctggggcaacccgacgccgaacaatggaattctagactcgacctgctggaacgcagtcgccaagccgttgacggtgtttgccgccataactatcgcttgggtgcccctttcaccgtgggacgcaaggttcaacctgaagttacagtgtatccggagcggacgccgttactgcaccagcacaacttgctccactgctccgttactgggttttaccccggtgatattaagatcaaatggttcctgaacggtcaagaagaacgcgctggggtcatgagcactggacccattagaaatggagactggacattccagactgtggtgatgttggaaatgaccccagaattggggcacgtttacacctgtttggtggatcattcttccctcctctcccctgtctccgtcgaatggcgggcacagtcagagtactcctggcgtaagatgctcagcggaatcgccgctttcctcttggggctcatattcctcctagtaggaatcgtgatacagctaagggcccagaaagggtacgtgcggactcaaatgtcagggaacgaagtcagcagggccgtgctcttgccccagagttgctag

SEQ ID NO: 125092 - DNA, 549 bp, Artificial Sequence
  derived and/or modified sequence
taaaatcttactagactggacagctccatgactcagggaacagatagtcctgaagatttcgtgattcaagcaaaggcagattgctactttaccaatggtacagaaaaggtccagttcgtcgtacgtttcatctttaaccttgaagagtatgtacggtttgactccgatgtcgggatgttcgtcgccttaacaaaactgggacaaccagatgcagagcaatggaactccagactggacttactcgagcgtagcagacaagcagtcgatggggtttgtcgccacaattacaggctcggtgctcccttcacagtcgggaggaaggaagtaaccgtctatccggaaagaacacctctgctgcaccaacataatttactacactgctccgtgactggattctaccctggagatattaagatcaagtggtttttgaatggtcaggaggagagagcaggagttatgagcacgggccctattaggaacggcgattggacattccagacagttgtgatgctggagatgactccggaactggggcatgtatacacatag

SEQ ID NO: 125093 - DNA, 822 bp, Artificial Sequence
  derived and/or modified sequence
atgggctctggctgggtcccctgggtggtggctttactggtcaatctaacaagactcgatagctccatgactcagggcaccgattccccagaagacttcgtgatccaggcaaaagcagactgctattttacaaacggcacggaaaaagtccagtttgttgtccggtttatatttaatttagaggagtatgttaggttcgattccgacgtcggtatgtttgtagcattgactaagcttggtcagcctgacgccgaacagtggaactcacggcttgacctgctggagcgctctcggcaagctgtggacggtgtgtgtcgccacaactatcgcctgggagcaccattcacagtcgggagaaaagtacaaccggaggtcacggtgtaccccgagagaacacctcttctccatcagcacaacttactacactgtagtgttactggcttttaccctggagatatcaagatcaagtggtttttgaacgggcaggaggagagagccggtgttatgtccaccgggccaatccggaacggagattggaccttccagacagtggtgatgcttgagatgacacccgaactggggcacgtgtacacatgtctagtagatcatagctcgctcttgtccccagtatctgtagagtggcgggctcagagtgaatatagttggaggaagatgctgtcaggcatcgctgccttcttgttgggtttgattttccttctggtgggaatcgtgatccagctgcgagcccaaaagggctatgttcgtacgcagatgagcggcaacgaagtgagtcgcgctgtgctcctcccacagagctgctag

SEQ ID NO: 125094 - DNA, 1388 bp, Artificial Sequence
  derived and/or modified sequence
gatttatactcttaatgggtactttctgactgaattttatgagctcattctgaagaggctgacgattttactatctcatttttttcctttctccagaatgggttctgggtgggtcccctgggtggtggctctgctagtgaatctgacccgactggattcctccatgactcaaggcacagactctccagaagattttgtgattcaggcaaaggctgactgttacttcaccaacgggacagaaaaggtgcagtttgtggtcagattcatctttaacttggaggagtatgtacgtttcgacagtgatgtggggatgtttgtggcattgaccaagctggggcagccagatgctgagcagtggaacagccggctggatctcttggagaggagcagacaggccgtggatggggtctgtagacacaactacaggctgggcgcacccttcactgtggggagaaaagtgcaaccagaggtgacagtgtacccagagaggaccccactcctgcaccagcataatctgctgcactgctctgtgacaggcttctatccaggggatatcaagatcaagtggttcctgaatgggcaggaggagagagctggggtcatgtccactggccctatcaggaatggagactggacctttcagactgtggtgatgctagaaatgactcctgaacttggacatgtctacacctgccttgtcgatcactccagcctgctgagccctgtttctgtggagtggagagctcagtctgaatattcttggagaaagatgctgagtggcattgcagccttcctacttgggctaatcttccttctggtgggaatcgtcatccagctaagggctcagaaaggatatgtgaggacgcagatgtctggtaatgaggtctcaagagctgttctgctccctcagtcatgctaaggtcctcactgaagcttctctctctggagcctgaagtagtgatgagtagtctgggccctgggtgaggtaaaggacattcatgaggtcaatgttctgggaataactctcttccctgatccttggaggagcccgaactgattctggagctctgtgttctgagatcatgcatctcccacccatctgcccttctcccttctacgtgtacatcattaatccccattgccaagggcattgtccagaaactcccctgagaccttactccttccagccccaaatcatttacttttctgtggtccagccctactcctataagtcatgatctccaaagctttctgtcttccaactgcagtctccacagtcttcagaagacaaatgctcaggtagtcactgtttccttttcactgtttttaaaaaccttttattgtcaaataaaatggagatacaaaaaatgtaaaaaaaaaaaaaaaaa

SEQ ID NO: 125095 - protein, 258 aa, Artificial Sequence
  derived and/or modified sequence
MMVLQVSAAPRTVALTALLMVLLTSVVQGRATPENYVYQLRQECYAFNGTQRFLERYIYNREEFVRFDSDVGEFRAVTELGRPDEDYWNSQKDLLEEKRAVPDRVCRHNYELDEAVTLQRRVQPKVNVSPSKKGPLQHHNLLVCHVTDFYPGSIQVRWFLNGQEETAGVVSTNLIRNGDWTFQILVMLEMTPQQGDVYICQVEHTSLDSPVTVEWKAQSDSARSKTLTGAGGFVLGLIICGVGIFMHRRSKKVQRGSA

SEQ ID NO: 125096 - protein, 228 aa, Artificial Sequence
  derived and/or modified sequence
MMVLQVSAAPRTVALTALLMVLLTSVVQGRATPENYLFQGRQECYAFNGTQRFLERYIYNREELVRFDSDVGEFRAVTELGRPEAEYWNSQKDILEEERAVPDRMCRHNYELGGPMTLQRRGSIQVRWFLNGQEETAGVVSTNLIRNGDWTFQILVMLEMTPQQGDVYTCQVEHTSLDSPVTVEWKAQSDSARSKTLTGAGGFVLGLIICGVGIFMHRRSKKVQRGSA

SEQ ID NO: 125097 - protein, 258 aa, Artificial Sequence
  derived and/or modified sequence
MMVLQVSAAPRTVALTALLMVLLTSVVQGRATPENYLFQGRQECYAFNGTQRFLERYIYNREELVRFDSDVGEFRAVTELGRPEAEYWNSQKDILEEERAVPDRMCRHNYELGGPMTLQRRVQPRVNVSPSKKGPLQHHNLLVCHVTDFYPGSIQVRWFLNGQEETAGVVSTNLIRNGDWTFQILVMLEMTPQQGDVYTCQVEHTSLDSPVTVEWKAQSDSARSKTLTGAGGFVLGLIICGVGIFMHRRSKKVQRGSA

SEQ ID NO: 125098 - protein, 229 aa, Artificial Sequence
  derived and/or modified sequence
KQAWRGSATRLGPQNSGRQECYAFNGTQRFLERYIYNREELVRFDSDVGEFRAVTELGRPEAEYWNSQKDILEEERAVPDRMCRHNYELGGPMTLQRRVQPRVNVSPSKKGPLQHHNLLVCHVTDFYPGSIQVRWFLNGQEETAGVVSTNLIRNGDWTFQILVMLEMTPQQGDVYTCQVEHTSLDSPVTVEWKAQSDSARSKTLTGAGGFVLGLIICGVGIFMHRRSKK

SEQ ID NO: 125099 - protein, 228 aa, Artificial Sequence
  derived and/or modified sequence
MMVLQVSAAPRTVALTALLMVLLTSVVQGRATPENYLFQGRQECYAFNGTQRFLERYIYNREEFARFDSDVGEFRAVTELGRPAAEYWNSQKDILEEKRAVPDRMCRHNYELGGPMTLQRRGSIQVRWFLNGQEETAGVVSTNLIRNGDWTFQILVMLEMTPQQGDVYTCQVEHTSLDSPVTVEWKAQSDSARSKTLTGAGGFVLGLIICGVGIFMHRRSKKVQRGSA

SEQ ID NO: 125100 - protein, 228 aa, Artificial Sequence
  derived and/or modified sequence
MMVLQVSAAPRTVALTALLMVLLTSVVQGRATPENYLFQGRQECYAFNGTQRFLERYIYNREEFVRFDSDVGEFRAVTELGRPDEEYWNSQKDILEEKRAVPDRMCRHNYELGGPMTLQRRGSIQVRWFLNGQEETAGVVSTNLIRNGDWTFQILVMLEMTPQQGDVYTCQVEHTSMDSPVTVEWKAQSDSARSKTLTGAGGFVLGLIICGVGIFMHRRSKKVQRGSA

SEQ ID NO: 125101 - protein, 235 aa, Artificial Sequence
  derived and/or modified sequence
  misc_feature (1)..(1): Xaa can be any naturally occurring amino acid
XNYLFQGRQECYAFNGTQRFLERYIYNREEFVRFDSDVGEFRAVTELGRPDEEYWNSQKDILEEKRAVPDRMCRHNYELGGPMTLQRRVQPRVNVSPSKKGPLQHHNLLVCHVTDFYPGSIQVRWFLNGQEETAGVVSTNLIRNGDWTFQILVMLEMTPQQGDVYTCQVEHTSMDSPVTVEWKAQSDSARSKTLTGAGGFVLGLIICGVGIFMHRRSKKGEKACRFNEDLHKQGS

SEQ ID NO: 125102 - protein, 258 aa, Artificial Sequence
  derived and/or modified sequence
MMVLQVSAAPRTVALTALLMVLLTSVVQGRATPENYLFQGRQECYAFNGTQRFLERYIYNREEFVRFDSDVGEFRAVTELGRPDEEYWNSQKDILEEKRAVPDRMCRHNYELGGPMTLQRRVQPRVNVSPSKKGPLQHHNLLVCHVTDFYPGSIQVRWFLNGQEETAGVVSTNLIRNGDWTFQILVMLEMTPQQGDVYTCQVEHTSMDSPVTVEWKAQSDSARSKTLTGAGGFVLGLIICGVGIFMHRRSKKVQRGSA

SEQ ID NO: 125103 - protein, 229 aa, Artificial Sequence
  derived and/or modified sequence
KQAWRGSATRLGPQNSGRQECYAFNGTQRFLERYIYNREEFVRFDSDVGEFRAVTELGRPDEEYWNSQKDILEEERAVPDRMCRHNYELGGPMTLQRRVQPRVNVSPSKKGPLQHHNLLVCHVTDFYPGSIQVRWFLNGQEETAGVVSTNLIRNGDWTFQILVMLEMTPQQGDVYTCQVEHTSLDSPVTVEWKAQSDSARSKTLTGAGGFVLGLIICGVGIFMHRRSKK

SEQ ID NO: 125104 - protein, 258 aa, Artificial Sequence
  derived and/or modified sequence
MMVLQVSAAPRTVALTALLMVLLTSVVQGRATPENYLFQGRQECYAFNGTQRFLERYIYNREEFVRFDSDVGEFRAVTELGRPDEEYWNSQKDILEEERAVPDRMCRHNYELGGPMTLQRRVQPRVNVSPSKKGPLQHHNLLVCHVTDFYPGSIQVRWFLNGQEETAGVVSTNLIRNGDWTFQILVMLEMTPQQGDVYTCQVEHTSLDSPVTVEWKAQSDSARSKTLTGAGGFVLGLIICGVGIFMHRRSKKVQRGSA

SEQ ID NO: 125105 - protein, 235 aa, Artificial Sequence
  derived and/or modified sequence
  misc_feature (1)..(1): Xaa can be any naturally occurring amino acid
XNYLFQGRQECYAFNGTQRFLERYIYNREEFARFDSDVGEFRAVTELGRPAAEYWNSQKDILEEKRAVPDRMCRHNYELGGPMTLQRRVQPRVNVSPSKKGPLQHHNLLVCHVTDFYPGSIQVRWFLNGQEETAGVVSTNLIRNGDWTFQILVMLEMTPQQGDVYTCQVEHTSLDSPVTVEWKAQSDSARSKTLTGAGGFVLGLIICGVGIFMHRRSKKGEKACRFNEDLHKQGS

SEQ ID NO: 125106 - protein, 229 aa, Artificial Sequence
  derived and/or modified sequence
KQAWRGSATRLGPQNSGRQECYAFNGTQRFLERYIYNREEFARFDSDVGEFRAVTELGRPAAEYWNSQKDILEEKRAVPDRMCRHNYELGGPMTLQRRVQPRVNVSPSKKGPLQHHNLLVCHVTDFYPGSIQVRWFLNGQEETAGVVSTNLIRNGDWTFQILVMLEMTPQQGDVYTCQVEHTSLDSPVTVEWKAQSDSARSKTLTGAGGFVLGLIICGVGIFMHRRSKK

SEQ ID NO: 125107 - protein, 258 aa, Artificial Sequence
  derived and/or modified sequence
MMVLQVSAAPRTVALTALLMVLLTSVVQGRATPENYLFQGRQECYAFNGTQRFLERYIYNREEFARFDSDVGEFRAVTELGRPAAEYWNSQKDILEEKRAVPDRMCRHNYELGGPMTLQRRVQPRVNVSPSKKGPLQHHNLLVCHVTDFYPGSIQVRWFLNGQEETAGVVSTNLIRNGDWTFQILVMLEMTPQQGDVYTCQVEHTSLDSPVTVEWKAQSDSARSKTLTGAGGFVLGLIICGVGIFMHRRSKKVQRGSA

SEQ ID NO: 125108 - protein, 82 aa, Artificial Sequence
  derived and/or modified sequence
MTPQQGDVYTCQVEHTSLDSPVTVEWKAQSDSARSKTLTGAGGRAGAHHLWSGHLHAQEEQESSTRICINRVPELTEKTIVP

SEQ ID NO: 125109 - protein, 235 aa, Artificial Sequence
  derived and/or modified sequence
  misc_feature (1)..(1): Xaa can be any naturally occurring amino acid
XNYLFQGRQECYAFNGTQRFLERYIYNREELVRFDSDVGEFRAVTELGRPEAEYWNSQKDILEEERAVPDRMCRHNYELGGPMTLQRRVQPRVNVSPSKKGPLQHHNLLVCHVTDFYPGSIQVRWFLNGQEETAGVVSTNLIRNGDWTFQILVMLEMTPQQGDVYTCQVEHTSLDSPVTVEWKAQSDSARSKTLTGAGGFVLGLIICGVGIFMHRRSKKGEKACRFNEDLHKQGS

SEQ ID NO: 125110 - protein, 235 aa, Artificial Sequence
  derived and/or modified sequence
  misc_feature (1)..(1): Xaa can be any naturally occurring amino acid
XNYVYQLRQECYAFNGTQRFLERYIYNREEFVRFDSDVGEFRAVTELGRPDEDYWNSQKDLLEEKRAVPDRVCRHNYELDEAVTLQRRVQPKVNVSPSKKGPLQHHNLLVCHVTDFYPGSIQVRWFLNGQEETAGVVSTNLIRNGDWTFQILVMLEMTPQQGDVYICQVEHTSLDSPVTVEWKAQSDSARSKTLTGAGGFVLGLIICGVGIFMHRRSKKGEKACKFNEDLHKQGS

SEQ ID NO: 125111 - protein, 229 aa, Artificial Sequence
  derived and/or modified sequence
KQAWRGSATRLGPQNSGRQECYAFNGTQRFLERYIYNREEFVRFDSDVGEFRAVTELGRPDEEYWNSQKDILEEKRAVPDRMCRHNYELGGPMTLQRRVQPRVNVSPSKKGPLQHHNLLVCHVTDFYPGSIQVRWFLNGQEETAGVVSTNLIRNGDWTFQILVMLEMTPQQGDVYTCQVEHTSMDSPVTVEWKAQSDSARSKTLTGAGGFVLGLIICGVGIFMHRRSKK

SEQ ID NO: 125112 - protein, 228 aa, Artificial Sequence
  derived and/or modified sequence
MMVLQVSAAPRTVALTALLMVLLTSVVQGRATPENYVYQLRQECYAFNGTQRFLERYIYNREEFVRFDSDVGEFRAVTELGRPDEDYWNSQKDLLEEKRAVPDRVCRHNYELDEAVTLQRRGSIQVRWFLNGQEETAGVVSTNLIRNGDWTFQILVMLEMTPQQGDVYICQVEHTSLDSPVTVEWKAQSDSARSKTLTGAGGFVLGLIICGVGIFMHRRSKKVQRGSA

SEQ ID NO: 125113 - protein, 235 aa, Artificial Sequence
  derived and/or modified sequence
  misc_feature (1)..(1): Xaa can be any naturally occurring amino acid
XNYLFQGRQECYAFNGTQRFLERYIYNREEFVRFDSDVGEFRAVTELGRPDEEYWNSQKDILEEERAVPDRMCRHNYELGGPMTLQRRVQPRVNVSPSKKGPLQHHNLLVCHVTDFYPGSIQVRWFLNGQEETAGVVSTNLIRNGDWTFQILVMLEMTPQQGDVYTCQVEHTSLDSPVTVEWKAQSDSARSKTLTGAGGFVLGLIICGVGIFMHRRSKKGEKACRFNEDLHKQGS

SEQ ID NO: 125114 - protein, 228 aa, Artificial Sequence
  derived and/or modified sequence
MMVLQVSAAPRTVALTALLMVLLTSVVQGRATPENYLFQGRQECYAFNGTQRFLERYIYNREEFVRFDSDVGEFRAVTELGRPDEEYWNSQKDILEEERAVPDRMCRHNYELGGPMTLQRRGSIQVRWFLNGQEETAGVVSTNLIRNGDWTFQILVMLEMTPQQGDVYTCQVEHTSLDSPVTVEWKAQSDSARSKTLTGAGGFVLGLIICGVGIFMHRRSKKVQRGSA

SEQ ID NO: 125115 - protein, 229 aa, Artificial Sequence
  derived and/or modified sequence
KQAWRGSATRLGPQNSLRQECYAFNGTQRFLERYIYNREEFVRFDSDVGEFRAVTELGRPDEDYWNSQKDLLEEKRAVPDRVCRHNYELDEAVTLQRRVQPKVNVSPSKKGPLQHHNLLVCHVTDFYPGSIQVRWFLNGQEETAGVVSTNLIRNGDWTFQILVMLEMTPQQGDVYICQVEHTSLDSPVTVEWKAQSDSARSKTLTGAGGFVLGLIICGVGIFMHRRSKK

SEQ ID NO: 125116 - protein, 123 aa, Artificial Sequence
  derived and/or modified sequence
MMVLQVSAAPRTVALTALLMVLLTSVVQGRATPENYLFQGRQECYAFNGTQRFLERYIYNREEFARFDSDVGEFRAVTELGRPAAEYWNSQKDILEEKRAVPDRMCRHNYELGGPMTLQRRGE

SEQ ID NO: 125117 - protein, 123 aa, Artificial Sequence
  derived and/or modified sequence
MMVLQVSAAPRTVALTALLMVLLTSVVQGRATPENYLFQGRQECYAFNGTQRFLERYIYNREELVRFDSDVGEFRAVTELGRPEAEYWNSQKDILEEERAVPDRMCRHNYELGGPMTLQRRGE

SEQ ID NO: 125118 - protein, 123 aa, Artificial Sequence
  derived and/or modified sequence
MMVLQVSAAPRTVALTALLMVLLTSVVQGRATPENYLFQGRQECYAFNGTQRFLERYIYNREEFVRFDSDVGEFRAVTELGRPDEEYWNSQKDILEEKRAVPDRMCRHNYELGGPMTLQRRGE

SEQ ID NO: 125119 - protein, 123 aa, Artificial Sequence
  derived and/or modified sequence
MMVLQVSAAPRTVALTALLMVLLTSVVQGRATPENYLFQGRQECYAFNGTQRFLERYIYNREEFVRFDSDVGEFRAVTELGRPDEEYWNSQKDILEEERAVPDRMCRHNYELGGPMTLQRRGE

SEQ ID NO: 125120 - protein, 249 aa, Artificial Sequence
  derived and/or modified sequence
MVLLTSVVQGRATPENYVYQLRQECYAFNGTQRFLERYIYNREEFVRFDSDVGEFRAVTELGRPDEDYWNSQKDLLEEKRAVPDRVCRHNYELDEAVTLQRRVQPKVNVSPSKKGPLQHHNLLVCHVTDFYPGSIQVRWFLNGQEETAGVVSTNLIRNGDWTFQILVMLEMTPQQGDVYICQVEHTSLDSPVTVEWKAQSDSARSKTLTGAGGFVLGLIICGVGIFMHRRSKKGEKACKFNEDLHKQGS

SEQ ID NO: 125121 - protein, 126 aa, Artificial Sequence
  derived and/or modified sequence
MMVLQVSAAPRTVALTALLMVLLTSVVQGRATPENYVYQLRQECYAFNGTQRFLERYIYNREEFVRFDSDVGEFRAVTELGRPDEDYWNSQKDLLEEKRAVPDRVCRHNYELDEAVTLQRRERGKK

SEQ ID NO: 125122 - protein, 82 aa, Artificial Sequence
  derived and/or modified sequence
MTPQQGDVYICQVEHTSLDSPVTVEWKAQSDSARSKTLTGAGGRAGAHHLWSGHLHAQEEQESSTRICINRVPDLTEKTNVP

SEQ ID NO: 125123 - DNA, 777 bp, Artificial Sequence
  derived and/or modified sequence
atgatggtgctgcaagtctctgcagctccacgcacagtcgccctcaccgctctgctcatggtactgttgactagcgttgtgcagggtcgcgctaccccagaaaactatgtctaccagttgcgccaggagtgctatgcatttaatggaacacagcgcttcttggaacgttatatctacaaccgtgaggaattcgtgagatttgatagcgatgtgggtgagttcagggccgtgacagaactcggtcggcctgacgaggactactggaacagccagaaggacttgctcgaagagaagcgagccgtacccgacagggtgtgccgtcataactatgagctagacgaggccgtgacgctccaaagacgggtgcagcccaaggtcaacgtctcacctagcaagaagggtcctctgcagcaccataacctcttagtatgccacgtcacagatttttacccaggatccatacaggtacgatggtttctgaacgggcaggaggaaacggcaggtgtcgtctcaacaaatttgatcagaaacggggattggaccttccagatactcgtgatgctcgaaatgacaccacagcagggtgatgtgtatatttgtcaggtcgagcacacatccctggacagccctgtgacggttgagtggaaggctcaatctgattcagccaggtccaaaacccttactggtgcgggggggttcgtgttggggctgataatatgtggcgtgggaatcttcatgcatcgtcggtccaaaaaggtacaacgcgggtccgcttag

SEQ ID NO: 125124 - DNA, 687 bp, Artificial Sequence
  derived and/or modified sequence
atgatggtgctccaggtgagcgccgcccctcgaaccgtggctctcaccgctttactgatggtcttactgactagtgtggtacaggggagagctacccctgagaactacctttttcagggcaggcaagaatgctacgcctttaacggcactcagaggttcctcgaacggtatatctacaacagggaagagctggtgaggttcgatagcgatgtcggggaatttcgtgctgtcaccgagttagggcgcccagaagcagagtattggaactcacagaaggacatacttgaggaagagagagcagttcccgataggatgtgccgccacaactatgaacttggcggtcccatgactttgcaacgacgcggaagcatacaggtcagatggttcctgaacggacaggaagaaaccgcaggcgtggtgtccaccaatttgattcggaacggcgattggacttttcaaattctagtgatgcttgaaatgacgccccagcagggagacgtgtatacttgtcaagttgaacacacctctcttgactctccagtgacagttgaatggaaggcccaatctgattccgcgagatccaaaacccttaccggcgctgggggattcgtgctaggactgatcatctgtggcgtgggtatttttatgcatagaaggtccaaaaaagtgcagagagggtccgcatag

SEQ ID NO: 125125 - DNA, 777 bp, Artificial Sequence
  derived and/or modified sequence
atgatggttctacaagtaagcgccgcaccccgaacagtcgccctcacggcactgctaatggtgctcctaacctccgtcgtgcaggggcgcgctacaccagaaaattaccttttccaagggcgccaagagtgctacgcctttaacggaacccaacggttcctggagcgttacatttataatagagaagagctggtgaggttcgatagtgatgttggggagttccgggctgtgacagagttgggtaggcctgaagctgaatactggaattcacagaaggatatattggaggaagaaagggcagtccctgaccgcatgtgcaggcataattatgagcttggcgggcctatgactctgcagcgtcgggtacagcctagggtgaatgtatccccgtccaaaaaaggccctctccagcaccataaccttctggtttgtcatgtgacagacttttatccggggtcaatccaagtgagatggttcctaaatgggcaggaagagacggccggggtggtctctacgaacctaataaggaatggggattggaccttccaaatcctcgtgatgctggagatgactcctcagcagggcgatgtttatacatgtcaagtggagcacacctcacttgactctcccgtgactgtggagtggaaagctcagtcggactccgctagatcaaagacccttactggagcgggcgggttcgtcctgggcctgattatttgtggagtaggaattttcatgcaccgtcgctccaaaaaggtgcaaaggggctccgcttag

SEQ ID NO: 125126 - DNA, 690 bp, Artificial Sequence
  derived and/or modified sequence
aaacaagcttggagaggaagtgccacgcgcctcgggccacagaattcaggcagacaggagtgctatgcgttcaacggcacccaaagatttttggagagatatatatacaatagggaagagcttgtgcggtttgactccgacgtaggtgaatttagagccgttaccgaactcgggcgtccagaagcagaatactggaattctcagaaagatatcctggaggaagaacgcgccgtgcccgaccggatgtgcaggcataactacgagctggggggacccatgactcttcagcgaagagtccaaccacgcgttaatgttagccctagtaagaagggaccactgcagcaccataaccttcttgtttgtcacgttacagacttctaccccggctctattcaagtacgatggtttctgaacggccaggaagagaccgccggtgttgttagtacaaatctaatccgaaacggagactggacgtttcagatcctcgtgatgctggagatgactccccaacagggcgacgtatacacctgccaagttgagcacacaagccttgatagccccgtgaccgtagagtggaaagcacagagcgactcagcgcgctccaagaccctaacaggagctggcggattcgtgcttggactaattatctgtggggtgggaatttttatgcacagacggtcaaaaaagtag

SEQ ID NO: 125127 - DNA, 687 bp, Artificial Sequence
  derived and/or modified sequence
atgatggttctgcaagtgagcgcggcacccagaactgtcgctctgacggcccttctgatggtgctgctcacttcggtagtgcagggccgtgccactccggagaattatctctttcagggtcgccaggaatgctatgcttttaacggcacccagcggttccttgaacggtatatctacaatcgggaagaattcgctagatttgactccgacgtcggggagttccgggctgtgacggaacttggccggccagctgctgagtactggaactcccagaaggacattctggaggaaaagcgggccgtccctgatcgaatgtgcagacataactacgagctcggcggccctatgactcttcaaagacgcggctcaattcaagtgcgctggttcctaaatggtcaggaggagacagctggggtcgtcagcacaaacctgatccgcaacggggattggacgttccagatcctggtaatgctggagatgacccctcagcaaggggacgtgtatacgtgtcaggtggaacatacaagtctcgatagtccagtgaccgttgagtggaaagcccagtccgactcagctaggtctaaaaccttaacaggagccgggggatttgtgctggggctcataatctgcggtgttgggatatttatgcatcgcaggtccaagaaagtgcagaggggcagtgcttag

SEQ ID NO: 125128 - DNA, 687 bp, Artificial Sequence
  derived and/or modified sequence
atgatggtgctgcaggtgtcagccgctcctcggactgtggctctaaccgctctattgatggtcttgcttacttctgtggttcaggggcgggccactcccgaaaattatctctttcagggtaggcaagaatgctacgcgtttaatggtacacagaggtttctggagagatacatttataacagagaagagttcgtgaggttcgattccgatgtgggtgagtttagagccgtcacagagctgggaagacctgatgaggaatattggaattcacagaaagatatcctagaggagaagcgcgccgttccagacaggatgtgccgtcacaattatgaactgggaggacccatgacattgcagaggcgcgggagcatccaggtgcgctggttcctgaacggccaggaagagacagctggcgtcgtgagcaccaacctgattagaaatggcgactggacatttcagattttagtgatgctggagatgacacctcagcagggtgacgtctacacgtgccaggttgaacatacgagcatggatagcccagtgacggtagagtggaaggcccagtccgacagtgctagatcaaagacactgactggggccggcggattcgtgcttggactcattatttgcggcgtgggtatctttatgcatcgacggtctaaaaaggtgcagagagggagcgcatag

SEQ ID NO: 125129 - DNA, 708 bp, Artificial Sequence
  derived and/or modified sequence
tagaactatcttttccaaggtaggcaggagtgctacgcattcaacggaactcagcggtttcttgagcgctacatctacaaccgagaggaattcgtaaggttcgacagcgatgtgggagaatttcgtgctgtcacagagctgggacgccctgacgaagaatattggaattcccagaaggatatcctcgaggagaagagggcggtccctgatcgcatgtgcagacacaactatgaactgggcggcccaatgactcttcagcggagagttcagccccgagtaaacgtctcgccatcaaagaaaggaccactccagcatcataacctgttagtgtgccacgtgactgacttttacccaggtagtattcaagtgagatggtttctcaacggacaggaagaaaccgccggcgttgtctctaccaacttaataagaaatggagactggaccttccagatcctggtgatgctggagatgactccccaacaaggcgacgtatacacatgccaggtagagcacactagtatggactctcccgtcaccgtagagtggaaggcgcagtccgattccgctaggtccaaaaccctcaccggagccggaggcttcgtactcgggctgataatatgcggtgttggtatctttatgcaccgtcggagtaaaaaaggcgagaaagcatgcagattcaatgaagaccttcataagcagggctcttag

SEQ ID NO: 125130 - DNA, 777 bp, Artificial Sequence
  derived and/or modified sequence
atgatggtgctgcaggtttcagcagcccctcgaactgttgctctgacagcccttctcatggtactgctgacatccgtcgtgcaaggccgcgccactccggaaaactacctgttccagggtcgacaggaatgctacgcgttcaacggcacgcaacgcttcctggagcgctacatttataaccgggaggagtttgtacgcttcgactctgacgtgggggagtttcgcgccgtgaccgagctcggtcgtcctgacgaggaatattggaattcgcagaaggacatccttgaggagaagcgtgcggtgccggaccgcatgtgccgtcacaactacgaacttgggggacctatgacactgcagcggagagttcagccccgcgttaacgtttcaccttccaaaaagggccctctgcagcaccataatctgttggtgtgtcacgtgactgacttttacccaggcagtatccaggttcggtggttcctcaacggacaggaggagactgctggagttgtcagcactaacctcattcgtaatggagattggaccttccagatccttgtaatgctggagatgacgccacagcagggagacgtgtacacctgtcaagtggagcataccagtatggattcgcctgtgacagtggaatggaaagcgcaatcagattccgcacgctcaaaaaccctcaccggcgccgggggtttcgtgctgggactcatcatctgcggggtaggtatttttatgcatagacggtccaaaaaagtgcagaggggatctgcatag

SEQ ID NO: 125131 - DNA, 687 bp, Artificial Sequence
  derived and/or modified sequence
atgatggttttgcaagtgagtgctgcccctaggaccgtggctctcacagcactcctcatggtgctcttgacctcagttgtacagggccgagccacccctgaaaactatttgttccagggtcgtcaggaatgctatgcgtttaacggaacccagcgattcctggagcgttacatttacaatagagaggaattcgccaggttcgattcagacgtcggggagtttcgagcagtgactgaactcggacgccctgcagctgagtactggaacagccagaaagacatcttagaagaaaagcgtgctgtccccgaccggatgtgtaggcataactatgaacttggcgggcccatgacactccagcgtagggggagcattcaagtcagatggttccttaatggacaggaagagacagcaggggtagtgagcacgaatctgattaggaacggtgattggacattccagattttagttatgctagagatgactcctcaacagggagatgtctatacttgtcaggttgagcacacatcacttgattctcctgtgaccgtggagtggaaagcccagtcagattccgctagatcaaagacccttacaggcgccggcggattcgtgctgggtctgatcatatgcggagtcggcattttcatgcacaggcgatctaaaaaggttcagcgcggctctgcctag

SEQ ID NO: 125132 - DNA, 690 bp, Artificial Sequence
  derived and/or modified sequence
aagcaggcctggagaggtagtgccactcggctcggcccccagaatagcgggagacaggagtgttacgccttcaatggaacccaacgctttctggaacgatatatttataatcgggaagagtttgtgcggttcgactccgacgtgggggagtttcgcgccgtgacagaacttggaaggccagacgaggagtattggaactctcagaaagatattcttgaagaggagcgcgccgtccctgataggatgtgccggcacaactacgagcttggggggcccatgacactacagaggagggttcagccacgcgtcaacgtctccccctcgaagaaaggccctctccagcaccataacctgctagtgtgccatgtgactgacttctacccaggaagcatccaggttcgctggttcctaaacgggcaggaggagacagctggagtggtctcaaccaatttaatccgcaatggcgactggacattccagatattggttatgctcgagatgacaccccaacaaggagatgtgtacacctgccaagtcgaacatacatcgctcgactcacctgttaccgtggaatggaaggcccaatcggacagcgcgcgctcaaagaccctcactggagctgggggctttgtccttgggctaataatctgcggagtcgggatcttcatgcatagaagaagcaaaaagtag

SEQ ID NO: 125133 - DNA, 777 bp, Artificial Sequence
  derived and/or modified sequence
atgatggtcctgcaggtgtccgccgcaccccggaccgtggcactgactgctcttctgatggtccttctaacatccgtggtacagggacgcgcaacgcctgaaaactatctgtttcaaggaagacaggaatgttatgcctttaacgggacacagcggttccttgaacggtacatctacaatagagaagagtttgtgagattcgattctgacgtaggggaatttagggcggtgaccgagctcggccggcctgatgaagagtactggaattctcaaaaagacatattggaagaggagagagccgtacccgaccgcatgtgcaggcacaattatgaacttggcggacccatgacactccagcggcgcgtgcagccacgcgttaatgtgagcccatctaagaaagggccgttgcagcaccacaatctgctggtatgccacgtgactgatttttatcctgggtctatccaggtgcgttggtttttaaacggccaggaggagaccgccggcgtagtgtccactaatctcatccgtaatggcgactggactttccagatcctagttatgctggaaatgacaccacagcaaggggatgtttacacatgtcaagtggagcataccagcctcgattctcctgtgacggtagagtggaaagcccagtccgacagtgcccggagtaagacactgacaggagctggtggatttgttctgggattaatcatttgcggcgtgggaattttcatgcatagacgctctaaaaaggtgcagcgcggctcagcgtag

SEQ ID NO: 125134 - DNA, 708 bp, Artificial Sequence
  derived and/or modified sequence
taaaactacctatttcaagggagacaggagtgttacgcctttaatggcacacagcgctttttggagcgttatatctataaccgagaagaattcgctagatttgattcagatgtgggagaatttcgcgctgtaacggagctggggcgcccggctgccgagtactggaatagccagaaggatatcctcgaagaaaaacgggcagttcccgatcgcatgtgccgtcacaactacgagctgggggggcccatgacattacagagacgtgtgcagccacgtgtgaatgtcagcccttctaagaaaggcccactgcaacaccataatcttctagtttgccatgttaccgatttctatcccggatccatccaagtgcgatggttcctaaacggacaggaagaaacagctggcgtggttagcaccaacctcattaggaatggcgattggacatttcagattctcgtcatgctggagatgaccccccagcagggggatgtgtacacatgtcaggtggagcatacatcactggattcccccgtgactgtcgaatggaaggcccagtcagactcagccagatcgaaaacactgaccggagcaggaggtttcgtgctcggcctgatcatctgtggagtcggcatattcatgcatcgccgctcaaaaaaaggtgaaaaagcatgccggtttaacgaagacttacacaagcaaggtagctag

SEQ ID NO: 125135 - DNA, 690 bp, Artificial Sequence
  derived and/or modified sequence
aagcaggcctggcgggggtccgcgacaagactcggccctcagaattcaggccggcaggagtgctatgcattcaatggcacccagaggtttctggaacgttacatttacaatagagaagaattcgctaggtttgacagcgacgtcggcgaatttagggctgtgactgagctggggcgacctgcagccgagtactggaactcacaaaaagacattctggaagagaagcgtgcggttcctgatcgtatgtgcaggcacaattatgaacttgggggcccaatgactttgcagaggcgcgtacagcccagagtgaatgttagtccttctaaaaaagggccgctccaacatcataatctgctggtgtgtcacgtgaccgacttctaccctggaagtattcaggtccgatggttcctgaacgggcaggaggaaacggcaggcgtggtgtccacaaacttgattcggaacggcgattggaccttccaaatcctggtaatgctcgaaatgacgccacagcagggcgacgtttatacctgccaggtcgaacataccagcctcgacagtccagtgactgtggagtggaaagcacagtcagactccgcacgcagcaagacactgactggggccgggggatttgtcctcgggctgataatatgcggagtgggaatcttcatgcaccgaagatctaagaagtag

SEQ ID NO: 125136 - DNA, 777 bp, Artificial Sequence
  derived and/or modified sequence
atgatggtcttacaggtctccgctgcgccacggacagtggcgcttaccgccctactgatggtgctactcacctccgtggtgcaaggtagggccacacctgagaactacttgtttcagggcagacaggagtgttatgctttcaatggcacccagcgttttctggaacgttacatctacaaccgtgaagagttcgccaggtttgacagcgatgtaggcgagtttcgggcagtgaccgagctaggaaggccagccgccgaatactggaacagtcagaaggacattcttgaggagaagagggctgtgccggatagaatgtgtcgccataattatgagctggggggacccatgactctgcagaggagggttcagcctagagtgaatgtctctccctctaagaaggggccccttcaacaccacaaccttcttgtttgccacgtgaccgacttttaccctggttctattcaagtgcgttggtttctgaacggtcaagaggagaccgctggagttgtgagtacaaatctcatcaggaacggtgactggacttttcagatcctggtgatgcttgaaatgactccacagcaaggtgatgtttatacgtgtcaggtggaacatacaagcttggactctccggtcacagtggagtggaaggctcagtcagattctgctaggagcaaaactctcacgggagcgggaggattcgttttgggactgattatctgcggcgtcggaatcttcatgcatagaaggtcaaagaaagttcagcggggtagcgcctag

SEQ ID NO: 125137 - DNA, 777 bp, Artificial Sequence
  derived and/or modified sequence
atgatggtcctgcaggtgtctgccgccccccgaacggtcgcactcactgccctccttatggtgctcctcacctctgtcgtgcagggacgcgccactcccgagaattatctgttccagggcagacaggaatgttacgctttcaatggaacccagcggtttctggagcgttacatttataatcgcgaggagttcgtcaggtttgatagtgacgtaggggagtttagggctgtgaccgagctgggtagaccggatgaagagtactggaacagtcagaaggacattctggaagaaaaacgggccgtgcctgatcggatgtgcagacacaactatgagttgggtggtccgatgactctgcagaggcgggttcaaccacgcgtgaacgtgtctccatctaagaagggcccactgcaacatcataatctcctggtctgtcacgttactgatttctatcccggctctatacaggtgagatggtttcttaacggccaagaggaaaccgccggtgtggtcagcactaacctgattcggaacggagattggaccttccagattctcgtgatgttagagatgaccccacagcagggggatgtgtacacttgtcaggtggagcatacttcaatggactcacccgtgactgtagagtggaaggcgcaaagcgattcagccagatcgaaaactctgactggggcgggaggttttgttttgggtttaatcatctgtggggtcgggattttcatgcacaggcggtccaaaaaggttcagagagggtccgcctag

SEQ ID NO: 125138 - DNA, 690 bp, Artificial Sequence
  derived and/or modified sequence
aagcaagcatggcggggatcggccaccaggttaggcccacagaattcaggccgccaggagtgctacgccttcaatgggacccagcgcttcctagagcgctacatatacaaccgcgaagagtttgctcggttcgacagtgacgtgggcgaattcagagcagtgactgagctgggcagaccagcagcggaatattggaattcacagaaggatatcctggaggagaagagagcggtaccagatcggatgtgtcggcacaactatgaattaggcggtcctatgaccctacagcgtcgtgttcagcccagggtgaatgtgagtcccagcaaaaaaggacctctacagcatcataatcttctcgtgtgccatgtgactgacttttatccaggctccatccaggtccggtggttcctgaatgggcaagaagagacagccggggtggtttcaactaatctgatacggaatggggactggactttccagatcctggtcatgctagaaatgacacctcagcaaggcgatgtttatacctgccaagttgagcacacttccctcgatagtcccgtgaccgtcgaatggaaagcacagtccgacagcgcacgctccaaaacactgaccggcgccgggggatttgtgctgggcctgatcatatgtggggtcggcatcttcatgcatcgtcggtctaaaaagtag

SEQ ID NO: 125139 - DNA, 708 bp, Artificial Sequence
  derived and/or modified sequence
taaaattatcttttccaaggccggcaggagtgctatgcttttaacgggactcagcggttcctggagcggtacatctataaccgggaagagctggtgagatttgactctgacgtgggcgagtttagagccgtcacagagctgggacgccccgaagctgaatactggaatagccagaaagatatccttgaggaggaacgcgccgtgcccgacagaatgtgccgtcataattacgagctcggcgggcctatgactctgcagaggcgagtgcagccccgagtaaatgtctcgccttctaaaaagggaccactgcagcaccataatctactcgtctgtcacgtgactgatttttatcctggttctatccaggttagatggtttcttaatggacaggaggagacagctggcgtggtttccacaaacctgattcggaatggagattggacgtttcagatcttggtcatgttggagatgaccccccaacaaggtgatgtctatacctgccaagtcgagcacaccagtctggacagccccgtaaccgtcgagtggaaggcgcagagcgacagcgcacgatctaaaactttaacaggcgccggaggtttcgtgttgggactcatcatctgcggtgttgggatattcatgcaccggaggtcaaaaaaaggagagaaggcgtgtcgctttaacgaggatttacacaaacaaggttcctag

SEQ ID NO: 125140 - DNA, 777 bp, Artificial Sequence
  derived and/or modified sequence
atgatggtgttacaggtgtccgctgccccacgcaccgtggcattaacagcgctgttaatggtgctgctgacctccgtggtgcagggccgcgccacccctgagaattatcttttccaaggcagacaagagtgctacgcattcaacgggactcagaggtttctggagaggtatatatataacagagaagagtttgcaaggttcgactcggatgtgggagagtttcgggctgtaaccgaactcgggcgcccggccgccgaatattggaattcccagaaggacattctcgaggagaaacgcgcagtgcccgaccggatgtgtcgtcataactatgaactcggtggacctatgaccctgcagagacgggtgcagcctcgggttaacgtatcccccagtaaaaaaggccccctgcagcatcacaacctgctggtttgtcatgtcaccgacttctaccccggatcaatacaagtccggtggttcctgaatggacaggaggagaccgcaggcgttgtttcaaccaacctcattcggaacggcgactggacatttcagatcttagtgatgctggagatgaccccacaacaaggagatgtgtacacctgccaggtggaacacacatccctggacagccctgtgaccgtggaatggaaagctcagtccgactctgcgcggtctaagactttaacaggcgccgggggcttcgtccttgggctgatcatttgtggtgtaggcatatttatgcaccgaagatccaagaaagttcaaaggggctctgcttag

SEQ ID NO: 125141 - DNA, 708 bp, Artificial Sequence
  derived and/or modified sequence
tgaaactatgtgtaccagttgcgccaggaatgttacgcgtttaatgggactcagagattcctggaaaggtatatttataaccgcgaggagttcgttcgcttcgacagtgatgtcggggaatttagggccgtcacagaactgggacgaccagacgaagactattggaattctcaaaaggatctgttggaggagaaaagagccgtgcccgatagagtttgtcgacataactacgaactggacgaagccgtgacgttacaacgtagagtgcagccaaaagtcaacgtctcaccaagcaaaaaaggtccactccaacaccataacctgctggtgtgccacgtgaccgacttttatccaggatcaattcaagtgcgctggttcctcaatggacaggaagaaacggctggtgtcgtgtccactaacctgataaggaatggagactggacttttcaaatcctcgtcatgttggagatgactccgcagcaaggtgacgtgtacatctgtcaggtggagcacacatccctcgattctccagtgaccgtggaatggaaggctcagtccgactcagcacgatctaaaactctgaccggggctggaggtttcgtgttgggtctgattatatgcggggtgggcatctttatgcaccggcgaagcaaaaaaggtgaaaaggcctgcaaattcaatgaagatttacacaagcaaggctcttag

SEQ ID NO: 125142 - DNA, 690 bp, Artificial Sequence
  derived and/or modified sequence
aaacaggcttggcgtggatccgccacccggctgggcccacagaactctggtcgccaggagtgttatgcatttaacggaacacagcggttcttagagaggtacatatacaatagggaagagtttgttcgctttgatagtgatgtcggggaattcagggctgtcacggaactgggtaggccggatgaagagtactggaattcccagaaggacatcttggaggaaaaacgggccgtgcctgaccggatgtgtcgtcataactacgagctaggtggacccatgaccctgcaacgccgagtccagcccagagtgaacgtgtccccctctaaaaaggggcccctgcaacaccacaatctgttagtgtgtcatgtgactgacttctatcccggctcgatccaggttaggtggttcttaaacggacaggaagagaccgcaggcgtggtgtctaccaacctgattagaaacggcgattggactttccagatcctagtaatgcttgagatgacaccccagcagggagacgtctatacatgccaggtggaacatacgtcaatggatagccctgtgactgtagaatggaaggcgcaatccgactccgcacgttctaaaacgttaaccggtgcaggcggtttcgtcctggggcttatcatctgtggcgtgggtatattcatgcatcgccgtagcaagaaatag

SEQ ID NO: 125143 - DNA, 687 bp, Artificial Sequence
  derived and/or modified sequence
atgatggttcttcaagtctctgcggcccccaggactgtggcactcactgccctgctgatggtgctgctgacgagcgtggttcaggggcgcgccacacccgagaactacgtgtaccaactgcgccaagaatgctatgcgttcaatggaacacagcgtttcctagaacgttacatatacaacagggaagaattcgtcaggtttgattccgatgtgggtgagttcagggccgtcaccgagctgggacgacctgatgaggactactggaattctcaaaaggaccttctggaagagaaacgggcggtacctgacagggtgtgccgccacaattatgagctggacgaggcagtgactttacaacgtagaggaagcatacaagtacggtggtttcttaatgggcaggaggagactgctggagtggtaagtactaacttaattcgcaatggcgattggaccttccaaattctcgtgatgctagagatgacaccccaacagggcgacgtctacatctgtcaggtggaacatacctcacttgatagtcccgtcaccgtggagtggaaggctcaaagcgacagtgcacgaagtaaaaccttaacaggagcaggggggttcgtcttggggctgatcatatgcggggtcggtatatttatgcatcgccgcagcaagaaggtacagaggggcagtgcatag

SEQ ID NO: 125144 - DNA, 687 bp, Artificial Sequence
  derived and/or modified sequence
atgatggttttacaagtttctgccgccccaagaaccgttgccctcacagctctgttgatggttctcctcacaagtgtggtgcaaggtcgagccacacctgagaactacctgttccagggccggcaggaatgttatgcattcaacgggacccagagattcctagaacggtatatttacaatagagaggagttcgtgcggttcgacagcgacgtgggggagttccgagcggtcaccgaactgggacgccccgacgaagaatactggaattcgcaaaaggatatcctcgaggagaagcgggcggtccccgaccggatgtgtcgacacaactacgaactcggaggccctatgactttgcagcgaagggggtccattcaggtgaggtggttcctgaacggccaggaggaaacggccggagtggtctccacaaaccttatccggaacggagattggacgtttcagatattagtaatgctggagatgaccccacagcaaggcgatgtgtacacctgtcaggtggagcatacgtcgatggattccccagtgacagtggagtggaaagcacagtccgactcggcccgctctaagactttgaccggggccggaggatttgtcctcggcctgattatttgcggggtgggcatatttatgcaccggcggtccaaaaaagttcagcgcggttccgcttag

SEQ ID NO: 125145 - DNA, 687 bp, Artificial Sequence
  derived and/or modified sequence
atgatggtgctgcaggtgagcgctgcaccacggactgtagccctcaccgctctcctaatggttttgttaacctccgtggttcaaggcagagctacacctgagaactatctgttccaagggcgccaggagtgttatgccttcaatgggacacagagattcctcgagcggtatatttataaccgagaagaatttgctcgtttcgattccgatgtaggcgagttccgcgccgtgaccgaattaggccggccggcggccgaatattggaactctcaaaaggatattctcgaggaaaagcgagctgtgccagatcggatgtgtagacataactacgaattaggcggccccatgacactgcaacgcaggggaagtattcaagtccgttggttcctaaacggccaggaggaaacagcaggagtcgtgtccaccaacttaatcagaaacggcgactggaccttccagatactggttatgctggagatgactccacagcagggcgacgtatacacatgtcaggtggaacacacatcattggactcaccagtgactgtggagtggaaggcccagtctgatagcgctcgatcgaagactctcacaggcgccggaggttttgtgctgggcctaatcatctgtggggttggtatttttatgcacagaaggagcaagaaagtgcagcggggtagtgcgtag

SEQ ID NO: 125146 - DNA, 690 bp, Artificial Sequence
  derived and/or modified sequence
aagcaggcgtggcgaggcagcgctacaagactgggacctcagaattcaggacggcaggaatgctacgcctttaatggcactcagcgcttcctcgagagatacatctacaacagggaagaatttgtccggttcgacagcgacgtcggggagttccgggcagtcacagagttaggaaggcccgacgaagaatattggaactctcagaaggatatccttgaagaaaaacgcgccgttcccgatagaatgtgtcggcataactacgagctaggcggaccgatgacacttcagagaagggttcagccccgggtgaatgtatctccaagtaagaaaggccctctccagcaccacaacctcctggtctgtcatgtgactgacttttaccccggcagcattcaggttcggtggttccttaacggccaagaggagactgccggagtagtgtcaactaacctgatccgcaatggggactggacatttcagatactggtcatgttagagatgacaccgcagcagggtgatgtctacacctgccaagtggaacacacatcaatggatagtccagttaccgtggagtggaaggctcaaagcgattctgcgagatctaagacgttaactggagctggcgggtttgttttggggctgatcatttgcggggtgggcatctttatgcataggagatcaaaaaagtag

SEQ ID NO: 125147 - DNA, 708 bp, Artificial Sequence
  derived and/or modified sequence
tagaactatctgttccaagggagacaagagtgttacgccttcaacggcacgcagcgcttcttggagaggtacatatataacagagaggagttcgtacggtttgattctgacgtgggcgagttcagggccgttactgaacttggccgacctgacgaagagtattggaattctcagaaggatatacttgaagaggagcgcgccgtgccagatcgaatgtgccggcacaactatgaacttggaggccctatgactcttcagcgcagagttcaaccccgagtcaacgtgtccccttctaaaaaaggacctctgcaacaccacaaccttttggtgtgtcatgtcacagacttctatccgggttccatccaggttaggtggtttcttaatggacaagaagagaccgccggggttgtgagcaccaatttgattaggaatggcgactggacattccagattctggtcatgttggaaatgaccccccaacagggtgatgtctatacctgccaggtggagcacacctctctggattcaccagtgacagtcgagtggaaggcacagtctgacagcgctaggtctaaaacactcacaggcgcaggtggattcgtgttgggtctcatcatttgcggggtgggcatatttatgcaccggcggtccaaaaaaggcgaaaaagcatgtcgctttaacgaagaccttcacaaacaggggtcttag

SEQ ID NO: 125148 - DNA, 708 bp, Artificial Sequence
  derived and/or modified sequence
taaaattatctgttccaaggcagacaggaatgctacgctttcaacggcactcagcgtttcctcgaaaggtacatttacaatcgagaggagtttgctagatttgacagcgacgttggtgaattcagggctgtgactgagctgggcagacctgcagctgagtattggaacagccagaaagacatccttgaggaaaaaagagccgtgcctgatcgcatgtgtaggcataactacgagctgggagggccaatgacgctacagaggagagtccaacccagggtaaacgtgagtccgtccaagaaaggcccgctacagcaccataacctgctggtctgtcatgtcactgatttttatcctggctccattcaagtgagatggttcctcaacggacaagaggagaccgccggagttgtatctacgaatctgatccgcaacggtgactggacgttccaaatcctggtcatgctcgaaatgacacctcagcaaggtgacgtctacacctgccaggtcgagcacacgtcccttgattcccccgtgactgtggaatggaaggctcagtccgactcggctagatccaaaactttgacaggcgcaggagggttcgtcctagggctgattatctgcggggtgggcatattcatgcatcggagatcgaaaaagggcgagaaggcttgtcgcttcaatgaggatcttcataaacagggaagttag

SEQ ID NO: 125149 - DNA, 687 bp, Artificial Sequence
  derived and/or modified sequence
atgatggtcttacaagtcagcgccgccccaagaactgtggcactcactgccctgctcatggtgctgcttactagcgtggtgcagggacgcgctacacctgagaattatctgtttcagggccgccaggaatgctacgcgtttaatgggacacagcggtttctagagagatatatctataaccgtgaagagttcgtcagatttgattcagatgtgggcgaatttcgggcagtgactgaactgggccggcccgatgaagagtattggaacagtcagaaagacattcttgaagaggagagggccgtacccgacagaatgtgtcgccacaattacgagctcggggggcccatgacactccaacggcggggatcaattcaggtccggtggttcctgaacggtcaggaggaaaccgctggtgtggtaagcaccaatctaatacggaatggagattggactttccagattctggtaatgttggaaatgacaccacaacagggggacgtttatacctgccaagtcgaacacaccagtctggactcacccgtaacggtagagtggaaagctcaaagcgatagcgctaggagcaagactctgaccggggcagggggatttgtgttaggactaataatctgcggggttggcatttttatgcacaggaggtccaaaaaggtccagcggggaagtgcctag

SEQ ID NO: 125150 - DNA, 690 bp, Artificial Sequence
  derived and/or modified sequence
aagcaggcatggaggggcagcgctactagactcggtccacagaactctttacgccaggagtgctacgccttcaatggaacccagagatttctggagcgctacatctataatagagaggaattcgtccgctttgattcggacgtcggagaattcagagcagttaccgagctcggacgacccgatgaagattattggaatagtcagaaagacctgcttgaagagaagagagcagtcccagatagagtttgcagacacaattacgagctggacgaggccgttaccctgcagcgtcgtgtccagcccaaagttaacgtgagcccaagcaaaaaaggacccctgcagcatcataacctgctggtgtgtcacgtgaccgacttttaccccggctccatccaggtgcgctggtttttgaacgggcaggaagaaactgccggcgtcgtgagtactaatctgatccgcaacggagattggactttccagattctcgttatgttagagatgacaccacaacagggggacgtttatatctgccaggtcgagcatacctcactcgacagcccagttactgtcgaatggaaggcccagtcagacagcgccagatctaaaaccttgaccggggccggtggcttcgtgctaggactgattatttgcggggtggggatttttatgcacaggaggagcaagaaatag

SEQ ID NO: 125151 - DNA, 777 bp, Artificial Sequence
  derived and/or modified sequence
atgatggtgctgcaggtgagcgccgctcctagaaccgtggcactaactgcactgctgatggtcctgctcacctctgtggtgcagggcagggccacacctgagaattacctcttccaaggtcgccaggagtgttatgcatttaatgggacacagaggtttctggagcgttatatatataatcgcgaggagttcgcgcggtttgacagcgatgtcggtgagttccgtgcagtaacggagctggggagacctgcagctgaatattggaattctcagaaagacatcctggaggaaaagcgggcagttcccgatcggatgtgcagacataactacgaactgggggggccgatgactttgcagcgccgagtgcagcccagggtgaacgttagtccttccaaaaagggccccctgcagcatcataacctgctggtgtgccatgtgaccgacttctacccaggctcaatacaagtcaggtggttcttgaatggacaggaggagactgccggcgtggtatccaccaatctcataaggaacggtgattggacgttccagatccttgtgatgttggagatgactccccagcagggtgatgtttatacttgccaagttgagcacacaagcttggactcaccagttacagtcgagtggaaggcccagtcagattcagctcggtctaagaccctgactggggcgggcggattcgttctgggcctaatcatatgcggggtgggcatatttatgcacaggagaagcaaaaaggtgcagcggggcagcgcctag

SEQ ID NO: 125152 - DNA, 708 bp, Artificial Sequence
  derived and/or modified sequence
taaaattacctgttccagggccgccaggaatgctatgcctttaatggaacacaaaggtttcttgagaggtacatctacaaccgtgaggagtttgtaagattcgacagtgacgtcggcgaattcagagccgttactgagctcggccgcccagacgaagagtattggaatagccagaaggatatcctcgaggagaagagagcagtgcctgaccgcatgtgccggcataactatgaactaggcggacctatgactcttcagaggagggtgcaaccgcgagtcaatgtctcaccctctaagaagggacctctacagcaccataatctgttggtttgccacgttaccgacttctacccaggctccattcaggtgagatggttccttaatggccaggaagagaccgcgggtgtcgtgtcgactaacttaatcaggaatggcgactggacttttcagatcctggtcatgctggaaatgactccacagcagggcgacgtctacacatgccaggtcgagcacacatcaatggatagccccgtgacagttgagtggaaggcccaatccgattcagccaggagcaagacattgacgggagctggtggattcgtgctgggcctgatcatttgtggcgtgggaatttttatgcatcgtaggtcaaagaagggtgagaaagcttgtaggttcaacgaggatctgcataagcagggttcttag

SEQ ID NO: 125153 - DNA, 690 bp, Artificial Sequence
  derived and/or modified sequence
aaacaagcctggaggggcagtgccacgaggctgggaccccagaacagcggacgccaggagtgctacgccttcaacgggacccagaggtttttagaacggtatatctacaaccgcgaggagttcgccaggttcgactccgatgtgggggagttccgagccgtaacagagctcgggaggccggccgcagagtactggaactcccagaaggacatccttgaagaaaaacgcgcagtcccagaccgtatgtgtcgccataattacgaactcggcggccccatgacccttcagcgacgcgtgcagcctagggttaacgtctcgccatctaaaaaaggtcctctgcaacaccacaatctcctagtctgccacgttaccgacttctaccctggatccatacaggtcaggtggttcctcaacgggcaggaggaaacagcaggtgtagttagtaccaacctcatcaggaacggagattggaccttccagatactcgtgatgctcgagatgaccccgcagcagggtgatgtctatacatgccaggtagagcataccagtctcgactctccagtcactgtcgagtggaaggctcagtccgacagcgcaaggtcaaagacccttaccggtgccggaggcttcgtgttgggattgattatctgtggcgtcggcatctttatgcaccgaagatctaagaagtag

SEQ ID NO: 125154 - DNA, 708 bp, Artificial Sequence
  derived and/or modified sequence
tgaaactacctctttcaaggccggcaggaatgttatgctttcaatggtactcagagatttctggagcgatatatctataaccgtgaggaattcgcccgctttgatagcgacgttggagagttccgcgctgtgactgagttaggcagacccgcagccgaatactggaacagccagaaggacatcctagaagagaaacgagctgtgcctgacaggatgtgcagacacaactacgagctgggtggccctatgacccttcaaagacgcgtgcaaccacgagtgaatgtgagtccgtctaagaagggccccctgcagcaccataatcttctcgtgtgccacgtgactgacttctatcccggctctatacaagttaggtggtttctcaacggtcaggaagaaaccgcaggggtcgtaagtactaacctgatacggaatggtgattggacatttcagatcctggtaatgctggagatgacgccccagcagggagacgtctacacctgccaggtagagcacacctccctggactcccctgtaaccgtggagtggaaggctcagtctgatagcgcacggtcaaagacactcactggcgctggtggattcgtcctcggtctgatcatttgcggcgtcggaattttcatgcatcgaaggtctaagaagggagagaaagcctgtcgtttcaacgaagacctgcataagcagggcagctag

SEQ ID NO: 125155 - DNA, 372 bp, Artificial Sequence
  derived and/or modified sequence
atgatggtcttgcaagtgtctgcagcgcctaggaccgtcgctttaaccgcactactgatggttctgctgactagcgtggtgcagggccgcgccaccccagagaactacctttttcaggggaggcaggagtgttatgcgttcaacggtactcaacggtttttggagagatatatttataatcgggaggaatttgcgcgctttgacagcgatgtgggagagttcagggcagtgactgaactgggaagacctgcggccgagtactggaactcacagaaggatattttggaagaaaaacgcgctgtaccggacagaatgtgccggcacaactatgaactcggaggcccaatgactctgcaacggcgcggggagtag

SEQ ID NO: 125156 - DNA, 372 bp, Artificial Sequence
  derived and/or modified sequence
atgatggtactccaagtgtccgccgccccaagaaccgtggctctgactgcccttctgatggtgctgcttacttcagttgtgcaaggacgggcaaccccggaaaactacctattccaaggcaggcaggaatgctacgcctttaatgggacccagcgctttctcgagcggtatatttacaatcgggaagagctggtccggtttgattctgacgtaggggaattccgcgcggtgacagagttaggtcgccctgaagccgagtactggaattcacagaaggacatattggaggaggagcgtgccgtgccagatcgcatgtgtaggcacaattacgaactaggcgggcccatgaccttacagcgtaggggagagtag

SEQ ID NO: 125157 - DNA, 372 bp, Artificial Sequence
  derived and/or modified sequence
atgatggttcttcaagtctccgcagctccacgtaccgtggcactaaccgcactgctgatggttctgctgacttccgtggttcagggcagggcaacccctgagaattacttgtttcaggggaggcaggaatgttacgcttttaacgggacccagcgattcctggaacgatatatttataatcgtgaagagtttgttaggtttgactccgatgtgggggagttccgcgctgtgaccgagctgggcagaccagatgaagagtattggaatagccaaaaagacattctggaagaaaagagagcggtgcctgatcgcatgtgccgtcacaattatgaacttggcgggcccatgacgttgcagcggcggggggaatag

SEQ ID NO: 125158 - DNA, 372 bp, Artificial Sequence
  derived and/or modified sequence
atgatggtgcttcaggtgagcgctgccccgaggaccgtggctcttacggcactgcttatggtgctgctgactagcgtggtgcaaggtagagcaactcctgaaaactacctctttcagggacggcaggagtgttatgcatttaatggaacgcagaggttcctcgaaagatacatatacaatcgggaagagttcgtgcgtttcgacagcgatgttggggaattcagggctgtaacagaactggggcgacccgatgaggagtattggaacagccaaaaggacatcctggaggaagagcgcgcagtgcctgacaggatgtgtcggcacaactacgaactcggtgggcctatgacgctacagcggaggggagaatag

SEQ ID NO: 125159 - DNA, 750 bp, Artificial Sequence
  derived and/or modified sequence
atggtcctgttgacgagcgtagtacagggacgggccacacccgagaattacgtttaccaactccgtcaagagtgttacgcctttaatggaactcagcgcttcttggaacggtacatctacaacagggaggagttcgtgaggtttgactcggatgttggcgaattcagggctgtaactgaattggggagaccagatgaggactattggaactctcagaaagatctgctcgaagagaagagagccgtgccagatcgggtttgtcgccacaattacgaactggacgaggctgtgacactccagcgaagagtccagcccaaggtgaatgtgtcaccaagtaagaaaggacccttgcagcatcacaacctcttggtgtgccacgtaacagatttctatcccggctcgatacaggtgaggtggtttctgaacgggcaggaggagactgccggcgtcgtgagcacaaatctgatccgcaatggcgactggacctttcagatcctggtgatgctggagatgaccccacaacagggcgatgtgtacatctgtcaggtggagcacacaagcctggacagccccgtcactgtcgaatggaaagcccagagtgattcagctcgatccaaaactctgactggagcggggggatttgtgctcggcctcatcatctgtggggtcggtatttttatgcatagacggagtaagaagggagagaaagcgtgcaagtttaatgaggatttgcataagcaaggcagctag

SEQ ID NO: 125160 - DNA, 372 bp, Artificial Sequence
  derived and/or modified sequence
atgatggtgctgcaggtcagcgccgccccgcggactgtggcgctgacagcgcttcttatggtactgctcactagcgtcgttcaggggcgggccacccctgaaaactatctgttccaaggacggcaggagtgttacgctttcaatggcacccaacggttcctagagagatatatctacaatagagaggaatttgctcgcttcgatagcgatgttggggagttcagggccgtcaccgagcttggacggccagcggcggagtattggaattcgcaaaaggatatcctcgaggagaagcgagccgttcccgaccggatgtgtagacataattacgagctgggcggccctatgactttacagcgtcggggggagtag

SEQ ID NO: 125161 - DNA, 372 bp, Artificial Sequence
  derived and/or modified sequence
atgatggtgctgcaggtttccgctgcgccccggaccgttgccctcaccgctctgttaatggtgttgcttacaagcgtggttcagggcagagccactccagagaactatttatttcagggccggcaggaatgttacgccttcaatgggacccagcggtttcttgagcgctacatttacaacagggaggaattcgcccgctttgatagcgatgtgggcgaattccgagcagtcactgaactaggcaggcctgcggccgagtattggaattcgcagaaggacatcctggaggagaaacgggcagtgccagaccgtatgtgtaggcataattatgagctgggaggtcctatgaccctgcagcggcgcggtgaatag

SEQ ID NO: 125162 - DNA, 381 bp, Artificial Sequence
  derived and/or modified sequence
atgatggtcctccaggtgtccgccgctccgaggaccgtagcacttacagccttgctgatggtccttctgacaagcgttgtccaaggcagggctaccccagagaactacgtctatcagctgcgccaggaatgctatgccttcaacggtacacagaggttcctcgaacgctacatctataatcgcgaagagttcgttagatttgactctgacgtgggcgagtttcgcgctgtgaccgagcttggccgcccagacgaggattactggaattctcaaaaagatctcctcgaggaaaagagagcagttccggatcgagtttgtagacacaactacgaactagacgaggcagtaacgctgcagaggcgggagagagggaaaaaatag

SEQ ID NO: 125163 - DNA, 372 bp, Artificial Sequence
  derived and/or modified sequence
atgatggtgttacaggtgagcgccgctccccgcacggtagctctaacagcattattaatggtgctgttgaccagtgtggtccagggtcgagcaacccccgagaattacctgttccagggcagacaggaatgctatgcctttaacgggactcagagattcctggagagatatatatacaatcgggaggagttcgttcgtttcgatagtgatgttggagagtttcgagccgtcaccgaattgggcagacctgacgaggagtattggaacagtcagaaggatattcttgaggaaaagcgagccgttccagatcgcatgtgcagacataactacgagctcggaggtcccatgacacttcagaggcgcggcgaatag

SEQ ID NO: 125164 - DNA, 777 bp, Artificial Sequence
  derived and/or modified sequence
atgatggtgctgcaggtgtctgctgcccccaggacagtggccctgacagccctgctgatggtgctgctgacctctgtggtgcagggccgggccaccccagagaactacgtgtaccagctgcggcaggagtgctacgccttcaacggcacccagcgcttcctggagcgctacatctacaaccgggaggagtttgtgcgctttgacagtgatgtgggggagttccgggctgtgacagagctgggccgcccagatgaggactactggaacagccagaaggacctgctggaggagaagagagctgtgcctgacagagtgtgccgccacaactatgagctggatgaagctgtgaccctgcagaggagagtgcagcccaaggtgaatgtgagccccagcaagaagggccccctgcagcaccacaacctgctggtgtgccacgtgacagacttctacccaggcagcatccaggtgcgctggttcctgaatggccaggaggagacagctggggtggtgtccaccaacctgatcagaaatggagactggaccttccagatcctggtgatgctggagatgaccccccagcagggagatgtgtacatctgccaggtggagcacaccagcctggacagccctgtgacagtggagtggaaggcccagagcgacagcgcccggagcaagaccctgaccggggccggcggctttgtgctgggcctcatcatctgtggggtgggcatcttcatgcaccggcgcagcaagaaggtgcagaggggcagcgcctag

SEQ ID NO: 125165 - DNA, 687 bp, Artificial Sequence
  derived and/or modified sequence
atgatggtgctgcaggtgtctgctgcccccaggacagtggccctgacagccctgctgatggtgctgctgacctctgtggtgcagggccgggccaccccagagaactacctgttccagggccggcaggagtgctacgccttcaacggcacccagcgcttcctggagcgctacatctacaaccgggaggagctggtgcgctttgacagtgatgtgggggagttccgggctgtgacagagctgggccggcctgaggccgagtactggaacagccagaaggacatcctggaggaggagagagctgtgcctgacaggatgtgccgccacaactatgagctgggcggccccatgaccctgcagaggcggggcagcatccaggtgcgctggttcctgaatggccaggaggagacagctggggtggtgtccaccaacctgatcagaaatggagactggaccttccagatcctggtgatgctggagatgaccccccagcagggagatgtgtacacctgccaggtggagcacaccagcctggacagccctgtgacagtggagtggaaggcccagagcgacagcgcccggagcaagaccctgaccggggccggcggctttgtgctgggcctcatcatctgtggggtgggcatcttcatgcaccggcgcagcaagaaggtgcagaggggcagcgcctag

SEQ ID NO: 125166 - DNA, 777 bp, Artificial Sequence
  derived and/or modified sequence
atgatggtgctgcaggtgtctgctgcccccaggacagtggccctgacagccctgctgatggtgctgctgacctctgtggtgcagggccgggccaccccagagaactacctgttccagggccggcaggagtgctacgccttcaacggcacccagcgcttcctggagcgctacatctacaaccgggaggagctggtgcgctttgacagtgatgtgggggagttccgggctgtgacagagctgggccggcctgaggccgagtactggaacagccagaaggacatcctggaggaggagagagctgtgcctgacaggatgtgccgccacaactatgagctgggcggccccatgaccctgcagaggagagtgcagccccgggtgaatgtgagccccagcaagaagggccccctgcagcaccacaacctgctggtgtgccacgtgacagacttctacccaggcagcatccaggtgcgctggttcctgaatggccaggaggagacagctggggtggtgtccaccaacctgatcagaaatggagactggaccttccagatcctggtgatgctggagatgaccccccagcagggagatgtgtacacctgccaggtggagcacaccagcctggacagccctgtgacagtggagtggaaggcccagagcgacagcgcccggagcaagaccctgaccggggccggcggctttgtgctgggcctcatcatctgtggggtgggcatcttcatgcaccggcgcagcaagaaggtgcagaggggcagcgcctag

SEQ ID NO: 125167 - DNA, 690 bp, Artificial Sequence
  derived and/or modified sequence
aagcaggcctggaggggcagcgccacccggctgggcccccagaacagcggccggcaggagtgctacgccttcaacggcacccagcgcttcctggagcgctacatctacaaccgggaggagctggtgcgctttgacagtgatgtgggggagttccgggctgtgacagagctgggccggcctgaggccgagtactggaacagccagaaggacatcctggaggaggagagagctgtgcctgacaggatgtgccgccacaactatgagctgggcggccccatgaccctgcagaggagagtgcagccccgggtgaatgtgagccccagcaagaagggccccctgcagcaccacaacctgctggtgtgccacgtgacagacttctacccaggcagcatccaggtgcgctggttcctgaatggccaggaggagacagctggggtggtgtccaccaacctgatcagaaatggagactggaccttccagatcctggtgatgctggagatgaccccccagcagggagatgtgtacacctgccaggtggagcacaccagcctggacagccctgtgacagtggagtggaaggcccagagcgacagcgcccggagcaagaccctgactggagctgggggctttgtgctgggcctcatcatctgtggggtgggcatcttcatgcacagaagaagcaagaagtag

SEQ ID NO: 125168 - DNA, 687 bp, Artificial Sequence
  derived and/or modified sequence
atgatggtgctgcaggtgtctgctgcccccaggacagtggccctgacagccctgctgatggtgctgctgacctctgtggtgcagggccgggccaccccagagaactacctgttccagggccggcaggagtgctacgccttcaacggcacccagcgcttcctggagcgctacatctacaaccgggaggagtttgccaggtttgacagtgatgtgggggagttccgggctgtgacagagctgggccggcctgctgctgagtactggaacagccagaaggacatcctggaggagaagagagctgtgcctgacaggatgtgccgccacaactatgagctgggcggccccatgaccctgcagaggcggggcagcatccaggtgcgctggttcctgaatggccaggaggagacagctggggtggtgtccaccaacctgatcagaaatggagactggaccttccagatcctggtgatgctggagatgaccccccagcagggagatgtgtacacctgccaggtggagcacaccagcctggacagccctgtgacagtggagtggaaggcccagagcgacagcgcccggagcaagaccctgaccggggccggcggctttgtgctgggcctcatcatctgtggggtgggcatcttcatgcaccggcgcagcaagaaggtgcagaggggcagcgcctag

SEQ ID NO: 125169 - DNA, 687 bp, Artificial Sequence
  derived and/or modified sequence
atgatggtgctgcaggtgtctgctgcccccaggacagtggccctgacagccctgctgatggtgctgctgacctctgtggtgcagggccgggccaccccagagaactacctgttccagggccggcaggagtgctacgccttcaacggcacccagcgcttcctggagcgctacatctacaaccgggaggagtttgtgcgctttgacagtgatgtgggggagttccgggctgtgacagagctgggccgcccagatgaggagtactggaacagccagaaggacatcctggaggagaagagagctgtgcctgacaggatgtgccgccacaactatgagctgggcggccccatgaccctgcagaggcggggcagcatccaggtgcgctggttcctgaatggccaggaggagacagctggggtggtgtccaccaacctgatcagaaatggagactggaccttccagatcctggtgatgctggagatgaccccccagcagggagatgtgtacacctgccaggtggagcacacctccatggacagccctgtgacagtggagtggaaggcccagagcgacagcgcccggagcaagaccctgaccggggccggcggctttgtgctgggcctcatcatctgtggggtgggcatcttcatgcaccggcgcagcaagaaggtgcagaggggcagcgcctag

SEQ ID NO: 125170 - DNA, 708 bp, Artificial Sequence
  derived and/or modified sequence
tgaaactacctgttccagggccggcaggagtgctacgccttcaacggcacccagcgcttcctggagcgctacatctacaaccgggaggagtttgtgcgctttgacagtgatgtgggggagttccgggctgtgacagagctgggccgcccagatgaggagtactggaacagccagaaggacatcctggaggagaagagagctgtgcctgacaggatgtgccgccacaactatgagctgggcggccccatgaccctgcagaggagagtgcagccccgggtgaatgtgagccccagcaagaagggccccctgcagcaccacaacctgctggtgtgccacgtgacagacttctacccaggcagcatccaggtgcgctggttcctgaatggccaggaggagacagctggggtggtgtccaccaacctgatcagaaatggagactggaccttccagatcctggtgatgctggagatgaccccccagcagggagatgtgtacacctgccaggtggagcacacctccatggacagccctgtgacagtggagtggaaggcccagagcgacagcgcccggagcaagaccctgactggagctgggggctttgtgctgggcctcatcatctgtggggtgggcatcttcatgcacagaagaagcaagaagggggagaaggcctgccgcttcaatgaagacctgcacaagcagggcagctag

SEQ ID NO: 125171 - DNA, 777 bp, Artificial Sequence
  derived and/or modified sequence
atgatggtgctgcaggtgtctgctgcccccaggacagtggccctgacagccctgctgatggtgctgctgacctctgtggtgcagggccgggccaccccagagaactacctgttccagggccggcaggagtgctacgccttcaacggcacccagcgcttcctggagcgctacatctacaaccgggaggagtttgtgcgctttgacagtgatgtgggggagttccgggctgtgacagagctgggccgcccagatgaggagtactggaacagccagaaggacatcctggaggagaagagagctgtgcctgacaggatgtgccgccacaactatgagctgggcggccccatgaccctgcagaggagagtgcagccccgggtgaatgtgagccccagcaagaagggccccctgcagcaccacaacctgctggtgtgccacgtgacagacttctacccaggcagcatccaggtgcgctggttcctgaatggccaggaggagacagctggggtggtgtccaccaacctgatcagaaatggagactggaccttccagatcctggtgatgctggagatgaccccccagcagggagatgtgtacacctgccaggtggagcacacctccatggacagccctgtgacagtggagtggaaggcccagagcgacagcgcccggagcaagaccctgaccggggccggcggctttgtgctgggcctcatcatctgtggggtgggcatcttcatgcaccggcgcagcaagaaggtgcagaggggcagcgcctag

SEQ ID NO: 125172 - DNA, 690 bp, Artificial Sequence
  derived and/or modified sequence
aagcaggcctggaggggcagcgccacccggctgggcccccagaacagcggccggcaggagtgctacgccttcaacggcacccagcgcttcctggagcgctacatctacaaccgggaggagtttgtgcgctttgacagtgatgtgggggagttccgggctgtgacagagctgggccgcccagatgaggagtactggaacagccagaaggacatcctggaggaggagagagctgtgcctgacaggatgtgccgccacaactatgagctgggcggccccatgaccctgcagaggagagtgcagccccgggtgaatgtgagccccagcaagaagggccccctgcagcaccacaacctgctggtgtgccacgtgacagacttctacccaggcagcatccaggtgcgctggttcctgaatggccaggaggagacagctggggtggtgtccaccaacctgatcagaaatggagactggaccttccagatcctggtgatgctggagatgaccccccagcagggagatgtgtacacctgccaggtggagcacaccagcctggacagccctgtgacagtggagtggaaggcccagagcgacagcgcccggagcaagaccctgactggagctgggggctttgtgctgggcctcatcatctgtggggtgggcatcttcatgcacagaagaagcaagaagtag

SEQ ID NO: 125173 - DNA, 777 bp, Artificial Sequence
  derived and/or modified sequence
atgatggtgctgcaggtgtctgctgcccccaggacagtggccctgacagccctgctgatggtgctgctgacctctgtggtgcagggccgggccaccccagagaactacctgttccagggccggcaggagtgctacgccttcaacggcacccagcgcttcctggagcgctacatctacaaccgggaggagtttgtgcgctttgacagtgatgtgggggagttccgggctgtgacagagctgggccgcccagatgaggagtactggaacagccagaaggacatcctggaggaggagagagctgtgcctgacaggatgtgccgccacaactatgagctgggcggccccatgaccctgcagaggagagtgcagccccgggtgaatgtgagccccagcaagaagggccccctgcagcaccacaacctgctggtgtgccacgtgacagacttctacccaggcagcatccaggtgcgctggttcctgaatggccaggaggagacagctggggtggtgtccaccaacctgatcagaaatggagactggaccttccagatcctggtgatgctggagatgaccccccagcagggagatgtgtacacctgccaggtggagcacaccagcctggacagccctgtgacagtggagtggaaggcccagagcgacagcgcccggagcaagaccctgaccggggccggcggctttgtgctgggcctcatcatctgtggggtgggcatcttcatgcaccggcgcagcaagaaggtgcagaggggcagcgcctag

SEQ ID NO: 125174 - DNA, 708 bp, Artificial Sequence
  derived and/or modified sequence
tgaaactacctgttccagggccggcaggagtgctacgccttcaacggcacccagcgcttcctggagcgctacatctacaaccgggaggagtttgccaggtttgacagtgatgtgggggagttccgggctgtgacagagctgggccggcctgctgctgagtactggaacagccagaaggacatcctggaggagaagagagctgtgcctgacaggatgtgccgccacaactatgagctgggcggccccatgaccctgcagaggagagtgcagccccgggtgaatgtgagccccagcaagaagggccccctgcagcaccacaacctgctggtgtgccacgtgacagacttctacccaggcagcatccaggtgcgctggttcctgaatggccaggaggagacagctggggtggtgtccaccaacctgatcagaaatggagactggaccttccagatcctggtgatgctggagatgaccccccagcagggagatgtgtacacctgccaggtggagcacaccagcctggacagccctgtgacagtggagtggaaggcccagagcgacagcgcccggagcaagaccctgactggagctgggggctttgtgctgggcctcatcatctgtggggtgggcatcttcatgcacagaagaagcaagaagggggagaaggcctgccgcttcaatgaagacctgcacaagcagggcagctag

SEQ ID NO: 125175 - DNA, 690 bp, Artificial Sequence
  derived and/or modified sequence
aagcaggcctggaggggcagcgccacccggctgggcccccagaacagcggccggcaggagtgctacgccttcaacggcacccagcgcttcctggagcgctacatctacaaccgggaggagtttgccaggtttgacagtgatgtgggggagttccgggctgtgacagagctgggccggcctgctgctgagtactggaacagccagaaggacatcctggaggagaagagagctgtgcctgacaggatgtgccgccacaactatgagctgggcggccccatgaccctgcagaggagagtgcagccccgggtgaatgtgagccccagcaagaagggccccctgcagcaccacaacctgctggtgtgccacgtgacagacttctacccaggcagcatccaggtgcgctggttcctgaatggccaggaggagacagctggggtggtgtccaccaacctgatcagaaatggagactggaccttccagatcctggtgatgctggagatgaccccccagcagggagatgtgtacacctgccaggtggagcacaccagcctggacagccctgtgacagtggagtggaaggcccagagcgacagcgcccggagcaagaccctgactggagctgggggctttgtgctgggcctcatcatctgtggggtgggcatcttcatgcacagaagaagcaagaagtag

SEQ ID NO: 125176 - DNA, 777 bp, Artificial Sequence
  derived and/or modified sequence
atgatggtgctgcaggtgtctgctgcccccaggacagtggccctgacagccctgctgatggtgctgctgacctctgtggtgcagggccgggccaccccagagaactacctgttccagggccggcaggagtgctacgccttcaacggcacccagcgcttcctggagcgctacatctacaaccgggaggagtttgccaggtttgacagtgatgtgggggagttccgggctgtgacagagctgggccggcctgctgctgagtactggaacagccagaaggacatcctggaggagaagagagctgtgcctgacaggatgtgccgccacaactatgagctgggcggccccatgaccctgcagaggagagtgcagccccgggtgaatgtgagccccagcaagaagggccccctgcagcaccacaacctgctggtgtgccacgtgacagacttctacccaggcagcatccaggtgcgctggttcctgaatggccaggaggagacagctggggtggtgtccaccaacctgatcagaaatggagactggaccttccagatcctggtgatgctggagatgaccccccagcagggagatgtgtacacctgccaggtggagcacaccagcctggacagccctgtgacagtggagtggaaggcccagagcgacagcgcccggagcaagaccctgaccggggccggcggctttgtgctgggcctcatcatctgtggggtgggcatcttcatgcaccggcgcagcaagaaggtgcagaggggcagcgcctag

SEQ ID NO: 125177 - DNA, 708 bp, Artificial Sequence
  derived and/or modified sequence
tgaaactacctgttccagggccggcaggagtgctacgccttcaacggcacccagcgcttcctggagcgctacatctacaaccgggaggagctggtgcgctttgacagtgatgtgggggagttccgggctgtgacagagctgggccggcctgaggccgagtactggaacagccagaaggacatcctggaggaggagagagctgtgcctgacaggatgtgccgccacaactatgagctgggcggccccatgaccctgcagaggagagtgcagccccgggtgaatgtgagccccagcaagaagggccccctgcagcaccacaacctgctggtgtgccacgtgacagacttctacccaggcagcatccaggtgcgctggttcctgaatggccaggaggagacagctggggtggtgtccaccaacctgatcagaaatggagactggaccttccagatcctggtgatgctggagatgaccccccagcagggagatgtgtacacctgccaggtggagcacaccagcctggacagccctgtgacagtggagtggaaggcccagagcgacagcgcccggagcaagaccctgactggagctgggggctttgtgctgggcctcatcatctgtggggtgggcatcttcatgcacagaagaagcaagaagggggagaaggcctgccgcttcaatgaagacctgcacaagcagggcagctag

SEQ ID NO: 125178 - DNA, 708 bp, Artificial Sequence
  derived and/or modified sequence
tgaaactacgtgtaccagctgcggcaggagtgctacgccttcaacggcacccagcgcttcctggagcgctacatctacaaccgggaggagtttgtgcgctttgacagtgatgtgggggagttccgggctgtgacagagctgggccgcccagatgaggactactggaacagccagaaggacctgctggaggagaagagagctgtgcctgacagagtgtgccgccacaactatgagctggatgaggccgtgaccctgcagaggagagtgcagcccaaggtgaatgtgagccccagcaagaagggccccctgcagcaccacaacctgctggtgtgccacgtgacagacttctacccaggcagcatccaggtgcgctggttcctgaatggccaggaggagacagctggggtggtgtccaccaacctgatcagaaatggagactggaccttccagatcctggtgatgctggagatgaccccccagcagggagatgtgtacatctgccaggtggagcacaccagcctggacagccctgtgacagtggagtggaaggcccagagcgacagcgcccggagcaagaccctgactggagctgggggctttgtgctgggcctcatcatctgtggggtgggcatcttcatgcacagaagaagcaagaagggggagaaggcctgcaagttcaatgaagacctgcacaagcagggcagctag

SEQ ID NO: 125179 - DNA, 690 bp, Artificial Sequence
  derived and/or modified sequence
aagcaggcctggaggggcagcgccacccggctgggcccccagaacagcggccggcaggagtgctacgccttcaacggcacccagcgcttcctggagcgctacatctacaaccgggaggagtttgtgcgctttgacagtgatgtgggggagttccgggctgtgacagagctgggccgcccagatgaggagtactggaacagccagaaggacatcctggaggagaagagagctgtgcctgacaggatgtgccgccacaactatgagctgggcggccccatgaccctgcagaggagagtgcagccccgggtgaatgtgagccccagcaagaagggccccctgcagcaccacaacctgctggtgtgccacgtgacagacttctacccaggcagcatccaggtgcgctggttcctgaatggccaggaggagacagctggggtggtgtccaccaacctgatcagaaatggagactggaccttccagatcctggtgatgctggagatgaccccccagcagggagatgtgtacacctgccaggtggagcacacctccatggacagccctgtgacagtggagtggaaggcccagagcgacagcgcccggagcaagaccctgactggagctgggggctttgtgctgggcctcatcatctgtggggtgggcatcttcatgcacagaagaagcaagaagtag

SEQ ID NO: 125180 - DNA, 687 bp, Artificial Sequence
  derived and/or modified sequence
atgatggtgctgcaggtgtctgctgcccccaggacagtggccctgacagccctgctgatggtgctgctgacctctgtggtgcagggccgggccaccccagagaactacgtgtaccagctgcggcaggagtgctacgccttcaacggcacccagcgcttcctggagcgctacatctacaaccgggaggagtttgtgcgctttgacagtgatgtgggggagttccgggctgtgacagagctgggccgcccagatgaggactactggaacagccagaaggacctgctggaggagaagagagctgtgcctgacagagtgtgccgccacaactatgagctggatgaagctgtgaccctgcagaggcggggcagcatccaggtgcgctggttcctgaatggccaggaggagacagctggggtggtgtccaccaacctgatcagaaatggagactggaccttccagatcctggtgatgctggagatgaccccccagcagggagatgtgtacatctgccaggtggagcacaccagcctggacagccctgtgacagtggagtggaaggcccagagcgacagcgcccggagcaagaccctgaccggggccggcggctttgtgctgggcctcatcatctgtggggtgggcatcttcatgcaccggcgcagcaagaaggtgcagaggggcagcgcctag

SEQ ID NO: 125181 - DNA, 708 bp, Artificial Sequence
  derived and/or modified sequence
tgaaactacctgttccagggccggcaggagtgctacgccttcaacggcacccagcgcttcctggagcgctacatctacaaccgggaggagtttgtgcgctttgacagtgatgtgggggagttccgggctgtgacagagctgggccgcccagatgaggagtactggaacagccagaaggacatcctggaggaggagagagctgtgcctgacaggatgtgccgccacaactatgagctgggcggccccatgaccctgcagaggagagtgcagccccgggtgaatgtgagccccagcaagaagggccccctgcagcaccacaacctgctggtgtgccacgtgacagacttctacccaggcagcatccaggtgcgctggttcctgaatggccaggaggagacagctggggtggtgtccaccaacctgatcagaaatggagactggaccttccagatcctggtgatgctggagatgaccccccagcagggagatgtgtacacctgccaggtggagcacaccagcctggacagccctgtgacagtggagtggaaggcccagagcgacagcgcccggagcaagaccctgactggagctgggggctttgtgctgggcctcatcatctgtggggtgggcatcttcatgcacagaagaagcaagaagggggagaaggcctgccgcttcaatgaagacctgcacaagcagggcagctag

SEQ ID NO: 125182 - DNA, 687 bp, Artificial Sequence
  derived and/or modified sequence
atgatggtgctgcaggtgtctgctgcccccaggacagtggccctgacagccctgctgatggtgctgctgacctctgtggtgcagggccgggccaccccagagaactacctgttccagggccggcaggagtgctacgccttcaacggcacccagcgcttcctggagcgctacatctacaaccgggaggagtttgtgcgctttgacagtgatgtgggggagttccgggctgtgacagagctgggccgcccagatgaggagtactggaacagccagaaggacatcctggaggaggagagagctgtgcctgacaggatgtgccgccacaactatgagctgggcggccccatgaccctgcagaggcggggcagcatccaggtgcgctggttcctgaatggccaggaggagacagctggggtggtgtccaccaacctgatcagaaatggagactggaccttccagatcctggtgatgctggagatgaccccccagcagggagatgtgtacacctgccaggtggagcacaccagcctggacagccctgtgacagtggagtggaaggcccagagcgacagcgcccggagcaagaccctgaccggggccggcggctttgtgctgggcctcatcatctgtggggtgggcatcttcatgcaccggcgcagcaagaaggtgcagaggggcagcgcctag

SEQ ID NO: 125183 - DNA, 690 bp, Artificial Sequence
  derived and/or modified sequence
aagcaggcctggaggggcagcgccacccggctgggcccccagaacagcctgcggcaggagtgctacgccttcaacggcacccagcgcttcctggagcgctacatctacaaccgggaggagtttgtgcgctttgacagtgatgtgggggagttccgggctgtgacagagctgggccgcccagatgaggactactggaacagccagaaggacctgctggaggagaagagagctgtgcctgacagagtgtgccgccacaactatgagctggatgaggccgtgaccctgcagaggagagtgcagcccaaggtgaatgtgagccccagcaagaagggccccctgcagcaccacaacctgctggtgtgccacgtgacagacttctacccaggcagcatccaggtgcgctggttcctgaatggccaggaggagacagctggggtggtgtccaccaacctgatcagaaatggagactggaccttccagatcctggtgatgctggagatgaccccccagcagggagatgtgtacatctgccaggtggagcacaccagcctggacagccctgtgacagtggagtggaaggcccagagcgacagcgcccggagcaagaccctgactggagctgggggctttgtgctgggcctcatcatctgtggggtgggcatcttcatgcacagaagaagcaagaagtag

SEQ ID NO: 125184 - DNA, 372 bp, Artificial Sequence
  derived and/or modified sequence
atgatggtgctgcaggtgtctgctgcccccaggacagtggccctgacagccctgctgatggtgctgctgacctctgtggtgcagggccgggccaccccagagaactacctgttccagggccggcaggagtgctacgccttcaacggcacccagcgcttcctggagcgctacatctacaaccgggaggagtttgccaggtttgacagtgatgtgggggagttccgggctgtgacagagctgggccggcctgctgctgagtactggaacagccagaaggacatcctggaggagaagagagctgtgcctgacaggatgtgccgccacaactatgagctgggcggccccatgaccctgcagaggagaggagagtag

SEQ ID NO: 125185 - DNA, 372 bp, Artificial Sequence
  derived and/or modified sequence
atgatggtgctgcaggtgtctgctgcccccaggacagtggccctgacagccctgctgatggtgctgctgacctctgtggtgcagggccgggccaccccagagaactacctgttccagggccggcaggagtgctacgccttcaacggcacccagcgcttcctggagcgctacatctacaaccgggaggagctggtgcgctttgacagtgatgtgggggagttccgggctgtgacagagctgggccggcctgaggccgagtactggaacagccagaaggacatcctggaggaggagagagctgtgcctgacaggatgtgccgccacaactatgagctgggcggccccatgaccctgcagaggagaggagagtag

SEQ ID NO: 125186 - DNA, 372 bp, Artificial Sequence
  derived and/or modified sequence
atgatggtgctgcaggtgtctgctgcccccaggacagtggccctgacagccctgctgatggtgctgctgacctctgtggtgcagggccgggccaccccagagaactacctgttccagggccggcaggagtgctacgccttcaacggcacccagcgcttcctggagcgctacatctacaaccgggaggagtttgtgcgctttgacagtgatgtgggggagttccgggctgtgacagagctgggccgcccagatgaggagtactggaacagccagaaggacatcctggaggagaagagagctgtgcctgacaggatgtgccgccacaactatgagctgggcggccccatgaccctgcagaggagaggagagtag

SEQ ID NO: 125187 - DNA, 372 bp, Artificial Sequence
  derived and/or modified sequence
atgatggtgctgcaggtgtctgctgcccccaggacagtggccctgacagccctgctgatggtgctgctgacctctgtggtgcagggccgggccaccccagagaactacctgttccagggccggcaggagtgctacgccttcaacggcacccagcgcttcctggagcgctacatctacaaccgggaggagtttgtgcgctttgacagtgatgtgggggagttccgggctgtgacagagctgggccgcccagatgaggagtactggaacagccagaaggacatcctggaggaggagagagctgtgcctgacaggatgtgccgccacaactatgagctgggcggccccatgaccctgcagaggagaggagagtag

SEQ ID NO: 125188 - DNA, 750 bp, Artificial Sequence
  derived and/or modified sequence
atggtgctgctgacctctgtggtgcagggccgggccaccccagaaaattatgtgtaccagctgcggcaggagtgctacgccttcaacggcacccagcgcttcctggagcgctacatctacaaccgggaggagtttgtgcgctttgacagtgatgtgggggagttccgggctgtgacagagctgggccgcccagatgaggactactggaacagccagaaggacctgctggaggagaagagagctgtgcctgacagagtgtgccgccacaactatgagctggatgaggccgtgaccctgcagaggagagtgcagcccaaggtgaatgtgagccccagcaagaagggccccctgcagcaccacaacctgctggtgtgccacgtgacagacttctacccaggcagcatccaggtgcgctggttcctgaatggccaggaggagacagctggggtggtgtccaccaacctgatcagaaatggagactggaccttccagatcctggtgatgctggagatgaccccccagcagggagatgtgtacatctgccaggtggagcacaccagcctggacagccctgtgacagtggagtggaaggcccagagcgacagcgcccggagcaagaccctgactggagctgggggctttgtgctgggcctcatcatctgtggggtgggcatcttcatgcacagaagaagcaagaagggggagaaggcctgcaagttcaatgaagacctgcacaagcagggcagctag

SEQ ID NO: 125189 - DNA, 381 bp, Artificial Sequence
  derived and/or modified sequence
atgatggtgctgcaggtgtctgctgcccccaggacagtggccctgacagccctgctgatggtgctgctgacctctgtggtgcagggccgggccaccccagagaactacgtgtaccagctgcggcaggagtgctacgccttcaacggcacccagcgcttcctggagcgctacatctacaaccgggaggagtttgtgcgctttgacagtgatgtgggggagttccgggctgtgacagagctgggccgcccagatgaggactactggaacagccagaaggacctgctggaggagaagagagctgtgcctgacagagtgtgccgccacaactatgagctggatgaagctgtgaccctgcagaggcgggagcggggcaagaagtag

SEQ ID NO: 125190 - DNA, 305 bp, Artificial Sequence
  derived and/or modified sequence
gtcgaagcgcacgaactcctcccggttgtagatgtatctctccaggaagcgctgtgtcccattaaacgcgtagcattcctgccgtccctggaaaaggtgaatcccagccatgctgattcctctccacccatttccagtgctagaggcccacagtttcagtctcatctgcctccactcggcctcagttcctcatcactgttcctgtgctcacagtcatcaattatagaccccacaacatgcgccctgaagacagaatgttccatatcagagctgtgatcttgagagccctctccttggctttcctg

SEQ ID NO: 125191 - DNA, 305 bp, Artificial Sequence
  derived and/or modified sequence
gtcgaagcgcgcgaactcctcccggttgtagatgtatctctccaggaagcgctgtgtcccattaaacgcgtagcattcctgccgtccctggaaaaggtgaatcccagccatgctgattcctctccacccatttccagtgctagaggcccacagtttcagtctcatctgcctccactcggcctcagttcctcatcactgttcctgtgctcacagtcatcaattatagaccccacaacatgcgccctgaagacagaatgttccatatcagagctgtgatcttgagagccctctccttggctttcctg

SEQ ID NO: 125192 - DNA, 305 bp, Artificial Sequence
  derived and/or modified sequence
gtcgaagcgcacgagctcctcccggttgtagatgtatctctccaggaagcgctgtgtcccattaaacgcgtagcattcctgccgtccctggaaaaggtgaatcccagccatgctgattcctctccacccatttccagtgctagaggcccacagtttcagtctcatctgcctccactcggcctcagttcctcatcactgttcctgtgctcacagtcatcaattatagaccccacaacatgcgccctgaagacagaatgttccatatcagagctgtgatcttgagagccctctccttggctttcctg

SEQ ID NO: 125193 - DNA, 305 bp, Artificial Sequence
  derived and/or modified sequence
gtcgaagcgcacgaactcctcccggttgtagatgtatctctccaggaagcgctgtgtcccattaaacgcgtagcattcctgccgtaactggtacacgtgaatcccagccatgctgattcctctccacccatttccagtgctagaggcccacagtttcagtctcatctgcctccactcggcctcagttcctcatcactgttcctgtgctcacagtcatcaattatagaccccacaacatgcgccctgaagacagaatgttccatatcagagctgtgatcttgagagccctctccttggctttcctg

SEQ ID NO: 125194 - DNA, 1560 bp, Artificial Sequence
  derived and/or modified sequence
gtcacagaagactacttgggttcatggtctctaatatttcaaacaggagctccctttagcgagtccttcttttcctgactgcagctcttttcattttgccatccttttccagctccatgatggttctgcaggtttctgcggccccccggacagtggctctgacggcgttactgatggtgctgctcacatctgtggtccagggcagggccactccagagaattacgtgtaccagttacggcaggaatgctacgcgtttaatgggacacagcgcttcctggagagatacatctacaaccgggaggagttcgtgcgcttcgacagcgacgtgggggagttccgggcggtgacggagctggggcggcctgatgaggactactggaacagccagaaggacctcctggaggagaagcgggcagtgccggacagggtatgcagacacaactacgagctggacgaggccgtgaccctgcagcgccgagtccagcctaaggtgaacgtttccccctccaagaaggggcccctgcagcaccacaacctgcttgtctgccacgtgacagatttctacccaggcagcattcaagtccgatggttcctgaatggacaggaggaaacagctggggtcgtgtccaccaacctgatccgtaatggagactggaccttccagatcctggtgatgctggaaatgaccccccagcagggagacgtctacatctgccaagtggagcacaccagcctggacagtcctgtcaccgtggagtggaaggcacagtctgattctgcccggagtaagacattgacgggagctgggggcttcgtgctggggctcatcatctgtggagtgggcatcttcatgcacaggaggagcaagaaagttcaacgaggatctgcataaacagggttcctgacctcaccgaaaagactaatgtgccttagaacaagcatttgctgtgttttgttagcacctggttccaggacagaccctcagcttcccaagaggatactgctgccaagaagttgctctgaagtcagtttctatcgttctgctctttgattcaaagcactgtttctctcactgggcctccaaccatgttcccttcttcttagcaccacaaataatcaaaacccaacataagtgtttgttttcctttaaaaatatgcatcaaatcgtctctcattacttttctctgagggttttagtaaacagtaggagttaataaagaagttcattttggtttacacgtaggaaagaagagaagcatgaaagtggagatatgttaactattgtataatgtggcctgttatacatgacactcttctgaattgactgtatttcagtgagctgcccccaaatcaagtttagtgccctcatccatttatgtctcagaccgctattcttaactattcaatggtgagcagactgcaaatctgcctgataggacccgtattcccacagcactaattcaacatatatcttactgagagcatgttttatcattaccattaagaagttaaatgaacatcagaatttaaaatcataaatataatctaatacactttaa

SEQ ID NO: 125195 - DNA, 1424 bp, Artificial Sequence
  derived and/or modified sequence
gagctccctttagcgagtccttcttttcctgactgcagctcttttcattttgccatccttttccagctccatgatggttctgcaggtttctgcggccccccggacagtggctctgacggcgttactgatggtgctgctcacatctgtggtccagggcagggccactccagagaattaccttttccagggacggcaggaatgctacgcgtttaatgggacacagcgcttcctggagagatacatctacaaccgggaggagctcgtgcgcttcgacagcgacgtgggggagttccgggcggtgacggagctggggcggcctgaggcggagtactggaacagccagaaggacatcctggaggaggagcgggcagtgccggacaggatgtgcagacacaactacgagctgggcgggcccatgaccctgcagcgccgaggcagcattcaagtccgatggttcctgaatggacaggaggaaacagctggggtcgtgtccaccaacctgatccgtaatggagactggaccttccagatcctggtgatgctggaaatgaccccccagcagggagatgtctacacctgccaagtggagcacaccagcctggatagtcctgtcaccgtggagtggaaggcacagtctgattctgcccggagtaagacattgacgggagctgggggcttcgtgctggggctcatcatctgtggagtgggcatcttcatgcacaggaggagcaagaaagttcaacgaggatctgcataaacagggttcctgagctcactgaaaagactattgtgccttaggaaaagcatttgctgtgtttcgttagcatctggctccaggacagaccttcaacttccaaattggatactgctgccaagaagttgctctgaagtcagtttctatcattctgctctttgattcaaagcactgtttctctcactgggcctccaaccatgttcccttcttcttagcaccacaaataatcaaaacccaacatgactgtttgttttcctttaaaaatatgcaccaaatcatctctcatcacttttctctgagggttttagtagacagtaggagttaataaagaagttcattttggtttaaacataggaaagaagagaaccatgaaaatggggatatgttaactattgtataatggggcctgttacacatgacactcttctgaattgactgtatttcagtgagctgcccccaaatcaagtttagtgccctcatccatttatgtctcagaccactattcttaactattcaatggtgagcagactgcaaatctgcctgataggacccatattcccacagcactaattcaacatataccttactgagagcatgttttatcattaccattaagaagttaaatgaacatcagaatttaaaatcataaatataatctaatacactttaa

SEQ ID NO: 125196 - DNA, 1560 bp, Artificial Sequence
  derived and/or modified sequence
gtcacagaagactacttgggttcatggtctctaatatttcaaacaggagctccctttagcgagtccttcttttcctgactgcagctcttttcattttgccatccttttccagctccatgatggttctgcaggtttctgcggccccccggacagtggctctgacggcgttactgatggtgctgctcacatctgtggtccagggcagggccactccagagaattaccttttccagggacggcaggaatgctacgcgtttaatgggacacagcgcttcctggagagatacatctacaaccgggaggagctcgtgcgcttcgacagcgacgtgggggagttccgggcggtgacggagctggggcggcctgaggcggagtactggaacagccagaaggacatcctggaggaggagcgggcagtgccggacaggatgtgcagacacaactacgagctgggcgggcccatgaccctgcagcgccgagtccagcctagggtgaatgtttccccctccaagaaggggcccttgcagcaccacaacctgcttgtctgccacgtgacggatttctacccaggcagcattcaagtccgatggttcctgaatggacaggaggaaacagctggggtcgtgtccaccaacctgatccgtaatggagactggaccttccagatcctggtgatgctggaaatgaccccccagcagggagatgtctacacctgccaagtggagcacaccagcctggatagtcctgtcaccgtggagtggaaggcacagtctgattctgcccggagtaagacattgacgggagctgggggcttcgtgctggggctcatcatctgtggagtgggcatcttcatgcacaggaggagcaagaaagttcaacgaggatctgcataaacagggttcctgagctcactgaaaagactattgtgccttaggaaaagcatttgctgtgtttcgttagcatctggctccaggacagaccttcaacttccaaattggatactgctgccaagaagttgctctgaagtcagtttctatcattctgctctttgattcaaagcactgtttctctcactgggcctccaaccatgttcccttcttcttagcaccacaaataatcaaaacccaacatgactgtttgttttcctttaaaaatatgcaccaaatcatctctcatcacttttctctgagggttttagtagacagtaggagttaataaagaagttcattttggtttaaacataggaaagaagagaaccatgaaaatggggatatgttaactattgtataatggggcctgttacacatgacactcttctgaattgactgtatttcagtgagctgcccccaaatcaagtttagtgccctcatccatttatgtctcagaccactattcttaactattcaatggtgagcagactgcaaatctgcctgataggacccatattcccacagcactaattcaacatataccttactgagagcatgttttatcattaccattaagaagttaaatgaacatcagaatttaaaatcataaatataatctaatacactttaa

SEQ ID NO: 125197 - DNA, 688 bp, Artificial Sequence
  derived and/or modified sequence
aaacaggcctggagaggctctgcgacccgcttaggaccacagaactcgggacggcaggaatgctacgcgtttaatgggacacagcgcttcctggagagatacatctacaaccgggaggagctcgtgcgcttcgacagcgacgtgggggagttccgggcggtgacggagctggggcggcctgaggcggagtactggaacagccagaaggacatcctggaggaggagcgggcagtgccggacaggatgtgcagacacaactacgagctgggcgggcccatgaccctgcagcgccgagtccagcctagggtgaatgtttccccctccaagaaggggcccttgcagcaccacaacctgcttgtctgccacgtgacggatttctacccaggcagcattcaagtccgatggttcctgaatggacaggaggaaacagctggggtcgtgtccaccaacctgatccgtaatggagactggaccttccagatcctggtgatgctggaaatgaccccccagcagggagatgtctacacctgccaagtggagcacaccagcctggatagtcctgtcaccgtggagtggaaggcacagtctgattctgcccggagtaagacattgacgggagctgggggcttcgtgctggggctcatcatctgtggagtgggcatcttcatgcacaggaggagcaagaaag

SEQ ID NO: 125198 - DNA, 1424 bp, Artificial Sequence
  derived and/or modified sequence
gagctccctttagcgagtccttcttttcctgactgcagctcttttcattttgccatccttttccagctccatgatggttctgcaggtttctgcggccccccggacagtggctctgacggcgttactgatggtgctgctcacatctgtggtccagggcagggccactccagagaattaccttttccagggacggcaggaatgctacgcgtttaatgggacacagcgcttcctggagagatacatctacaaccgggaggagttcgcgcgcttcgacagcgacgtgggggagttccgggcggtgacggagctggggcggcctgctgcggagtactggaacagccagaaggacatcctggaggagaagcgggcagtgccggacaggatgtgcagacacaactacgagctgggcgggcccatgaccctgcagcgccgaggcagcattcaagtccgatggttcctgaatggacaggaggaaacagctggggtcgtgtccaccaacctgatccgtaatggagactggaccttccagatcctggtgatgctggaaatgaccccccagcagggagatgtctacacctgccaagtggagcacaccagcctggatagtcctgtcaccgtggagtggaaggcacagtctgattctgcccggagtaagacattgacgggagctgggggcttcgtgctggggctcatcatctgtggagtgggcatcttcatgcacaggaggagcaagaaagttcaacgaggatctgcataaacagggttcctgagctcactgaaaagactattgtgccttaggaaaagcatttgctgtgtttcgttagcatctggctccaggacagaccttcaacttccaaattggatactgctgccaagaagttgctctgaagtcagtttctatcattctgctctttgattcaaagcactgtttctctcactgggcctccaaccatgttcccttcttcttagcaccacaaataatcaaaacccaacatgactgtttgttttcctttaaaaatatgcaccaaatcatctctcatcacttttctctgagggttttagtagacagtaggagttaataaagaagttcattttggtttaaacataggaaagaagagaaccatgaaaatggggatatgttaactattgtataatggggcctgttacacatgacactcttctgaattgactgtatttcagtgagctgcccccaaatcaagtttagtgccctcatccatttatgtctcagaccactattcttaactattcaatggtgagcagactgcaaatctgcctgataggacccatattcccacagcactaattcaacatataccttactgagagcatgttttatcattaccattaagaagttaaatgaacatcagaatttaaaatcataaatataatctaatacactttaa

SEQ ID NO: 125199 - DNA, 1424 bp, Artificial Sequence
  derived and/or modified sequence
gagctccctttagcgagtccttcttttcctgactgcagctcttttcattttgccatccttttccagctccatgatggttctgcaggtttctgcggccccccggacagtggctctgacggcgttactgatggtgctgctcacatctgtggtccagggcagggccactccagagaattaccttttccagggacggcaggaatgctacgcgtttaatgggacacagcgcttcctggagagatacatctacaaccgggaggagttcgtgcgcttcgacagcgacgtgggggagttccgggcggtgacggagctggggcggcctgatgaggagtactggaacagccagaaggacatcctggaggagaagcgggcagtgccggacaggatgtgcagacacaactacgagctgggcgggcccatgaccctgcagcgccgaggcagcattcaagtccgatggttcctgaatggacaggaggaaacagctggggtcgtgtccaccaacctgatccgtaatggagactggaccttccagatcctggtgatgctggaaatgaccccccagcagggagatgtctacacctgccaagtggagcacaccagcatggatagtcctgtcaccgtggagtggaaggcacagtctgattctgcccggagtaagacattgacgggagctgggggcttcgtgctggggctcatcatctgtggagtgggcatcttcatgcacaggaggagcaagaaagttcaacgaggatctgcataaacagggttcctgagctcactgaaaagactattgtgccttaggaaaagcatttgctgtgtttcgttagcatctggctccaggacagaccttcaacttccaaattggatactgctgccaagaagttgctctgaagtcagtttctatcattctgctctttgattcaaagcactgtttctctcactgggcctccaaccatgttcccttcttcttagcaccacaaataatcaaaacccaacatgactgtttgttttcctttaaaaatatgcaccaaatcatctctcatcacttttctctgagggttttagtagacagtaggagttaataaagaagttcattttggtttaaacataggaaagaagagaaccatgaaaatggggatatgttaactattgtataatggggcctgttacacatgacactcttctgaattgactgtatttcagtgagctgcccccaaatcaagtttagtgccctcatccatttatgtctcagaccactattcttaactattcaatggtgagcagactgcaaatctgcctgataggacccatattcccacagcactaattcaacatataccttactgagagcatgttttatcattaccattaagaagttaaatgaacatcagaatttaaaatcataaatataatctaatacactttaa

SEQ ID NO: 125200 - DNA, 1361 bp, Artificial Sequence
  derived and/or modified sequence
agaattaccttttccagggacggcaggaatgctacgcgtttaatgggacacagcgcttcctggagagatacatctacaaccgggaggagttcgtgcgcttcgacagcgacgtgggggagttccgggcggtgacggagctggggcggcctgatgaggagtactggaacagccagaaggacatcctggaggagaagcgggcagtgccggacaggatgtgcagacacaactacgagctgggcgggcccatgaccctgcagcgccgagtccagcctagggtgaatgtttccccctccaagaaggggcccttgcagcaccacaacctgcttgtctgccacgtgacggatttctacccaggcagcattcaagtccgatggttcctgaatggacaggaggaaacagctggggtcgtgtccaccaacctgatccgtaatggagactggaccttccagatcctggtgatgctggaaatgaccccccagcagggagatgtctacacctgccaagtggagcacaccagcatggatagtcctgtcaccgtggagtggaaggcacagtctgattctgcccggagtaagacattgacgggagctgggggcttcgtgctggggctcatcatctgtggagtgggcatcttcatgcacaggaggagcaagaaaggtgagaaagcctgcaggttcaacgaggatctgcataaacagggttcctgagctcactgaaaagactattgtgccttaggaaaagcatttgctgtgtttcgttagcatctggctccaggacagaccttcaacttccaaattggatactgctgccaagaagttgctctgaagtcagtttctatcattctgctctttgattcaaagcactgtttctctcactgggcctccaaccatgttcccttcttcttagcaccacaaataatcaaaacccaacatgactgtttgttttcctttaaaaatatgcaccaaatcatctctcatcacttttctctgagggttttagtagacagtaggagttaataaagaagttcattttggtttaaacataggaaagaagagaaccatgaaaatggggatatgttaactattgtataatggggcctgttacacatgacactcttctgaattgactgtatttcagtgagctgcccccaaatcaagtttagtgccctcatccatttatgtctcagaccactattcttaactattcaatggtgagcagactgcaaatctgcctgataggacccatattcccacagcactaattcaacatataccttactgagagcatgttttatcattaccattaagaagttaaatgaacatcagaatttaaaatcataaatataatctaatacactttaa

SEQ ID NO: 125201 - DNA, 1560 bp, Artificial Sequence
  derived and/or modified sequence
gtcacagaagactacttgggttcatggtctctaatatttcaaacaggagctccctttagcgagtccttcttttcctgactgcagctcttttcattttgccatccttttccagctccatgatggttctgcaggtttctgcggccccccggacagtggctctgacggcgttactgatggtgctgctcacatctgtggtccagggcagggccactccagagaattaccttttccagggacggcaggaatgctacgcgtttaatgggacacagcgcttcctggagagatacatctacaaccgggaggagttcgtgcgcttcgacagcgacgtgggggagttccgggcggtgacggagctggggcggcctgatgaggagtactggaacagccagaaggacatcctggaggagaagcgggcagtgccggacaggatgtgcagacacaactacgagctgggcgggcccatgaccctgcagcgccgagtccagcctagggtgaatgtttccccctccaagaaggggcccttgcagcaccacaacctgcttgtctgccacgtgacggatttctacccaggcagcattcaagtccgatggttcctgaatggacaggaggaaacagctggggtcgtgtccaccaacctgatccgtaatggagactggaccttccagatcctggtgatgctggaaatgaccccccagcagggagatgtctacacctgccaagtggagcacaccagcatggatagtcctgtcaccgtggagtggaaggcacagtctgattctgcccggagtaagacattgacgggagctgggggcttcgtgctggggctcatcatctgtggagtgggcatcttcatgcacaggaggagcaagaaagttcaacgaggatctgcataaacagggttcctgagctcactgaaaagactattgtgccttaggaaaagcatttgctgtgtttcgttagcatctggctccaggacagaccttcaacttccaaattggatactgctgccaagaagttgctctgaagtcagtttctatcattctgctctttgattcaaagcactgtttctctcactgggcctccaaccatgttcccttcttcttagcaccacaaataatcaaaacccaacatgactgtttgttttcctttaaaaatatgcaccaaatcatctctcatcacttttctctgagggttttagtagacagtaggagttaataaagaagttcattttggtttaaacataggaaagaagagaaccatgaaaatggggatatgttaactattgtataatggggcctgttacacatgacactcttctgaattgactgtatttcagtgagctgcccccaaatcaagtttagtgccctcatccatttatgtctcagaccactattcttaactattcaatggtgagcagactgcaaatctgcctgataggacccatattcccacagcactaattcaacatataccttactgagagcatgttttatcattaccattaagaagttaaatgaacatcagaatttaaaatcataaatataatctaatacactttaa

SEQ ID NO: 125202 - DNA, 688 bp, Artificial Sequence
  derived and/or modified sequence
aaacaggcctggagaggctctgcgacccgcttaggaccacagaactcgggacggcaggaatgctacgcgtttaatgggacacagcgcttcctggagagatacatctacaaccgggaggagttcgtgcgcttcgacagcgacgtgggggagttccgggcggtgacggagctggggcggcctgatgaggagtactggaacagccagaaggacatcctggaggaggagcgggcagtgccggacaggatgtgcagacacaactacgagctgggcgggcccatgaccctgcagcgccgagtccagcctagggtgaatgtttccccctccaagaaggggcccttgcagcaccacaacctgcttgtctgccacgtgacggatttctacccaggcagcattcaagtccgatggttcctgaatggacaggaggaaacagctggggtcgtgtccaccaacctgatccgtaatggagactggaccttccagatcctggtgatgctggaaatgaccccccagcagggagatgtctacacctgccaagtggagcacaccagcctggatagtcctgtcaccgtggagtggaaggcacagtctgattctgcccggagtaagacattgacgggagctgggggcttcgtgctggggctcatcatctgtggagtgggcatcttcatgcacaggaggagcaagaaag

SEQ ID NO: 125203 - DNA, 1560 bp, Artificial Sequence
  derived and/or modified sequence
gtcacagaagactacttgggttcatggtctctaatatttcaaacaggagctccctttagcgagtccttcttttcctgactgcagctcttttcattttgccatccttttccagctccatgatggttctgcaggtttctgcggccccccggacagtggctctgacggcgttactgatggtgctgctcacatctgtggtccagggcagggccactccagagaattaccttttccagggacggcaggaatgctacgcgtttaatgggacacagcgcttcctggagagatacatctacaaccgggaggagttcgtgcgcttcgacagcgacgtgggggagttccgggcggtgacggagctggggcggcctgatgaggagtactggaacagccagaaggacatcctggaggaggagcgggcagtgccggacaggatgtgcagacacaactacgagctgggcgggcccatgaccctgcagcgccgagtccagcctagggtgaatgtttccccctccaagaaggggcccttgcagcaccacaacctgcttgtctgccacgtgacggatttctacccaggcagcattcaagtccgatggttcctgaatggacaggaggaaacagctggggtcgtgtccaccaacctgatccgtaatggagactggaccttccagatcctggtgatgctggaaatgaccccccagcagggagatgtctacacctgccaagtggagcacaccagcctggatagtcctgtcaccgtggagtggaaggcacagtctgattctgcccggagtaagacattgacgggagctgggggcttcgtgctggggctcatcatctgtggagtgggcatcttcatgcacaggaggagcaagaaagttcaacgaggatctgcataaacagggttcctgagctcactgaaaagactattgtgccttaggaaaagcatttgctgtgtttcgttagcatctggctccaggacagaccttcaacttccaaattggatactgctgccaagaagttgctctgaagtcagtttctatcattctgctctttgattcaaagcactgtttctctcactgggcctccaaccatgttcccttcttcttagcaccacaaataatcaaaacccaacatgactgtttgttttcctttaaaaatatgcaccaaatcatctctcatcacttttctctgagggttttagtagacagtaggagttaataaagaagttcattttggtttaaacataggaaagaagagaaccatgaaaatggggatatgttaactattgtataatggggcctgttacacatgacactcttctgaattgactgtatttcagtgagctgcccccaaatcaagtttagtgccctcatccatttatgtctcagaccactattcttaactattcaatggtgagcagactgcaaatctgcctgataggacccatattcccacagcactaattcaacatataccttactgagagcatgttttatcattaccattaagaagttaaatgaacatcagaatttaaaatcataaatataatctaatacactttaa

SEQ ID NO: 125204 - DNA, 1361 bp, Artificial Sequence
  derived and/or modified sequence
agaattaccttttccagggacggcaggaatgctacgcgtttaatgggacacagcgcttcctggagagatacatctacaaccgggaggagttcgcgcgcttcgacagcgacgtgggggagttccgggcggtgacggagctggggcggcctgctgcggagtactggaacagccagaaggacatcctggaggagaagcgggcagtgccggacaggatgtgcagacacaactacgagctgggcgggcccatgaccctgcagcgccgagtccagcctagggtgaatgtttccccctccaagaaggggcccttgcagcaccacaacctgcttgtctgccacgtgacggatttctacccaggcagcattcaagtccgatggttcctgaatggacaggaggaaacagctggggtcgtgtccaccaacctgatccgtaatggagactggaccttccagatcctggtgatgctggaaatgaccccccagcagggagatgtctacacctgccaagtggagcacaccagcctggatagtcctgtcaccgtggagtggaaggcacagtctgattctgcccggagtaagacattgacgggagctgggggcttcgtgctggggctcatcatctgtggagtgggcatcttcatgcacaggaggagcaagaaaggtgagaaagcctgcaggttcaacgaggatctgcataaacagggttcctgagctcactgaaaagactattgtgccttaggaaaagcatttgctgtgtttcgttagcatctggctccaggacagaccttcaacttccaaattggatactgctgccaagaagttgctctgaagtcagtttctatcattctgctctttgattcaaagcactgtttctctcactgggcctccaaccatgttcccttcttcttagcaccacaaataatcaaaacccaacatgactgtttgttttcctttaaaaatatgcaccaaatcatctctcatcacttttctctgagggttttagtagacagtaggagttaataaagaagttcattttggtttaaacataggaaagaagagaaccatgaaaatggggatatgttaactattgtataatggggcctgttacacatgacactcttctgaattgactgtatttcagtgagctgcccccaaatcaagtttagtgccctcatccatttatgtctcagaccactattcttaactattcaatggtgagcagactgcaaatctgcctgataggacccatattcccacagcactaattcaacatataccttactgagagcatgttttatcattaccattaagaagttaaatgaacatcagaatttaaaatcataaatataatctaatacactttaa

SEQ ID NO: 125205 - DNA, 688 bp, Artificial Sequence
  derived and/or modified sequence
aaacaggcctggagaggctctgcgacccgcttaggaccacagaactcgggacggcaggaatgctacgcgtttaatgggacacagcgcttcctggagagatacatctacaaccgggaggagttcgcgcgcttcgacagcgacgtgggggagttccgggcggtgacggagctggggcggcctgctgcggagtactggaacagccagaaggacatcctggaggagaagcgggcagtgccggacaggatgtgcagacacaactacgagctgggcgggcccatgaccctgcagcgccgagtccagcctagggtgaatgtttccccctccaagaaggggcccttgcagcaccacaacctgcttgtctgccacgtgacggatttctacccaggcagcattcaagtccgatggttcctgaatggacaggaggaaacagctggggtcgtgtccaccaacctgatccgtaatggagactggaccttccagatcctggtgatgctggaaatgaccccccagcagggagatgtctacacctgccaagtggagcacaccagcctggatagtcctgtcaccgtggagtggaaggcacagtctgattctgcccggagtaagacattgacgggagctgggggcttcgtgctggggctcatcatctgtggagtgggcatcttcatgcacaggaggagcaagaaag

SEQ ID NO: 125206 - DNA, 1560 bp, Artificial Sequence
  derived and/or modified sequence
gtcacagaagactacttgggttcatggtctctaatatttcaaacaggagctccctttagcgagtccttcttttcctgactgcagctcttttcattttgccatccttttccagctccatgatggttctgcaggtttctgcggccccccggacagtggctctgacggcgttactgatggtgctgctcacatctgtggtccagggcagggccactccagagaattaccttttccagggacggcaggaatgctacgcgtttaatgggacacagcgcttcctggagagatacatctacaaccgggaggagttcgcgcgcttcgacagcgacgtgggggagttccgggcggtgacggagctggggcggcctgctgcggagtactggaacagccagaaggacatcctggaggagaagcgggcagtgccggacaggatgtgcagacacaactacgagctgggcgggcccatgaccctgcagcgccgagtccagcctagggtgaatgtttccccctccaagaaggggcccttgcagcaccacaacctgcttgtctgccacgtgacggatttctacccaggcagcattcaagtccgatggttcctgaatggacaggaggaaacagctggggtcgtgtccaccaacctgatccgtaatggagactggaccttccagatcctggtgatgctggaaatgaccccccagcagggagatgtctacacctgccaagtggagcacaccagcctggatagtcctgtcaccgtggagtggaaggcacagtctgattctgcccggagtaagacattgacgggagctgggggcttcgtgctggggctcatcatctgtggagtgggcatcttcatgcacaggaggagcaagaaagttcaacgaggatctgcataaacagggttcctgagctcactgaaaagactattgtgccttaggaaaagcatttgctgtgtttcgttagcatctggctccaggacagaccttcaacttccaaattggatactgctgccaagaagttgctctgaagtcagtttctatcattctgctctttgattcaaagcactgtttctctcactgggcctccaaccatgttcccttcttcttagcaccacaaataatcaaaacccaacatgactgtttgttttcctttaaaaatatgcaccaaatcatctctcatcacttttctctgagggttttagtagacagtaggagttaataaagaagttcattttggtttaaacataggaaagaagagaaccatgaaaatggggatatgttaactattgtataatggggcctgttacacatgacactcttctgaattgactgtatttcagtgagctgcccccaaatcaagtttagtgccctcatccatttatgtctcagaccactattcttaactattcaatggtgagcagactgcaaatctgcctgataggacccatattcccacagcactaattcaacatataccttactgagagcatgttttatcattaccattaagaagttaaatgaacatcagaatttaaaatcataaatataatctaatacactttaa

SEQ ID NO: 125207 - DNA, 1499 bp, Artificial Sequence
  derived and/or modified sequence
agcgagtccttcttttcctgactgcagctcttttcattttgccatccttttccagctccatgatggttctgcaggtttctgcggccccccggacagtggctctgacggcgttactgatggtgctgctcacatctgtggtccagggcagggccactccagagaattaccttttccagggacggcaggaatgctacgcgtttaatgggacacagcgcttcctggagagatacatctacaaccgggaggagttcgcgcgcttcgacagcgacgtgggggagttccgggcggtgacggagctggggcggcctgctgcggagtactggaacagccagaaggacatcctggaggagaagcgggcagtgccggacaggatgtgcagacacaactacgagctgggcgggcccatgaccctgcagcgccgagtccagcctagggtgaatgtttccccctccaagaaggggcccttgcagcaccacaacctgcttgtctgccacgtgacggatttctacccaggcagcattcaagtccgatggttcctgaatggacaggaggaaacagctggggtcgtgtccaccaacctgatccgtaatggagactggaccttccagatcctggtgatgctggaaatgaccccccagcagggagatgtctacacctgccaagtggagcacaccagcctggatagtcctgtcaccgtggagtggaaggcacagtctgattctgcccggagtaagacattgacgggagctgggggccgtgctggggctcatcatctgtggagtgggcatcttcatgcacaggaggagcaagaaagttcaacgaggatctgcataaacagggttcctgagctcactgaaaagactattgtgccttaggaaaagcatttgctgtgtttcgttagcatctggctccaggacagaccttcaacttccaaattggatactgctgccaagaagttgctctgaagtcagtttctatcattctgctctttgattcaaagcactgtttctctcactgggcctccaaccatgttcccttcttcttagcaccacaaataatcaaaacccaacatgactgtttgttttcctttaaaaatatgcaccaaatcatctctcatcacttttctctgagggttttagtagacagtaggagttaataaagaagttcattttggtttaaacataggaaagaagagaaccatgaaaatggggatatgttaactattgtataatggggcctgttacacatgacactcttctgaattgactgtatttcagtgagctgcccccaaatcaagtttagtgccctcatccatttatgtctcagaccactattcttaactattcaatggtgagcagactgcaaatctgcctgataggacccatattcccacagcactaattcaacatataccttactgagagcatgttttatcattaccattaagaagttaaatgaacatcagaatttaaaatcataaatataatctaatacacttt

SEQ ID NO: 125208 - DNA, 1361 bp, Artificial Sequence
  derived and/or modified sequence
agaattaccttttccagggacggcaggaatgctacgcgtttaatgggacacagcgcttcctggagagatacatctacaaccgggaggagctcgtgcgcttcgacagcgacgtgggggagttccgggcggtgacggagctggggcggcctgaggcggagtactggaacagccagaaggacatcctggaggaggagcgggcagtgccggacaggatgtgcagacacaactacgagctgggcgggcccatgaccctgcagcgccgagtccagcctagggtgaatgtttccccctccaagaaggggcccttgcagcaccacaacctgcttgtctgccacgtgacggatttctacccaggcagcattcaagtccgatggttcctgaatggacaggaggaaacagctggggtcgtgtccaccaacctgatccgtaatggagactggaccttccagatcctggtgatgctggaaatgaccccccagcagggagatgtctacacctgccaagtggagcacaccagcctggatagtcctgtcaccgtggagtggaaggcacagtctgattctgcccggagtaagacattgacgggagctgggggcttcgtgctggggctcatcatctgtggagtgggcatcttcatgcacaggaggagcaagaaaggtgagaaagcctgcaggttcaacgaggatctgcataaacagggttcctgagctcactgaaaagactattgtgccttaggaaaagcatttgctgtgtttcgttagcatctggctccaggacagaccttcaacttccaaattggatactgctgccaagaagttgctctgaagtcagtttctatcattctgctctttgattcaaagcactgtttctctcactgggcctccaaccatgttcccttcttcttagcaccacaaataatcaaaacccaacatgactgtttgttttcctttaaaaatatgcaccaaatcatctctcatcacttttctctgagggttttagtagacagtaggagttaataaagaagttcattttggtttaaacataggaaagaagagaaccatgaaaatggggatatgttaactattgtataatggggcctgttacacatgacactcttctgaattgactgtatttcagtgagctgcccccaaatcaagtttagtgccctcatccatttatgtctcagaccactattcttaactattcaatggtgagcagactgcaaatctgcctgataggacccatattcccacagcactaattcaacatataccttactgagagcatgttttatcattaccattaagaagttaaatgaacatcagaatttaaaatcataaatataatctaatacactttaa

SEQ ID NO: 125209 - DNA, 1361 bp, Artificial Sequence
  derived and/or modified sequence
agaattacgtgtaccagttacggcaggaatgctacgcgtttaatgggacacagcgcttcctggagagatacatctacaaccgggaggagttcgtgcgcttcgacagcgacgtgggggagttccgggcggtgacggagctggggcggcctgatgaggactactggaacagccagaaggacctcctggaggagaagcgggcagtgccggacagggtatgcagacacaactacgagctggacgaggccgtgaccctgcagcgccgagtccagcctaaggtgaacgtttccccctccaagaaggggcccctgcagcaccacaacctgcttgtctgccacgtgacagatttctacccaggcagcattcaagtccgatggttcctgaatggacaggaggaaacagctggggtcgtgtccaccaacctgatccgtaatggagactggaccttccagatcctggtgatgctggaaatgaccccccagcagggagacgtctacatctgccaagtggagcacaccagcctggacagtcctgtcaccgtggagtggaaggcacagtctgattctgcccggagtaagacattgacgggagctgggggcttcgtgctggggctcatcatctgtggagtgggcatcttcatgcacaggaggagcaagaaaggtgagaaagcctgcaagttcaacgaggatctgcataaacagggttcctgacctcaccgaaaagactaatgtgccttagaacaagcatttgctgtgttttgttagcacctggttccaggacagaccctcagcttcccaagaggatactgctgccaagaagttgctctgaagtcagtttctatcgttctgctctttgattcaaagcactgtttctctcactgggcctccaaccatgttcccttcttcttagcaccacaaataatcaaaacccaacataagtgtttgttttcctttaaaaatatgcatcaaatcgtctctcattacttttctctgagggttttagtaaacagtaggagttaataaagaagttcattttggtttacacgtaggaaagaagagaagcatgaaagtggagatatgttaactattgtataatgtggcctgttatacatgacactcttctgaattgactgtatttcagtgagctgcccccaaatcaagtttagtgccctcatccatttatgtctcagaccgctattcttaactattcaatggtgagcagactgcaaatctgcctgataggacccgtattcccacagcactaattcaacatatatcttactgagagcatgttttatcattaccattaagaagttaaatgaacatcagaatttaaaatcataaatataatctaatacactttaa

SEQ ID NO: 125210 - DNA, 688 bp, Artificial Sequence
  derived and/or modified sequence
aaacaggcctggagaggctctgcgacccgcttaggaccacagaactcgggacggcaggaatgctacgcgtttaatgggacacagcgcttcctggagagatacatctacaaccgggaggagttcgtgcgcttcgacagcgacgtgggggagttccgggcggtgacggagctggggcggcctgatgaggagtactggaacagccagaaggacatcctggaggagaagcgggcagtgccggacaggatgtgcagacacaactacgagctgggcgggcccatgaccctgcagcgccgagtccagcctagggtgaatgtttccccctccaagaaggggcccttgcagcaccacaacctgcttgtctgccacgtgacggatttctacccaggcagcattcaagtccgatggttcctgaatggacaggaggaaacagctggggtcgtgtccaccaacctgatccgtaatggagactggaccttccagatcctggtgatgctggaaatgaccccccagcagggagatgtctacacctgccaagtggagcacaccagcatggatagtcctgtcaccgtggagtggaaggcacagtctgattctgcccggagtaagacattgacgggagctgggggcttcgtgctggggctcatcatctgtggagtgggcatcttcatgcacaggaggagcaagaaag

SEQ ID NO: 125211 - DNA, 1424 bp, Artificial Sequence
  derived and/or modified sequence
gagctccctttagcgagtccttcttttcctgactgcagctcttttcattttgccatccttttccagctccatgatggttctgcaggtttctgcggccccccggacagtggctctgacggcgttactgatggtgctgctcacatctgtggtccagggcagggccactccagagaattacgtgtaccagttacggcaggaatgctacgcgtttaatgggacacagcgcttcctggagagatacatctacaaccgggaggagttcgtgcgcttcgacagcgacgtgggggagttccgggcggtgacggagctggggcggcctgatgaggactactggaacagccagaaggacctcctggaggagaagcgggcagtgccggacagggtatgcagacacaactacgagctggacgaggccgtgaccctgcagcgccgaggcagcattcaagtccgatggttcctgaatggacaggaggaaacagctggggtcgtgtccaccaacctgatccgtaatggagactggaccttccagatcctggtgatgctggaaatgaccccccagcagggagacgtctacatctgccaagtggagcacaccagcctggacagtcctgtcaccgtggagtggaaggcacagtctgattctgcccggagtaagacattgacgggagctgggggcttcgtgctggggctcatcatctgtggagtgggcatcttcatgcacaggaggagcaagaaagttcaacgaggatctgcataaacagggttcctgacctcaccgaaaagactaatgtgccttagaacaagcatttgctgtgttttgttagcacctggttccaggacagaccctcagcttcccaagaggatactgctgccaagaagttgctctgaagtcagtttctatcgttctgctctttgattcaaagcactgtttctctcactgggcctccaaccatgttcccttcttcttagcaccacaaataatcaaaacccaacataagtgtttgttttcctttaaaaatatgcatcaaatcgtctctcattacttttctctgagggttttagtaaacagtaggagttaataaagaagttcattttggtttacacgtaggaaagaagagaagcatgaaagtggagatatgttaactattgtataatgtggcctgttatacatgacactcttctgaattgactgtatttcagtgagctgcccccaaatcaagtttagtgccctcatccatttatgtctcagaccgctattcttaactattcaatggtgagcagactgcaaatctgcctgataggacccgtattcccacagcactaattcaacatatatcttactgagagcatgttttatcattaccattaagaagttaaatgaacatcagaatttaaaatcataaatataatctaatacactttaa

SEQ ID NO: 125212 - DNA, 1361 bp, Artificial Sequence
  derived and/or modified sequence
agaattaccttttccagggacggcaggaatgctacgcgtttaatgggacacagcgcttcctggagagatacatctacaaccgggaggagttcgtgcgcttcgacagcgacgtgggggagttccgggcggtgacggagctggggcggcctgatgaggagtactggaacagccagaaggacatcctggaggaggagcgggcagtgccggacaggatgtgcagacacaactacgagctgggcgggcccatgaccctgcagcgccgagtccagcctagggtgaatgtttccccctccaagaaggggcccttgcagcaccacaacctgcttgtctgccacgtgacggatttctacccaggcagcattcaagtccgatggttcctgaatggacaggaggaaacagctggggtcgtgtccaccaacctgatccgtaatggagactggaccttccagatcctggtgatgctggaaatgaccccccagcagggagatgtctacacctgccaagtggagcacaccagcctggatagtcctgtcaccgtggagtggaaggcacagtctgattctgcccggagtaagacattgacgggagctgggggcttcgtgctggggctcatcatctgtggagtgggcatcttcatgcacaggaggagcaagaaaggtgagaaagcctgcaggttcaacgaggatctgcataaacagggttcctgagctcactgaaaagactattgtgccttaggaaaagcatttgctgtgtttcgttagcatctggctccaggacagaccttcaacttccaaattggatactgctgccaagaagttgctctgaagtcagtttctatcattctgctctttgattcaaagcactgtttctctcactgggcctccaaccatgttcccttcttcttagcaccacaaataatcaaaacccaacatgactgtttgttttcctttaaaaatatgcaccaaatcatctctcatcacttttctctgagggttttagtagacagtaggagttaataaagaagttcattttggtttaaacataggaaagaagagaaccatgaaaatggggatatgttaactattgtataatggggcctgttacacatgacactcttctgaattgactgtatttcagtgagctgcccccaaatcaagtttagtgccctcatccatttatgtctcagaccactattcttaactattcaatggtgagcagactgcaaatctgcctgataggacccatattcccacagcactaattcaacatataccttactgagagcatgttttatcattaccattaagaagttaaatgaacatcagaatttaaaatcataaatataatctaatacactttaa

SEQ ID NO: 125213 - DNA, 1424 bp, Artificial Sequence
  derived and/or modified sequence
gagctccctttagcgagtccttcttttcctgactgcagctcttttcattttgccatccttttccagctccatgatggttctgcaggtttctgcggccccccggacagtggctctgacggcgttactgatggtgctgctcacatctgtggtccagggcagggccactccagagaattaccttttccagggacggcaggaatgctacgcgtttaatgggacacagcgcttcctggagagatacatctacaaccgggaggagttcgtgcgcttcgacagcgacgtgggggagttccgggcggtgacggagctggggcggcctgatgaggagtactggaacagccagaaggacatcctggaggaggagcgggcagtgccggacaggatgtgcagacacaactacgagctgggcgggcccatgaccctgcagcgccgaggcagcattcaagtccgatggttcctgaatggacaggaggaaacagctggggtcgtgtccaccaacctgatccgtaatggagactggaccttccagatcctggtgatgctggaaatgaccccccagcagggagatgtctacacctgccaagtggagcacaccagcctggatagtcctgtcaccgtggagtggaaggcacagtctgattctgcccggagtaagacattgacgggagctgggggcttcgtgctggggctcatcatctgtggagtgggcatcttcatgcacaggaggagcaagaaagttcaacgaggatctgcataaacagggttcctgagctcactgaaaagactattgtgccttaggaaaagcatttgctgtgtttcgttagcatctggctccaggacagaccttcaacttccaaattggatactgctgccaagaagttgctctgaagtcagtttctatcattctgctctttgattcaaagcactgtttctctcactgggcctccaaccatgttcccttcttcttagcaccacaaataatcaaaacccaacatgactgtttgttttcctttaaaaatatgcaccaaatcatctctcatcacttttctctgagggttttagtagacagtaggagttaataaagaagttcattttggtttaaacataggaaagaagagaaccatgaaaatggggatatgttaactattgtataatggggcctgttacacatgacactcttctgaattgactgtatttcagtgagctgcccccaaatcaagtttagtgccctcatccatttatgtctcagaccactattcttaactattcaatggtgagcagactgcaaatctgcctgataggacccatattcccacagcactaattcaacatataccttactgagagcatgttttatcattaccattaagaagttaaatgaacatcagaatttaaaatcataaatataatctaatacactttaa

SEQ ID NO: 125214 - DNA, 688 bp, Artificial Sequence
  derived and/or modified sequence
aaacaggcctggagaggctctgcgacccgcttaggaccacagaactcgttacggcaggaatgctacgcgtttaatgggacacagcgcttcctggagagatacatctacaaccgggaggagttcgtgcgcttcgacagcgacgtgggggagttccgggcggtgacggagctggggcggcctgatgaggactactggaacagccagaaggacctcctggaggagaagcgggcagtgccggacagggtatgcagacacaactacgagctggacgaggccgtgaccctgcagcgccgagtccagcctaaggtgaacgtttccccctccaagaaggggcccctgcagcaccacaacctgcttgtctgccacgtgacagatttctacccaggcagcattcaagtccgatggttcctgaatggacaggaggaaacagctggggtcgtgtccaccaacctgatccgtaatggagactggaccttccagatcctggtgatgctggaaatgaccccccagcagggagacgtctacatctgccaagtggagcacaccagcctggacagtcctgtcaccgtggagtggaaggcacagtctgattctgcccggagtaagacattgacgggagctgggggcttcgtgctggggctcatcatctgtggagtgggcatcttcatgcacaggaggagcaagaaag

SEQ ID NO: 125215 - DNA, 940 bp, Artificial Sequence
  derived and/or modified sequence
aaacaggagctccctttagcgagtccttcttttcctgactgcagctcttttcattttgccatccttttccagctccatgatggttctgcaggtttctgcggccccccggacagtggctctgacggcgttactgatggtgctgctcacatctgtggtccagggcagggccactccagagaattaccttttccagggacggcaggaatgctacgcgtttaatgggacacagcgcttcctggagagatacatctacaaccgggaggagttcgcgcgcttcgacagcgacgtgggggagttccgggcggtgacggagctggggcggcctgctgcggagtactggaacagccagaaggacatcctggaggagaagcgggcagtgccggacaggatgtgcagacacaactacgagctgggcgggcccatgaccctgcagcgccgaggtgagtgagggctttgggccggcggtcccagggcagccccgcgggcccgtgcccagggcgcaggagcagccgggttggcctaagggaccttagtgccgggcggaaaggggactttgggttggggattcatggggggagcccatctggagcttgtcaggggagcgagcgcggggacctggactgggctgagcatggagtgaggaggacgagagcagagagacccccgggacttcatcaggcctggcagctgactgcatgtggggtgaaaaaaggaagccacaggacagcgcacaagggtatggtgtggagatggaggtggagatggcacagcaggccacacagagaagaaacctacagggagaaagaggaaaaaaatgaagggaggaggaggaggaagctggggagatcacacctttgattttcttgttcctggaaagtgaaaggaagttcacctgctatgagtgagaaggtggacacactgggtggggatgaggtgagtg

SEQ ID NO: 125216 - DNA, 1499 bp, Artificial Sequence
  derived and/or modified sequence
agcgagtccttcttttcctgactgcagctcttttcattttgccatccttttccagctccatgatggttctgcaggtttctgcggccccccggacagtggctctgacggcgttactgatggtgctgctcacatctgtggtccagggcagggccactccagagaattaccttttccagggacggcaggaatgctacgcgtttaatgggacacagcgcttcctggagagatacatctacaaccgggaggagttcgtgcgcttcgacagcgacgtgggggagttccgggcggtgacggagctggggcggcctgatgaggagtactggaacagccagaaggacatcctggaggaggagcgggcagtgccggacaggatgtgcagacacaactacgagctgggcgggcccatgaccctgcagcgccgagtccagcctagggtgaatgtttccccctccaagaaggggcccttgcagcaccacaacctgcttgtctgccacgtgacggatttctacccaggcagcattcaagtccgatggttcctgaatggacaggaggaaacagctggggtcgtgtccaccaacctgatccgtaatggagactggaccttccagatcctggtgatgctggaaatgaccccccagcagggagatgtctacacctgccaagtggagcacaccagcctggatagtcctgtcaccgtggagtggaaggcacagtctgattctgcccggagtaagacattgacgggagctgggggccgtgctggggctcatcatctgtggagtgggcatcttcatgcacaggaggagcaagaaagttcaacgaggatctgcataaacagggttcctgagctcactgaaaagactattgtgccttaggaaaagcatttgctgtgtttcgttagcatctggctccaggacagaccttcaacttccaaattggatactgctgccaagaagttgctctgaagtcagtttctatcattctgctctttgattcaaagcactgtttctctcactgggcctccaaccatgttcccttcttcttagcaccacaaataatcaaaacccaacatgactgtttgttttcctttaaaaatatgcaccaaatcatctctcatcacttttctctgagggttttagtagacagtaggagttaataaagaagttcattttggtttaaacataggaaagaagagaaccatgaaaatggggatatgttaactattgtataatggggcctgttacacatgacactcttctgaattgactgtatttcagtgagctgcccccaaatcaagtttagtgccctcatccatttatgtctcagaccactattcttaactattcaatggtgagcagactgcaaatctgcctgataggacccatattcccacagcactaattcaacatataccttactgagagcatgttttatcattaccattaagaagttaaatgaacatcagaatttaaaatcataaatataatctaatacacttt

SEQ ID NO: 125217 - DNA, 940 bp, Artificial Sequence
  derived and/or modified sequence
aaacaggagctccctttagcgagtccttcttttcctgactgcagctcttttcattttgccatccttttccagctccatgatggttctgcaggtttctgcggccccccggacagtggctctgacggcgttactgatggtgctgctcacatctgtggtccagggcagggccactccagagaattaccttttccagggacggcaggaatgctacgcgtttaatgggacacagcgcttcctggagagatacatctacaaccgggaggagctcgtgcgcttcgacagcgacgtgggggagttccgggcggtgacggagctggggcggcctgaggcggagtactggaacagccagaaggacatcctggaggaggagcgggcagtgccggacaggatgtgcagacacaactacgagctgggcgggcccatgaccctgcagcgccgaggtgagtgagggctttgggccggcggtcccagggcagccccgcgggcccgtgcccagggcgcaggagcagccgggttggcctaagggaccttagtgccgggcggaaaggggactttgggttggggattcatggggggagcccatctggagcttgtcaggggagcgagcgcggggacctggactgggctgagcatggagtgaggaggacgagagcagagagacccccgggacttcatcaggcctggcagctgactgcatgtggggtgaaaaaaggaagccacaggacagcgcacaagggtatggtgtggagatggaggtggagatggcacagcaggccacacagagaagaaacctacagggagaaagaggaaaaaaatgaagggaggaggaggaggaagctggggagatcacacctttgattttcttgttcctggaaagtgaaaggaagttcacctgctatgagtgagaaggtggacacactgggtggggatgaggtgagtg

SEQ ID NO: 125218 - DNA, 940 bp, Artificial Sequence
  derived and/or modified sequence
aaacaggagctccctttagcgagtccttcttttcctgactgcagctcttttcattttgccatccttttccagctccatgatggttctgcaggtttctgcggccccccggacagtggctctgacggcgttactgatggtgctgctcacatctgtggtccagggcagggccactccagagaattaccttttccagggacggcaggaatgctacgcgtttaatgggacacagcgcttcctggagagatacatctacaaccgggaggagttcgtgcgcttcgacagcgacgtgggggagttccgggcggtgacggagctggggcggcctgatgaggagtactggaacagccagaaggacatcctggaggagaagcgggcagtgccggacaggatgtgcagacacaactacgagctgggcgggcccatgaccctgcagcgccgaggtgagtgagggctttgggccggcggtcccagggcagccccgcgggcccgtgcccagggcgcaggagcagccgggttggcctaagggaccttagtgccgggcggaaaggggactttgggttggggattcatggggggagcccatctggagcttgtcaggggagcgagcgcggggacctggactgggctgagcatggagtgaggaggacgagagcagagagacccccgggacttcatcaggcctggcagctgactgcatgtggggtgaaaaaaggaagccacaggacagcgcacaagggtatggtgtggagatggaggtggagatggcacagcaggccacacagagaagaaacctacagggagaaagaggaaaaaaatgaagggaggaggaggaggaagctggggagatcacacctttgattttcttgttcctggaaagtgaaaggaagttcacctgctatgagtgagaaggtggacacactgggtggggatgaggtgagtg

SEQ ID NO: 125219 - DNA, 940 bp, Artificial Sequence
  derived and/or modified sequence
aaacaggagctccctttagcgagtccttcttttcctgactgcagctcttttcattttgccatccttttccagctccatgatggttctgcaggtttctgcggccccccggacagtggctctgacggcgttactgatggtgctgctcacatctgtggtccagggcagggccactccagagaattaccttttccagggacggcaggaatgctacgcgtttaatgggacacagcgcttcctggagagatacatctacaaccgggaggagttcgtgcgcttcgacagcgacgtgggggagttccgggcggtgacggagctggggcggcctgatgaggagtactggaacagccagaaggacatcctggaggaggagcgggcagtgccggacaggatgtgcagacacaactacgagctgggcgggcccatgaccctgcagcgccgaggtgagtgagggctttgggccggcggtcccagggcagccccgcgggcccgtgcccagggcgcaggagcagccgggttggcctaagggaccttagtgccgggcggaaaggggactttgggttggggattcatggggggagcccatctggagcttgtcaggggagcgagcgcggggacctggactgggctgagcatggagtgaggaggacgagagcagagagacccccgggacttcatcaggcctggcagctgactgcatgtggggtgaaaaaaggaagccacaggacagcgcacaagggtatggtgtggagatggaggtggagatggcacagcaggccacacagagaagaaacctacagggagaaagaggaaaaaaatgaagggaggaggaggaggaagctggggagatcacacctttgattttcttgttcctggaaagtgaaaggaagttcacctgctatgagtgagaaggtggacacactgggtggggatgaggtgagtg

SEQ ID NO: 125220 - DNA, 1510 bp, Artificial Sequence
  derived and/or modified sequence
cttcttttcctgactgcagctcttttcattttgccatccttttccagctccatgatggttctgcaggtttctgcggccccccggacagtggctctgacggcgttactgatggtgctgctcacatctgtggtccagggcagggccactccagagaattacgtgtaccagttacggcaggaatgctacgcgtttaatgggacacagcgcttcctggagagatacatctacaaccgggaggagttcgtgcgcttcgacagcgacgtgggggagttccgggcggtgacggagctggggcggcctgatgaggactactggaacagccagaaggacctcctggaggagaagcgggcagtgccggacagggtatgcagacacaactacgagctggacgaggccgtgaccctgcagcgccgagtccagcctaaggtgaacgtttccccctccaagaaggggcccctgcagcaccacaacctgcttgtctgccacgtgacagatttctacccaggcagcattcaagtccgatggttcctgaatggacaggaggaaacagctggggtcgtgtccaccaacctgatccgtaatggagactggaccttccagatcctggtgatgctggaaatgaccccccagcagggagacgtctacatctgccaagtggagcacaccagcctggacagtcctgtcaccgtggagtggaaggcacagtctgattctgcccggagtaagacattgacgggagctgggggcttcgtgctggggctcatcatctgtggagtgggcatcttcatgcacaggaggagcaagaaaggtgagaaagcctgcaagttcaacgaggatctgcataaacagggttcctgacctcaccgaaaagactaatgtgccttagaacaagcatttgctgtgttttgttagcacctggttccaggacagaccctcagcttcccaagaggatactgctgccaagaagttgctctgaagtcagtttctatcgttctgctctttgattcaaagcactgtttctctcactgggcctccaaccatgttcccttcttcttagcaccacaaataatcaaaacccaacataagtgtttgttttcctttaaaaatatgcatcaaatcgtctctcattacttttctctgagggttttagtaaacagtaggagttaataaagaagttcattttggtttacacgtaggaaagaagagaagcatgaaagtggagatatgttaactattgtataatgtggcctgttatacatgacactcttctgaattgactgtatttcagtgagctgcccccaaatcaagtttagtgccctcatccatttatgtctcagaccgctattcttaactattcaatggtgagcagactgcaaatctgcctgataggacccgtattcccacagcactaattcaacatatatcttactgagagcatgttttatcattaccattaagaagttaaatgaacatcagaatttaaaatcataaatataatctaatacacttt

SEQ ID NO: 125221 - DNA, 1499 bp, Artificial Sequence
  derived and/or modified sequence
agcgagtccttcttttcctgactgcagctcttttcattttgccatccttttccagctccatgatggttctgcaggtttctgcggccccccggacagtggctctgacggcgttactgatggtgctgctcacatctgtggtccagggcagggccactccagagaattaccttttccagggacggcaggaatgctacgcgtttaatgggacacagcgcttcctggagagatacatctacaaccgggaggagctcgtgcgcttcgacagcgacgtgggggagttccgggcggtgacggagctggggcggcctgaggcggagtactggaacagccagaaggacatcctggaggaggagcgggcagtgccggacaggatgtgcagacacaactacgagctgggcgggcccatgaccctgcagcgccgagtccagcctagggtgaatgtttccccctccaagaaggggcccttgcagcaccacaacctgcttgtctgccacgtgacggatttctacccaggcagcattcaagtccgatggttcctgaatggacaggaggaaacagctggggtcgtgtccaccaacctgatccgtaatggagactggaccttccagatcctggtgatgctggaaatgaccccccagcagggagatgtctacacctgccaagtggagcacaccagcctggatagtcctgtcaccgtggagtggaaggcacagtctgattctgcccggagtaagacattgacgggagctgggggccgtgctggggctcatcatctgtggagtgggcatcttcatgcacaggaggagcaagaaagttcaacgaggatctgcataaacagggttcctgagctcactgaaaagactattgtgccttaggaaaagcatttgctgtgtttcgttagcatctggctccaggacagaccttcaacttccaaattggatactgctgccaagaagttgctctgaagtcagtttctatcattctgctctttgattcaaagcactgtttctctcactgggcctccaaccatgttcccttcttcttagcaccacaaataatcaaaacccaacatgactgtttgttttcctttaaaaatatgcaccaaatcatctctcatcacttttctctgagggttttagtagacagtaggagttaataaagaagttcattttggtttaaacataggaaagaagagaaccatgaaaatggggatatgttaactattgtataatggggcctgttacacatgacactcttctgaattgactgtatttcagtgagctgcccccaaatcaagtttagtgccctcatccatttatgtctcagaccactattcttaactattcaatggtgagcagactgcaaatctgcctgataggacccatattcccacagcactaattcaacatataccttactgagagcatgttttatcattaccattaagaagttaaatgaacatcagaatttaaaatcataaatataatctaatacacttt

SEQ ID NO: 125222 - DNA, 908 bp, Artificial Sequence
  derived and/or modified sequence
aattaccttttccagggacggcaggaatgctacgcgtttaatgggacacagcgcttcctggagagatacatctacaaccgggaggagttcgtgcgcttcgacagcgacgtgggggagttccgggcggtgacggagctggggcggcctgatgaggagtactggaacagccagaaggacatcctggaggagaagcgggcagtgccggacaggatgtgcagacacaactacgagctgggcgggcccatgaccctgcagcgccgagtccagcctagggtgaatgtttccccctccaagaaggggcccttgcagcaccacaacctgcttgtctgccacgtgacggatttctacccaggcagcattcaagtccgatggttcctgaatggacaggaggaaacagctggggtcgtgtccaccaacctgatccgtaatggagactggaccttccagatcctggtgatgctggaaatgaccccccagcagggagatgtctacacctgccaagtggagcacaccagcatggatagtcctgtcaccgtggagtggaaggcacagtctgattctgcccggagtaagacattgacgggagctgggggccgtgctggggctcatcatctgtggagtgggcatcttcatgcacaggaggagcaagaaagttcaacgaggatctgcataaacagggttcctgagctcactgaaaagactattgtgccttaggaaaagcatttgctgtgtttcgttagcatctggctccaggacagaccttcaacttccaaattggatactgctgccaagaagttgctctgaagtcagtttctatcattctgctctttgattcaaagcactgtttctctcactgggcctccaaccatgttcccttcttcttagcaccacaaataatcaaaacccaa

SEQ ID NO: 125223 - DNA, 1400 bp, Artificial Sequence
  derived and/or modified sequence
aatatttcaaacaggagctccctttagcgagtccttcttttcctgactgcagctcttttcattttgccatccttttccagctccatgatggttctgcaggtttctgcggccccccggacagtggctctgacggcgttactgatggtgctgctcacatctgtggtccagggcagggccactccagagaattacgtgtaccagttacggcaggaatgctacgcgtttaatgggacacagcgcttcctggagagatacatctacaaccgggaggagttcgtgcgcttcgacagcgacgtgggggagttccgggcggtgacggagctggggcggcctgatgaggactactggaacagccagaaggacctcctggaggagaagcgggcagtgccggacagggtatgcagacacaactacgagctggacgaggccgtgaccctgcagcgccgagaaagaggaaaaaaatgaagggaggaggaggaggaagctggggagatcacacctttgattttcttgttcctggaaagtgaaaggaagttcacctgctatgagtgagaaggtggacacactgggtggggatgagtccagcctaaggtgaacgtttccccctccaagaaggggcccctgcagcaccacaacctgcttgtctgccacgtgacagatttctacccaggcagcattcaagtccgatggttcctgaatggacaggaggaaacagctggggtcgtgtccaccaacctgatccgtaatggagactggaccttccagatcctggtgatgctggaaatgaccccccagcagggagacgtctacatctgccaagtggagcacaccagcctggacagtcctgtcaccgtggagtggaaggcacagtctgattctgcccggagtaagacattgacgggagctgggggcttcgtgctggggctcatcatctgtggagtgggcatcttcatgcacaggaggagcaagaaagttcaacgaggatctgcataaacagggttcctgacctcaccgaaaagactaatgtgccttagaacaagcatttgctgtgttttgttagcacctggttccaggacagaccctcagcttcccaagaggatactgctgccaagaagttgctctgaagtcagtttctatcgttctgctctttgattcaaagcactgtttctctcactgggcctccaaccatgttcccttcttcttagcaccacaaataatcaaaacccaacataagtgtttgttttcctttaaaaatatgcatcaaatcgtctctcattacttttctctgagggttttagtaaacagtaggagttaataaagaagttcattttggtttacacgtaggaaagaagagaagcatgaaagtggagatatgttaactattgtataatgtggcctgt

SEQ ID NO: 125224 - DNA, 1491 bp, Artificial Sequence
  derived and/or modified sequence
cttcttttcctgactgcagctcttttcattttgccatccttttccagctccatgatggttctgcaggtttctgcggccccccggacagtggctctgacggcgttactgatggtgctgctcacatctgtggtccagggcagggccactccagagaattacgtgtaccagttacggcaggaatgctacgcgtttaatgggacacagcgcttcctggagagatacatctacaaccgggaggagttcgtgcgcttcgacagcgacgtgggggagttccgggcggtgacggagctggggcggcctgatgaggactactggaacagccagaaggacctcctggaggagaagcgggcagtgccggacagggtatgcagacacaactacgagctggacgaggccgtgaccctgcagcgccgagtccagcctaaggtgaacgtttccccctccaagaaggggcccctgcagcaccacaacctgcttgtctgccacgtgacagatttctacccaggcagcattcaagtccgatggttcctgaatggacaggaggaaacagctggggtcgtgtccaccaacctgatccgtaatggagactggaccttccagatcctggtgatgctggaaatgaccccccagcagggagacgtctacatctgccaagtggagcacaccagcctggacagtcctgtcaccgtggagtggaaggcacagtctgattctgcccggagtaagacattgacgggagctgggggccgtgctggggctcatcatctgtggagtgggcatcttcatgcacaggaggagcaagaaagttcaacgaggatctgcataaacagggttcctgacctcaccgaaaagactaatgtgccttagaacaagcatttgctgtgttttgttagcacctggttccaggacagaccctcagcttcccaagaggatactgctgccaagaagttgctctgaagtcagtttctatcgttctgctctttgattcaaagcactgtttctctcactgggcctccaaccatgttcccttcttcttagcaccacaaataatcaaaacccaacataagtgtttgttttcctttaaaaatatgcatcaaatcgtctctcattacttttctctgagggttttagtaaacagtaggagttaataaagaagttcattttggtttacacgtaggaaagaagagaagcatgaaagtggagatatgttaactattgtataatgtggcctgttatacatgacactcttctgaattgactgtatttcagtgagctgcccccaaatcaagtttagtgccctcatccatttatgtctcagaccgctattcttaactattcaatggtgagcagactgcaaatctgcctgataggacccgtattcccacagcactaattcaacatatatcttactgagagcatgttttatcattaccattaagaagttaaatgaacatcagaatttaaaatcataaatataatctaatacacttt

SEQ ID NO: 125225 - DNA, 777 bp, Artificial Sequence
  derived and/or modified sequence
atgatggtgctgcaggtgagcgccgccccccggaccgtggccctgaccgcattattaatggtgctgctgacttcagtcgtgcagggcagagcaaccccggagaactatgtgtaccagctgaggcaagagtgctatgccttcaatggcacccagagattccttgaacggtatatctataatcgcgaggaatttgtccgcttcgattctgatgtaggggaattcagggcagtcaccgaactcgggcgacccgacgaagattattggaactcccagaaggatctgctggaggagaagcgcgccgtaccagatcgggtatgccgtcacaattatgaactagatgaggccgtgactctgcagcgtagggtccagccaaaagtgaacgtctctccatccaagaaaggaccgctgcaacatcacaatctgttggtctgtcacgtgactgatttttatcccgggtccattcaggtgagatggttcctgaatggccaggaagaaaccgcgggcgtggtcagcaccaacctgatccgaaacggggattggactttccagatcctggttatgctggagatgacaccccagcagggcgacgtctatatctgtcaagtggagcatacttctctcgacagccctgtgacagtagagtggaaagcccaaagtgactctgcaagatccaagacgctgactggcgccggcggctttgtgctgggcctgatcatatgcggggtggggatattcatgcacaggcggagcaagaaagtgcagcgggggtccgcctag

SEQ ID NO: 125226 - DNA, 687 bp, Artificial Sequence
  derived and/or modified sequence
atgatggtgctgcaggtgagcgccgccccccggaccgtggccctgacggcactgctgatggttctcctgacttcagtagtccaagggagggccactcccgaaaattatctgttccagggcaggcaggaatgctacgcatttaatggcacccaacgctttctggagagatacatctataacagagaggagttggtgaggttcgactctgacgtaggagagttcagagcagtgaccgagctcggtcgaccggaggccgaatattggaacagccagaaggacatcctcgaggaagaacgtgccgtccctgatcgaatgtgtaggcacaattacgaattgggcggcccaatgactctgcagcggcgaggtagtatccaggttaggtggttcctgaatggtcaagaagagaccgctggagtagtatccaccaatctgatcaggaacggggattggacgtttcagattctcgtgatgctggaaatgacaccgcagcaaggtgacgtctatacatgtcaggtagagcacacatcactggattcccccgtaaccgtggagtggaaagctcagagtgattccgctagatcaaagacgcttactggagcgggtggattcgtcctgggtctcatcatctgtggcgtcggcatctttatgcatcgccggagtaaaaaggtccagagagggagtgcctag

SEQ ID NO: 125227 - DNA, 777 bp, Artificial Sequence
  derived and/or modified sequence
atgatggtgctgcaggtgagcgccgccccccggaccgtggccctgaccgctctcttgatggtcctgttgacatccgtggtccaaggcagagcaacaccagagaattacctttttcaagggcgccaggagtgttacgcctttaatggcacccaaagatttttagagagatacatctacaatcgtgaggagctggttagatttgactcagacgtgggtgagtttagggcggtgacggagcttggaaggcctgaagccgaatattggaacagtcagaaggatatcctggaagaggagcgggcagttcctgacagaatgtgccgccacaactacgagctgggtggccctatgacactacagcggagggtgcaaccccgggtgaacgtctctcctagcaagaagggtccactccagcatcacaacctgctggtgtgtcacgtcactgacttttaccctggctctatccaggtcaggtggtttttgaacggacaggaagagacagcgggcgtggtgtcaactaatttaatcaggaatggcgactggacgtttcagatcctcgtcatgttggagatgactcctcaacagggagatgtctacacttgccaggttgagcatacctctctggattccccggtgacggtggagtggaaggctcagagtgactccgctcggagtaaaacgttaaccggagcaggtggttttgttcttggtctcatcatttgtggtgtgggtatttttatgcaccgtcggtccaagaaagtgcagcgaggctcggcctag

SEQ ID NO: 125228 - DNA, 690 bp, Artificial Sequence
  derived and/or modified sequence
aagcaggcctggcggggcagcgccacccggctgggcccccagaactccggtaggcaggagtgttacgcatttaatgggacccagaggttcctcgaacgctatatctataaccgggaagaactcgttcgctttgatagcgatgtcggggagtttcgggcggttaccgagctggggagaccggaggccgagtattggaatagccaaaaggatatccttgaggaggagcgagcagtgcctgacagaatgtgccgacacaactacgaattaggtggaccaatgaccctgcaacggcgcgttcagccccgggtcaacgttagcccttccaagaaaggaccacttcagcatcacaacttactggtttgtcatgtgaccgatttttacccgggttccatccaggtccgttggttccttaacgggcaggaagaaaccgccggggtggtaagcaccaatttaatccgaaatggcgattggacctttcaaatcctagtgatgctcgaaatgacacctcaacagggggatgtttatacttgtcaggtggagcatacctccctggatagcccagtcacagtggaatggaaggcgcagagcgattccgcaagaagtaaaaccctgacaggtgcaggtgggtttgtgctggggttaatcatctgtggggttggcatctttatgcaccgccgctccaaaaagtag

SEQ ID NO: 125229 - DNA, 687 bp, Artificial Sequence
  derived and/or modified sequence
atgatggtgctgcaggtgagcgccgccccccggaccgtggccctgacggcattgctaatggtgctccttacgtcggttgtgcagggccgggccacaccagaaaattacctgtttcagggcaggcaggaatgttacgcgtttaacgggacccaaagattcttagaaagatacatctataaccgggaggaatttgcaagatttgactcggatgtgggagaatttagggcggtcacagaactcggacggcccgcggctgagtactggaactcccaaaaggatatccttgaggaaaagcgggcagtgcccgatcgaatgtgtagacacaactacgagctgggcggccccatgacactgcagagaaggggaagtattcaggttcgctggttcctgaacgggcaagaggagacagccggcgttgtctccacaaatctgatcagaaacggagattggaccttccagattcttgtaatgctggagatgaccccgcaacagggcgacgtatacacctgccaggtggaacataccagcttggattcacctgtaactgtggagtggaaggctcagagtgacagcgctcggtcaaagactttgactggcgccggcggcttcgtgctgggcctcatcatctgcggggtgggcattttcatgcacagacgtagcaagaaagtacagcgcggaagtgcatag

SEQ ID NO: 125230 - DNA, 687 bp, Artificial Sequence
  derived and/or modified sequence
atgatggtgctgcaggtgagcgccgccccccggaccgtggccctgaccgccctcctcatggtgctactgactagtgtcgttcaggggagggccactcctgagaactatttattccagggccgtcaagagtgctatgccttcaacggtacacaaagatttcttgagagatatatctacaatcgagaagagttcgtgaggtttgactcagacgttggggagtttcgagcagtcactgagttagggcggccagacgaagagtattggaactctcagaaggatatattggaggagaaacgcgccgtccccgatcgaatgtgtcgccacaactacgagctgggtggtcctatgaccttacaacgcagagggtctattcaggttcggtggtttcttaatggccaagaagaaacggccggcgtggtctctaccaacttaattcggaacggagattggaccttccagatcctggtgatgcttgaaatgacgccccagcagggggacgtttacacttgtcaggttgagcatacgagtatggattctcccgtgacggtcgaatggaaagcacagagcgatagcgctcgcagcaaaacacttacgggggcaggaggtttcgttcttgggctaataatatgcggagttgggattttcatgcacaggcgctccaaaaaggttcaacgcggctccgcgtag

SEQ ID NO: 125231 - DNA, 708 bp, Artificial Sequence
  derived and/or modified sequence
tgaaactacctgttccagggccggcaggagtgctacgccttcaacggtacacagcgattcctggaacggtacatctacaaccgagaagagtttgttcgatttgattcggacgtcggagagtttagagcagtgaccgagctaggccggccagacgaggaatattggaactctcagaaagatatcctcgaggagaaaagggctgtgcccgatagaatgtgccgccacaactatgaactgggaggacctatgaccctgcagcggcgggtgcaacctagggtgaatgtctctccatctaaaaaaggcccgctgcaacatcacaacctcctcgtctgtcatgtgactgacttttaccctggctctatacaggtgcgatggttcttgaacgggcaagaggagaccgccggcgtcgtgtcaaccaacctaatccgtaatggcgattggacattccagatcctggtgatgctggagatgacaccccagcagggggatgtgtacacttgccaggttgagcatacctccatggacagcccagtgacggtcgaatggaaggcacagagtgattccgcacgttccaagactctgaccggagctgggggctttgtcctgggactaataatctgtggggttggaatttttatgcatcgccggagcaagaagggagaaaaagcctgccgcttcaacgaggacctgcataagcaggggtcgtag

SEQ ID NO: 125232 - DNA, 777 bp, Artificial Sequence
  derived and/or modified sequence
atgatggtgctgcaggtgagcgccgccccccggaccgtggccctgacagctctgctgatggttcttctcaccagtgtcgtacagggacgagccacccccgagaactacctctttcaagggagacaagagtgctacgccttcaatggcacacaacggttcctggagcgatacatctataatcgggaggagttcgtgagattcgactccgatgtaggtgaatttcgggcagttactgaactcgggagacccgacgaggagtattggaactcccagaaggacatcctggaggagaagcgcgcggtcccagacaggatgtgtagacataactacgaacttggcggccctatgactctccagagacgcgtgcagccccgagttaacgtgtccccttcaaagaagggccctctgcagcaccacaatctactcgtgtgtcacgtgactgacttttatcccggctctatccaggtgaggtggtttctaaatggacaagaggagaccgcaggagttgtgtctacaaatctgataaggaacggggactggacgtttcaaatcctggttatgctcgagatgacacctcagcagggcgatgtttacacttgtcaggtggaacatactagcatggactcccccgttactgtagaatggaaggcccagtctgattccgcacgctctaaaacccttaccggggcagggggttttgtgctgggcctcatcatatgcggggtcggcatttttatgcacagacgatctaagaaggtgcagagaggaagtgcctag

SEQ ID NO: 125233 - DNA, 687 bp, Artificial Sequence
  derived and/or modified sequence
atgatggtgctgcaggtgagcgccgccccccggaccgtggccctgactgccctcctgatggttctcctgacctctgtggtgcaaggaagagcaacccctgagaactacttatttcaaggacgacaagagtgctatgcctttaacggcacacagcggttcttggagcgctatatttataaccgggaggaattcgctcgcttcgattccgacgttggagagttccgagctgtgaccgagctgggccggccagccgctgaatactggaatagccagaaagacatcttggaagagaaaagagctgtgccggaccgaatgtgtaggcacaactatgaactgggggggcctatgactttacagcgcagaggctccatccaggtgcgctggtttttgaacggccaagaagagaccgcaggggtggtgtccacaaacctcatccggaatggggactggacctttcagatactagtcatgctggagatgaccccacagcagggcgatgtatacacatgccaggtcgagcatacctccctcgacagccccgtgaccgttgaatggaaggcccagagtgatagtgccaggagcaaaaccctcaccggggcagggggttttgtgctcggacttatcatatgcggagtgggtatctttatgcaccgccggagtaaaaaagttcaaaggggctccgcctag

SEQ ID NO: 125234 - DNA, 690 bp, Artificial Sequence
  derived and/or modified sequence
aagcaggcctggcggggcagcgccacccggctgggcccccagaactctggcaggcaggagtgttacgcatttaacggaactcagcgctttctggagagatatatatacaatcgtgaagaatttgtccggtttgatagcgacgtaggcgaattccgagcagtaaccgagttgggaagacccgatgaagagtattggaacagccaaaaagatatattggaagaagagagggccgtgccggatcgtatgtgcagacacaactacgagctcggaggccctatgactttgcaacgtcgggtgcagccccgggtgaacgttagcccctctaaaaaggggcctctgcaacaccataacctgctggtgtgtcatgttacggatttttacccaggcagcattcaggtgcggtggttcctcaacggtcaagaagaaaccgccggagtggtgagtacaaatctgattagaaatggggactggacattccagatactcgttatgctcgagatgactccccaacagggtgacgtgtacacctgtcaggtggagcacacttcactggattctcctgtgactgtagagtggaaggcccaatctgattccgccaggtctaaaaccctgacaggggccggaggctttgtgctagggcttatcatttgcggcgtgggaatatttatgcatcgacggagtaaaaaatag

SEQ ID NO: 125235 - DNA, 777 bp, Artificial Sequence
  derived and/or modified sequence
atgatggtgctgcaggtgagcgccgccccccggaccgtggccctgaccgccctgctgatggtactgctcacgtccgttgtgcagggtcgggccacaccagaaaactatttgttccagggaagacaggagtgttatgcttttaacggaactcagagattcctggagagatacatctacaatcgcgaggaatttgtacgcttcgactctgatgtcggagagttccgagctgtgaccgagttagggcgacccgacgaggaatactggaattcccagaaggatatcttggaggaagagagagccgtccctgacagaatgtgccgccacaattatgagctgggcggtcccatgaccctccagcggagagttcagccccgtgtaaacgtgtcaccgagtaaaaagggcccgctgcagcatcataacctcttggtgtgccacgtcaccgacttctatccgggatctatccaggtgcgatggtttctcaatggtcaggaggagacagctggcgtagtgagcacaaacctcatccgtaacggtgactggactttccagatccttgttatgcttgagatgactccccagcagggtgacgtatacacttgccaagtggaacacacgtccctcgacagtccagtgaccgttgagtggaaggcgcagtcagattccgcccgatctaaaaccctgacaggggccggcggcttcgttctcggccttattatctgtggcgtcgggatatttatgcacaggcggagtaaaaaagtgcagaggggcagcgcctag

SEQ ID NO: 125236 - DNA, 708 bp, Artificial Sequence
  derived and/or modified sequence
tgaaactacctgttccagggccggcaggagtgctacgccttcaacggcacccagagattcttggaacggtacatctataacagggaggagtttgcgaggttcgatagcgatgttggcgaatttcgggccgtgaccgagctcggaagacccgcagctgaatattggaatagtcaaaaagacattttggaagaaaaacgagctgtcccagatagaatgtgtcggcataattacgagttggggggccccatgacattgcagcggcgagttcaaccccgcgtaaatgtaagcccaagcaaaaagggccctctgcagcaccataatcttttggtgtgtcacgtcaccgacttctatcccggctcaattcaggttcggtggtttcttaacggtcaggaagagacggcaggggtcgtgagtacaaacctgataagaaatggagattggacatttcagatactggttatgttggagatgactccccaacagggcgacgtgtatacgtgtcaggtggaacacacctcgcttgactcacctgtgacagtcgagtggaaagcacagagcgattccgccagaagtaagaccttgactggagccgggggctttgtcttagggctgataatctgtggagttggcatttttatgcacaggcggagtaaaaagggagaaaaagcctgcaggttcaatgaagacctgcataaacaggggtcttag

SEQ ID NO: 125237 - DNA, 690 bp, Artificial Sequence
  derived and/or modified sequence
aagcaggcctggcggggcagcgccacccggctgggcccccagaactcagggcgccaggagtgttatgcctttaatggaactcagcggttccttgagaggtacatttataacagggaggagtttgcccgcttcgattcagacgttggcgagtttcgcgccgtgactgaactaggacggcccgctgcggagtactggaattcccaaaaagacatcctcgaggaaaagcgggccgtgccggatcgaatgtgccggcacaactatgagctgggtggacctatgaccctccagaggagagtacagcctcgtgtgaacgtgagcccgagcaagaagggcccactgcagcatcacaaccttctggtgtgtcacgttacagatttctaccctgggtcaatacaggtgcggtggttcctgaacggccaggaagagactgcaggggtcgtttcaactaacttaataagaaacggcgattggaccttccagatactggtaatgctcgaaatgacgccccagcagggggacgtgtatacctgtcaggttgagcataccagcttggattctcctgtcacagtggaatggaaggctcaatctgattcagctagatccaagactctgacaggcgcaggcggctttgtcctggggttgatcatttgcggcgtgggtatttttatgcaccggagaagtaaaaagtag

SEQ ID NO: 125238 - DNA, 777 bp, Artificial Sequence
  derived and/or modified sequence
atgatggtgctgcaggtgagcgccgccccccggaccgtggccctgaccgcgttgcttatggtcctcctgacttccgtcgttcagggtagggctaccccagagaactatttgttccaaggaaggcaggaatgttatgcttttaatggtacacaaagatttcttgagaggtacatctacaatagggaggagtttgcccggtttgacagcgatgtgggggaatttagggccgtcacagaactgggccgtcccgcagctgaatactggaactcacagaaagacatcctcgaggagaagcgggcagtgcccgataggatgtgccggcataactatgagctgggtggtccaatgaccctacagagacgtgtgcaacccagggttaatgtgagccctagcaaaaaagggcccctgcagcaccataacctgctcgtgtgtcacgtgaccgatttctaccctggtagcattcaagtcagatggttcctcaacggccaggaagagacagcaggggtggttagcaccaaccttatacggaatggcgattggacgtttcagatccttgttatgcttgaaatgacacctcagcagggcgacgtgtacacctgccaggtcgaacacactagcctggactccccagtcactgtcgaatggaaggctcagtcggactcagctcggtctaaaacactgaccggcgcaggaggcttcgtcttgggactgattatctgtggcgtgggaattttcatgcatagaagaagtaagaaagtccaacgggggagcgcatag

SEQ ID NO: 125239 - DNA, 777 bp, Artificial Sequence
  derived and/or modified sequence
atgatggtgctgcaggtgagcgccgccccccggaccgtggccctgacggctctccttatggtgctgttgacttccgtcgttcagggcagggccactccagaaaactatttgtttcagggccgtcaagaatgttatgctttcaatgggactcagagattcctcgagaggtacatctacaatcgcgaagaattcgtgaggtttgattccgacgtcggagaattccgggcagtgacagagctaggccgacctgacgaggaatactggaactcccaaaaagatatcctggaggaaaaaagggccgtcccggatcgcatgtgcagacataattacgagctcggcggacccatgaccttacaacgccgtgttcagcccagagtcaacgtctccccatcaaagaaggggccactccaacatcataatctactcgtgtgccacgtcacggatttttaccctggcagcatccaggtcaggtggttcttaaacggccaagaagaaacggcaggcgtagtgagcactaacctgattagaaatggagactggacattccagatcttggttatgctcgagatgacccctcagcagggcgatgtttacacctgccaggttgagcatacaagtatggatagccccgtgacagtggagtggaaagcgcagtctgatagtgcacggagcaaaacactgaccggcgccggaggattcgtgctaggcttgattatatgcggcgtgggcattttcatgcatcggcgctccaaaaaagtccagagaggcagtgcctag

SEQ ID NO: 125240 - DNA, 690 bp, Artificial Sequence
  derived and/or modified sequence
aagcaggcctggcggggcagcgccacccggctgggcccccagaactcaggtagacaggagtgttatgcgttcaatggcacccaacggtttctggaaaggtacatctacaatcgggaagagttcgcaagatttgattctgatgttggggagttccgcgccgtgaccgaacttggacggcccgcggcagaatattggaactcccaaaaggatatcctggaggaaaaaagggcagtgccagacagaatgtgccggcacaactatgagctcggagggcctatgacgctgcagcgtcgagtccagccacgggtgaacgtgagcccaagtaagaaggggccactgcagcatcacaacctcctcgtgtgtcatgttaccgatttctaccctggcagcattcaggtccgctggttcctgaatggacaggaagagaccgccggcgtcgtgagcacaaacttaattaggaacggcgactggactttccagattctagtaatgctggagatgacccctcagcagggagatgtctatacatgccaagtggagcacacctcccttgactctcccgttaccgtggagtggaaagctcagtccgattcagcccgcagtaagaccctgaccggagccggaggcttcgtgctgggtctcattatctgcggagtgggtatattcatgcatcgtaggagcaagaagtag

SEQ ID NO: 125241 - DNA, 708 bp, Artificial Sequence
  derived and/or modified sequence
tgaaactacctgttccagggccggcaggagtgctacgccttcaacggcacacaacgctttctcgagcgctatatttataatcgcgaagagttggttcgctttgactccgatgtgggagagttccgtgccgttacagaactggggcgccctgaagcggaatattggaatagccaaaaagatatcttggaggaggagagggcagtgcccgatcggatgtgccggcataattacgagcttggtggccctatgacactccagaggcgggtccagccaagagtgaacgtaagcccttctaagaaggggccactgcaacatcataacctgcttgtctgccatgtgactgatttctacccaggatcaatacaagtgcgatggttcctgaacgggcaagaggagaccgcaggggtcgtgtcaacaaacctcatccgtaatggagactggacctttcagattctggtgatgctcgagatgacgcctcagcagggcgacgtgtacacctgtcaggtcgagcataccagcctggacagtccggttactgtggagtggaaggctcagtccgacagcgcccgcagcaagacactaacaggcgccggcggattcgtgctgggcctgataatctgtggcgtgggcatattcatgcaccgaaggtctaagaagggcgagaaagcttgtcgctttaatgaggatctgcacaaacagggctcttag

SEQ ID NO: 125242 - DNA, 777 bp, Artificial Sequence
  derived and/or modified sequence
atgatggtgctgcaggtgagcgccgccccccggaccgtggccctgaccgcactgctgatggtcctgctcacttcagtggtccaaggtcgggccaccccggagaactatctctttcagggaaggcaagaatgctacgccttcaacggtacacaacggttccttgaacgctacatctacaatcgggaggaatttgcccgcttcgactccgatgtgggggaattcagagctgtgaccgagctgggaagacctgccgccgagtactggaacagccaaaaagacatcctggaggaaaaacgcgctgtccctgatagaatgtgcaggcacaattacgagttgggcggaccaatgacgctgcagaggcgggttcagcccagagtcaatgtgagcccgtcaaaaaaagggccactgcagcaccacaatctgctggtgtgccatgttaccgatttctaccccggcagcatacaggttaggtggttcctcaatggacaggaggaaacggccggggtggtgtcgactaacctgatcagaaacggggattggaccttccaaatcctggtaatgctggagatgacgccccagcagggagacgtgtatacatgccaagtggagcatacaagcttggacagccccgtcacagttgagtggaaggcccagagtgattccgccaggtctaagactctcacaggagccggaggcttcgtgctgggcctaattatttgtggggtcggaattttcatgcatcgtcggagcaaaaaggtgcaacgagggtcggcatag

SEQ ID NO: 125243 - DNA, 708 bp, Artificial Sequence
  derived and/or modified sequence
tgaaactacgtgtaccagctgcggcaggagtgctacgccttcaacggcacacagcgcttcttagagaggtacatttataaccgggaggagtttgtccgctttgacagcgacgtcggtgagttcagagcagtgacagagctcggccgtcctgacgaggactactggaacagtcaaaaagatctgctggaagagaagcgggcagtgcccgatagagtgtgtaggcacaactacgagctagacgaggctgtgaccctgcagagacgtgtgcagccaaaggtgaatgttagtccaagtaaaaaaggacctctgcaacatcataacctgttagtgtgtcatgtcacagatttctatcctggcagcatccaggtgaggtggtttctgaacggccaggaggaaaccgccggcgtcgtaagcacgaatctcatcagaaatggagattggacatttcaaattctggtgatgctggagatgacaccacagcagggtgacgtctacatctgccaagtggaacatacctccctagacagccctgtgactgtcgagtggaaagctcagagcgattcggctcgcagcaaaaccctgaccggtgccggtggctttgtgctgggtctgatcatctgcggcgtgggcatattcatgcatcgccgctccaaaaaaggggaaaaagcatgcaagttcaacgaggacttacacaaacagggatcttag

SEQ ID NO: 125244 - DNA, 690 bp, Artificial Sequence
  derived and/or modified sequence
aagcaggcctggcggggcagcgccacccggctgggcccccagaactcagggcggcaggagtgctacgcattcaacggcacgcagcgctttttagagcgctatatttacaacagggaagagttcgtccgcttcgatagcgatgttggagagttccgggccgtgacagaactgggacgtcctgatgaggagtattggaacagccaaaaagacatcctggaggaaaagagggctgtccccgatcggatgtgtcggcacaactacgaactcggcggcccgatgactcttcaacgccgtgtccagccaagagtgaatgtgtccccatcaaaaaaaggtcctctgcagcaccacaacctgctggtctgtcacgtgaccgacttctaccctgggtctatacaggttagatggtttctcaacgggcaggaggagactgccggcgtcgtatccacgaatttgatcagaaatggggactggacgtttcagattcttgtaatgctcgagatgacccctcaacaaggagacgtgtatacctgccaggtggagcatactagtatggatagtcctgtgaccgttgagtggaaagcccaatcagactctgcacgctccaagactttaaccggcgctggtgggttcgtgctgggcttaatcatttgtggcgtcggaatatttatgcacaggcggtcaaagaagtag

SEQ ID NO: 125245 - DNA, 687 bp, Artificial Sequence
  derived and/or modified sequence
atgatggtgctgcaggtgagcgccgccccccggaccgtggccctgacggcgctcctgatggttctactgacatctgtcgtgcagggtcgtgccacccccgagaattacgtgtaccagctgcggcaggagtgctacgctttcaatggcacccagaggtttctggaacggtacatttacaatcgggaagaattcgtgagatttgatagcgatgttggcgagttcagagctgttactgagctcgggcggcccgacgaggattactggaactcccagaaggacttgctcgaagagaaacgggccgttccagatcgagtgtgccgccataattacgaactagacgaggcagtgacgcttcaaagacggggttctatccaggtgagatggtttctcaacggccaggaggaaactgctggagttgtgagcaccaatttgatccgaaatggggattggacgtttcagattctggtgatgttggagatgactccacaacagggggatgtgtacatctgccaggtcgagcatacatccctggattcacccgtgacggttgagtggaaagcccagtctgactctgctagatcaaagaccctgacgggagcaggcggattcgtgctcggactgatcatctgcggggtcggaatctttatgcaccgcagaagtaagaaagtgcagcgcggctctgcctag

SEQ ID NO: 125246 - DNA, 687 bp, Artificial Sequence
  derived and/or modified sequence
atgatggtgctgcaggtgagcgccgccccccggaccgtggccctgacagcattgctgatggtgctcctgacctctgttgttcagggaagagcaacacctgagaattacttgttccaggggagacaggagtgttacgccttcaacgggacccagcgattcctggagaggtacatctataaccgggaagagtttgtccgatttgacagcgatgtgggcgaattccgggctgttactgaattgggccgaccggacgaggagtactggaatagtcagaaagatatcctggaggagaagcgagcagttcccgatcgcatgtgtcgccacaattacgagcttggcgggcccatgaccctccaacggcggggaagtattcaggtcagatggtttctgaacggtcaagaggagaccgccggtgtagtctctacaaatctgatcaggaacggtgactggacatttcagattctagtgatgctggagatgaccccccagcagggagacgtgtacacatgccaggtggaacataccagtatggattcccccgtgacagtcgagtggaaggcacaatctgattccgcccgctcaaagactctgacaggggcagggggctttgtgctgggcctgattatctgcggagtgggcatctttatgcacagacgctcaaaaaaggtgcagagagggagcgcctag

SEQ ID NO: 125247 - DNA, 687 bp, Artificial Sequence
  derived and/or modified sequence
atgatggtgctgcaggtgagcgccgccccccggaccgtggccctgacagcattgctgatggtcctcttgactagcgtcgtgcagggacgggcaacccccgaaaattacctgtttcagggcaggcaggaatgttacgccttcaacggtacacagaggttcctggaacgctacatttacaaccgcgaggaatttgccagattcgattccgacgtcggtgagttccgagccgttactgaactgggccggcccgccgcagagtattggaactcccagaaggacatactggaggaaaagcgggctgtgccggatcggatgtgccgccacaattacgaactcggcggccccatgaccctccagagaagaggctccatccaagtgcgctggttcctaaacgggcaagaagaaacagccggtgtggtttcaacgaacttaattcgaaacggagactggacatttcaaattctcgtgatgctggagatgactcctcagcagggagacgtgtacacttgtcaggtggaacacaccagcctcgattcgccagttacagtggagtggaaagcccaatccgacagtgcccgctccaaaaccctcacaggcgccggcggctttgttctgggcctcatcatctgtggcgtgggcatatttatgcaccgaagaagtaagaaggttcagcggggaagtgcttag

SEQ ID NO: 125248 - DNA, 690 bp, Artificial Sequence
  derived and/or modified sequence
aagcaggcctggcggggcagcgccacccggctgggcccccagaacagtggcagacaagaatgttacgccttcaacggaactcagcgattcttagagcgttatatttataatcgagaggaattcgtgcgattcgatagcgatgtcggcgagttcagggccgtgacggagctggggaggccagacgaggaatattggaactctcagaaagacatcctcgaggagaagcgggctgtgcctgatagaatgtgccggcacaattacgagcttggcggccctatgaccctgcaacggcgcgtgcagccccgtgttaatgtcagcccaagcaaaaaaggaccacttcagcatcacaatttactggtatgtcacgtgactgacttttatcctggcagtatccaggtccgatggtttctaaacgggcaggaggagacagctggagtcgtgagtactaacctgatacgcaatggggattggaccttccagatcctagtgatgctggagatgactccacaacaaggcgacgtctatacctgtcaagtggagcacacgagcatggacagcccagtgactgttgagtggaaagcccagtctgacagtgctcggtccaaaactctgacaggcgccggaggttttgtgctcggcttgattatttgcggcgtgggtatctttatgcaccggcgatccaaaaaatag

SEQ ID NO: 125249 - DNA, 708 bp, Artificial Sequence
  derived and/or modified sequence
tgaaactacctgttccagggccggcaggagtgctacgccttcaacggaacccagcgatttctcgagcgttacatatataacagagaggaatttgtgaggtttgacagcgatgtgggcgagtttagggccgtgactgagttaggtcgcccagacgaggagtattggaatagccagaaggatattctcgaagaggagcgcgccgtgcctgatcgtatgtgccgacataattatgagctgggcggtccaatgaccctacaacggagggtgcagcctcgagttaacgttagcccaagtaagaagggacccctccagcaccacaatctgttggtgtgtcatgttacggacttttatcctggctctattcaggtaagatggttcttaaacggacaggaagaaacagccggagttgtgtccacaaatttaatccgtaacggggattggacatttcagatcctagttatgctggaaatgaccccccagcagggcgacgtgtatacatgccaggtcgagcacacttctctcgattctccagtcacggtcgaatggaaagcccaaagtgacagtgcgcggagcaagaccctcaccggagctggaggatttgtcctcgggttgatcatttgcggcgtaggaattttcatgcaccgcaggtccaagaaaggagaaaaggcctgccggttcaacgaagacctgcacaagcaggggtcttag

SEQ ID NO: 125250 - DNA, 708 bp, Artificial Sequence
  derived and/or modified sequence
tgaaactacctgttccagggccggcaggagtgctacgccttcaacggaacacagcgcttcctggagaggtacatctacaatagagaggaatttgcacgtttcgatagcgatgtgggagagttccgcgctgtgactgaactcgggagacctgcagcagagtattggaatagtcaaaaggatatactggaggagaaaagagctgtacccgaccggatgtgtaggcacaactacgagctgggcggacctatgacgctccagaggcgggtgcagccccgggtaaatgtgtctccgagcaagaaaggccctctgcaacatcataatctcctagtgtgtcacgtgaccgacttctatccgggatccatccaggtacggtggttcctaaacggtcaggaggagacggccggagttgtgagtacaaatctgatcagaaacggggattggacgttccagatcctcgtcatgctggagatgactccccagcagggcgacgtgtacacttgccaggtggagcacacctccctagacagtcccgtgaccgtggagtggaaagcccagtctgactcagcaaggtccaagaccttgactggggcaggtgggtttgttctcggcctgatcatttgtggggttgggatcttcatgcacaggcgctctaagaagggggaaaaggcctgcaggtttaatgaagatcttcataaacaaggtagttag

SEQ ID NO: 125251 - DNA, 687 bp, Artificial Sequence
  derived and/or modified sequence
atgatggtgctgcaggtgagcgccgccccccggaccgtggccctgactgctctgcttatggtgctgttaacttcggttgttcaaggcagagctactcccgagaactacttattccaggggaggcaggagtgctatgccttcaacggcactcaacggttcctcgagcgttacatttacaatagggaagagttcgttagatttgattcagacgtcggggagttccgcgccgttacagagcttggccggcccgatgaggagtactggaacagtcaaaaagacattctcgaggaagaaagagcggtgccagaccgtatgtgtaggcataactacgaactagggggccccatgacgctccagcgcaggggctccattcaggtgcggtggtttttaaatggacaggaggagacagccggtgtcgtgtctactaatctaattcggaacggcgactggacgttccaaatcctggtaatgctagagatgaccccacagcagggggacgtatacacatgtcaggtggagcatacgtcccttgactcacctgtgacggttgagtggaaggcccagtcagactctgccagaagtaagacccttactggcgccgggggttttgttctcgggctgatcatctgtggagtcggtattttcatgcatcgacgttctaaaaaagtgcagcggggctccgcctag

SEQ ID NO: 125252 - DNA, 690 bp, Artificial Sequence
  derived and/or modified sequence
aagcaggcctggcggggcagcgccacccggctgggcccccagaactctctgcgacaggagtgttacgctttcaatgggacacagcgcttcctggaaaggtatatctacaaccgagaggaatttgtccgcttcgactccgacgtaggcgagttcagagctgtgaccgagctgggcaggccagatgaagactactggaacagccagaaggacctgttagaagaaaagagggcagtgccggatcgggtatgcaggcataactacgagctggatgaagccgtaacactccagaggagagttcaaccaaaggtgaacgtttctccatccaagaagggcccattacagcaccacaacttgcttgtgtgccatgtcactgacttctacccaggatctattcaggtgagatggtttctcaacggacaggaggaaaccgctggcgtcgtctcaacaaatttgatccgtaacggggactggacgtttcagatcttagtgatgttggagatgacaccccagcagggggatgtatacatttgccaggtggagcacacctcactggactctcccgtcaccgtagaatggaaagcacaaagcgactccgcccggagcaaaactctgactggagcaggcggctttgtgctgggtctcatcatttgtggggtcgggatatttatgcatcggcgaagtaaaaagtag

SEQ ID NO: 125253 - DNA, 777 bp, Artificial Sequence
  derived and/or modified sequence
atgatggtgctgcaggtgagcgccgccccccggaccgtggccctgacagcccttctgatggttctgctgaccagcgtcgttcaaggtcgtgctacccctgagaactatctctttcagggccgacaggaatgctacgccttcaatgggacacaaaggtttctcgaacgctatatttacaatcgcgaggagttcgcacgttttgactccgatgtgggcgaattcagggcggtgacggagttggggaggccggctgccgagtactggaactcacagaaagacattctggaggaaaaacgggcagtgcccgatcgcatgtgccgccataactacgagcttgggggccctatgactctgcagaggcgcgtgcagcctagggtcaacgtttcaccatctaagaaggggcccctacagcaccacaatcttctggtatgccacgtaactgatttttatcctggtagcattcaagtaagatggtttctgaacggacaggaggagaccgctggtgtcgtaagtacaaacctcattcgcaacggggactggaccttccagatcctcgtgatgctcgagatgacgcctcaacagggagatgtttacacttgtcaggttgaacatacctccttggattcccccgtaactgtggagtggaaggcgcaatctgattccgctaggagtaagaccctgacaggggccggtggcttcgtactgggtctgattatttgtggcgtcggcatttttatgcacaggcgctcaaagaaggtccaacgcgggtcagcgtag

SEQ ID NO: 125254 - DNA, 708 bp, Artificial Sequence
  derived and/or modified sequence
tgaaactacctgttccagggccggcaggagtgctacgccttcaacggtacacaacggttcttggaacgatacatctataatcgggaagagtttgtacgcttcgattccgacgtgggggagttcagagctgtaacagagctcgggcgcccagatgaggagtattggaacagccagaaagacatcttagaagagaagagagcagttcctgatcgaatgtgccgccacaattatgaactgggtggccccatgactttgcagaggcgcgtccagcctagggtcaatgtgagtcccagtaaaaaggggccgctgcaacatcacaatctgcttgtttgccatgttacagatttttaccccggaagcattcaagtccgatggttcctgaatggacaggaggagacagctggggtcgtgagtaccaatcttattagaaatggagattggaccttccagattcttgtgatgcttgagatgacgccccagcagggtgatgtgtatacttgtcaggtggagcatacatctatggattcacccgtgaccgtggagtggaaggcccagtcagattctgctcgttccaaaaccctgacgggcgccggcgggttcgtgcttggccttattatatgcggggtcgggatctttatgcacagacggtctaagaaaggggagaaggcatgcaggtttaatgaagacctccacaagcagggaagttag

SEQ ID NO: 125255 - DNA, 690 bp, Artificial Sequence
  derived and/or modified sequence
aagcaggcctggcggggcagcgccacccggctgggcccccagaactcaggccggcaggagtgttacgcctttaatgggacacaaagattcctggaaaggtacatctacaaccgtgaggagttcgccaggtttgactccgatgtgggtgagttccgggctgtgactgaactgggtagaccagcagccgaatattggaatagccagaaggacatccttgaggagaaacgggccgttcccgacagaatgtgtaggcacaactatgagctgggcgggccgatgacgcttcaaagacgcgtacagcctagagtaaatgtttcaccatctaaaaaagggccactccaacaccataatctgctggtttgccacgtgactgacttttacccagggtccatacaagtgcgctggttcttgaacgggcaggaagagacagccggcgtggtctcaaccaatctcattcggaatggagattggactttccaaatcctggtcatgttggagatgacaccacagcagggtgacgtgtacacctgtcaggtggaacatacatccttagactcacctgtcacagtcgagtggaaggcccagtccgattctgccagatctaaaactctgacaggcgccgggggatttgtgttaggtctgattatttgcggagtcggcatcttcatgcatcgacggagcaaaaagtag

SEQ ID NO: 125256 - DNA, 708 bp, Artificial Sequence
  derived and/or modified sequence
tgaaactacctgttccagggccggcaggagtgctacgccttcaacgggacgcaaaggttcctggagcgctacatatataatagggaggaattcgcaaggttcgacagcgatgtcggggaattcagagcggttactgaactgggtagacccgccgccgagtattggaactctcagaaagatatattagaggagaaacgtgccgttcccgatcgcatgtgtagacataattatgagctagggggccctatgaccctgcagaggcgcgttcaaccccgtgtcaacgtgagcccgtccaagaaaggacccctccaacatcacaacctgttggtgtgtcatgtgactgatttctaccccggaagcatccaagtgcgatggttcctcaacggccaggaggaaactgctggggtggtgagtacaaaccttattaggaatggcgattggacctttcagattctcgtgatgttagaaatgaccccccagcaaggggacgtgtatacctgtcaggtggaacataccagtctcgactcccccgtaacagtcgaatggaaggcacaaagtgatagcgccagaagcaagaccctaacaggagcaggggggttcgtgctgggtctgataatttgcggtgtcggaatctttatgcatcggcggtcaaagaagggcgaaaaagcgtgcagattcaacgaagacttacacaagcaaggtagctag

SEQ ID NO: 125257 - DNA, 372 bp, Artificial Sequence
  derived and/or modified sequence
atgatggtgctgcaggtgagcgccgccccccggaccgtggccctgactgcacttcttatggttctcctgacatcggttgtgcagggccgcgctacgccagagaactatctgtttcagggcagacaagagtgctacgcgttcaacggtactcagcgtttcctggagagatacatctacaatagggaagagttcgccaggttcgacagcgatgttggagagttccgggcggtgaccgagctcggccgccccgcggccgaatattggaattctcagaaggatatcctggaggaaaagagagccgtgcccgatcggatgtgtcgacacaattacgaactgggaggccccatgaccctgcagaggcggggggagtag

SEQ ID NO: 125258 - DNA, 372 bp, Artificial Sequence
  derived and/or modified sequence
atgatggtgctgcaggtgagcgccgccccccggaccgtggccctgacggccctgctgatggtgctcttaacatctgtagtccaaggaagggctacgccggaaaattacctgttccagggacgccaggaatgttatgcgttcaatggtacccagcgctttctggaacgctatatatataaccgcgaggaactggtgcgctttgatagcgatgtgggagagtttagagccgtgaccgaactggggaggccagaagccgagtactggaattctcagaaagatattctcgaggaagagcgggcggtgccagataggatgtgtcggcataactacgagcttggcggtccgatgacattacagcggcggggagagtag

SEQ ID NO: 125259 - DNA, 372 bp, Artificial Sequence
  derived and/or modified sequence
atgatggtgctgcaggtgagcgccgccccccggaccgtggccctgaccgcgctcctgatggtgctactgacatctgtcgtccagggacgcgcgacccctgagaactacttgtttcagggaaggcaggagtgttatgcattcaatggcacacaacggtttctggagagatacatttacaaccgagaggaattcgtacggtttgactccgacgtgggagagtttagggccgtcaccgaactgggacgtccggatgaggaatactggaactctcagaaagacatccttgaggaaaaacgcgccgtgccggataggatgtgtcgccataactacgagctcggcggccccatgactctgcaacgacgcggagagtag

SEQ ID NO: 125260 - DNA, 372 bp, Artificial Sequence
  derived and/or modified sequence
atgatggtgctgcaggtgagcgccgccccccggaccgtggccctgacagccctattaatggtgctgctcacctctgtggttcaggggcgtgctacgccagagaattatctattccagggtagacaagagtgttatgctttcaacggtacccaacggttcctggaacgctatatttataatagggaggaattcgttagattcgatagcgacgttggcgagtttagggccgttaccgaactaggcagacccgatgaggaatactggaactctcagaaggatattctggaggaggaaagggccgttccagaccgaatgtgccgccataattatgagttgggaggcccaatgaccctgcagcggcgtggggagtag

SEQ ID NO: 125261 - DNA, 750 bp, Artificial Sequence
  derived and/or modified sequence
atggtgctgctgaccagcgtggtgcagggccgggccacccccgagaattatgtgtaccagcttaggcaagaatgctatgccttcaacggcacacagcgctttctcgagaggtacatctacaaccgggaagagtttgtccggttcgattcagacgtaggtgagtttcgagctgtcacagagctcggcagacccgatgaggactattggaactcccagaaagatcttcttgaggagaagagggccgtgcccgatcgggtatgtcgtcataattatgagcttgatgaggctgtgacactgcagcggcgtgtgcagcccaaggttaacgtgagcccatcgaagaaaggccctctgcagcatcacaatctgctggtgtgccacgtcaccgatttttaccccggcagtattcaggtgcgctggtttctgaatgggcaggaagagaccgcaggggttgtgagtaccaaccttatcagaaacggagactggacgttccaaattctggtcatgttggagatgacaccccaacagggtgatgtgtatatctgccaggtagaacacacaagcctcgatagtccggtgacagtggaatggaaggctcagtctgactctgcccgtagtaaaacactgaccggtgctggcggattcgtgctcggcttgatcatatgtggggttggcatatttatgcataggagatctaagaagggggaaaaagcatgtaaatttaacgaggacctccacaagcaggggtcttag

SEQ ID NO: 125262 - DNA, 372 bp, Artificial Sequence
  derived and/or modified sequence
atgatggtgctgcaggtgagcgccgccccccggaccgtggccctgaccgcccttctcatggtcctcctgaccagtgtagtccagggtcgggccactcctgaaaactatctgtttcaaggcaggcaggagtgctacgctttcaacggaacccagaggtttttagaaaggtatatttataacagggaagagtttgctcgcttcgattccgacgtaggcgaatttagggccgtgacagaactggggcggcccgccgcagagtattggaactcccagaaagacatcctggaggagaagcgggccgttccggaccggatgtgtcggcataactacgagttaggagggccgatgacactccaaagacgcggcgagtag

SEQ ID NO: 125263 - DNA, 372 bp, Artificial Sequence
  derived and/or modified sequence
atgatggtgctgcaggtgagcgccgccccccggaccgtggccctgactgcgctgcttatggtgctgttgacctccgttgtccaggggcgcgccacaccagagaattatctcttccagggtaggcaagagtgttatgcatttaacggcacccagcggttcctggaaaggtatatctataatcgggaggaatttgcgcggttcgatagcgatgtgggggagtttcgagccgtgaccgagctcggaaggcccgcagccgaatattggaacagtcagaaagacatcctcgaggagaagcgagctgtgccagacagaatgtgtcgccataactacgagttgggaggtcctatgacattgcagcgtaggggagaatag

SEQ ID NO: 125264 - DNA, 381 bp, Artificial Sequence
  derived and/or modified sequence
atgatggtgctgcaggtgagcgccgccccccggaccgtggccctgaccgcactgttgatggtgctgttaaccagtgtagttcaggggagagcaacaccagaaaactatgtgtatcaactgcgccaggaatgctatgcttttaacggcacgcagagattcctagaacgctatatttataacagagaggagttcgtgcgcttcgactccgacgtgggcgaatttcgtgctgtcacggagctaggaaggcctgacgaggattattggaactcacagaaagacctgctggaagagaagcgagccgtccctgaccgggtctgtcgccacaattacgagctggacgaggcggtcaccctccagaggcgcgagcgtggcaaaaagtag

SEQ ID NO: 125265 - DNA, 372 bp, Artificial Sequence
  derived and/or modified sequence
atgatggtgctgcaggtgagcgccgccccccggaccgtggccctgaccgcgctgctaatggttctgctgacatctgtggtacagggccgcgccacacctgagaactacttatttcagggacggcaggaatgttatgcctttaacggaactcaaaggttcctcgagaggtacatatataaccgcgaggaatttgtcaggtttgattccgatgtaggtgaattcagggcagtgaccgagcttgggagaccagatgaggagtactggaacagtcaaaaagacattttggaggagaagagggccgtgccagaccgcatgtgccggcataactacgagctgggaggacctatgacactgcagagaaggggcgaatag

SEQ ID NO: 125266 - DNA, 777 bp, Artificial Sequence
  derived and/or modified sequence
atgatggtcttacaggtctctgctgcgccaaggacagtggcattaacggcactcctgatggtgttacttacaagcgttgtacaggggagagctacgccggaaaattatgtataccaattacgacaagagtgttacgcctttaatggaacacagagatttctggaacgttatatttacaacagggaggagtttgtccgtttcgactctgacgtgggggaattcagagcagtgacagaactgggtagacctgatgaggattactggaactctcagaaagatctgcttgaagaaaaacgggcagtgccagacagggtctgccggcacaactacgagctcgacgaggcagtgaccctgcaaaggagagttcagcctaaagtgaacgtgtcgcccagcaagaaggggccacttcagcaccacaacctgcttgtgtgccacgttactgacttctatccgggtagcattcaggtgcgctggttcctcaatggccaggaggagacagcgggtgtggtctccacaaaccttatcaggaacggcgactggaccttccaaattctggtcatgctggagatgacacctcagcagggagatgtctatatctgccaggttgaacatacgagcttggatagtccagttactgtcgagtggaaggctcagtcagactctgcgaggagcaaaaccctcactggcgctggcggattcgtgctgggcctcattatctgcggggtgggaatattcatgcaccgcaggtcaaagaaagtacaaagaggtagcgcatag

SEQ ID NO: 125267 - DNA, 687 bp, Artificial Sequence
  derived and/or modified sequence
atgatggtgctgcaggtgtctgccgctcccaggaccgtggcactgacggccctgctgatggtcctgttaacctcggtggtgcagggtcgggctaccccggaaaattatctatttcaaggaaggcaggaatgctacgcattcaatggaacccaacgctttcttgagcgctacatttataatagggaagaactggttagattcgattcagatgttggtgagtttagggccgttaccgaactggggaggccagaggccgaatactggaatagccagaaggatatactggaagaagaaagagccgtgccagatcgcatgtgccgccataactatgaattgggtggcccaatgactctgcagcggagaggcagcattcaggtgaggtggttcctgaatgggcaggaggagaccgccggtgttgtgagcaccaacctgatacggaatggagactggacattccagatcctggtcatgctggagatgacaccccaacagggagatgtgtatacatgccaggttgagcatactagtctggattctccagtgaccgttgagtggaaggcccagtccgattcagccagatccaaaaccctgacaggggctggtggcttcgttctcggactgatcatctgtggagtgggaatcttcatgcacaggcggtcaaaaaaggtgcagagaggctccgcgtag

SEQ ID NO: 125268 - DNA, 777 bp, Artificial Sequence
  derived and/or modified sequence
atgatggtgctccaggtgagcgccgctcccaggaccgtcgcactgacagcgctgttaatggtcctcttaacctccgtggtgcagggcagagcaacaccggagaattatttgtttcagggtcgccaggaatgttatgcctttaacggcacacagcgtttcctggaacggtacatctacaaccgcgaggagctcgtgagatttgatagtgacgtcggcgagtttagagccgtcactgagctgggacgacccgaggctgaatactggaactcacaaaaggacatactcgaggaggaacgcgcagtgcctgaccgaatgtgccgccacaattacgaactggggggtcccatgacacttcagcgccgtgtacagccgagggtaaatgtgagtccatctaagaaaggaccgttgcagcatcataacctgttggtctgtcatgtaaccgacttttacccgggaagcattcaggtgagatggtttctgaatggtcaggaggagactgctggcgtggtgagcacgaacctcatcagaaatggggactggacgttccaaattcttgtgatgctcgaaatgacaccccagcagggggacgtgtacacctgccaggtcgaacacaccagtctcgactcaccagttacagttgaatggaaagcccaaagcgatagtgccaggtccaaaacactgaccggagcaggaggcttcgtccttggtcttataatctgcggggttggaatattcatgcatcggagatctaaaaaagtacagagaggaagcgcctag

SEQ ID NO: 125269 - DNA, 690 bp, Artificial Sequence
  derived and/or modified sequence
aagcaggcatggagaggctctgccacaagactgggccctcaaaacagcgggaggcaagagtgttatgcctttaacggtacccaaaggttcctcgaacggtacatatacaacagggaagagctggtacgcttcgactctgacgtgggggagtttcgggctgtaacggaactggggcgacctgaagccgaatattggaactctcaaaaggacatcctagaagaagaacgggctgtgcctgataggatgtgcaggcataactacgagctgggcggtcctatgacattgcagagaagggtacaaccccgtgttaatgtatcaccttccaaaaaaggccctctgcagcatcataatctcctcgtctgtcacgtgaccgacttttacccaggcagtatccaggtgaggtggtttctgaatggtcaggaagagaccgccggagtcgtaagcaccaatctcatacgcaatggggattggacttttcaaatcctggttatgctggaaatgacaccgcagcaaggcgacgtgtacacttgccaggtggagcatacatctttggacagccccgttactgtggagtggaaggcacagagcgatagcgcgaggagtaagactttgacaggcgcaggcggatttgtgctcggactgatcatttgcggggtcgggatcttcatgcaccgacgttccaagaagtag

SEQ ID NO: 125270 - DNA, 687 bp, Artificial Sequence
  derived and/or modified sequence
atgatggtactgcaggtttccgccgcacctagaactgtcgccctgaccgcactgttaatggtcctcctgacctccgtggttcagggacgcgctacgccagaaaattatctgttccagggaagacaagagtgctatgctttcaatggcacccaacgcttccttgaacgctacatatacaaccgagaggaattcgcacggtttgattctgatgtgggagaatttcgggctgtgaccgaactggggagaccggcagcggagtattggaattcacagaaagacatcctagaggagaagagggccgtccctgataggatgtgtcgccacaactacgagctggggggaccaatgactctgcagcgacgaggctcaatacaggtccgctggttccttaacggccaggaagaaactgccggagttgtcagcacgaacctgattaggaatggggattggacattccagatacttgtgatgttagaaatgacgcctcagcagggagacgtgtacacttgtcaggtagaacacaccagcctcgatagcccggtgacggtcgaatggaaggctcaatcggactctgcacgctcgaagaccctcactggggctgggggttttgtactggggctcatcatttgcggcgtgggcatattcatgcaccgacgaagtaaaaaagtgcaaaggggaagtgcttag

SEQ ID NO: 125271 - DNA, 687 bp, Artificial Sequence
  derived and/or modified sequence
atgatggtactgcaagtctccgcagcccctcgaacagtggctttgaccgccctgctgatggtcttactcaccagcgtagtccaaggacgcgctacccctgaaaattacctatttcagggaagacaggaatgttacgcattcaacgggacccagagatttcttgaacgatatatttataacagagaggagtttgtgagatttgattctgatgtgggtgagttccgagcagtgacggaactgggacgcccagacgaagaatactggaactcacaaaaagacattcttgaagagaaacgggcagtgcctgatcgcatgtgtcggcataactatgagttaggcggtccaatgacactgcagcgaaggggaagcattcaggtgcggtggtttcttaacggccaggaagagacagccggagtggttagcaccaatctgatccgcaacggcgactggacatttcagattctggtcatgctggagatgacaccccagcaaggggacgtgtatacttgccaggtggagcatacctcaatggactctcctgttacggtggaatggaaagcacagtccgactcagccaggtcaaaaacacttacaggtgctgggggtttcgtgcttggactgataatctgtggggtgggtatattcatgcacaggaggagcaaaaaggtgcagcggggatctgcctag

SEQ ID NO: 125272 - DNA, 708 bp, Artificial Sequence
  derived and/or modified sequence
tgaaattacctcttccaggggcgtcaggaatgctatgccttcaacggcactcagagattcctcgagcggtatatttacaaccgcgaggagtttgtccggttcgacagcgacgtgggagagttcagagccgtcaccgagctgggaaggccagatgaggagtactggaattctcagaaagatattctggaggaaaagcgggcagtgccagaccgaatgtgccggcataattatgagcttggcggaccgatgacgctccagcgtcgggttcagcccagagtaaatgtctcaccctcaaagaaggggcctctgcagcaccacaatctgctcgtttgtcacgtgacagacttctatcccggatccattcaagttcgatggtttctgaacggccaggaagagactgccggtgtcgttagcacgaacctgatccgaaatggggattggacattccagattctagtgatgttggagatgacgccccagcaaggggatgtatatacttgccaagtagaacacacctcgatggattcccccgtcaccgtggaatggaaagcccaaagcgattccgcacggtccaagactttgaccggagctggaggctttgtgctgggcctgataatttgcggcgtcgggatctttatgcaccggagatccaaaaagggggagaaggcctgtaggttcaacgaagacctgcataagcagggtagctag

SEQ ID NO: 125273 - DNA, 777 bp, Artificial Sequence
  derived and/or modified sequence
atgatggttcttcaggtctccgccgcacctagaactgtggctttaaccgcactgctgatggtcttgctgaccagtgtagttcagggtcgcgcaaccccagagaattacctgttccaggggcgacaggagtgctatgccttcaatggtacccagcggtttttggaacgctacatttacaaccgtgaggagttcgtcaggttcgatagcgacgtgggcgaattccgggcagtgacagaattgggtcgccctgacgaagagtactggaacagccagaaagacatcctcgaagagaagagagctgtaccagaccggatgtgtagacacaattacgaattaggtgggccaatgactctccagcggagagtgcagcccagagtcaatgtttcaccatccaagaaggggcctctgcagcaccacaatctcctggtttgtcacgtgaccgacttctaccccggaagtatccaggtcaggtggttcctgaatggccaggaagaaacggccggagtggtgtccaccaatctaatccgtaatggagattggactttccagattttggtcatgttggagatgactccacagcagggtgatgtttacacgtgccaggttgaacacacgagcatggacagtcccgtcacggtagagtggaaagcacagagtgacagcgccagatcgaagacactgactggagcaggcggatttgtgctggggctgatcatctgtggtgtgggcatttttatgcaccgcaggtctaaaaaggtccaaagaggctcggcttag

SEQ ID NO: 125274 - DNA, 687 bp, Artificial Sequence
  derived and/or modified sequence
atgatggtgctgcaggtatcagccgcacctagaactgtggcgctgactgccttgcttatggtccttcttacaagcgttgtacagggacgcgcaacaccagagaattatctttttcaagggagacaggagtgttatgccttcaatggaactcagcgcttcttggagagatatatctacaatcgggaagaatttgcacgtttcgactccgatgtcggggagtttcgggctgtcaccgaactcgggcgtccagcagccgagtattggaactcccagaaggatatcctagaggagaagcgtgccgtgcctgaccgcatgtgcaggcataattatgaactaggcggacccatgacgctacagaggaggggtagtattcaggtgcgttggtttctaaacggccaggaggaaacagccggagtcgtgtcaaccaaccttatccggaacggagactggacctttcagatactcgtaatgctggaaatgactcctcaacagggtgatgtctatacttgtcaggtggagcatacatcgttagacagccctgttacagtagaatggaaggctcaaagtgacagcgctagatctaaaaccctgaccggtgccggtggcttcgttttggggctgatcatctgtggcgtcgggatcttcatgcatcggagatcaaagaaggttcaacgaggttctgcttag

SEQ ID NO: 125275 - DNA, 690 bp, Artificial Sequence
  derived and/or modified sequence
aagcaggcctggcgcggaagcgctactaggctaggaccgcagaattctggcaggcaggagtgttatgctttcaacggcacacaacgctttttggaacggtacatatataaccgcgaggagttcgtaagatttgattctgacgtgggcgaattccgcgcagttaccgagttaggacgacccgacgaggaatattggaactcccaaaaggatatcctggaggaggaacgagccgtgcccgaccgaatgtgtcggcacaattatgaactaggtggtcctatgaccctgcagaggcgtgtgcagccacgagtgaacgttagtccatccaaaaaaggcccactgcagcaccataatttgcttgtgtgtcacgtgacagacttctatccaggctcaattcaggtgcgttggtttctgaatggacaggaggagacggccggtgttgtctccacgaatctcatccgtaatggcgattggaccttccagattttggtcatgcttgagatgacccctcaacaaggagacgtttacacctgtcaggtcgagcacacatcactggactctcctgtgactgtggagtggaaggcacaatcagacagcgcacggtccaaaaccctgactggggctggcggtttcgtgctaggtctgataatttgcggggtcggtatcttcatgcatcgtcgctctaagaaatag

SEQ ID NO: 125276 - DNA, 777 bp, Artificial Sequence
  derived and/or modified sequence
atgatggtgttgcaagttagcgcagcacccaggaccgttgctttaaccgccctgcttatggtacttctcacatctgttgtgcaggggagggccacccccgagaactatctgtttcagggcaggcaggaatgctacgcctttaatggcacacagagattcctcgaaaggtatatttataaccgcgaagagttcgtacggttcgactctgacgtgggagagttccgggcagtcactgagttaggccgacccgatgaggaatactggaacagccagaaggacatcttagaggaagagcgggcagtccccgatcggatgtgcaggcataactacgagctgggcggacctatgacactccagcggcgagtgcagcccagggtcaatgtgagtccctccaaaaagggcccattgcaacatcataacctccttgtgtgccatgtgaccgacttctaccctggatctattcaagtgagatggtttctcaatggacaggaggaaactgccggagtggtctccacgaatctgatcaggaacggcgactggacttttcagatcctggtgatgcttgagatgacgccccagcaaggtgacgtctacacctgccaggtggagcacacgtccctggacagtcctgtcaccgttgagtggaaagctcagtctgattctgctagatccaagaccttgaccggcgcaggcggattcgtgttggggctgatcatatgtggcgtgggtatcttcatgcatcgccgtagcaaaaaggtacaacggggatccgcttag

SEQ ID NO: 125277 - DNA, 708 bp, Artificial Sequence
  derived and/or modified sequence
tgaaactatctgttccagggcaggcaggaatgttatgcatttaacggtacccagcgctttctcgaaaggtatatatacaaccgcgaggagtttgctcggtttgacagtgatgttggagagttcagggcagtcacagagctcgggagacctgcagcagagtactggaactcccagaaggacatactggaagagaaaagagcagtgccagaccggatgtgtcggcacaactatgagttggggggtcctatgacacttcagcgaagagtgcagcctcgcgtcaatgtgtcgccgagcaaaaaaggacctctccagcatcataacctacttgtgtgtcacgttaccgacttctatcctgggtccatccaggtcaggtggttcctgaacgggcaagaggaaacagcaggcgtggtgtctactaaccttatcaggaatggagattggacttttcagattctcgtaatgctggagatgacgccacagcagggagacgtttacacgtgtcaggtcgagcatactagcctggactctcccgtgacagtggagtggaaggcccaatctgactcagcgcgatcaaaaacactgactggtgccggtggcttcgtgctgggtttgattatttgtggcgtggggatttttatgcaccgaaggagcaaaaagggcgaaaaagcgtgcaggttcaacgaggaccttcacaagcaaggctcatag

SEQ ID NO: 125278 - DNA, 690 bp, Artificial Sequence
  derived and/or modified sequence
aaacaggcatggcgcggatctgcaactcggcttggccctcagaatagtggaaggcaggagtgttacgcgtttaacggtacacaaagatttcttgagcgatatatttacaacagggaggagttcgccaggttcgactccgacgtcggcgaatttagagcggtgaccgaactcgggcgacctgcagcggagtactggaactcccaaaaagatattctggaggagaagcgagccgttccggaccgcatgtgccgccacaactatgaactcggtggtccgatgaccctgcagcgccgagtccagcctcgcgtaaatgtttctcctagcaagaaaggtcccctgcaacatcacaatctgctcgtgtgccacgtgacggacttttatcctggctctattcaggtgaggtggttcctaaatggccaggaggaaaccgccggagtcgtcagtacaaacctgattcggaatggcgattggacattccaaattctggtcatgctggagatgaccccacaacaaggcgatgtgtacacttgccaagtggaacacacaagcctggactcgccagtgacagttgagtggaaagcacagtctgactccgccaggagtaaaacactgaccggggctgggggatttgttctgggtcttatcatctgcggcgttgggatctttatgcaccgtcgatctaagaaatag

SEQ ID NO: 125279 - DNA, 777 bp, Artificial Sequence
  derived and/or modified sequence
atgatggtattgcaagtgtcagcggctccacgcacggttgccttgacagccctgctcatggtgctgttaacatctgtggtgcaaggaagagctactccggaaaattatttgtttcagggacgccaggaatgctatgcctttaacggtacccaacgtttcctcgagagatacatttacaatcgggaggagtttgctcgcttcgattccgacgtgggcgagttcagagccgtcacagagcttggaagacccgctgccgagtactggaactctcagaaagacatcctggaagagaaaagggccgtgcccgaccggatgtgtcggcacaactacgaactcggcggtcctatgaccctgcaacgccgagtgcagcctagggtcaacgtgagcccttctaagaaaggaccgctgcaacaccacaatcttttggtgtgccatgtgacggatttctatcccggttcgattcaggtgcgatggtttttaaatggacaggaggaaactgccggtgtggtgtctaccaatcttattcgcaacggtgactggacattccagatcctggtgatgctggagatgacaccccagcagggcgacgtatacacgtgccaagtggagcataccagtttagatagtcccgtgacagtcgagtggaaagcacagagcgactccgctcgatctaagacccttacaggagcagggggttttgtcttaggcttaatcatatgtggagtggggatttttatgcacagacggtctaagaaagtgcagagagggagcgcatag

SEQ ID NO: 125280 - DNA, 777 bp, Artificial Sequence
  derived and/or modified sequence
atgatggtgctgcaagtgagcgccgcacccagaacagtggcactgacagcccttctgatggttttactcacttcagtggtccagggacgcgcaacaccagagaattacctgtttcaggggaggcaggagtgctatgcattcaacgggactcagcgttttttggagcgttatatttacaaccgagaagaatttgtccgatttgactccgacgtaggcgagttccgagcagttacggaactggggagaccagatgaggagtattggaattcccaaaaagacattcttgaagaaaagcgcgcagtgcctgaccggatgtgccggcacaattacgagctggggggacccatgacgctgcagcgccgtgtccagcccagggttaacgttagtccctccaagaagggacctctgcagcatcataatctgttggtgtgccacgttacagatttctaccctggttccattcaagtcagatggtttctgaatggccaagaagaaacagctggggtggtgtcaactaacctgatccggaacggggattggacctttcaaatccttgtaatgctggaaatgacaccacagcagggagacgtatacacctgccaggtcgagcataccagcatggattcaccagtgacagtggagtggaaggcccaatctgactcagctaggtctaaaactttaacaggggctgggggattcgtgctcggacttattatatgcggcgtgggcatctttatgcatcggagaagcaagaaagtgcaaaggggatcggcctag

SEQ ID NO: 125281 - DNA, 690 bp, Artificial Sequence
  derived and/or modified sequence
aagcaggcgtggcggggtagcgccacgcgactgggcccacagaactcaggccgtcaggaatgctacgcattcaacggcactcaaagatttttagaaaggtacatctacaatcgagaggaattcgccaggttcgattccgatgtcggcgaattcagggctgtgacggagctgggtagacctgcagccgaatattggaactctcaaaaggacatcctggaggagaaacgggcagtgccagatcggatgtgccggcacaactatgagctgggcggacccatgacactgcagaggcgggtacagcctcgcgtgaacgtttctccctctaagaaagggcctcttcagcatcacaatcttctcgtatgccacgtcacggatttctaccccggttccatacaggtgcgttggtttcttaatggccaggaggagacagctggcgtggtttcaaccaacctcataagaaacggcgactggactttccagatactcgtcatgcttgaaatgactcctcagcaaggggatgtgtatacctgccaggttgaacacaccagcctagactctcccgtgactgtcgagtggaaagcccagtctgactctgccaggagtaagacattaacaggcgcaggagggttcgtgctgggcctgattatttgcggtgtaggcatattcatgcatagaagatctaagaaatag

SEQ ID NO: 125282 - DNA, 708 bp, Artificial Sequence
  derived and/or modified sequence
taaaattacctgttccagggcagacaagagtgctacgctttcaacggaacccagcgctttctcgagaggtatatctacaatagggaggagctcgtgcgcttcgactcagatgtcggcgagtttcgggctgtgacagaattgggacggccagaagccgagtattggaactcccaaaaggatattttagaagaagaaagagccgttcctgataggatgtgtcggcacaactatgagctcggaggtcctatgactttacagcgccgtgtgcaacccagggtgaacgtctcaccgagcaagaaaggcccactccaacaccataacctgctggtatgccatgtcactgacttttaccctggcagtatccaggtcagatggtttctaaacggtcaagaagaaaccgcaggggtagtgtccacgaacctgatacgaaacggtgactggactttccagatcctcgtcatgcttgagatgaccccccagcaaggagacgtctacacttgtcaagtcgagcacaccagcctcgacagccctgtgaccgtggagtggaaagcgcagtcagacagtgcaagatcaaagactttaactggggctggcggatttgttctgggtctgatcatttgcggcgttggaatctttatgcaccggaggagcaagaaaggtgagaaggcttgtcgatttaacgaagatttgcacaagcaaggctcttag

SEQ ID NO: 125283 - DNA, 777 bp, Artificial Sequence
  derived and/or modified sequence
atgatggtcctccaggtttcagccgcacccagaacagtcgctttgacggccctgctaatggtgctccttacctctgtagtgcagggcagagctactcctgaaaactatctgttccagggaaggcaggaatgttacgcgttcaacggcactcagagattcctggaacgctatatttataatcgtgaggagttcgccaggttcgactcagacgtgggggagtttcgggctgtgaccgagctgggtcggcctgctgccgagtactggaactcacagaaagatattctggaggaaaagcgcgctgtgcccgatagaatgtgtagacataactacgagctgggtgggcctatgacactgcagaggcgggtccagccacgtgtgaacgtgtctccatcaaaaaaaggtcccctgcagcaccataacctgctggtttgccacgtcaccgatttctaccccggttctatccaagtcaggtggtttctgaatgggcaggaagagactgccggtgtagtctcaaccaacttgattcgcaatggagactggactttccagatcctagtgatgctagagatgacaccacaacagggggatgtctatacctgtcaggttgagcacacctctctcgacagccctgtcactgtggaatggaaagctcagagtgatagcgccaggagcaagacgttgacgggggcaggaggctttgtgttgggtctcatcatatgcggggttggaatctttatgcacagaagatctaagaaggtgcagcggggttcggcttag

SEQ ID NO: 125284 - DNA, 708 bp, Artificial Sequence
  derived and/or modified sequence
tagaattacgtctaccagctacggcaagaatgttacgctttcaacggaactcagcggtttctggaaaggtacatctacaatagggaggaattcgtgcggtttgacagtgacgtgggcgagtttagggccgttacagaacttggaagacccgatgaagactattggaattcccagaaagacctgctggaagagaagcgggcagttcctgatagggtttgcagacacaactacgagcttgacgaagcagtgacactgcagcgaagggttcaaccaaaagtgaatgtttcccctagcaagaaggggcctttgcaacaccataacctgcttgtgtgtcacgtgaccgatttttacccaggatcaatacaagtgcgatggtttcttaacgggcaggaggagaccgcgggagtagtctctaccaatttgatccgcaatggcgattggaccttccagatcctcgtaatgctagagatgacaccccagcagggggacgtttatatctgccaagtggaacacaccagcctggacagcccggtgactgtcgaatggaaggcccagtccgacagtgcacggagtaagacccttacaggcgcaggtggattcgtcttgggtctcatcatctgcggggttggtatttttatgcacagacggtcaaaaaagggtgagaaggcatgtaagttcaacgaggatctgcacaagcaaggatcctag

SEQ ID NO: 125285 - DNA, 690 bp, Artificial Sequence
  derived and/or modified sequence
aaacaagcctggaggggttccgccacccgcctgggccctcagaatagtggacgccaggagtgttatgcttttaatggcacccagagattcctagagaggtacatttacaaccgcgaggagtttgttcgattcgactccgatgtgggtgagtttcgcgctgtcaccgagcttggccgacccgatgaggagtattggaattcccagaaggacattttggaggagaagcgggcagtgccagacaggatgtgcagacacaattatgagttgggaggtcctatgaccctccaacgaagagttcagccccgtgtgaatgtgagtccctcaaagaagggtccgctacagcatcacaacctgctcgtgtgccatgtaacagatttttatcccggaagtattcaggtgcggtggttcctgaatggccaagaggagacagccggagtggtttccacaaacctgattagaaacggagattggacatttcagattctcgtcatgctcgaaatgacccctcagcagggagatgtgtacacgtgccaggtggagcacacctccatggactcaccagtcactgtagaatggaaggcacagagcgactcagcccgatctaaaacgttaacaggggcaggcggttttgttctggggctgattatttgcggggtgggcatctttatgcaccgccgttccaaaaaatag

SEQ ID NO: 125286 - DNA, 687 bp, Artificial Sequence
  derived and/or modified sequence
atgatggtcctccaggttagcgcagctccccgaacagtggcacttacagcccttcttatggtgctgctgacatccgtcgtccaaggaagggccacacccgagaattacgtgtaccagctccggcaggaatgttacgctttcaatggcactcagcggttcctcgagaggtatatttataatcgggaggaattcgtgcgcttcgattccgacgtcggtgaatttcgcgcagtgactgagctaggtcggccagacgaagactattggaattcacaaaaggacctgctggaggagaagagggctgttccggatagagtttgtaggcataattacgagctggatgaggctgtcacattgcagcggaggggatccattcaagttcgttggttcctcaacggacaagaggaaactgctggagtagtctcgaccaatttaatacggaacggagattggacattccagatcctggtcatgcttgagatgactccccagcaaggggatgtatatatttgtcaggtcgaacacacaagccttgactcacccgttaccgtcgagtggaaagcacagtccgacagcgccagaagtaaaacgcttaccggggctggtgggttcgtgctggggttgatcatatgcggagtcggcatcttcatgcatcggagaagcaaaaaggtccagagaggtagcgcctag

SEQ ID NO: 125287 - DNA, 687 bp, Artificial Sequence
  derived and/or modified sequence
atgatggtgctccaggtgagtgcggctcccagaacagtcgcacttacagctctgttaatggttctactgaccagtgtggtacaggggagagcaactcctgagaactacctgtttcagggtagacaagagtgttatgccttcaacggaactcagcggttcctggagagatatatttataaccgggaggagtttgtcagatttgactctgatgtgggcgagttccgcgcagtcaccgagttgggaagaccagatgaggagtattggaactctcagaaggacattcttgaagaaaagagagccgtgccagatagaatgtgtaggcacaattatgagctgggtggacccatgaccctccaaagaaggggatcaattcaggtgcgctggttcctgaacggccaggaggagactgccggagtcgtgtcgactaacctcataaggaacggggactggacgttccagatcttagtcatgctagaaatgactccccagcaaggagatgtgtacacgtgccaggtagagcacaccagcatggacagcccagtaaccgtcgagtggaaggcccagagtgattcagcccgtagcaagacactgaccggagcgggaggatttgtcctgggccttatcatttgtggagtgggaatcttcatgcatcgccgttccaagaaggtgcagcgaggtagtgcatag

SEQ ID NO: 125288 - DNA, 687 bp, Artificial Sequence
  derived and/or modified sequence
atgatggttcttcaggtctccgctgcccctagaaccgtggcactcacggctctcttgatggtgctgctgacaagtgtcgttcagggtcgggctaccccggagaattacttattccaaggacggcaggaatgctacgctttcaatggcacacagcgattcctggagcggtatatctacaatagagaggaatttgcaagattcgacagcgatgtgggcgagtttcgcgctgtcactgaactgggccgaccagcggctgagtactggaacagtcagaaagatatccttgaggaaaaaagggctgtccctgataggatgtgccggcataactacgagctgggaggcccaatgactctgcaacgcagggggtcgatccaggtgaggtggttccttaacgggcaagaggagacggcgggagtagtctctacaaatttaatccgtaacggcgactggactttccaaattcttgttatgcttgagatgacgccgcagcagggcgatgtgtacacttgtcaggtggagcacacatctctcgatagccctgtgaccgtcgagtggaaagctcagagcgatagtgcgaggtcaaagaccctcaccggcgctggaggatttgttctcggcctgattatatgcggagtgggtatcttcatgcaccggagaagcaagaaggttcaaagaggaagcgcttag

SEQ ID NO: 125289 - DNA, 690 bp, Artificial Sequence
  derived and/or modified sequence
aagcaggcctggaggggatccgccaccagattgggccctcaaaactctggtaggcaagaatgctatgcattcaatggtacacagagatttctcgaacggtatatctacaatcgcgaagagtttgtccgattcgacagtgatgttggagagtttagagccgtaaccgagttaggcagacctgatgaggaatactggaactcgcagaaagacatcctggaagaaaaaagggctgtccccgaccgtatgtgccgacacaactatgagctggggggaccaatgacattacaacgcagagttcagccacgggtcaatgtgagcccatccaagaaggggcctctccagcaccacaatcttctggtctgccacgtgaccgatttttaccccggttcaattcaggtacggtggttccttaacggccaagaggagaccgcaggggtagtgtctaccaatctgatacgtaacggcgactggacctttcagattttagtaatgctcgagatgacaccacagcagggagacgtctacacatgtcaggtcgaacacaccagcatggatagccccgtgacagtggagtggaaggctcagtctgacagcgcacggtccaagacattgactggggctggaggatttgtcctgggcctgataatctgtggggtgggaatatttatgcacagaagatccaaaaaatag

SEQ ID NO: 125290 - DNA, 708 bp, Artificial Sequence
  derived and/or modified sequence
tgaaactacttgttccagggcagacaggagtgttatgccttcaatggcacccagagattcctggaacggtacatttataatcgtgaggagttcgtgcgctttgatagtgacgtcggcgagtttcgagcagtgaccgaactcgggcgtcctgacgaggaatactggaacagtcagaaggacatcctagaggaagaacgggctgtgcccgacagaatgtgtcgccacaactatgaacttggcggacccatgaccttgcaaagacgagtccagccgagggtcaatgtttcccccagcaagaaaggtccattacagcatcataacctgctggtgtgccacgtgactgacttttatcccggaagcatccaagtccggtggttcttaaatggtcaggaagaaaccgcgggtgtcgtcagtacgaacctgatcaggaacggcgattggacctttcagattctggtcatgttggagatgaccccacaacagggcgatgtctatacctgccaggttgagcacactagcctggactctccggtgacagttgaatggaaggcacaaagtgatagtgccagatccaagaccttgacaggtgcagggggtttcgttctcggcctgatcatatgcggggtgggtatcttcatgcacagaagatccaaaaaaggagagaaagcctgccggttcaacgaagatctgcataagcaggggtcttag

SEQ ID NO: 125291 - DNA, 708 bp, Artificial Sequence
  derived and/or modified sequence
taaaactatctgttccaggggaggcaggaatgctacgctttcaatggaactcagagattcctggagaggtatatttataatagggaggagtttgctcgctttgactctgatgtgggggagtttagagcggtgactgagctcggcagacccgctgcggaatactggaacagccaaaaggatatactggaggagaaaagagcggttcccgatcgaatgtgcaggcataattacgaattaggcggacccatgactctccagcgcagagtgcaacccagggtgaatgtcagccctagcaagaaggggccactacagcaccacaatctgctagtttgccatgtgacagacttctaccccggtagcattcaggttcgctggttccttaatggtcaggaagagacagcaggcgtcgtgtccacaaacctgataagaaacggcgattggacctttcagatcctggtcatgcttgagatgacaccccagcaaggcgacgtttatacttgtcaggtggagcacacttcactagattccccagtgaccgtcgagtggaaggctcaatccgacagtgcacgcagtaagaccctgacgggagcgggtgggttcgtactggggctaatcatttgcggcgtgggaatcttcatgcacagacgtagcaagaaaggagagaaagcgtgtaggtttaacgaagatcttcacaaacagggctcatag

SEQ ID NO: 125292 - DNA, 687 bp, Artificial Sequence
  derived and/or modified sequence
atgatggttctgcaggtctccgctgcacccagaactgtcgccctgaccgctctgctaatggtgctcctgacaagcgtggtgcaggggagggctactcctgaaaactacctgttccaggggagacaggaatgttacgcatttaatggtacacagagatttctcgagagatacatctataacagggaagagtttgtccgatttgatagcgacgttggcgaattccgcgcagtgacggagctgggacgacccgatgaggaatactggaacagccagaaggatatcctggaagaggagagggctgtgccggaccgcatgtgtcggcacaattacgagctgggcggacccatgaccctgcagagacggggaagcattcaggtccggtggttcctcaacgggcaggaggaaacggctggcgttgtcagcacaaacttaattcgaaatggagattggactttccagatcctggtgatgctagagatgaccccacagcagggcgacgtttatacttgccaggtagagcatacgtctttagattctcctgttacagtcgaatggaaggcccagagtgactctgcaagaagtaagacgcttacaggggctggcggatttgtgttgggacttataatttgcggcgtcggcatctttatgcaccgtcgatccaagaaggtgcaaagaggctccgcatag

SEQ ID NO: 125293 - DNA, 690 bp, Artificial Sequence
  derived and/or modified sequence
aaacaggcctggcgtggctctgcgacaaggctgggccctcaaaactccctgcgtcaggaatgttatgcgttcaatggaacccagcgctttttggagcggtatatttataacagagaagaatttgtaaggtttgatagtgatgttggcgagtttcgtgctgtgaccgaattgggtcgtcctgacgaagattattggaactcgcagaaagacctcctcgaggaaaaacgtgctgtgccggacagggtttgcaggcataattacgaactggatgaagcagttaccctgcagcgcagggtgcagcctaaggtcaacgttagcccctctaagaagggacccttgcagcatcataatctgctcgtgtgtcatgtcacagatttctacccaggtagtatccaggtgcgatggttcctgaatgggcaggaagagaccgcaggggtggtgtctaccaaccttatcagaaacggcgattggaccttccagatcctggttatgctggagatgaccccacagcagggggacgtctatatctgccaggtggagcacacgtcactggattctccagtgacagtagaatggaaagctcaaagcgactccgcaaggtctaagactcttaccggcgcaggcggtttcgtgctggggctgataatctgcggcgtgggcatctttatgcaccggagatcaaaaaaatag

SEQ ID NO: 125294 - DNA, 777 bp, Artificial Sequence
  derived and/or modified sequence
atgatggtcctgcaggtgagtgccgctccgagaaccgtggcactcacggctctgctgatggtgctgctcactagcgtggtgcagggcagagccacacccgagaattaccttttccagggtcgacaagagtgctatgcatttaatgggacgcagcggttccttgagaggtatatttataatcgggaggaatttgccagatttgactccgatgtcggcgaattcagggcagtgaccgagctgggcagaccagcagcggagtattggaattcacagaaggacatcctggaggagaaaagggccgtgcccgacaggatgtgccgccacaactacgagcttgggggtccaatgacattacagcggagagtccagccgagggtgaatgtgtcacccagcaagaaggggccattgcaacaccataacctgcttgtgtgtcatgtgacggacttctatcccggatccatccaggtaaggtggtttctgaacggtcaggaagaaaccgccggtgtagtgtctacgaatctgatccgaaatggtgattggaccttccagatcctggtgatgctcgaaatgacgcctcagcaaggagatgtgtacacctgtcaggtcgagcatacctcccttgatagtcctgtgaccgttgagtggaaagcgcagtcagatagtgctcgtagcaagactctgacgggcgctggcggatttgtattgggactgataatctgcggcgttggaatctttatgcatcggagatccaagaaagtgcaaagggggagcgcctag

SEQ ID NO: 125295 - DNA, 708 bp, Artificial Sequence
  derived and/or modified sequence
tagaattatctcttccaaggcagacaagagtgctacgctttcaacggcacccaacgttttctcgagagatacatatacaaccgcgaggagttcgttaggttcgatagcgacgttggagaattccgcgctgtcaccgagctggggagacccgatgaagaatattggaattctcagaaggatatactagaggaaaaacgggctgtgcccgacagaatgtgtcgtcataattacgaactgggcggacccatgacgttacagcggagagtgcagcctagagttaatgtgagcccttcaaaaaaaggcccactgcaacatcacaatttgttagtgtgccatgtcaccgatttctatcctggatcaatccaggtgagatggttccttaacggtcaggaggagacagcaggagtagtgtccacaaacctgattagaaatggcgattggaccttccagattctcgtgatgctggagatgacgcctcagcagggtgacgtgtacacatgccaggtagagcatacgagtatggatagcccagtgacagtcgagtggaaggcccaatctgattcggcccgaagcaagaccttgacaggggcagggggattcgttctggggctgattatatgtggtgtgggaatctttatgcacaggagaagtaagaagggagaaaaagcgtgtagattcaatgaggacctgcacaagcaggggagctag

SEQ ID NO: 125296 - DNA, 690 bp, Artificial Sequence
  derived and/or modified sequence
aaacaggcctggcgcggatccgctacccggttgggacctcagaattctggacgccaggaatgttacgcttttaacggtacacagcgattcctggaacgatatatctacaacagggaggagtttgcacggtttgacagtgacgtgggcgagttccgggcagtgactgaattaggtcggcctgccgctgaatattggaacagccagaaggatatcctggaagaaaagagggccgttcctgacaggatgtgtaggcacaactatgaactcgggggtccaatgacattgcaaaggagagtgcagccgagggtgaacgtctccccgtccaaaaagggccctttgcaacatcataatttacttgtttgtcacgtaacggacttctatccaggatccattcaggtgcgatggtttttaaatgggcaagaagaaacagctggtgtggtatcaactaatttaattcgcaacggcgattggactttccagattttggtaatgctggaaatgactcctcagcagggagacgtctacacatgtcaggttgaacatacatctctggatagccccgtaacagtagaatggaaagcccagtccgactcagcccgaagtaagacactgacaggggctggaggattcgtgctgggattgatcatttgtggggtagggatcttcatgcatagacggagtaagaaatag

SEQ ID NO: 125297 - DNA, 708 bp, Artificial Sequence
  derived and/or modified sequence
tagaactatctgttccagggtaggcaggagtgctatgcttttaatggcacgcagcggttcctcgagcgctacatctacaatcgggaggagttcgccaggttcgattctgacgtgggagaatttagagcggtgaccgagctgggcaggccagcagcagaatactggaatagccagaaagacatccttgaggaaaagagagctgtgcccgataggatgtgtcgacataattatgagctgggtggaccgatgactctccagaggcgagtccagcctcgcgttaacgtgagtcccagcaagaaaggccctctccagcatcataatctgctggtttgccatgttactgatttctaccccggaagcatccaagtccgatggttcctgaatggacaggaagagacagcgggtgtcgtgtccaccaacctgatccgcaacggggattggactttccagatactggtgatgctggagatgacaccccagcagggggacgtgtacacatgtcaggtggagcatacatcattagattcccccgtaactgtggagtggaaagcccagtccgattcagcacgcagtaagaccttaactggcgctggtgggttcgtcctggggctgatcatttgtggagtcggcatctttatgcataggcggtctaaaaaaggggaaaaggcctgtaggttcaatgaagatcttcacaagcagggctcctag

SEQ ID NO: 125298 - DNA, 372 bp, Artificial Sequence
  derived and/or modified sequence
atgatggtcctgcaggtgtccgccgcacccaggaccgtagccctgacagctcttctcatggttctgctcacgtctgtagttcagggtagagccacgcccgagaattacctgtttcaggggaggcaggagtgctatgccttcaatggaacacaacgattcctcgagaggtatatctacaatcgcgaggaattcgccagattcgactcagacgtgggggaattcagagcagttactgaactgggcagacccgctgcggagtattggaactcacagaaggatatactcgaagagaagagagcagtgcccgatcgtatgtgcaggcataattacgagttgggtggacctatgaccctccaacgcagaggggagtag

SEQ ID NO: 125299 - DNA, 372 bp, Artificial Sequence
  derived and/or modified sequence
atgatggtgctgcaggtatcagccgctcctagaacagtggcgttgaccgccttgctgatggtgctcttgaccagtgttgtgcagggtagggctaccccggagaattatctgtttcaggggcgacaggagtgctatgccttcaacggcacccagagattcttggagcgatacatctataatcgcgaggagttagtgcggttcgactcagatgtgggagagttcagagccgtgacagagctcggtcgccctgaggcagagtattggaactcacagaaagacattctagaagaggagagagctgtgcccgatagaatgtgtcggcacaattatgaactgggcggaccgatgaccctgcagcgccgaggcgagtag

SEQ ID NO: 125300 - DNA, 372 bp, Artificial Sequence
  derived and/or modified sequence
atgatggtactgcaggtatctgccgcaccaaggacagttgctctgaccgctttactcatggtgctgttgacttccgtcgttcaggggcgagcgacacctgagaactatctatttcagggtcgtcaagaatgttatgcgttcaacggaacccagagatttctagagagatacatctacaaccgtgaagaatttgtccggttcgattctgatgtcggtgagttcagagcggtgacagagctgggaaggcccgacgaggagtattggaacagtcagaaggacatcctggaggaaaaaagggccgtccctgatagaatgtgccgccacaactatgaactcggtggccctatgaccctccaacggaggggtgagtag

SEQ ID NO: 125301 - DNA, 372 bp, Artificial Sequence
  derived and/or modified sequence
atgatggtactccaggtgagcgcagcccctagaaccgtggccctgacagcactcctgatggtgctgttaaccagcgttgtgcaaggccgagccaccccagagaactacctgtttcagggtaggcaagagtgttatgctttcaatggtacccaacgtttcctggaaaggtatatctataacagagaggagtttgtcagattcgattcggacgtaggagagttccgggcagtgaccgaactgggccgtccagatgaggaatattggaatagccagaaagatatcttagaggaggaacgcgcagtcccagacaggatgtgtcggcacaattatgaattaggtgggcctatgacccttcagaggcggggagagtag

SEQ ID NO: 125302 - DNA, 750 bp, Artificial Sequence
  derived and/or modified sequence
atggtgctcctgacaagcgttgtccagggcagagccacccctgagaactatgtatatcaactccggcaggaatgctatgcttttaacggaacacaacggttcctcgagaggtatatttacaacagagaggaattcgttagattcgactctgatgtcggggaatttagggccgtgactgaattaggacgccctgatgaagattattggaactcccaaaaggatctgctggaagagaaacgggcagtccccgaccgtgtgtgtcgccataattacgaacttgacgaggcggtaacgctccagagacgggtccagcccaaggtaaacgtctcccccagcaaaaaaggccctctgcaacaccacaacctgctggtctgtcatgtgacagatttctaccccggttcaattcaagtaaggtggttcctgaacgggcaagaagagactgcaggcgtggtcagcaccaatctgatcagaaacggggactggacgttccaaattctggtgatgctggaaatgaccccccaacagggggacgtatacatttgccaagtagaacacaccagtttggactccccagtgaccgtagaatggaaagcacagagcgattccgccaggagtaagacgctcacaggagcagggggattcgtgcttggcctaatcatctgcggcgttggtatatttatgcaccggaggagcaagaaaggggaaaaggcctgcaagtttaatgaggaccttcacaagcagggttcctag

SEQ ID NO: 125303 - DNA, 372 bp, Artificial Sequence
  derived and/or modified sequence
atgatggtcctccaggtctctgctgcacctcgcacagttgccctgacagctctgctcatggtgttgttgaccagtgtagtgcaaggaagggctactccagagaattacttatttcagggacgccaagagtgttacgctttcaacggcacacaaagattcttggagagatacatctataacagagaggagttcgccagattcgacagcgatgtgggggagttccgggcagtcaccgagcttggcaggcctgccgctgaatattggaatagccagaaagacatcctggaggagaaaagagcggtgccggacagaatgtgtcgccataactacgagctgggcggaccaatgacattgcaacgccgaggagaatag

SEQ ID NO: 125304 - DNA, 372 bp, Artificial Sequence
  derived and/or modified sequence
atgatggttttgcaagtgtccgctgctccacgcaccgtagccctcactgctctgctgatggtgctgcttacgagcgtggtgcagggtagggccacgcctgaaaactacctgtttcaagggagacaggaatgctatgcttttaacggaactcagcggtttctcgagagatatatctataaccgagaagaattcgccagatttgattctgatgtgggagagttccgcgctgtgactgagttggggagaccagccgctgagtattggaatagccagaaagacatactggaagagaaaagagctgtgcccgaccggatgtgcagacacaactacgagcttgggggacctatgaccctccagagacgaggtgagtag

SEQ ID NO: 125305 - DNA, 381 bp, Artificial Sequence
  derived and/or modified sequence
atgatggttctgcaagtgtccgcagctcccagaactgtcgcactgactgcgctgctgatggtgctactgacttccgtcgtacaaggcagggcgaccccagagaattacgtctaccaactgaggcaggaatgttacgctttcaatgggactcagcgtttccttgagcggtatatttataacagagaagaatttgtacgatttgactctgacgtaggggaattcagggctgttaccgagctggggcgacccgacgaagattactggaacagccagaaggatctgttggaggagaaacgagccgtgcccgacagagtttgccggcataactacgagctggacgaggcagtaacactccagcgcagagagcgcggaaagaaatag

SEQ ID NO: 125306 - DNA, 372 bp, Artificial Sequence
  derived and/or modified sequence
atgatggttctgcaagtgagcgcagctccaagaacggtcgccctaactgccctattaatggtgctcctcacttcggtcgtacagggcagggctacaccagaaaattatttgttccaggggagacaggaatgctacgcttttaatgggacacagcgatttctggaaaggtacatctataatcgggaagagttcgtgcgctttgactccgatgtgggagagttcagggcagttacagagctgggtcggccagacgaagaatattggaattcccaaaaggacatactagaggagaagcgtgcagtccccgacagaatgtgccgacacaattacgagctgggtgggccaatgaccttgcaaagacgaggagagtag

SEQ ID NO: 125307 - DNA, 777 bp, Artificial Sequence
  derived and/or modified sequence
atgatggtgctgcaggtgagcgccgcccccagaaccgtggccctgaccgccctgctgatggtgctgctgaccagcgtggtgcagggcagagccacccccgagaactacgtgtaccagctgagacaggagtgctacgccttcaacggcacccagagattcctggagagatacatctacaacagagaggagttcgtgagattcgacagcgacgtgggcgagttcagagccgtgaccgagctgggcagacccgacgaggactactggaacagccagaaggacctgctggaggagaagagagccgtgcccgacagagtgtgcagacacaactacgagctggacgaggccgtgaccctgcagagaagagtgcagcccaaggtgaacgtgagccccagcaagaagggccccctgcagcaccacaacctgctggtgtgccacgtgaccgacttctaccccggcagcatccaggtgagatggttcctgaacggccaggaggagaccgccggcgtggtgagcaccaacctgatcagaaacggcgactggaccttccagatcctggtgatgctggagatgaccccccagcagggcgacgtgtacatctgccaggtggagcacaccagcctggacagccccgtgaccgtggagtggaaggcccagagcgacagcgccagaagcaagaccctgaccggcgccggcggcttcgtgctgggcctgatcatctgcggcgtgggcatcttcatgcacagaagaagcaagaaggtgcagagaggcagcgcctag

SEQ ID NO: 125308 - DNA, 687 bp, Artificial Sequence
  derived and/or modified sequence
atgatggtgctgcaggtgagcgccgcccccagaaccgtggccctgaccgccctgctgatggtgctgctgaccagcgtggtgcagggcagagccacccccgagaactacctgttccagggcagacaggagtgctacgccttcaacggcacccagagattcctggagagatacatctacaacagagaggagctggtgagattcgacagcgacgtgggcgagttcagagccgtgaccgagctgggcagacccgaggccgagtactggaacagccagaaggacatcctggaggaggagagagccgtgcccgacagaatgtgcagacacaactacgagctgggcggccccatgaccctgcagagaagaggcagcatccaggtgagatggttcctgaacggccaggaggagaccgccggcgtggtgagcaccaacctgatcagaaacggcgactggaccttccagatcctggtgatgctggagatgaccccccagcagggcgacgtgtacacctgccaggtggagcacaccagcctggacagccccgtgaccgtggagtggaaggcccagagcgacagcgccagaagcaagaccctgaccggcgccggcggcttcgtgctgggcctgatcatctgcggcgtgggcatcttcatgcacagaagaagcaagaaggtgcagagaggcagcgcctag

SEQ ID NO: 125309 - DNA, 777 bp, Artificial Sequence
  derived and/or modified sequence
atgatggtgctgcaggtgagcgccgcccccagaaccgtggccctgaccgccctgctgatggtgctgctgaccagcgtggtgcagggcagagccacccccgagaactacctgttccagggcagacaggagtgctacgccttcaacggcacccagagattcctggagagatacatctacaacagagaggagctggtgagattcgacagcgacgtgggcgagttcagagccgtgaccgagctgggcagacccgaggccgagtactggaacagccagaaggacatcctggaggaggagagagccgtgcccgacagaatgtgcagacacaactacgagctgggcggccccatgaccctgcagagaagagtgcagcccagagtgaacgtgagccccagcaagaagggccccctgcagcaccacaacctgctggtgtgccacgtgaccgacttctaccccggcagcatccaggtgagatggttcctgaacggccaggaggagaccgccggcgtggtgagcaccaacctgatcagaaacggcgactggaccttccagatcctggtgatgctggagatgaccccccagcagggcgacgtgtacacctgccaggtggagcacaccagcctggacagccccgtgaccgtggagtggaaggcccagagcgacagcgccagaagcaagaccctgaccggcgccggcggcttcgtgctgggcctgatcatctgcggcgtgggcatcttcatgcacagaagaagcaagaaggtgcagagaggcagcgcctag

SEQ ID NO: 125310 - DNA, 690 bp, Artificial Sequence
  derived and/or modified sequence
aagcaggcctggagaggcagcgccaccagactgggcccccagaacagcggcagacaggagtgctacgccttcaacggcacccagagattcctggagagatacatctacaacagagaggagctggtgagattcgacagcgacgtgggcgagttcagagccgtgaccgagctgggcagacccgaggccgagtactggaacagccagaaggacatcctggaggaggagagagccgtgcccgacagaatgtgcagacacaactacgagctgggcggccccatgaccctgcagagaagagtgcagcccagagtgaacgtgagccccagcaagaagggccccctgcagcaccacaacctgctggtgtgccacgtgaccgacttctaccccggcagcatccaggtgagatggttcctgaacggccaggaggagaccgccggcgtggtgagcaccaacctgatcagaaacggcgactggaccttccagatcctggtgatgctggagatgaccccccagcagggcgacgtgtacacctgccaggtggagcacaccagcctggacagccccgtgaccgtggagtggaaggcccagagcgacagcgccagaagcaagaccctgaccggcgccggcggcttcgtgctgggcctgatcatctgcggcgtgggcatcttcatgcacagaagaagcaagaagtag

SEQ ID NO: 125311 - DNA, 687 bp, Artificial Sequence
  derived and/or modified sequence
atgatggtgctgcaggtgagcgccgcccccagaaccgtggccctgaccgccctgctgatggtgctgctgaccagcgtggtgcagggcagagccacccccgagaactacctgttccagggcagacaggagtgctacgccttcaacggcacccagagattcctggagagatacatctacaacagagaggagttcgccagattcgacagcgacgtgggcgagttcagagccgtgaccgagctgggcagacccgccgccgagtactggaacagccagaaggacatcctggaggagaagagagccgtgcccgacagaatgtgcagacacaactacgagctgggcggccccatgaccctgcagagaagaggcagcatccaggtgagatggttcctgaacggccaggaggagaccgccggcgtggtgagcaccaacctgatcagaaacggcgactggaccttccagatcctggtgatgctggagatgaccccccagcagggcgacgtgtacacctgccaggtggagcacaccagcctggacagccccgtgaccgtggagtggaaggcccagagcgacagcgccagaagcaagaccctgaccggcgccggcggcttcgtgctgggcctgatcatctgcggcgtgggcatcttcatgcacagaagaagcaagaaggtgcagagaggcagcgcctag

SEQ ID NO: 125312 - DNA, 687 bp, Artificial Sequence
  derived and/or modified sequence
atgatggtgctgcaggtgagcgccgcccccagaaccgtggccctgaccgccctgctgatggtgctgctgaccagcgtggtgcagggcagagccacccccgagaactacctgttccagggcagacaggagtgctacgccttcaacggcacccagagattcctggagagatacatctacaacagagaggagttcgtgagattcgacagcgacgtgggcgagttcagagccgtgaccgagctgggcagacccgacgaggagtactggaacagccagaaggacatcctggaggagaagagagccgtgcccgacagaatgtgcagacacaactacgagctgggcggccccatgaccctgcagagaagaggcagcatccaggtgagatggttcctgaacggccaggaggagaccgccggcgtggtgagcaccaacctgatcagaaacggcgactggaccttccagatcctggtgatgctggagatgaccccccagcagggcgacgtgtacacctgccaggtggagcacaccagcatggacagccccgtgaccgtggagtggaaggcccagagcgacagcgccagaagcaagaccctgaccggcgccggcggcttcgtgctgggcctgatcatctgcggcgtgggcatcttcatgcacagaagaagcaagaaggtgcagagaggcagcgcctag

SEQ ID NO: 125313 - DNA, 708 bp, Artificial Sequence
  derived and/or modified sequence
tgaaactacctgttccagggcagacaggagtgctacgccttcaacggcacccagagattcctggagagatacatctacaacagagaggagttcgtgagattcgacagcgacgtgggcgagttcagagccgtgaccgagctgggcagacccgacgaggagtactggaacagccagaaggacatcctggaggagaagagagccgtgcccgacagaatgtgcagacacaactacgagctgggcggccccatgaccctgcagagaagagtgcagcccagagtgaacgtgagccccagcaagaagggccccctgcagcaccacaacctgctggtgtgccacgtgaccgacttctaccccggcagcatccaggtgagatggttcctgaacggccaggaggagaccgccggcgtggtgagcaccaacctgatcagaaacggcgactggaccttccagatcctggtgatgctggagatgaccccccagcagggcgacgtgtacacctgccaggtggagcacaccagcatggacagccccgtgaccgtggagtggaaggcccagagcgacagcgccagaagcaagaccctgaccggcgccggcggcttcgtgctgggcctgatcatctgcggcgtgggcatcttcatgcacagaagaagcaagaagggcgagaaggcctgcagattcaacgaggacctgcacaagcagggcagctag

SEQ ID NO: 125314 - DNA, 777 bp, Artificial Sequence
  derived and/or modified sequence
atgatggtgctgcaggtgagcgccgcccccagaaccgtggccctgaccgccctgctgatggtgctgctgaccagcgtggtgcagggcagagccacccccgagaactacctgttccagggcagacaggagtgctacgccttcaacggcacccagagattcctggagagatacatctacaacagagaggagttcgtgagattcgacagcgacgtgggcgagttcagagccgtgaccgagctgggcagacccgacgaggagtactggaacagccagaaggacatcctggaggagaagagagccgtgcccgacagaatgtgcagacacaactacgagctgggcggccccatgaccctgcagagaagagtgcagcccagagtgaacgtgagccccagcaagaagggccccctgcagcaccacaacctgctggtgtgccacgtgaccgacttctaccccggcagcatccaggtgagatggttcctgaacggccaggaggagaccgccggcgtggtgagcaccaacctgatcagaaacggcgactggaccttccagatcctggtgatgctggagatgaccccccagcagggcgacgtgtacacctgccaggtggagcacaccagcatggacagccccgtgaccgtggagtggaaggcccagagcgacagcgccagaagcaagaccctgaccggcgccggcggcttcgtgctgggcctgatcatctgcggcgtgggcatcttcatgcacagaagaagcaagaaggtgcagagaggcagcgcctag

SEQ ID NO: 125315 - DNA, 690 bp, Artificial Sequence
  derived and/or modified sequence
aagcaggcctggagaggcagcgccaccagactgggcccccagaacagcggcagacaggagtgctacgccttcaacggcacccagagattcctggagagatacatctacaacagagaggagttcgtgagattcgacagcgacgtgggcgagttcagagccgtgaccgagctgggcagacccgacgaggagtactggaacagccagaaggacatcctggaggaggagagagccgtgcccgacagaatgtgcagacacaactacgagctgggcggccccatgaccctgcagagaagagtgcagcccagagtgaacgtgagccccagcaagaagggccccctgcagcaccacaacctgctggtgtgccacgtgaccgacttctaccccggcagcatccaggtgagatggttcctgaacggccaggaggagaccgccggcgtggtgagcaccaacctgatcagaaacggcgactggaccttccagatcctggtgatgctggagatgaccccccagcagggcgacgtgtacacctgccaggtggagcacaccagcctggacagccccgtgaccgtggagtggaaggcccagagcgacagcgccagaagcaagaccctgaccggcgccggcggcttcgtgctgggcctgatcatctgcggcgtgggcatcttcatgcacagaagaagcaagaagtag

SEQ ID NO: 125316 - DNA, 777 bp, Artificial Sequence
  derived and/or modified sequence
atgatggtgctgcaggtgagcgccgcccccagaaccgtggccctgaccgccctgctgatggtgctgctgaccagcgtggtgcagggcagagccacccccgagaactacctgttccagggcagacaggagtgctacgccttcaacggcacccagagattcctggagagatacatctacaacagagaggagttcgtgagattcgacagcgacgtgggcgagttcagagccgtgaccgagctgggcagacccgacgaggagtactggaacagccagaaggacatcctggaggaggagagagccgtgcccgacagaatgtgcagacacaactacgagctgggcggccccatgaccctgcagagaagagtgcagcccagagtgaacgtgagccccagcaagaagggccccctgcagcaccacaacctgctggtgtgccacgtgaccgacttctaccccggcagcatccaggtgagatggttcctgaacggccaggaggagaccgccggcgtggtgagcaccaacctgatcagaaacggcgactggaccttccagatcctggtgatgctggagatgaccccccagcagggcgacgtgtacacctgccaggtggagcacaccagcctggacagccccgtgaccgtggagtggaaggcccagagcgacagcgccagaagcaagaccctgaccggcgccggcggcttcgtgctgggcctgatcatctgcggcgtgggcatcttcatgcacagaagaagcaagaaggtgcagagaggcagcgcctag

SEQ ID NO: 125317 - DNA, 708 bp, Artificial Sequence
  derived and/or modified sequence
tgaaactacctgttccagggcagacaggagtgctacgccttcaacggcacccagagattcctggagagatacatctacaacagagaggagttcgccagattcgacagcgacgtgggcgagttcagagccgtgaccgagctgggcagacccgccgccgagtactggaacagccagaaggacatcctggaggagaagagagccgtgcccgacagaatgtgcagacacaactacgagctgggcggccccatgaccctgcagagaagagtgcagcccagagtgaacgtgagccccagcaagaagggccccctgcagcaccacaacctgctggtgtgccacgtgaccgacttctaccccggcagcatccaggtgagatggttcctgaacggccaggaggagaccgccggcgtggtgagcaccaacctgatcagaaacggcgactggaccttccagatcctggtgatgctggagatgaccccccagcagggcgacgtgtacacctgccaggtggagcacaccagcctggacagccccgtgaccgtggagtggaaggcccagagcgacagcgccagaagcaagaccctgaccggcgccggcggcttcgtgctgggcctgatcatctgcggcgtgggcatcttcatgcacagaagaagcaagaagggcgagaaggcctgcagattcaacgaggacctgcacaagcagggcagctag

SEQ ID NO: 125318 - DNA, 690 bp, Artificial Sequence
  derived and/or modified sequence
aagcaggcctggagaggcagcgccaccagactgggcccccagaacagcggcagacaggagtgctacgccttcaacggcacccagagattcctggagagatacatctacaacagagaggagttcgccagattcgacagcgacgtgggcgagttcagagccgtgaccgagctgggcagacccgccgccgagtactggaacagccagaaggacatcctggaggagaagagagccgtgcccgacagaatgtgcagacacaactacgagctgggcggccccatgaccctgcagagaagagtgcagcccagagtgaacgtgagccccagcaagaagggccccctgcagcaccacaacctgctggtgtgccacgtgaccgacttctaccccggcagcatccaggtgagatggttcctgaacggccaggaggagaccgccggcgtggtgagcaccaacctgatcagaaacggcgactggaccttccagatcctggtgatgctggagatgaccccccagcagggcgacgtgtacacctgccaggtggagcacaccagcctggacagccccgtgaccgtggagtggaaggcccagagcgacagcgccagaagcaagaccctgaccggcgccggcggcttcgtgctgggcctgatcatctgcggcgtgggcatcttcatgcacagaagaagcaagaagtag

SEQ ID NO: 125319 - DNA, 777 bp, Artificial Sequence
  derived and/or modified sequence
atgatggtgctgcaggtgagcgccgcccccagaaccgtggccctgaccgccctgctgatggtgctgctgaccagcgtggtgcagggcagagccacccccgagaactacctgttccagggcagacaggagtgctacgccttcaacggcacccagagattcctggagagatacatctacaacagagaggagttcgccagattcgacagcgacgtgggcgagttcagagccgtgaccgagctgggcagacccgccgccgagtactggaacagccagaaggacatcctggaggagaagagagccgtgcccgacagaatgtgcagacacaactacgagctgggcggccccatgaccctgcagagaagagtgcagcccagagtgaacgtgagccccagcaagaagggccccctgcagcaccacaacctgctggtgtgccacgtgaccgacttctaccccggcagcatccaggtgagatggttcctgaacggccaggaggagaccgccggcgtggtgagcaccaacctgatcagaaacggcgactggaccttccagatcctggtgatgctggagatgaccccccagcagggcgacgtgtacacctgccaggtggagcacaccagcctggacagccccgtgaccgtggagtggaaggcccagagcgacagcgccagaagcaagaccctgaccggcgccggcggcttcgtgctgggcctgatcatctgcggcgtgggcatcttcatgcacagaagaagcaagaaggtgcagagaggcagcgcctag

SEQ ID NO: 125320 - DNA, 708 bp, Artificial Sequence
  derived and/or modified sequence
tgaaactacctgttccagggcagacaggagtgctacgccttcaacggcacccagagattcctggagagatacatctacaacagagaggagctggtgagattcgacagcgacgtgggcgagttcagagccgtgaccgagctgggcagacccgaggccgagtactggaacagccagaaggacatcctggaggaggagagagccgtgcccgacagaatgtgcagacacaactacgagctgggcggccccatgaccctgcagagaagagtgcagcccagagtgaacgtgagccccagcaagaagggccccctgcagcaccacaacctgctggtgtgccacgtgaccgacttctaccccggcagcatccaggtgagatggttcctgaacggccaggaggagaccgccggcgtggtgagcaccaacctgatcagaaacggcgactggaccttccagatcctggtgatgctggagatgaccccccagcagggcgacgtgtacacctgccaggtggagcacaccagcctggacagccccgtgaccgtggagtggaaggcccagagcgacagcgccagaagcaagaccctgaccggcgccggcggcttcgtgctgggcctgatcatctgcggcgtgggcatcttcatgcacagaagaagcaagaagggcgagaaggcctgcagattcaacgaggacctgcacaagcagggcagctag

SEQ ID NO: 125321 - DNA, 708 bp, Artificial Sequence
  derived and/or modified sequence
tgaaactacgtgtaccagctgagacaggagtgctacgccttcaacggcacccagagattcctggagagatacatctacaacagagaggagttcgtgagattcgacagcgacgtgggcgagttcagagccgtgaccgagctgggcagacccgacgaggactactggaacagccagaaggacctgctggaggagaagagagccgtgcccgacagagtgtgcagacacaactacgagctggacgaggccgtgaccctgcagagaagagtgcagcccaaggtgaacgtgagccccagcaagaagggccccctgcagcaccacaacctgctggtgtgccacgtgaccgacttctaccccggcagcatccaggtgagatggttcctgaacggccaggaggagaccgccggcgtggtgagcaccaacctgatcagaaacggcgactggaccttccagatcctggtgatgctggagatgaccccccagcagggcgacgtgtacatctgccaggtggagcacaccagcctggacagccccgtgaccgtggagtggaaggcccagagcgacagcgccagaagcaagaccctgaccggcgccggcggcttcgtgctgggcctgatcatctgcggcgtgggcatcttcatgcacagaagaagcaagaagggcgagaaggcctgcaagttcaacgaggacctgcacaagcagggcagctag

SEQ ID NO: 125322 - DNA, 690 bp, Artificial Sequence
  derived and/or modified sequence
aagcaggcctggagaggcagcgccaccagactgggcccccagaacagcggcagacaggagtgctacgccttcaacggcacccagagattcctggagagatacatctacaacagagaggagttcgtgagattcgacagcgacgtgggcgagttcagagccgtgaccgagctgggcagacccgacgaggagtactggaacagccagaaggacatcctggaggagaagagagccgtgcccgacagaatgtgcagacacaactacgagctgggcggccccatgaccctgcagagaagagtgcagcccagagtgaacgtgagccccagcaagaagggccccctgcagcaccacaacctgctggtgtgccacgtgaccgacttctaccccggcagcatccaggtgagatggttcctgaacggccaggaggagaccgccggcgtggtgagcaccaacctgatcagaaacggcgactggaccttccagatcctggtgatgctggagatgaccccccagcagggcgacgtgtacacctgccaggtggagcacaccagcatggacagccccgtgaccgtggagtggaaggcccagagcgacagcgccagaagcaagaccctgaccggcgccggcggcttcgtgctgggcctgatcatctgcggcgtgggcatcttcatgcacagaagaagcaagaagtag

SEQ ID NO: 125323 - DNA, 687 bp, Artificial Sequence
  derived and/or modified sequence
atgatggtgctgcaggtgagcgccgcccccagaaccgtggccctgaccgccctgctgatggtgctgctgaccagcgtggtgcagggcagagccacccccgagaactacgtgtaccagctgagacaggagtgctacgccttcaacggcacccagagattcctggagagatacatctacaacagagaggagttcgtgagattcgacagcgacgtgggcgagttcagagccgtgaccgagctgggcagacccgacgaggactactggaacagccagaaggacctgctggaggagaagagagccgtgcccgacagagtgtgcagacacaactacgagctggacgaggccgtgaccctgcagagaagaggcagcatccaggtgagatggttcctgaacggccaggaggagaccgccggcgtggtgagcaccaacctgatcagaaacggcgactggaccttccagatcctggtgatgctggagatgaccccccagcagggcgacgtgtacatctgccaggtggagcacaccagcctggacagccccgtgaccgtggagtggaaggcccagagcgacagcgccagaagcaagaccctgaccggcgccggcggcttcgtgctgggcctgatcatctgcggcgtgggcatcttcatgcacagaagaagcaagaaggtgcagagaggcagcgcctag

SEQ ID NO: 125324 - DNA, 708 bp, Artificial Sequence
  derived and/or modified sequence
tgaaactacctgttccagggcagacaggagtgctacgccttcaacggcacccagagattcctggagagatacatctacaacagagaggagttcgtgagattcgacagcgacgtgggcgagttcagagccgtgaccgagctgggcagacccgacgaggagtactggaacagccagaaggacatcctggaggaggagagagccgtgcccgacagaatgtgcagacacaactacgagctgggcggccccatgaccctgcagagaagagtgcagcccagagtgaacgtgagccccagcaagaagggccccctgcagcaccacaacctgctggtgtgccacgtgaccgacttctaccccggcagcatccaggtgagatggttcctgaacggccaggaggagaccgccggcgtggtgagcaccaacctgatcagaaacggcgactggaccttccagatcctggtgatgctggagatgaccccccagcagggcgacgtgtacacctgccaggtggagcacaccagcctggacagccccgtgaccgtggagtggaaggcccagagcgacagcgccagaagcaagaccctgaccggcgccggcggcttcgtgctgggcctgatcatctgcggcgtgggcatcttcatgcacagaagaagcaagaagggcgagaaggcctgcagattcaacgaggacctgcacaagcagggcagctag

SEQ ID NO: 125325 - DNA, 687 bp, Artificial Sequence
  derived and/or modified sequence
atgatggtgctgcaggtgagcgccgcccccagaaccgtggccctgaccgccctgctgatggtgctgctgaccagcgtggtgcagggcagagccacccccgagaactacctgttccagggcagacaggagtgctacgccttcaacggcacccagagattcctggagagatacatctacaacagagaggagttcgtgagattcgacagcgacgtgggcgagttcagagccgtgaccgagctgggcagacccgacgaggagtactggaacagccagaaggacatcctggaggaggagagagccgtgcccgacagaatgtgcagacacaactacgagctgggcggccccatgaccctgcagagaagaggcagcatccaggtgagatggttcctgaacggccaggaggagaccgccggcgtggtgagcaccaacctgatcagaaacggcgactggaccttccagatcctggtgatgctggagatgaccccccagcagggcgacgtgtacacctgccaggtggagcacaccagcctggacagccccgtgaccgtggagtggaaggcccagagcgacagcgccagaagcaagaccctgaccggcgccggcggcttcgtgctgggcctgatcatctgcggcgtgggcatcttcatgcacagaagaagcaagaaggtgcagagaggcagcgcctag

SEQ ID NO: 125326 - DNA, 690 bp, Artificial Sequence
  derived and/or modified sequence
aagcaggcctggagaggcagcgccaccagactgggcccccagaacagcctgagacaggagtgctacgccttcaacggcacccagagattcctggagagatacatctacaacagagaggagttcgtgagattcgacagcgacgtgggcgagttcagagccgtgaccgagctgggcagacccgacgaggactactggaacagccagaaggacctgctggaggagaagagagccgtgcccgacagagtgtgcagacacaactacgagctggacgaggccgtgaccctgcagagaagagtgcagcccaaggtgaacgtgagccccagcaagaagggccccctgcagcaccacaacctgctggtgtgccacgtgaccgacttctaccccggcagcatccaggtgagatggttcctgaacggccaggaggagaccgccggcgtggtgagcaccaacctgatcagaaacggcgactggaccttccagatcctggtgatgctggagatgaccccccagcagggcgacgtgtacatctgccaggtggagcacaccagcctggacagccccgtgaccgtggagtggaaggcccagagcgacagcgccagaagcaagaccctgaccggcgccggcggcttcgtgctgggcctgatcatctgcggcgtgggcatcttcatgcacagaagaagcaagaagtag

SEQ ID NO: 125327 - DNA, 372 bp, Artificial Sequence
  derived and/or modified sequence
atgatggtgctgcaggtgagcgccgcccccagaaccgtggccctgaccgccctgctgatggtgctgctgaccagcgtggtgcagggcagagccacccccgagaactacctgttccagggcagacaggagtgctacgccttcaacggcacccagagattcctggagagatacatctacaacagagaggagttcgccagattcgacagcgacgtgggcgagttcagagccgtgaccgagctgggcagacccgccgccgagtactggaacagccagaaggacatcctggaggagaagagagccgtgcccgacagaatgtgcagacacaactacgagctgggcggccccatgaccctgcagagaagaggcgagtag

SEQ ID NO: 125328 - DNA, 372 bp, Artificial Sequence
  derived and/or modified sequence
atgatggtgctgcaggtgagcgccgcccccagaaccgtggccctgaccgccctgctgatggtgctgctgaccagcgtggtgcagggcagagccacccccgagaactacctgttccagggcagacaggagtgctacgccttcaacggcacccagagattcctggagagatacatctacaacagagaggagctggtgagattcgacagcgacgtgggcgagttcagagccgtgaccgagctgggcagacccgaggccgagtactggaacagccagaaggacatcctggaggaggagagagccgtgcccgacagaatgtgcagacacaactacgagctgggcggccccatgaccctgcagagaagaggcgagtag

SEQ ID NO: 125329 - DNA, 372 bp, Artificial Sequence
  derived and/or modified sequence
atgatggtgctgcaggtgagcgccgcccccagaaccgtggccctgaccgccctgctgatggtgctgctgaccagcgtggtgcagggcagagccacccccgagaactacctgttccagggcagacaggagtgctacgccttcaacggcacccagagattcctggagagatacatctacaacagagaggagttcgtgagattcgacagcgacgtgggcgagttcagagccgtgaccgagctgggcagacccgacgaggagtactggaacagccagaaggacatcctggaggagaagagagccgtgcccgacagaatgtgcagacacaactacgagctgggcggccccatgaccctgcagagaagaggcgagtag

SEQ ID NO: 125330 - DNA, 372 bp, Artificial Sequence
  derived and/or modified sequence
atgatggtgctgcaggtgagcgccgcccccagaaccgtggccctgaccgccctgctgatggtgctgctgaccagcgtggtgcagggcagagccacccccgagaactacctgttccagggcagacaggagtgctacgccttcaacggcacccagagattcctggagagatacatctacaacagagaggagttcgtgagattcgacagcgacgtgggcgagttcagagccgtgaccgagctgggcagacccgacgaggagtactggaacagccagaaggacatcctggaggaggagagagccgtgcccgacagaatgtgcagacacaactacgagctgggcggccccatgaccctgcagagaagaggcgagtag

SEQ ID NO: 125331 - DNA, 750 bp, Artificial Sequence
  derived and/or modified sequence
atggtgctgctgaccagcgtggtgcagggcagagccacccccgagaactacgtgtaccagctgagacaggagtgctacgccttcaacggcacccagagattcctggagagatacatctacaacagagaggagttcgtgagattcgacagcgacgtgggcgagttcagagccgtgaccgagctgggcagacccgacgaggactactggaacagccagaaggacctgctggaggagaagagagccgtgcccgacagagtgtgcagacacaactacgagctggacgaggccgtgaccctgcagagaagagtgcagcccaaggtgaacgtgagccccagcaagaagggccccctgcagcaccacaacctgctggtgtgccacgtgaccgacttctaccccggcagcatccaggtgagatggttcctgaacggccaggaggagaccgccggcgtggtgagcaccaacctgatcagaaacggcgactggaccttccagatcctggtgatgctggagatgaccccccagcagggcgacgtgtacatctgccaggtggagcacaccagcctggacagccccgtgaccgtggagtggaaggcccagagcgacagcgccagaagcaagaccctgaccggcgccggcggcttcgtgctgggcctgatcatctgcggcgtgggcatcttcatgcacagaagaagcaagaagggcgagaaggcctgcaagttcaacgaggacctgcacaagcagggcagctag

SEQ ID NO: 125332 - DNA, 381 bp, Artificial Sequence
  derived and/or modified sequence
atgatggtgctgcaggtgagcgccgcccccagaaccgtggccctgaccgccctgctgatggtgctgctgaccagcgtggtgcagggcagagccacccccgagaactacgtgtaccagctgagacaggagtgctacgccttcaacggcacccagagattcctggagagatacatctacaacagagaggagttcgtgagattcgacagcgacgtgggcgagttcagagccgtgaccgagctgggcagacccgacgaggactactggaacagccagaaggacctgctggaggagaagagagccgtgcccgacagagtgtgcagacacaactacgagctggacgaggccgtgaccctgcagagaagagagagaggcaagaagtag

SEQ ID NO: 125333 - DNA, 4055 bp, Artificial Sequence
  derived and/or modified sequence
gtcacagaagactacttgggttcatggtctctaatatttcaaacaggagctccctttagcgagtccttcttttcctgactgcagctcttttcattttgccatccttttccagctccatgatggttctgcaggtttctgcggccccccggacagtggctctgacggcgttactgatggtgctgctcacatctgtggtccagggcagggccactccagagaattaccttttccagggacggcaggaatgctacgcgtttaatgggacacagcgcttcctggagagatacatctacaaccgggaggagttcgcgcgcttcgacagcgacgtgggggagttccgggcggtgacggagctggggcggcctgctgcggagtactggaacagccagaaggacatcctggaggagaagcgggcagtgccggacaggatgtgcagacacaactacgagctgggcgggcccatgaccctgcagcgccgagtccagcctagggtgaatgtttccccctccaagaaggggcccttgcagcaccacaacctgcttgtctgccacgtgacggatttctacccaggcagcattcaagtccgatggttcctgaatggacaggaggaaacagctggggtcgtgtccaccaacctgatccgtaatggagactggaccttccagatcctggtgatgctggaaatgaccccccagcagggagatgtctacacctgccaagtggagcacaccagcctggatagtcctgtcaccgtggagtggaaggcacagtctgattctgcccggagtaagacattgacgggagctgggggcttcgtgctggggctcatcatctgtggagtgggcatcttcatgcacaggaggagcaagaaagttcaacgaggatctgcataaacagggttcctgagctcactgaaaagactattgtgccttaggaaaagcatttgctgtgtttcgttagcatctggctccaggacagaccttcaacttccaaattggatactgctgccaagaagttgctctgaagtcagtttctatcattctgctctttgattcaaagcactgtttctctcactgggcctccaaccatgttcccttcttcttagcaccacaaataatcaaaacccaacatgactgtttgttttcctttaaaaatatgcaccaaatcatctctcatcacttttctctgagggttttagtagacagtaggagttaataaagaagttcattttggtttaaacataggaaagaagagaaccatgaaaatggggatatgttaactattgtataatggggcctgttacacatgacactcttctgaattgactgtatttcagtgagctgcccccaaatcaagtttagtgccctcatccatttatgtctcagaccactattcttaactattcaatggtgagcagactgcaaatctgcctgataggacccatattcccacagcactaattcaacatataccttactgagagcatgttttatcattaccattaagaagttaaatgaacatcagaatttaaaatcataaatataatctaatacactttaaccattttctttgtgtgccatcacaaatactccttaaccaaatacggcttggacttttgaatgcatccaatagacgtcatttgtcgtctaagtctgcattcatccaccagcctaggcctcctgtcttaattttcatacagacagaaatgactccccactggggaaagagcaaagcaatacatgtagcactctttttcaaacactggtctttttttttttcttaacaatccaacattgttatgtgttttgcgtctcatattgacaccttttggtcaaggtagaggacatgtttgttgtaagctttctttttcgtgtagaggatggattcttcactcctgatacacacaatcagtgcacagcagctctcttatacatccagttgatgccttcagtctccctggcttcttacaagcatcttctgggccttgtgtgtccctgggcacctgtccctggtcaattcccgaaagctactgtgctcctcttgcccatctccccttgcaaataatatcttccatcgggggaccggcttcctccaatttcaggagaggtggggctgaaggcacagacttgggcgtcactggcacagatataagtaaatacagctggagtctgcagagaggctggactgagtcagggagtcaggaaagagaagccacacacaaggacaaccaatcatgtttctcataatcttcttaacctagggaataggacacaatcattttttctttttaaaacatctttatccctgatcagcctcatttcctcaaaaactataaaggaaaatgctgctgacttgtttttgcgtagtaatttcagctgtcacataataagctaaggaagacagtatatagtaaataaggaccctttatctgtcttattttcccttttggcttcacaggaaacttgtgagaaacctatgcagcataaaattaatatgatttcaatccagggattcaacgatggaaggaggtcatgagaatagcagaaagtcttcaaatcgagatcattatgaaatcctcagacccagagcacataaatcctaccctcagagtcactgagcagttaacattacaaattacaaaccatatccagtcagagtcattctctttcctgcttgtctcctgtactcatgttacaggttagggcagtaccccgagtggagtgaacaatctctggactaacacttgtcaggatcagaagctgaggtatctgcacccacattacaggaacaggatatgtgctcctagggaactgagggtgtcaggagatgaggaatgtccctggagtcacagaaagaaggtatcagatgtgtctcactctgacatatgcaggtgtttatgaaactctgggatttctaaggaaggatgcagtgcagagacaggtcccagaggagacaagagctgagagaccatccaaactgggaccaccttgtcactagacttcaaattttcaatattgatagagtgttttctaagagtcaggccctttgctgagtgctatgtgcagcaggatcaaaggcagccaggaggtagaggagtcttgaggtacatcagtcattggagttgaagagcagagattcaaaggaaagttggaactggagctttaaaggagatgtgaagtgggtgactcaacctctgactcagaaaaattgatacctgcagaagaaaaaacccggcgggcttaggactcccagctgagtgttgtatcctccatccctttccacctggtcccttcattttctacccctcacagttccctaacgagaaggtggtccacccaacagacaacactgcctcagatggttatcaaggggtaccctaagaagaaatcatctcaccctctctttgtccccatttgtcaagtagcagtgaggccgagccaggggatggtgaaagtggaaggaggtgggagttgggcatcgggtgtgaagatgctcttgaaaggggttttaataaccacttgctaccaggccagtgaacacttaccatagttgatgccttttgagcatgttgcattgtaaactgtccctgaaattactgtgcacttggcttatgggatgaaacatcctcctagttcttttgtctctcagcttctctgaagtctcattgagcaccttctcttcaatttcttttacacagtaagaataggatcagctgtgctaaactaacaaatacccagatatccaggtttggctcatgttacacgtccaaagtaagtcatgcaggaagctctgctcatcatcgtactcaggaagtcaggctgacagtctttctcctgcacatctgctcccagaacctccccagcagaatgaagggaacctaagaatttattcactggcttttaatgatccctcctagaaagaacacacttctcgcatttcattttccaatgtaaatcatatggctgcaactaacttcaaataagtgggaatacttgaaggtggaaaacatttaagaagtacacactaaataaataataaaatacttctacaagaga

SEQ ID NO: 125334 - protein, 255 aa, Artificial Sequence
  derived and/or modified sequence
MILNKALLLGALALTTVMSPCGGEDIVADHVASCGVNLYQFYGPSGQYTHEFDGDEQFYVDLERKETAWRWPEFSKFGGFDPQGALRNMAVAKHNLNIMIKRYNSTAATNEVPEVTVFSKSPVTLGQPNTLICLVDNIFPPVVNITWLSNGQSVTEGVSETSFLSKSDHSFFKISYLTFLPSADEIYDCKVEHWGLDQPLLKHWEPEIPAPMSELTETVVCALGLSVGLMGIVVGTVFIIQGLRSVGASRHQGPL

SEQ ID NO: 125335 - protein, 214 aa, Artificial Sequence
  derived and/or modified sequence
MILNKALLLGALALTTVMSPCGGEDIVADHVASCGVNLYQFYGPSGQYTHEFDGDEQFYVDLERKETAWRWPEFSKFGGFDPQGALRNMAVAKHNLNIMIKRYNSTAATNEVPEVTVFSKSPVTLGQPNTLICLVDNIFPPVVNITWLSNGQSVTEGVSETSFLSKSDHSFFKISYLTFLPSADEIYDCKVEHWGLDQPLLKHWGASPSTGAEE

SEQ ID NO: 125336 - DNA, 81 bp, Artificial Sequence
  derived and/or modified sequence
ttcttgatggataagtcaagtctcacgggggccctgtgttcaatcaccctagcaagtccttgcggtacgccaggaatctag

SEQ ID NO: 125337 - DNA, 768 bp, Artificial Sequence
  derived and/or modified sequence
atgatcctgaacaaagcattactgctgggggctctggctttgacgaccgtcatgtccccctgcgggggcgaagacatagtggccgaccatgtagcctcttgtggcgtgaacctgtatcagttttatgggccatctggccagtacactcatgaattcgacggggacgagcagttttatgttgacctcgagcggaaggaaaccgcctggagatggccagaattttccaagtttgggggttttgaccctcagggcgcactgcgcaacatggccgtagccaaacacaatctaaacattatgattaaacgatacaattccaccgctgcgaccaatgaagttcctgaagtgactgtctttagcaaaagtcccgtgaccctgggacagcccaacaccttgatttgtctggttgataatatctttcccccagtggtgaacattacgtggctgtccaacggacagtcggtcacagagggtgtaagtgagaccagttttctgtcgaaatccgatcattcctttttcaaaattagttatctcacctttctgcccagcgcggacgagatttatgactgcaaagtggaacactggggtctggatcagcctttgcttaaacactgggaacctgagatacccgctcccatgtccgagctgacggagaccgtcgtgtgcgcactcgggctgtcggtgggcttgatggggattgtggtggggactgtgttcatcattcaaggactgcggtccgtgggggcaagccgtcaccaaggcccactgtag

SEQ ID NO: 125338 - DNA, 768 bp, Artificial Sequence
  derived and/or modified sequence
atgatcctcaacaaagccttactgctgggtgccttggccctcaccaccgtgatgagcccctgcggcggggaggacatcgtggctgatcacgttgcgagctgtggcgtgaacttataccagttttacggaccatccggccagtatactcatgaatttgacggggacgagcagttctatgttgacttggagaggaaagagactgcatggaggtggccagaattttccaagtttggcggattcgatccacagggggctctgcggaatatggccgtcgcaaagcacaatctcaacatcatgatcaaacggtacaacagtaccgctgcaactaacgaggtgcctgaggtgacggtgtttagcaagagccctgtgaccctgggccaacccaacactctaatttgtcttgtggataatatctttccaccagtggtcaacattacctggttgtccaacgggcagagtgttacagaaggggttagcgagaccagttttttgagcaaatctgaccactccttcttcaaaatcagctaccttacattcctgccctccgccgatgagatctatgattgtaaagttgagcactgggggctggatcaacctctgctgaagcattgggaacctgagatcccagcgcctatgtcagagctgacagaaaccgtcgtgtgtgcccttggattatcagtgggcttgatgggtatcgtcgtgggcaccgtgttcattatccaggggctcaggtcagtgggtgcctccagacatcaggggcctctttag

SEQ ID NO: 125339 - DNA, 768 bp, Artificial Sequence
  derived and/or modified sequence
atgatcctgaataaagctctgttgctgggcgccctcgccttaactactgtgatgtctccctgtgggggggaagatattgttgccgatcacgtagctagctgtggggtgaatctgtatcaattctatggaccttctgggcaatatactcacgagttcgatggagatgaacagttctacgtggatctagaacgaaaagagacagcctggaggtggcctgagttcagcaagttcggaggtttcgacccacagggtgctctccgtaacatggcagtagccaagcacaatttgaacatcatgataaaacggtacaattccaccgccgccactaacgaagtgccggaggtcactgttttttccaaatccccagtcactctcggtcaaccaaatactctgatctgtttagtggataacatttttcccccggtggttaatattacatggttgagcaacgggcagtcagtcaccgagggtgtgagcgaaactagtttcctaagcaaatctgaccacagtttcttcaagattagttatttgacttttctgccctccgctgacgagatctatgactgcaaagtggagcattggggactagatcagccactgctgaagcactgggagcctgagatccccgccccgatgagcgagctgactgaaacagtagtatgcgccctcggtctgtctgtgggactcatgggcatagttgtgggaacagtctttataatccagggtctcagatccgtcggagcctcccggcatcaggggccactctag

SEQ ID NO: 125340 - DNA, 768 bp, Artificial Sequence
  derived and/or modified sequence
atgatcctgaataaagcactgctactgggcgctctcgctctgactaccgttatgagtccctgtggaggtgaggatatcgtcgccgaccacgttgcctcctgtggagtaaatttatatcagttctatggaccaagtggccaatacacccacgaattcgatggcgatgaacagttctatgtggatctcgagcgtaaagaaaccgcctggcggtggcctgagttctcaaaattcggcggcttcgaccctcagggtgcccttaggaacatggctgtggccaaacataacctgaacatcatgatcaagaggtacaactcaaccgcagcaacgaacgaagtgccagaagtcactgtgttctctaaaagtccagtgacgctgggtcagccaaacaccttaatctgcctagttgacaacatttttccccccgtggtgaacatcacctggctaagtaatggccagtcagtcacagagggagtatcagagacgtcctttctgagcaagagtgatcatagtttctttaagataagctatctgacatttttacccagtgccgatgaaatttatgactgtaaagtggagcactggggactcgaccaacctttgttaaagcattgggaacccgaaatccctgcacccatgtccgagctaaccgagactgtcgtttgcgctcttgggttatctgtcggcctcatgggaattgttgtagggaccgtctttataatacaggggctgcggtccgtgggcgcatcgagacatcagggcccactgtag

SEQ ID NO: 125341 - DNA, 75 bp, Artificial Sequence
  derived and/or modified sequence
atgattctcaacaaggctctgctgttaggagcccttgctctgactacagtgatgtcgccctgcggcggtgaatag

SEQ ID NO: 125342 - DNA, 84 bp, Artificial Sequence
  derived and/or modified sequence
atgattctcaataaagctctactgctgggtgctctggctctcacagccgtcatgtcaccttgtggaggcgaggatattgtgtag

SEQ ID NO: 125343 - DNA, 768 bp, Artificial Sequence
  derived and/or modified sequence
atgatcctgaacaaggccctgctgctgggcgccctggccctgaccaccgtgatgagcccctgtggcggggaggacatcgtggccgaccacgtggccagctgtggggtgaacctgtaccagttctacggccccagcggccagtacacccatgaatttgatggagatgagcagttctacgtggacctggagaggaaggagacagcctggcgctggccagagttcagcaagtttggaggctttgacccccagggcgccctgaggaacatggctgtggccaagcacaacctgaacatcatgatcaagcgctacaacagcacagctgccaccaatgaggtgcctgaggtgaccgtcttcagcaagagccctgtgaccctgggccagcccaacaccctcatctgcctggtggacaacatcttcccccctgtggtgaacatcacctggctgagcaatggccagagcgtgacagaaggagtgtctgagaccagcttcctgagcaagagtgaccacagcttcttcaagatctcctacctgaccttcctgcccagcgcagatgagatctatgactgcaaggtggagcactggggcctggaccagcccctgctgaagcactgggagcctgagatcccagcccccatgtctgagctgacagagaccgtggtgtgtgccctgggcctgtctgtgggcctgatgggcatcgtggtgggcaccgtcttcatcatccagggcctgcggtctgtgggcgccagccgccaccagggccccctgtag

SEQ ID NO: 125344 - DNA, 75 bp, Artificial Sequence
  derived and/or modified sequence
atgatcctgaacaaggccctgctgctgggcgccctggccctgaccaccgtgatgagcccctgtggcggggagtag

SEQ ID NO: 125345 - DNA, 1591 bp, Artificial Sequence
  derived and/or modified sequence
ggcagggtttggtttgggtgtcttcagatttccttgtcttgaggtcctcacaattactctacagctcagaacaccaactgctgaggctgccttgggaagaggatgatcctaaacaaagctctgctgctgggggccctcgctctgaccaccgtgatgagcccctgtggaggtgaagacattgtggctgaccacgttgcctcttgtggtgtaaacttgtaccagttttacggtccctctggccagtacacccatgaatttgatggagatgagcagttctacgtggacctggagaggaaggagactgcctggcggtggcctgagttcagcaaatttggaggttttgacccgcagggtgcactgagaaacatggctgtggcaaaacacaacttgaacatcatgattaaacgctacaactctaccgctgctaccaatgaggttcctgaggtcacagtgttttccaagtctcccgtgacactgggtcagcccaacaccctcatttgtcttgtggacaacatctttcctcctgtggtcaacatcacatggctgagcaatgggcagtcagtcacagaaggtgtttctgagaccagcttcctctccaagagtgatcattccttcttcaagatcagttacctcaccttcctcccttctgctgatgagatttatgactgcaaggtggagcactggggcctggaccagcctcttctgaaacactgggagcctgagattccagcccctatgtcagagctcacagagactgtggtctgtgccctggggttgtctgtgggcctcatgggcattgtggtgggcactgtcttcatcatccaaggcctgcgttcagttggtgcttccagacaccaagggccattgtgaatcccatcctggaagggaaggtgcatcgccatctacaggagcagaagaatggacttgctaaatgacctagcactattctctggcccgatttatcatatcccttttctcctccaaatatttctcctctcaccttttctctgggacttaagctgctatatcccctcagagctcacaaatgcctttacattctttccctgacctcctgattttttttttcttttctcaaatgttacctacaaagacatgcctggggtaagccacccggctacctaattcctcagtaacctccatctaaaatctccaaggaagcaataaattccttttatgagatctatgtcaaatttttccatctttcatccagggctgactgaaactatggctaataattggggtactcttatgtttcaatccaatttaacctcatttcccagatcatttttcatgtccagtaacacagaagccaccaagtacagtatagcctgataatatgttgatttcttagctgacattaatatttcttgcttccttgtgttcccacccttggcactgccacccacccctcaattcaggcaacaatgaaattaatggataccgtctgcccttggcccagaattgttatagcaaaaattttagaaccaaaaaataagtctgtactaatttcaatgtggcttttaaaagtatgacagagaaataagttaggataaaggaaatttgaatctca

SEQ ID NO: 125346 - DNA, 1060 bp, Artificial Sequence
  derived and/or modified sequence
gctcagaacaccaactgctgaggctgccttgggaagaggatgatcctaaacaaagctctgctgctgggggccctcgctctgaccaccgtgatgagcccctgtggaggtgaagacattgtggctgaccacgttgcctcttgtggtgtaaacttgtaccagttttacggtccctctggccagtacacccatgaatttgatggagatgagcagttctacgtggacctggagaggaaggagactgcctggcggtggcctgagttcagcaaatttggaggttttgacccgcagggtgcactgagaaacatggctgtggcaaaacacaacttgaacatcatgattaaacgctacaactctaccgctgctaccaatgaggttcctgaggtcacagtgttttccaagtctcccgtgacactgggtcagcccaacaccctcatttgtcttgtggacaacatctttcctcctgtggtcaacatcacatggctgagcaatgggcagtcagtcacagaaggtgtttctgagaccagcttcctctccaagagtgatcattccttcttcaagatcagttacctcaccttcctcccttctgctgatgagatttatgactgcaaggtggagcactggggcctggaccagcctcttctgaaacactgggagcctgagattccagcccctatgtcagagctcacagagactgtggtctgtgccctggggttgtctgtgggcctcatgggcattgtggtgggcactgtcttcatcatccaaggcctgcgttcagttggtgcttccagacaccaagggccattgtgaatcccatcctggaagggaaggtaagattgagactggttacagttgaagcggcagtatgaaaggaaggaaagtgggagggcgttgtggacatgaatgtggttgaaagttgtaggggaattgggaagtggcatgatgatgacacaggagccccctcggacccattgatctcatgtctgccctgttgcaggtgcatcgccatctacaggagcagaagaatggacttgctaaatgacctagcactattctctggccc

SEQ ID NO: 125347 - DNA, 1206 bp, Artificial Sequence
  derived and/or modified sequence
tcctcacaattactctacagctcagaacaccaactgctgaggctgccttgggaagaggatgatcctaaacaaagctctgctgctgggggccctcgctctgaccaccgtgatgagcccctgtggaggtgaagacattgtggctgaccacgttgcctcttgtggtgtaaacttgtaccagttttacggtccctctggccagtacacccatgaatttgatggagatgagcagttctacgtggacctggagaggaaggagactgcctggcggtggcctgagttcagcaaatttggaggttttgacccgcagggtgcactgagaaacatggctgtggcaaaacacaacttgaacatcatgattaaacgctacaactctaccgctgctaccaatgaggttcctgaggtcacagtgttttccaagtctcccgtgacactgggtcagcccaacaccctcatttgtcttgtggacaacatctttcctcctgtggtcaacatcacatggctgagcaatgggcagtcagtcacagaaggtgtttctgagaccagcttcctctccaagagtgatcattccttcttcaagatcagttacctcaccttcctcccttctgctgatgagatttatgactgcaaggtggagcactggggcctggaccagcctcttctgaaacactgggagcctgagattccagcccctatgtcagagctcacagagactgtggtctgtgccctggggttgtctgtgggcctcatgggcattgtggtgggcactgtcttcatcatccaaggcctgcgttcagttggtgcttccagacaccaagggccattgtgaatcccatcctggaagggaagggctgactgaaactatggctaataattggggtactcttatgtttcaatccaatttaacctcatttcccagatcatttttcatgtccagtaacacagaagccaccaagtacagtatagcctgataatatgttgatttcttagctgacattaatatttcttgcttccttgtgttcccacccttggcactgccacccacccctcaattcaggcaacaatgaaattaatggataccgtctgcccttggcccagaattgttatagcaaaaattttagaaccaaaaaataagtctgtactaatttcaatgtggcttttaaaagtatgacagagaaataagttaggataaaggaaatttgaatctca

SEQ ID NO: 125348 - DNA, 1385 bp, Artificial Sequence
  derived and/or modified sequence
ggcagggtttggtttgggtgtcttcagatttccttgtcttgaggtcctcacaattactctacagctcagaacaccaactgctgaggctgccttgggaagaggatgatcctaaacaaagctctgctgctgggggccctcgctctgaccaccgtgatgagcccctgtggaggtgaagacattgtggctgaccacgttgcctcttgtggtgtaaacttgtaccagttttacggtccctctggccagtacacccatgaatttgatggagatgagcagttctacgtggacctggagaggaaggagactgcctggcggtggcctgagttcagcaaatttggaggttttgacccgcagggtgcactgagaaacatggctgtggcaaaacacaacttgaacatcatgattaaacgctacaactctaccgctgctaccaatgaggttcctgaggtcacagtgttttccaagtctcccgtgacactgggtcagcccaacaccctcatttgtcttgtggacaacatctttcctcctgtggtcaacatcacatggctgagcaatgggcagtcagtcacagaaggtgtttctgagaccagcttcctctccaagagtgatcattccttcttcaagatcagttacctcaccttcctcccttctgctgatgagatttatgactgcaaggtggagcactggggcctggaccagcctcttctgaaacactgggagcctgagattccagcccctatgtcagagctcacagagactgtggtctgtgccctggggttgtctgtgggcctcatgggcattgtggtgggcactgtcttcatcatccaaggcctgcgttcagttggtgcttccagacaccaagggccattgtgaatcccatcctggaagggaagatgttacctacaaagacatgcctggggtaagccacccggctacctaattcctcagtaacctccatctaaaatctccaaggaagcaataaattccttttatgagatctatgtcaaatttttccatctttcatccagggctgactgaaactatggctaataattggggtactcttatgtttcaatccaatttaacctcatttcccagatcatttttcatgtccagtaacacagaagccaccaagtacagtatagcctgataatatgttgatttcttagctgacattaatatttcttgcttccttgtgttcccacccttggcactgccacccacccctcaattcaggcaacaatgaaattaatggataccgtctgcccttggcccagaattgttatagcaaaaattttagaaccaaaaaataagtctgtactaatttcaatgtggcttttaaaagtatgacagagaaataagttaggataaaggaaatttgaatctca

SEQ ID NO: 125349 - DNA, 81 bp, Artificial Sequence
  derived and/or modified sequence
atgatcctaaacaaagctctgctgctgggggccctcgccctgactgccgtgatgagcccctgtggaggtgaagacattgtg

SEQ ID NO: 125350 - DNA, 768 bp, Artificial Sequence
  derived and/or modified sequence
atgatcctgaacaaggccctgctgctgggcgccctggccctgaccaccgtgatgagcccgtgcggaggtgaagacattgtggcagaccacgttgcctcatgtggcgtaaacctttatcagttttatgggccctccgggcagtacacgcacgagtttgacggtgatgagcagttttacgtggaccttgaacgcaaagaaaccgcatggagatggcccgagttctctaaatttggtggatttgaccctcagggcgctttgagaaacatggctgtggctaagcataacctgaatattatgataaaacggtacaactctactgctgctaccaacgaggtgccggaagtcacagtgtttagcaagtcacccgtgacattgggccaacctaacacccttatctgcctggttgataacatttttcctcctgtagtcaacataacctggcttagtaatggacagagcgtgaccgagggtgtttcggaaacctcctttttatctaaaagcgaccattccttttttaaaatctcatatcttaccttcttgcctagtgcagatgaaatttacgattgtaaggtcgagcattggggacttgaccagcccctgctgaaacattgggaacctgagattcccgcccctatgagcgaactaacagagaccgtggtgtgcgcccttggcctgagcgtcgggctgatgggaattgttgtgggcacagttttcatcatccaaggtttaaggagcgtgggggcgagccggcatcagggccccttatag

SEQ ID NO: 125351 - DNA, 768 bp, Artificial Sequence
  derived and/or modified sequence
atgatcctgaacaaggccctgctgctgggcgccctggccctgaccacagtcatgtcaccttgcggcggcgaggatattgtggctgaccacgttgccagctgcggcgtaaacctgtaccagttttacgggcccagtggccagtacactcatgaatttgatggggatgagcagttctacgtcgaccttgagcggaaggaaacagcatggagatggcctgaattcagcaagtttgggggattcgacccacagggagcactcaggaatatggcagtggcaaaacacaacctcaacattatgatcaagagatataactctaccgccgccactaacgaggttcccgaggtgaccgtcttctcaaagagccccgtcaccttgggacagccaaacactctgatctgccttgttgacaatatattcccccctgtagtcaatatcacttggcttagtaatggacaaagcgtcacagagggggtcagcgaaaccagttttttaagcaaaagtgaccattcattttttaagatcagctacctcaccttcctgccgtctgcagatgagatttatgactgtaaggtggagcactgggggttggaccagcctctgctgaaacattgggagccagagatcccggctcccatgtccgaactgaccgagaccgttgtttgcgccctaggcttaagtgtgggactcatgggcatcgtggtaggcactgtgttcataattcagggactgcgctctgtgggagctagcagacaccaaggcccactctag

SEQ ID NO: 125352 - DNA, 768 bp, Artificial Sequence
  derived and/or modified sequence
atgatcctgaacaaggccctgctgctgggcgccctggccctgaccactgtgatgtccccctgcggaggcgaggatattgtcgctgaccacgtagcctcttgcggagtaaacttgtaccaattctatggtccctctggtcagtatacccatgaattcgatggggacgaacagttttatgttgacctggagcgcaaggaaactgcctggagatggcccgaattttcaaagttcggtggcttcgacccacagggtgcactgagaaacatggctgttgccaagcacaatttaaacattatgatcaagagatacaacagcaccgccgccacaaacgaggtccctgaggtaactgtgtttagcaaatctcccgtgacccttggccagcccaatacattgatttgcttggtcgataacattttccctccagtggtcaacattacgtggctgtctaacggtcagagcgtgaccgaaggcgttagtgagacaagttttttgtcaaaaagcgaccactcattctttaaaatcagctacctaaccttcctcccctcagcagacgaaatatatgactgcaaagtagaacactgggggctcgaccagcccctgcttaagcactgggagccagagatccctgcgcctatgtcagagcttaccgagactgtggtgtgcgccctgggcctatcagtgggcctaatgggaattgtggtcggaacggtcttcatcatccagggacttcgcagcgtgggagcctcaagacatcagggccccttgtag

SEQ ID NO: 125353 - DNA, 768 bp, Artificial Sequence
  derived and/or modified sequence
atgatcctgaacaaggccctgctgctgggcgccctggccctgaccacagtcatgtcgccctgcggaggcgaagatatcgtggccgaccatgtggcctcctgtggggtgaatctttatcagttttacgggccaagcggtcagtacacacacgagtttgacggcgatgaacagttctacgtagatctcgaaagaaaagagaccgcttggagatggccggaattctcaaagtttggcgggttcgatccacagggagcccttcgtaacatggcagtcgccaaacacaaccttaatatcatgattaaaaggtataatagcacggcggcaactaatgaggttccagaagtcaccgtgttttctaagtctccagtgaccctgggtcaacccaatacgctgatctgcctcgtggacaatatttttcccccagtagttaatattacctggctgtctaacgggcaatctgttacggagggcgtgagtgagactagttttctgagcaagtcagatcactcattcttcaaaatcagctatttgacttttctgccatcagccgacgaaatatacgattgtaaggtggagcactggggcctggaccagccgctcctgaagcattgggagcccgagatcccagcgcctatgtcggagctaactgaaactgtggtctgcgcccttggactttctgtgggcctgatgggtatagtggtggggaccgtgttcatcatccaagggctgagatccgtgggggcatcgcggcaccagggacccctgtag

SEQ ID NO: 125354 - DNA, 75 bp, Artificial Sequence
  derived and/or modified sequence
atgatcctgaacaaggccctgctgctgggcgccctggccctgaccacagtcatgagtccttgtggcggggagtag

SEQ ID NO: 125355 - DNA, 84 bp, Artificial Sequence
  derived and/or modified sequence
atgatcctgaacaaggccctgctgctgggcgccctggccctgaccgctgttatgagtccatgcggcggcgaagacattgtttag

SEQ ID NO: 125356 - DNA, 768 bp, Artificial Sequence
  derived and/or modified sequence
atgatcttgaacaaggccttgctgctgggcgcactcgccctcactaccgtgatgtctccgtgcggcggagaagacatcgttgccgaccacgtcgcctcgtgtggtgtaaatctttatcagttctacggccctagtgggcagtatacccacgagttcgacggcgatgaacaattctacgtggaccttgagcggaaggagacagcatggcgatggcctgagttctccaagttcgggggattcgatccacagggagccttacggaacatggcagtggccaaacacaaccttaacatcatgatcaaacgctataatagtacagccgcaactaacgaggtgcccgaagtgaccgtgttttcgaaatcacctgtgacactgggccagcccaatactctgatctgtctggtggacaacatttttccccctgtggtgaatattacctggttaagtaacggccaaagcgtcacagagggcgtatctgaaacttcttttctgagtaaaagtgatcatagcttctttaaaataagctacctaacctttcttccgagtgcagacgagatatacgattgcaaagtagaacattgggggctcgatcagcctctgttgaaacattgggaacctgaaattccagctccaatgtctgagctgacagaaactgtggtgtgcgccttgggtctgtccgtcggcttaatgggcattgtggtagggactgtcttcattatacagggcctcaggagtgtgggcgcatctcggcaccagggaccactctag

SEQ ID NO: 125357 - DNA, 768 bp, Artificial Sequence
  derived and/or modified sequence
atgatcctcaataaggccctgctgctgggcgcactggcactgactacagtgatgtcaccttgcggcggtgaggacatcgtggccgatcacgtggcaagttgtggcgtgaacctgtatcagttctatggaccgtcgggccagtatacccatgaatttgacggggacgagcagttctacgtggacttggaaagaaaagagacggcctggcggtggccggaattttctaagttcggcggattcgacccccagggggctcttaggaacatggcagttgcgaagcacaacctgaacattatgattaagcggtataatagcaccgctgcgacaaatgaagtcccggaggtgacagtcttctccaagtcccctgtgacgttagggcaacccaacacccttatatgtctggtggataatatttttccaccagttgtgaacattacatggctctccaacgggcagagcgtgacagagggagttagcgaaaccagtttcttaagcaaatcagaccacagtttttttaaaatctcatatctgacctttctcccttcagccgacgaaatttatgactgtaaggtggaacactggggacttgaccagcccctcctgaagcactgggagcctgaaatacccgcaccaatgtccgagctgactgagaccgttgtgtgtgccctgggcttgtctgtgggcctgatgggtatcgtagttggaacagtcttcattattcagggcttgcgctccgtgggagccagccggcatcagggtcccctctag

SEQ ID NO: 125358 - DNA, 768 bp, Artificial Sequence
  derived and/or modified sequence
atgatcttgaataaggcgctcctcctcggtgcgctggcactcacgacagttatgtctccatgcggtggcgaagatatagttgccgaccatgtggcatcctgtggtgtcaatctctatcagttttatggcccaagcgggcaatatacacatgagtttgacggcgacgaacagttttacgtcgacctagaacgcaaggagaccgcttggagatggcctgaattctcaaagtttggtggctttgaccctcaaggcgctctgaggaacatggcagttgccaaacataatctgaatatcatgatcaaacgttacaacagtacggccgctacaaatgaggtgccagaggtgaccgtctttagcaagtcacctgttactttgggacagccaaatacattaatttgcctggtggataacatctttccacctgtcgtgaatatcacctggctctcaaacggacaatcggtaaccgaaggagtctcagagacctcctttctttcaaagtcagatcactctttttttaaaatttcatacttgaccttcctgccctccgctgatgagatttacgactgcaaagtggaacactggggcctcgatcagcccctgctcaaacactgggaaccggaaattcctgctcctatgtcagagttaacggaaaccgttgtgtgtgccctggggcttagtgtggggttgatgggcatcgtggtgggaaccgtgttcatcatacagggcctgagaagcgttggagcctcccggcaccaagggcctctttag

SEQ ID NO: 125359 - DNA, 768 bp, Artificial Sequence
  derived and/or modified sequence
atgattctaaacaaagcgcttttgcttggcgcattggccctcaccacggtaatgtccccatgcgggggtgaggatattgtggccgaccacgtagctagctgcggagtcaatctgtaccagttctacggccctagcggccagtatacgcacgaattcgatggcgatgaacagttctatgttgacctggagcgcaaggaaaccgcttggagatggcccgaattctcaaagtttgggggattcgaccctcagggtgcacttaggaacatggccgtcgctaagcacaatctgaatataatgattaaacggtataattccactgccgcaactaacgaagtcccagaggtcaccgtgttttccaagagtcctgtgactttgggacaacccaacacactgatctgtctcgtggacaatatctttccgccagtggtgaacattacatggctgtccaacggccagtcagtcaccgagggggtcagtgagacgtccttcctgtccaaatctgatcactctttcttcaaaattagctatctcacattcctgccttctgccgatgaaatttatgactgcaaagtcgaacattggggactggaccaaccactgctgaagcactgggagcccgagatacccgctcccatgtcggaactcacggagacagttgtgtgcgctctcggactatctgtcggtctgatgggtatcgtggttggcaccgtgttcattattcagggcttacgatcagtgggcgcatccagacaccagggccctctgtag

SEQ ID NO: 125360 - DNA, 75 bp, Artificial Sequence
  derived and/or modified sequence
atgatactgaacaaggccttgctgcttggggctttggctttgactaccgtgatgtctccctgtggtggagaatag

SEQ ID NO: 125361 - DNA, 84 bp, Artificial Sequence
  derived and/or modified sequence
atgatacttaacaaggcattacttctgggtgctctggctctgacagcagttatgtccccctgcgggggagaagatattgtgtag

SEQ ID NO: 125362 - DNA, 768 bp, Artificial Sequence
  derived and/or modified sequence
atgatcctgaacaaggccctgctgctgggcgccctggccctgaccaccgtgatgagcccctgcggcggcgaggacatcgtggccgaccacgtggccagctgcggcgtgaacctgtaccagttctacggccccagcggccagtacacccacgagttcgacggcgacgagcagttctacgtggacctggagagaaaggagaccgcctggagatggcccgagttcagcaagttcggcggcttcgacccccagggcgccctgagaaacatggccgtggccaagcacaacctgaacatcatgatcaagagatacaacagcaccgccgccaccaacgaggtgcccgaggtgaccgtgttcagcaagagccccgtgaccctgggccagcccaacaccctgatctgcctggtggacaacatcttcccccccgtggtgaacatcacctggctgagcaacggccagagcgtgaccgagggcgtgagcgagaccagcttcctgagcaagagcgaccacagcttcttcaagatcagctacctgaccttcctgcccagcgccgacgagatctacgactgcaaggtggagcactggggcctggaccagcccctgctgaagcactgggagcccgagatccccgcccccatgagcgagctgaccgagaccgtggtgtgcgccctgggcctgagcgtgggcctgatgggcatcgtggtgggcaccgtgttcatcatccagggcctgagaagcgtgggcgccagcagacaccagggccccctgtag

SEQ ID NO: 125363 - DNA, 75 bp, Artificial Sequence
  derived and/or modified sequence
atgatcctgaacaaggccctgctgctgggcgccctggccctgaccaccgtgatgagcccctgcggcggcgagtag

SEQ ID NO: 125364 - DNA, 1542 bp, Artificial Sequence
  derived and/or modified sequence
acaattactctacagctcagaacaccaactgctgaggctgccttgggaagaggatgatcctaaacaaagctctgctgctgggggccctcgctctgaccaccgtgatgagcccctgtggaggtgaagacattgtggctgaccacgttgcctcttgtggtgtaaacttgtaccagttttacggtccctctggccagtacacccatgaatttgatggagatgagcagttctacgtggacctggagaggaaggagactgcctggcggtggcctgagttcagcaaatttggaggttttgacccgcagggtgcactgagaaacatggctgtggcaaaacacaacttgaacatcatgattaaacgctacaactctaccgctgctaccaatgaggttcctgaggtcacagtgttttccaagtctcccgtgacactgggtcagcccaacaccctcatttgtcttgtggacaacatctttcctcctgtggtcaacatcacatggctgagcaatgggcagtcagtcacagaaggtgtttctgagaccagcttcctctccaagagtgatcattccttcttcaagatcagttacctcaccttcctcccttctgctgatgagatttatgactgcaaggtggagcactggggcctggaccagcctcttctgaaacactgggagcctgagattccagcccctatgtcagagctcacagagactgtggtctgtgccctggggttgtctgtgggcctcatgggcattgtggtgggcactgtcttcatcatccaaggcctgcgttcagttggtgcttccagacaccaagggccattgtgaatcccatcctggaagggaaggtgcatcgccatctacaggagcagaagaatggacttgctaaatgacctagcactattctctggcccgatttatcatatcccttttctcctccaaatatttctcctctcaccttttctctgggacttaagctgctatatcccctcagagctcacaaatgcctttacattctttccctgacctcctgattttttttttcttttctcaaatgttacctacaaagacatgcctggggtaagccacccggctacctaattcctcagtaacctccatctaaaatctccaaggaagcaataaattccttttatgagatctatgtcaaatttttccatctttcatccagggctgactgaaactatggctaataattggggtactcttatgtttcaatccaatttaacctcatttcccagatcatttttcatgtccagtaacacagaagccaccaagtacagtatagcctgataatatgttgatttcttagctgacattaatatttcttgcttccttgtgttcccacccttggcactgccacccacccctcaattcaggcaacaatgaaattaatggataccgtctgcccttggcccagaattgttatagcaaaaattttagaaccaaaaaataagtctgtactaatttcaatgtggcttttaaaagtatgacagagaaataagttaggataaaggaaatttgaatctca

SEQ ID NO: 125365 - protein, 224 aa, Artificial Sequence
  derived and/or modified sequence
MSWKKALRIPGDLRVATVTLMLAMLSSLLAEGRDSPEDFVFQFKGMCYFTNGTERVRLVTRYIYNREEYARFDSDVGVYRAVTPQGRPDAEYWNSQKEVLEGTRAELDTVCRHNYEVAFRGILQRRVEPTVTISPSRTEALNHHNLLVCSVTDFYPGQIKVRWFRNDQEETAGVVSTPLIRNGDWTFQILVMLEMTPQRGDVYTCHVEHPSLQSPITVEWRLLH

SEQ ID NO: 125366 - protein, 261 aa, Artificial Sequence
  derived and/or modified sequence
MSWKKALRIPGDLRVATVTLMLAMLSSLLAEGRDSPEDFVFQFKGMCYFTNGTERVRLVTRYIYNREEYARFDSDVGVYRAVTPQGRPDAEYWNSQKEVLEGTRAELDTVCRHNYEVAFRGILQRRVEPTVTISPSRTEALNHHNLLVCSVTDFYPGQIKVRWFRNDQEETAGVVSTPLIRNGDWTFQILVMLEMTPQRGDVYTCHVEHPSLQSPITVEWRAQSESAQSKMLSGVGGFVLGLIFLGLGLIIRQRSQKGLLH

SEQ ID NO: 125367 - protein, 144 aa, Artificial Sequence
  derived and/or modified sequence
MSWKKALRIPGDLRVATVTPQGRPDAEYWNSQKEVLEGTRAELDTVCRHNYEVAFRGILQRRVEPTVTISPSRTEALNHHNLLVCSVTDFYPGQIKVRWFRNDQEETAGVVSTPLIRNGDWTFQILVMLEMTPQRGDVYTCHVE

SEQ ID NO: 125368 - protein, 136 aa, Artificial Sequence
  derived and/or modified sequence
MSWKKALRIPGDLRVATVTLMLAMLSSLLAEGRDSPEDFVFQFKGMCYFTNGTERVRLVTRYIYNREEYARFDSDVGVYRAVTPQGRPDAEYWNSQKEVLEGTRAELDTVCRHNYEVAFRGILQRRGMVTGLSRSW

SEQ ID NO: 125369 - protein, 180 aa, Artificial Sequence
  derived and/or modified sequence
MCYFTNGTERVRGVTRYIYNREEYARFDSDVGVYRAVTPLGPPAAEYWNSQKEVLERTRAELDTVCRHNYQLELRTTLQRRVEPTVTISPSRTEALNHHNLLVCSVTDFYPAQIKVRWFRNDQEETTGVVSTPLIRNGDWTFQILVMLEMTPQRGDVYTCHVEHPSLQNPIIVEWRMDEF

SEQ ID NO: 125370 - DNA, 411 bp, Artificial Sequence
  derived and/or modified sequence
atgagctggaagaaggccctgagaatccccggcggcctgagagtggccaccgtgaccctgatgctggccatgctgagcacccccgtggccgagggcagagacagccccgaggacttcgtgtaccagttcaagggcatgtgctacttcaccaacggcaccgagagagtgagactggtgaccagatacatctacaacagagaggagtacgccagattcgacagcgacgtgggcgtgtacagagccgtgacccccctgggcccccccgacgccgagtactggaacagccagaaggaggtgctggagagaaccagagccgagctggacaccgtgtgcagacacaactaccagctggagctgagaaccaccctgcagagaagaggcaccgtgaccggccccagcagaagctggtag

SEQ ID NO: 125371 - DNA, 411 bp, Artificial Sequence
  derived and/or modified sequence
atgagctggaaaaaagctctgaggattcccggaggcctgcgagtagctacagtgacacttatgctggctatgcttagtacacccgttgctgaaggccgagacagtccagaggatttcgtgtaccagttcaaaggcatgtgttattttaccaatggcaccgagagagtccgattagtcacacgttatatctataatagagaggaatacgctagattcgattcagacgtgggcgtttaccgggcagttacaccactgggccctcctgacgcagaatattggaattctcagaaagaagtgctcgagaggactagagcagaactggataccgtgtgtagacacaactaccagctggaactgaggactacccttcagcgccgcgggacagtaaccggtccatcgcgaagttggtag

SEQ ID NO: 125372 - DNA, 411 bp, Artificial Sequence
  derived and/or modified sequence
atgtcctggaagaaggccctgcgcatccctgggggcctgcgggtggccaccgtgaccctgatgctggccatgctgagcacccctgtggccgagggccgggacagcccagaagattttgtgtaccagttcaagggcatgtgctacttcaccaatggaacagagcgggtgcggctggtgacccgctacatctacaaccgggaggagtatgccaggtttgacagtgatgtgggcgtgtacagagctgtgacccccctgggccccccagatgctgagtactggaacagccagaaggaggtgctggagaggaccagggctgagctggacacagtgtgccgccacaactaccagctggagctgcggaccaccctgcagaggcggggcaccgtgacaggccccagccgctcctggtag

SEQ ID NO: 125373 - DNA, 1423 bp, Artificial Sequence
  derived and/or modified sequence
gactaccactacttttcccttcgtctcaattatgtcttggaagaaggctttgcggatccctggaggccttcgggtagcaactgtgaccttgatgctggcgatgctgagcaccccggtggctgagggcagagactctcccgaggatttcgtgtaccagtttaagggcatgtgctacttcaccaacgggacggagcgcgtgcgtcttgtgaccagatacatctataaccgagaggagtacgcacgcttcgacagcgacgtgggggtgtatcgggcggtgacgccgctggggccgcctgacgccgagtactggaacagccagaaggaagtcctggagaggacccgggcggagttggacacggtgtgcagacacaactaccagttggagctccgcacgaccttgcagcggcgaggaacggtgactggaccttccagatcctggtgatgctggaaatgactccccagcgtggagacgtctacacctgccacgtggagcaccccagcctccagaaccccatcatcgtggagtggcgggctcagtctgaatctgcccagagcaagatgctgagtggcattggaggcttcgtgctggggctgatcttcctcgggctgggccttattatccatcacaggagtcagaaagggctcctgcactgactcctgagactattttaactgggattggttatcacttttctgtaacgcctgcttgtccctgcccagaattcccagctgcctgtgtcagcctgtcccccgagatcagagtcctacagtggctgtcacgcagccaccaggtcatctcctttcatccccacctcaaggctgatggctgtgaccctgcttcctgcactgacccagagcctctgcctgtgcacggccagctgcgtctactgaggccccaaggggtttctgtttctattctctcctcagactgctcaagagaagcacatgaaaaccattacctgactttagagcttttttacataattaaacatgatcctgagttatctgtattctcaacttccttaattgagcagaggcaggaaatcactgcagaatgaaggaacataccttgaggtgacccagccaacctgtgcccagaaggagggttgtaccttgaaaagacactgaaagaattttgggtgcaaagtcagggtgggcagaggaggtagaagatcaactcagttgtcgcatcattcatggttctttcatattgatgttcaatgcagtggcctgagaatatcccagcctctcttctggtttggtgagtgctatataagtaagcatggtggaattgtttgggggcagatatagtgacccttggtcactggtgtttcaaacattctggcaagtcacatcaatcaagaataatttttacttttaagaaagcataaccagcaataaaagtattatttttgagtctaaa

SEQ ID NO: 125374 - DNA, 411 bp, Artificial Sequence
  derived and/or modified sequence
atgagctggaagaaggccctgcggatccccggcggcctgcgggtggctaccgtgacactcatgttggccatgttgtctacaccagtagctgagggccgggactccccagaggattttgtgtaccagtttaaaggaatgtgttactttacgaacgggacagagagagtgagattagtgacacgttatatctataatcgcgaagagtacgcccggtttgacagcgatgtcggagtttatcgggcagtgacccctcttggtcctcccgacgccgaatactggaatagccagaaggaagttttggagcggactagggctgagctcgacacagtatgccggcataactaccaactggaactgaggacaaccctgcaaaggaggggtaccgtgacggggccatctcgctcgtggtag

SEQ ID NO: 125375 - DNA, 411 bp, Artificial Sequence
  derived and/or modified sequence
atgtcatggaagaaggccctgaggattcccggagggctgcgagtagcgaccgttacgcttatgttagcgatgttaagcacgcctgtcgcggagggcagagacagcccggaggacttcgtgtaccaatttaaaggaatgtgctatttcaccaacggtaccgagagggtccgcttggtgactcggtacatctacaatcgggaggaatacgcgagatttgactccgatgtcggggtgtatcgcgcagtcaccccgctggggcctcccgacgcagaatactggaatagccagaaagaagtcctggaacggaccagagcagaactagacaccgtctgccgccacaactaccaactggagttgcgcaccactttgcagaggcggggaactgtaactggcccttcacggtcctggtag

SEQ ID NO: 125376 - DNA, 675 bp, Artificial Sequence
  derived and/or modified sequence
atgtcttggaagaaagccctgagaatccctggagatctcagggtggctaccgtgacgctcatgttggcaatgctgagttccttgttagccgagggccgggatagccctgaggatttcgtctttcaatttaaaggcatgtgttacttcaccaatggaacagaaagagtgagactagtaacccgctacatttataatcgtgaggaatacgcgagattcgattcagacgtgggcgtgtaccgtgctgtgacgccgcagggaaggccagatgctgaatattggaactcccaaaaggaggttctggagggcacacgggctgagctagacaccgtctgtagacacaactatgaggtggcatttaggggtatactacagcgccgcgtcgaaccaacagtaacaatcagcccatcaagaacagaggctttgaaccaccataatctattggtgtgtagcgtcacagacttttatcccggacagatcaaagtgaggtggttcagaaacgatcaggaagaaacagccggcgtggtatcaacccctttgattagaaatggagattggacttttcagatccttgttatgctggagatgactcctcagagaggcgatgtgtacacatgtcatgttgaacatccttctctgcaaagcccaatcaccgtagagtggaggttactccattag

SEQ ID NO: 125377 - DNA, 786 bp, Artificial Sequence
  derived and/or modified sequence
atgagctggaagaaagccctgcgcatcccaggagatttgagggtggcaacagtgactctgatgctggcaatgctgtcctctctgttagctgaggggcgcgattcccccgaggatttcgtttttcagtttaagggaatgtgttatttcactaacggtacggagcgggtacgcttggtaacccgatacatctacaaccgcgaggaatacgcaaggttcgactccgacgttggggtgtatagagccgttacgcctcagggcagaccagacgccgagtactggaactcccaaaaagaggttctggaaggaactcgcgccgagctggacacggtgtgcagacacaactacgaggttgcctttagaggaattctacaaagaagggtggagccaactgtgaccatctctccctcacgcacagaagcactaaaccatcataacctgctggtgtgtagcgttaccgatttctaccccggacagataaaggttagatggttccggaacgatcaagaagagacagctggggtcgtgtcaaccccattgattaggaacggggactggacatttcaaatcctggttatgctcgaaatgacaccgcagaggggggacgtttatacatgccatgtggaacatccctcattacaatcacccattaccgtggaatggcgggcccagtcagaatccgcgcagagtaagatgctgtccggggtgggaggctttgtccttgggctgatctttctaggtctgggactaatcatacggcaaagatcgcagaaagggttgctgcactag

SEQ ID NO: 125378 - DNA, 675 bp, Artificial Sequence
  derived and/or modified sequence
atgagctggaaaaaggcacttaggataccaggcggactgcgcgcagccaccgtcacccttatgctagcaatgctcagtacacccgtcgcagagggaagggacagccctgaagattttgtctaccagtttaaggcgatgtgctactttacaaacggaaccgaaagagttaggtacgtgacccgatacatctacaatagagaagagtacgcgagatttgatagcgacgtggaggtatatcgagccgtcacacctttggggccgcctgacgcggagtactggaacagccagaaagaggttctggaaagaacccgcgccgaattggacaccgtttgccggcataactaccaattggagcttaggacaacattacaaaggcgggtcgagcccaccgttaccatctccccctcacgtacagaggccttaaatcaccacaacctccttgtgtgtagtgtaacggatttctatccagctcagataaaagtcaggtggttcaggaatgaccaggaggagaccacaggcgttgtcagcacaccgttgatcagaaatggagactggaccttccagatcctggtgatgctggaaatgactcctcagcatggggacgtgtacacttgccatgtggaacacccttctctccagaaccccatcaccgttgagtggcgattgctgcattag

SEQ ID NO: 125379 - DNA, 786 bp, Artificial Sequence
  derived and/or modified sequence
atgtcttggaagaaagccctgcgcataccaggagacctgcgtgtcgccactgttacactgatgctcgcaatgctctcctccctgcttgcagaaggacgggactctccggaagacttcgtgtttcagttcaagggcatgtgctacttcacaaacggcactgaacgggttcggctggtcacaaggtacatctataatcgcgaggagtacgcaagatttgatagtgacgtcggtgtgtatcgggcggttacaccccagggcaggcccgacgccgagtattggaactctcaaaaagaggtactcgagggaaccagggcagagcttgatactgtgtgccgtcacaactacgaagtggcttttcggggcatactgcagcgacgtgtcgaaccgacagtgactatctcaccttcaaggaccgaggcattgaatcaccacaatctcttggtatgttctgttaccgacttttacccaggtcaaatcaaagttaggtggtttaggaacgaccaggaggagacagcaggagtggtctctacaccgctcattagaaacggagattggaccttccagattctggtcatgctagagatgacaccacagagaggagacgtttatacgtgtcacgttgagcatccatctcttcaatcacctatcaccgtggaatggagagcgcaatcagagtctgcccagtccaagatgctgagcggcgttggcggatttgtcctcggcctcattttccttggactcgggctgatcattaggcaaagaagccagaagggactcctccactag

SEQ ID NO: 125380 - DNA, 675 bp, Artificial Sequence
  derived and/or modified sequence
atgagctggaagaaggctcttaggatccctggcggactgagggtcgctaccgtcacgttgatgttagctatgttatccacaccagtggccgaaggacgggacagtccagaggattttgtctaccagtttaagggaatgtgctacttcactaatggcactgagcgtgtgcgtctggtcacacgttatatatataatagagaggaatatgctcgcttcgactcagatgtcggggtgtatcgcgctgtcactccgctgggcccacccgacgctgaatactggaactcacagaaggaggtgctggaacgcactcgtgccgagctggataccgtctgcaggcataattatcagttggaactgagaacaacattgcaacggagagtggaaccgacagttacaatttccccaagccggaccgaggcactgaatcaccataacctcctcgtctgcagcgttactgatttttatccagctcagattaaggtgaggtggtttcgtaatgaccaggaagagactactggcgtggttagcacaccactgattagaaacggggattggacttttcaaatcttagtaatgcttgagatgacgccgcagcgcggggatgtgtacacatgccatgtagagcatccatcacttcagaacccaatcatcgttgagtggcggctgttacactag

SEQ ID NO: 125381 - DNA, 435 bp, Artificial Sequence
  derived and/or modified sequence
atgtcatggaagaaagctctcagaattcccggcgatcttcgggtagctacagtaactccgcagggtcggcctgacgccgaatactggaattctcaaaaggaggtgctcgagggcaccagggccgagctggacacagtgtgcagacacaattacgaggtggccttccgcggcatcctgcagcgaagagtcgagccaacggtgaccatctccccctctcgaacggaggcattaaaccatcataatttgctggtatgttccgtgaccgatttttatccaggtcagatcaaggtgcggtggtttcggaacgaccaggaggagacggctggggttgtaagtacacccttgataaggaacggggattggactttccaaattctggttatgctagaaatgacccctcaaaggggagacgtgtacacttgtcatgtagagtag

SEQ ID NO: 125382 - DNA, 411 bp, Artificial Sequence
  derived and/or modified sequence
atgtcttggaaaaaggctttgcgcatccctggaggtctcagggccgcaaccgttaccctgatgctggcgatgttaagcactccggtggccgagggaagggatagcccagaggattttgtgtatcagttcaaagctatgtgttatttcacgaatggcactgagcgggtgcggtatgtaactagatatatatataatcgcgaggagtatgcccggtttgatagtgacgtagaggtgtatagggccgtaacccctcttgggccacctgacgcggaatattggaacagccagaaggaggttctggagcgaacacgggctgagctggatacggtttgccgacataactatcagctcgaactgagaacaactctacagcggagaggaaccgtgacgggcccttccaggtcgtggtag

SEQ ID NO: 125383 - DNA, 411 bp, Artificial Sequence
  derived and/or modified sequence
atgagctggaaaaaagcactacggatacccggcgatctaagagtggcaacagtgacactgatgctcgccatgctgtctagtttattagccgagggacgcgattcccctgaggatttcgtgtttcagtttaaaggcatgtgttatttcacaaatggcaccgagcgggtcagattggtcacacgatacatctataaccgtgaggagtatgcccggttcgacagtgatgtgggcgtctatcgcgccgtgacaccccagggacggccagacgcagagtattggaattcccagaaagaagtcctggagggaacgagggccgaactggacaccgtgtgcagacacaactacgaggtcgcttttaggggcattcttcagagaaggggcatggtcaccgggctctccaggagctggtag

SEQ ID NO: 125384 - DNA, 543 bp, Artificial Sequence
  derived and/or modified sequence
atgtgctatttcactaacggaactgaacgagtcagaggtgtgacccgatatatctataatcgagaggagtatgctagatttgactcagatgtgggcgtgtaccgggctgtgaccccacttggacctcctgccgctgaatactggaatagtcagaaggaggtcctggaacggacacgagctgaactcgacactgtgtgtcgtcacaactaccagctggagctccgaaccacacttcagaggcgggttgagccgacagttacgatttccccctcccggactgaagccctgaaccaccataacctgctggtctgtagcgtgactgacttctatccagcccagattaaagtcaggtggttcagaaacgatcaggaggagacaaccggagtggtctccacaccacttattcgcaatggggactggaccttccagattttagtgatgctggaaatgacacctcagcgcggcgacgtctacacatgccacgtggagcacccatccctgcaaaatcctattatcgtcgagtggagaatggatgaattctag

SEQ ID NO: 125385 - DNA, 675 bp, Artificial Sequence
  derived and/or modified sequence
atgtcctggaagaaggccctgcgcatccctggggacctgcgggtggccaccgtgaccctgatgctggccatgctgagcagcctgctggccgagggccgggacagcccagaagattttgtgttccagttcaagggcatgtgctacttcaccaatggaacagagcgggtgcggctggtgacccgctacatctacaaccgggaggagtatgccaggtttgacagtgatgtgggcgtgtacagagctgtgaccccccagggccgcccagatgctgagtactggaacagccagaaggaggtgctggagggcaccagggctgagctggacacagtgtgccgccacaactatgaggtggccttccggggcatcctgcagaggagagtggagcccaccgtgaccatcagccccagcaggacagaggccctgaaccaccacaacctgctggtgtgcagcgtgacagacttctacccaggccagatcaaggtgcgctggttcagaaatgaccaggaggagacagctggggtggtgtccacccccctcatcagaaatggagactggaccttccagatcctggtgatgctggagatgaccccccagagaggagatgtgtacacctgccacgtggagcaccccagcctgcagagccccatcaccgtggagtggaggctgctgcactag

SEQ ID NO: 125386 - DNA, 786 bp, Artificial Sequence
  derived and/or modified sequence
atgtcctggaagaaggccctgcgcatccctggggacctgcgggtggccaccgtgaccctgatgctggccatgctgagcagcctgctggccgagggccgggacagcccagaagattttgtgttccagttcaagggcatgtgctacttcaccaatggaacagagcgggtgcggctggtgacccgctacatctacaaccgggaggagtatgccaggtttgacagtgatgtgggcgtgtacagagctgtgaccccccagggccgcccagatgctgagtactggaacagccagaaggaggtgctggagggcaccagggctgagctggacacagtgtgccgccacaactatgaggtggccttccggggcatcctgcagaggagagtggagcccaccgtgaccatcagccccagcaggacagaggccctgaaccaccacaacctgctggtgtgcagcgtgacagacttctacccaggccagatcaaggtgcgctggttcagaaatgaccaggaggagacagctggggtggtgtccacccccctcatcagaaatggagactggaccttccagatcctggtgatgctggagatgaccccccagagaggagatgtgtacacctgccacgtggagcaccccagcctgcagagccccatcaccgtggagtggagggcccagagcgagagcgcccagagcaagatgctgtctggagtgggcggctttgtgctgggcctcatcttcctgggcctgggcctcatcatccggcagaggagccagaagggcctgctgcactag

SEQ ID NO: 125387 - DNA, 675 bp, Artificial Sequence
  derived and/or modified sequence
atgtcctggaagaaggccctgcgcatccctgggggcctgcgggccgccaccgtgaccctgatgctggccatgctgagcacccctgtggccgagggccgggacagcccagaagattttgtgtaccagttcaaggccatgtgctacttcaccaatggaacagagcgggtgcgctacgtgacccgctacatctacaaccgggaggagtatgccaggtttgacagtgatgtggaggtgtacagagctgtgacccccctgggccccccagatgctgagtactggaacagccagaaggaggtgctggagaggaccagggctgagctggacacagtgtgccgccacaactaccagctggagctgcggaccaccctgcagaggagagtggagcccaccgtgaccatcagccccagcaggacagaggccctgaaccaccacaacctgctggtgtgcagcgtgacagacttctacccagcccagatcaaggtgcgctggttcagaaatgaccaggaggagaccaccggggtggtgtccacccccctcatcagaaatggagactggaccttccagatcctggtgatgctggagatgaccccccagcacggagatgtgtacacctgccacgtggagcaccccagcctgcagaaccccatcaccgtggagtggaggctgctgcactag

SEQ ID NO: 125388 - DNA, 675 bp, Artificial Sequence
  derived and/or modified sequence
atgtcctggaagaaggccctgcgcatccctgggggcctgcgggtggccaccgtgaccctgatgctggccatgctgagcacccctgtggccgagggccgggacagcccagaagattttgtgtaccagttcaagggcatgtgctacttcaccaatggaacagagcgggtgcggctggtgacccgctacatctacaaccgggaggagtatgccaggtttgacagtgatgtgggcgtgtacagagctgtgacccccctgggccccccagatgctgagtactggaacagccagaaggaggtgctggagaggaccagggctgagctggacacagtgtgccgccacaactaccagctggagctgcggaccaccctgcagaggagagtggagcccaccgtgaccatcagccccagcaggacagaggccctgaaccaccacaacctgctggtgtgcagcgtgacagacttctacccagcccagatcaaggtgcgctggttcagaaatgaccaggaggagaccaccggggtggtgtccacccccctcatcagaaatggagactggaccttccagatcctggtgatgctggagatgaccccccagagaggagatgtgtacacctgccacgtggagcaccccagcctgcagaaccccatcatcgtggagtggaggctgctgcactag

SEQ ID NO: 125389 - DNA, 435 bp, Artificial Sequence
  derived and/or modified sequence
atgtcctggaagaaggccctgcgcatccctggggacctgcgggtggccaccgtgaccccccagggccgcccagatgctgagtactggaacagccagaaggaggtgctggagggcaccagggctgagctggacacagtgtgccgccacaactatgaggtggccttccggggcatcctgcagaggagagtggagcccaccgtgaccatcagccccagcaggacagaggccctgaaccaccacaacctgctggtgtgcagcgtgacagacttctacccaggccagatcaaggtgcgctggttcagaaatgaccaggaggagacagctggggtggtgtccacccccctcatcagaaatggagactggaccttccagatcctggtgatgctggagatgaccccccagagaggagatgtgtacacctgccacgtggagtag

SEQ ID NO: 125390 - DNA, 411 bp, Artificial Sequence
  derived and/or modified sequence
atgtcctggaagaaggccctgcgcatccctgggggcctgcgggccgccaccgtgaccctgatgctggccatgctgagcacccctgtggccgagggccgggacagcccagaagattttgtgtaccagttcaaggccatgtgctacttcaccaatggaacagagcgggtgcgctacgtgacccgctacatctacaaccgggaggagtatgccaggtttgacagtgatgtggaggtgtacagagctgtgacccccctgggccccccagatgctgagtactggaacagccagaaggaggtgctggagaggaccagggctgagctggacacagtgtgccgccacaactaccagctggagctgcggaccaccctgcagaggcggggcaccgtgacaggccccagccgctcctggtag

SEQ ID NO: 125391 - DNA, 411 bp, Artificial Sequence
  derived and/or modified sequence
atgtcctggaagaaggccctgcgcatccctggggacctgcgggtggccaccgtgaccctgatgctggccatgctgagcagcctgctggccgagggccgggacagcccagaagattttgtgttccagttcaagggcatgtgctacttcaccaatggaacagagcgggtgcggctggtgacccgctacatctacaaccgggaggagtatgccaggtttgacagtgatgtgggcgtgtacagagctgtgaccccccagggccgcccagatgctgagtactggaacagccagaaggaggtgctggagggcaccagggctgagctggacacagtgtgccgccacaactatgaggtggccttccggggcatcctgcagaggcggggcatggtgacaggcctgagccgctcctggtag

SEQ ID NO: 125392 - DNA, 543 bp, Artificial Sequence
  derived and/or modified sequence
atgtgctacttcaccaacggcacagagcgggtgcggggcgtgacccgctacatctacaaccgggaggagtatgccaggtttgacagtgatgtgggcgtgtacagagctgtgacccccctgggccccccagctgctgagtactggaacagccagaaggaggtgctggagaggaccagggctgagctggacacagtgtgccgccacaactaccagctggagctgcggaccaccctgcagaggagagtggagcccaccgtgaccatcagccccagcaggacagaggccctgaaccaccacaacctgctggtgtgcagcgtgacagacttctacccagcccagatcaaggtgcgctggttcagaaatgaccaggaggagaccactggagtggtgtccacccccctcatcagaaatggagactggaccttccagatcctggtgatgctggagatgaccccccagagaggagatgtgtacacctgccacgtggagcaccccagcctgcagaaccccatcatcgtggagtggaggatggatgagttctag

SEQ ID NO: 125393 - DNA, 1656 bp, Artificial Sequence
  derived and/or modified sequence
attctttctgccaggtacatcagatccatcaggtccgagctgtgttgactaccactgcttttcccttcgtctcagttatgtcttggaagaaggctttgcggatccccggagaccttcgggtagcaactgtcaccttgatgctggcgatgctgagctccctactggctgagggcagagactctcccgaggatttcgtgttccagtttaagggcatgtgctacttcaccaacgggacggagcgcgtgcgtcttgtgaccagatacatctataaccgagaggagtacgcgcgcttcgacagcgacgtgggggtgtaccgcgcggtgacgccgcaggggcggcctgatgccgagtactggaacagccagaaggaagtcctggaggggacccgggcggagttggacacggtgtgcagacacaactacgaggtggcgttccgcgggatcttgcagaggagagtggagcccacagtgaccatctccccatccaggacagaggccctcaaccaccacaacctgctggtctgctcggtgacagatttctatccaggccagatcaaagtccggtggtttcggaatgatcaggaggagacagccggcgttgtgtccaccccccttattaggaatggtgactggactttccagatcctggtgatgctggaaatgactccccagcgtggagatgtctacacctgccacgtggagcaccccagcctccagagccccatcaccgtggagtggcgggctcagtctgaatctgcccagagcaagatgctgagtggcgttggaggcttcgtgctggggctgatcttccttgggctgggccttatcatccgtcaaaggagtcagaaaggacctcaagggcctccaccagcagggcttctgcactgactcctgagactattttaactaggattggttatcactcttctgtgatgcctgcttatgcctgcccagaattcccagctgcctgtgtcagcttgtccccctgagatcaaagtcctacagtggctgtcacgcagccaccaggtcatctcctttcatccccaccccaaggcgctggctgtgactctgcttcctgcactgacccagagcctctgcctgtgcatggccagctgcgtctactcaggtcccaaggggtttctgtttctattctttcctcagactgctcaagagaagcacatgaaaaacattacctgactttagagcttttttacataattaaacatgatcctgagttatctgtattctgaactttcttaattgagaagaggcaggaaatcactgcagaatgaaggaacatcccttgaggtgacccagcaaacctgtggccagaaggaggattgtaccttgaaaagacactgaaagcattttggggtgtgaagtaagggtgggcagaggaggtagaaaataattcaattgtcgcatcattcatggttctttaatactgatgctcagtgcattggccttagaatatcccagcctctcttctggtttggtgagtgctgtgtaaataagcatggtagaattgtttggagacatatatagtgatccttggtcactggtgtttcaaacattctggaaagtcacatcgatcaagaatattttttatttttaagaaagcataaccagcaataaaaatactatttttgagtctaaa

SEQ ID NO: 125394 - DNA, 1501 bp, Artificial Sequence
  derived and/or modified sequence
cagatccatcaggtccgagctgtgttgactaccactgcttttcccttcgtctcagttatgtcttggaagaaggctttgcggatccccggagaccttcgggtagcaactgtcaccttgatgctggcgatgctgagctccctactggctgagggcagagactctcccgaggatttcgtgttccagtttaagggcatgtgctacttcaccaacgggacggagcgcgtgcgtcttgtgaccagatacatctataaccgagaggagtacgcgcgcttcgacagcgacgtgggggtgtaccgcgcggtgacgccgcaggggcggcctgatgccgagtactggaacagccagaaggaagtcctggaggggacccgggcggagttggacacggtgtgcagacacaactacgaggtggcgttccgcgggatcttgcagaggagagtggagcccacagtgaccatctccccatccaggacagaggccctcaaccaccacaacctgctggtctgctcggtgacagatttctatccaggccagatcaaagtccggtggtttcggaatgatcaggaggagacagccggcgttgtgtccaccccccttattaggaatggtgactggactttccagatcctggtgatgctggaaatgactccccagcgtggagatgtctacacctgccacgtggagcaccccagcctccagagccccatcaccgtggagtggcggcttctgcactgactcctgagactattttaactaggattggttatcactcttctgtgatgcctgcttatgcctgcccagaattcccagctgcctgtgtcagcttgtccccctgagatcaaagtcctacagtggctgtcacgcagccaccaggtcatctcctttcatccccaccccaaggcgctggctgtgactctgcttcctgcactgacccagagcctctgcctgtgcatggccagctgcgtctactcaggtcccaaggggtttctgtttctattctttcctcagactgctcaagagaagcacatgaaaaacattacctgactttagagcttttttacataattaaacatgatcctgagttatctgtattctgaactttcttaattgagaagaggcaggaaatcactgcagaatgaaggaacatcccttgaggtgacccagcaaacctgtggccagaaggaggattgtaccttgaaaagacactgaaagcattttggggtgtgaagtaagggtgggcagaggaggtagaaaataattcaattgtcgcatcattcatggttctttaatactgatgctcagtgcattggccttagaatatcccagcctctcttctggtttggtgagtgctgtgtaaataagcatggtagaattgtttggagacatatatagtgatccttggtcactggtgtttcaaacattctggaaagtcacatcgatcaagaatattttttatttttaagaaagcataaccagcaataaaaatactatttttgagtctaaa

SEQ ID NO: 125395 - DNA, 1734 bp, Artificial Sequence
  derived and/or modified sequence
aggatggattagagacctctattttgaggcgcactgatgtaggggctgaggaaggacattgagggcaccttcaggtctctctgcctattcttccttgccccaactccattccaggtgtacatcagatccatcaggtccgagctgtgttgactaccactgcttttcccttcgtctcagttatgtcttggaagaaggctttgcggatccccggagaccttcgggtagcaactgtcaccttgatgctggcgatgctgagctccctactggctgagggcagagactctcccgaggatttcgtgttccagtttaagggcatgtgctacttcaccaacgggacggagcgcgtgcgtcttgtgaccagatacatctataaccgagaggagtacgcgcgcttcgacagcgacgtgggggtgtaccgcgcggtgacgccgcaggggcggcctgatgccgagtactggaacagccagaaggaagtcctggaggggacccgggcggagttggacacggtgtgcagacacaactacgaggtggcgttccgcgggatcttgcagaggagagtggagcccacagtgaccatctccccatccaggacagaggccctcaaccaccacaacctgctggtctgctcggtgacagatttctatccaggccagatcaaagtccggtggtttcggaatgatcaggaggagacagccggcgttgtgtccaccccccttattaggaatggtgactggactttccagatcctggtgatgctggaaatgactccccagcgtggagatgtctacacctgccacgtggagcaccccagcctccagagccccatcaccgtggagtggcgggctcagtctgaatctgcccagagcaagatgctgagtggcgttggaggcttcgtgctggggctgatcttccttgggctgggccttatcatccgtcaaaggagtcagaaagggcttctgcactgactcctgagactattttaactaggattggttatcactcttctgtgatgcctgcttatgcctgcccagaattcccagctgcctgtgtcagcttgtccccctgagatcaaagtcctacagtggctgtcacgcagccaccaggtcatctcctttcatccccaccccaaggcgctggctgtgactctgcttcctgcactgacccagagcctctgcctgtgcatggccagctgcgtctactcaggtcccaaggggtttctgtttctattctttcctcagactgctcaagagaagcacatgaaaaacattacctgactttagagcttttttacataattaaacatgatcctgagttatctgtattctgaactttcttaattgagaagaggcaggaaatcactgcagaatgaaggaacatcccttgaggtgacccagcaaacctgtggccagaaggaggattgtaccttgaaaagacactgaaagcattttggggtgtgaagtaagggtgggcagaggaggtagaaaataattcaattgtcgcatcattcatggttctttaatactgatgctcagtgcattggccttagaatatcccagcctctcttctggtttggtgagtgctgtgtaaataagcatggtagaattgtttggagacatatatagtgatccttggtcactggtgtttcaaacattctggaaagtcacatcgatcaagaatattttttatttttaagaaagcataaccagcaataaaaatactatttttgagtctaaa

SEQ ID NO: 125396 - DNA, 1485 bp, Artificial Sequence
  derived and/or modified sequence
gagctgtgttgactaccactacttttcccttcgtctcaattatgtcttggaaaaaggctttgcggatccccggaggccttcgggcagcaactgttaccttgatgctggcgatgctgagcaccccagtggctgagggcagagactctcccgaggatttcgtgtaccagtttaaggccatgtgctacttcaccaacgggacggagcgcgtgcgttatgtgaccagatacatctataaccgagaggagtacgcacgcttcgacagcgacgtggaggtgtaccgggcggtgacgccgctggggccgcctgacgccgagtactggaacagccagaaggaagtcctggagaggacccgggcggagttggacacggtgtgcagacacaactaccagttggagctccgcacgaccttgcagcggcgagtggagcccacagtgaccatctccccatccaggacagaggccctcaaccaccacaacctgctggtctgctcagtgacagatttctatccagcccagatcaaagtccggtggtttcggaatgaccaggaggagacaaccggcgttgtgtccaccccccttattaggaacggtgactggaccttccagatcctggtgatgctggaaatgactccccagcatggagacgtctacacctgccacgtggagcaccccagcctccagaaccccatcaccgtggagtggcggctcctgcactgactcctgagactattttaactgggattggttatcacttttctgtaacgcctgcttgtccctgcccagaattcccaactgcctgtgtcagcctgtccccctgagatcagagtcctacagtggctgtcacgcagccaccaggtcatctcctttcatccccaccccaaggcgctggctgtgactctgcttcctgcactgacccagagcctctgcctgtgcatggccagctgcgtctactcaggccccaaggggtttctgtttctattctctcctcagactgctcaagagaagcacatgaaaaccattacctgactttagagcttttttacataattaaacatgatcctgagttatctgtattctcaacttccttaattgagcagaggcaggaaatcactgcagaatgaaggaacataccttgaggtgacccagccaacctgtgcccagaaggagggttgtaccttgaaaagacactgaaagaatttggggtgcaaagtcatggtgggcagaggaggtagaaaatcaactcagttgtcgcatcattcatggttctttcatattgatgttcagtgcagtggcctgagaatatcccagcctctcttctggtttggtgagtgctatataagtaaacatggtggaattgtttgggggcagatatagtgacccttggtcactggtgtttcaaacattctggcaagtcacatcaatcaagaataatttttacttttaagaaagcataaccagcaataaaagtattatttttgattctaaa

SEQ ID NO: 125397 - DNA, 1642 bp, Artificial Sequence
  derived and/or modified sequence
acaggtttttattctttctgccaggtacatcagatccatcaggtccgagctgtgttgactaccactgcttttcccttcgtctcagttatgtcttggaagaaggctttgcggatccccggagaccttcgggtagcaactgtcaccttgatgctggcgatgctgagctccctactggctgagggcagagactctcccgaggatttcgtgttccagtttaagggcatgtgctacttcaccaacgggacggagcgcgtgcgtcttgtgaccagatacatctataaccgagaggagtacgcgcgcttcgacagcgacgtgggggtgtaccgcgcggtgacgccgcaggggcggcctgatgccgagtactggaacagccagaaggaagtcctggaggggacccgggcggagttggacacggtgtgcagacacaactacgaggtggcgttccgcgggatcttgcagaggagagtggagcccacagtgaccatctccccatccaggacagaggccctcaaccaccacaacctgctggtctgctcggtgacagatttctatccaggccagatcaaagtccggtggtttcggaatgatcaggaggagacagccggcgttgtgtccaccccccttattaggaatggtgactggactttccagatcctggtgatgctggaaatgactccccagcgtggagatgtctacacctgccacgtggagcaccccagcctccagagccccatcaccgtggagtggcgggctcagtctgaatctgcccagagcaagatgctgagtggcgttggaggcttcgtgctggggctgatcttccttgggctgggccttatcatccgtcaaaggagtcagaaagggcttctgcactgactcctgagactattttaactaggattggttatcactcttctgtgatgcctgcttatgcctgcccagaattcccagctgcctgtgtcagcttgtccccctgagatcaaagtcctacagtggctgtcacgcagccaccaggtcatctcctttcatccccaccccaaggcgctggctgtgactctgcttcctgcactgacccagagcctctgcctgtgcatggccagctgcgtctactcaggtcccaaggggtttctgtttctattctttcctcagactgctcaagagaagcacatgaaaaacattacctgactttagagcttttttacataattaaacatgatcctgagttatctgtattctgaactttcttaattgagaagaggcaggaaatcactgcagaatgaaggaacatcccttgaggtgacccagcaaacctgtggccagaaggaggattgtaccttgaaaagacactgaaagcattttggggtgtgaagtaagggtgggcagaggaggtagaaaataattcaattgtcgcatcattcatggttctttaatactgatgctcagtgcattggccttagaatatcccagcctctcttctggtttggtgagtgctgtgtaaataagcatggtagaattgtttggagacatatatagtgatccttggtcactggtgtttcaaacattctggaaagtcacatcgatcaagaatattttttatttttaagaaagcataaccagcaataaaaatactatttttgagtctaaa

SEQ ID NO: 125398 - DNA, 1484 bp, Artificial Sequence
  derived and/or modified sequence
agctgtgttgactaccactacttttcccttcgtctcaattatgtcttggaagaaggctttgcggatccctggaggccttcgggtagcaactgtgaccttgatgctggcgatgctgagcaccccggtggctgagggcagagactctcccgaggatttcgtgtaccagtttaagggcatgtgctacttcaccaacgggacggagcgcgtgcgtcttgtgaccagatacatctataaccgagaggagtacgcacgcttcgacagcgacgtgggggtgtatcgggcggtgacgccgctggggccgcctgacgccgagtactggaacagccagaaggaagtcctggagaggacccgggcggagttggacacggtgtgcagacacaactaccagttggagctccgcacgaccttgcagcggcgagtggagcccacagtgaccatctccccatccaggacagaggccctcaaccaccacaacctgctggtctgctcagtgacagatttctatccagcccagatcaaagtccggtggtttcggaatgaccaggaggagacaactggcgttgtgtccaccccccttattaggaacggtgactggaccttccagatcctggtgatgctggaaatgactccccagcgtggagacgtctacacctgccacgtggagcaccccagcctccagaaccccatcatcgtggagtggcggctcctgcactgactcctgagactattttaactgggattggttatcacttttctgtaacgcctgcttgtccctgcccagaattcccagctgcctgtgtcagcctgtcccccgagatcagagtcctacagtggctgtcacgcagccaccaggtcatctcctttcatccccacctcaaggctgatggctgtgaccctgcttcctgcactgacccagagcctctgcctgtgcacggccagctgcgtctactgaggccccaaggggtttctgtttctattctctcctcagactgctcaagagaagcacatgaaaaccattacctgactttagagcttttttacataattaaacatgatcctgagttatctgtattctcaacttccttaattgagcagaggcaggaaatcactgcagaatgaaggaacataccttgaggtgacccagccaacctgtgcccagaaggagggttgtaccttgaaaagacactgaaagaattttgggtgcaaagtcagggtgggcagaggaggtagaagatcaactcagttgtcgcatcattcatggttctttcatattgatgttcaatgcagtggcctgagaatatcccagcctctcttctggtttggtgagtgctatataagtaagcatggtggaattgtttgggggcagatatagtgacccttggtcactggtgtttcaaacattctggcaagtcacatcaatcaagaataatttttacttttaagaaagcataaccagcaataaaagtattatttttgagtctaaa

SEQ ID NO: 125399 - DNA, 484 bp, Artificial Sequence
  derived and/or modified sequence
atcaggtccgagctgtgttgactaccactgcttttcccttcgtctcagttatgtcttggaagaaggctttgcggatccccggagaccttcgggtagcaactgtgacgccgcaggggcggcctgatgccgagtactggaacagccagaaggaagtcctggaggggacccgggcggagttggacacggtgtgcagacacaactacgaggtggcgttccgcgggatcttgcagaggagagtggagcccacagtgaccatctccccatccaggacagaggccctcaaccaccacaacctgctggtctgctcggtgacagatttctatccaggccagatcaaagtccggtggtttcggaatgatcaggaggagacagccggcgttgtgtccaccccccttattaggaatggtgactggactttccagatcctggtgatgctggaaatgactccccagcgtggagatgtctacacctgccacgtggagca

SEQ ID NO: 125400 - DNA, 1423 bp, Artificial Sequence
  derived and/or modified sequence
gactaccactacttttcccttcgtctcaattatgtcttggaaaaaggctttgcggatccccggaggccttcgggcagcaactgttaccttgatgctggcgatgctgagcaccccagtggctgagggcagagactctcccgaggatttcgtgtaccagtttaaggccatgtgctacttcaccaacgggacggagcgcgtgcgttatgtgaccagatacatctataaccgagaggagtacgcacgcttcgacagcgacgtggaggtgtaccgggcggtgacgccgctggggccgcctgacgccgagtactggaacagccagaaggaagtcctggagaggacccgggcggagttggacacggtgtgcagacacaactaccagttggagctccgcacgaccttgcagcggcgaggaacggtgactggaccttccagatcctggtgatgctggaaatgactccccagcatggagacgtctacacctgccacgtggagcaccccagcctccagaaccccatcaccgtggagtggcgggctcagtctgaatctgcccagagcaagatgctgagtggcattggaggcttcgtgctggggctcatcttcctcgggctgggccttattatccatcacaggagtcagaaagggctcctgcactgactcctgagactattttaactgggattggttatcacttttctgtaacgcctgcttgtccctgcccagaattcccaactgcctgtgtcagcctgtccccctgagatcagagtcctacagtggctgtcacgcagccaccaggtcatctcctttcatccccaccccaaggcgctggctgtgactctgcttcctgcactgacccagagcctctgcctgtgcatggccagctgcgtctactcaggccccaaggggtttctgtttctattctctcctcagactgctcaagagaagcacatgaaaaccattacctgactttagagcttttttacataattaaacatgatcctgagttatctgtattctcaacttccttaattgagcagaggcaggaaatcactgcagaatgaaggaacataccttgaggtgacccagccaacctgtgcccagaaggagggttgtaccttgaaaagacactgaaagaatttggggtgcaaagtcatggtgggcagaggaggtagaaaatcaactcagttgtcgcatcattcatggttctttcatattgatgttcagtgcagtggcctgagaatatcccagcctctcttctggtttggtgagtgctatataagtaaacatggtggaattgtttgggggcagatatagtgacccttggtcactggtgtttcaaacattctggcaagtcacatcaatcaagaataatttttacttttaagaaagcataaccagcaataaaagtattatttttgattctaaa

SEQ ID NO: 125401 - DNA, 783 bp, Artificial Sequence
  derived and/or modified sequence
gactaccactgcttttcccttcgtctcagttatgtcttggaagaaggctttgcggatccccggagaccttcgggtagcaactgtcaccttgatgctggcgatgctgagctccctactggctgagggcagagactctcccgaggatttcgtgttccagtttaagggcatgtgctacttcaccaacgggacggagcgcgtgcgtcttgtgaccagatacatctataaccgagaggagtacgcgcgcttcgacagcgacgtgggggtgtaccgcgcggtgacgccgcaggggcggcctgatgccgagtactggaacagccagaaggaagtcctggaggggacccgggcggagttggacacggtgtgcagacacaactacgaggtggcgttccgcgggatcttgcagaggagaggaatggtgactggactttccagatcctggtgatgctggaaatgactccccagcgtggagatgtctacacctgccacgtggagcaccccagcctccagagccccatcaccgtggagtggcgggctcagtctgaatctgcccagagcaagatgctgagtggcgttggaggcttcgtgctggggctgatcttccttgggctgggccttatcatccgtcaaaggagtcagaaagggcttctgcactgactcctgagactattttaactaggattggttatcactcttctgtgatgcctgcttatgcctgcccagaattcccagctgcctgtgtcagcttgtccccctgagatcaaagtcctacagtggctgtcacgc

SEQ ID NO: 125402 - DNA, 675 bp, Artificial Sequence
  derived and/or modified sequence
atgagctggaagaaggccctgcggatccccggcgacctgcgggtggcaaccgtgaccctaatgctggctatgctgtcttcgctgttagctgaggggcgagattctcccgaagacttcgtgttccagttcaaaggcatgtgctattttactaacggcactgagcgggtgcgcctcgtcaccaggtacatctataatcgggaggaatacgcccgctttgattccgacgtaggagtgtatcgcgcggtaacgccccaggggagaccagacgcggaatattggaattctcagaaagaggtgctggagggcacaagggcagaactcgacaccgtttgcaggcacaattatgaggtggcatttaggggaatcttgcagcggagagtggagcctaccgttacaatctccccctccagaactgaggccctgaatcatcataacttgttagtgtgctctgtgactgacttctacccaggccaaattaaggtgcggtggttccggaacgatcaggaggaaaccgcgggggtcgtgagcacccccttgattcgtaatggcgactggactttccagatccttgttatgttggagatgacaccccagagaggagatgtgtatacatgtcacgtggaacaccctagccttcagtctccaattaccgtggaatggcggcttctgcattag

SEQ ID NO: 125403 - DNA, 786 bp, Artificial Sequence
  derived and/or modified sequence
atgagctggaagaaggccctgcggatccccggcgacctgcgggtggcaacagttacactgatgctggccatgctgtcaagcctgctagccgaaggacgagatagcccagaagactttgtgttccagttcaagggaatgtgttacttcacaaatggcactgagcgcgttaggctcgtgacccggtatatttataatagggaagagtatgcccggtttgactcagatgtgggagtctacagggccgttactccacaggggaggccagatgccgaatactggaatagtcagaaagaagtgctggaaggtacgagagctgaactagacactgtctgccgccataactacgaagttgcatttcgagggatactgcaaaggagagtggagccgactgtgaccattagtccaagccgtaccgaagctctgaatcatcataacctgctcgtctgtagcgtcacagatttctatccaggacaaatcaaggtcagatggttccgcaatgatcaagaggaaactgctggagtggtaagtacacctctgattagaaatggcgattggacgttccaaatcctggtcatgttagaaatgacccctcagagaggtgatgtctatacgtgccatgtggagcacccaagtttgcagagccccataacagtggaatggagagcccagagcgaaagcgcccagtccaagatgctaagcggtgtgggcggcttcgttttaggcctgatcttcctggggctgggactaatcataagacaacggtctcagaagggtctcttgcactag

SEQ ID NO: 125404 - DNA, 675 bp, Artificial Sequence
  derived and/or modified sequence
atgagctggaagaaggccctgcggatccccggcggcctgcgggccgcaacagtaactcttatgctcgcaatgctctcaacacccgttgccgaaggtagagactccccggaggactttgtgtatcaatttaaagcaatgtgttatttcacgaacggcacagaacgagttcggtatgttactcgctacatttacaacagagaggagtacgctagattcgactcggacgttgaggtgtatagagctgttacaccgcttggccctcccgacgcagaatactggaactctcagaaggaggtgctggagaggacccgggctgaactcgacacagtgtgccggcataactatcagctggaacttcggaccactctacagagaagggtagaacccacagtcaccatttctccatctaggacagaggcgctcaaccaccataatctactcgtgtgctctgtgaccgatttttacccagcacagataaaggttcggtggtttaggaacgatcaagaagagactacaggcgtggtgtcaacaccccttattagaaatggtgattggactttccaaatcctggtgatgctcgaaatgacgcctcaacacggagacgtctatacttgccatgtcgagcaccccagtctgcagaatccgatcacagtcgaatggcgactgctccactag

SEQ ID NO: 125405 - DNA, 786 bp, Artificial Sequence
  derived and/or modified sequence
atgagctggaagaaggccctgcggatccccggcgacctgcgggtggcaactgtgacactgatgctggccatgcttagttctttgctggccgagggtcgtgacagcccagaagatttcgtgtttcagtttaaaggaatgtgttatttcacaaatgggacagagcgagtgcgactggtaacccggtacatttataatcgcgaggaatacgcccgttttgattcggatgtcggtgtatatcgagccgtgacaccacagggtagacccgatgcagagtattggaatagccagaaagaagtccttgagggcactcgggccgagctggacactgtgtgccgccacaactatgaggtcgccttccgcggtatcctgcagcgacgggtggagccgactgtgacaatctctccttcgcggacggaggccctcaatcatcacaatctattagtgtgctcagttacagacttctatcccggacagatcaaggtgagatggtttagaaatgatcaagaggaaaccgcaggagtggtgtctaccccgttgattcgtaatggcgactggaccttccaaattctggtaatgttagagatgacgccacaacgaggagacgtttacacgtgccacgtggagcaccccagtctgcagagtcctattaccgtagagtggcgggcccaatccgaatcagcacagtccaagatgctctccggtgttggcgggttcgtactcggcctaatctttcttgggctgggacttatcattcgccaacggtcccagaagggccttctccactag

SEQ ID NO: 125406 - DNA, 675 bp, Artificial Sequence
  derived and/or modified sequence
atgagctggaagaaggccctgcggatccccggcggcctgcgggtggccaccgtcaccttgatgctcgccatgctgtccacaccggtggcggaaggccgcgactctcccgaggactttgtgtatcagtttaaaggcatgtgctacttcaccaatgggacagagagggtacgattggtgaccagatatatttataatcgcgaagagtatgcaaggtttgactctgacgtgggggtgtatcgggcggtcacgcccctggggccgcccgacgcggagtactggaattcccagaaagaagttctggaacgaacaagagcagaactcgatacagtctgccgccataattatcagctggagttgcgaaccacacttcaacggagggtggagcccacggtgactatttcccctagccgaaccgaagccttgaaccaccataatctgctggtgtgcagcgtgacagacttttaccccgcccaaatcaaggtgcgttggtttaggaacgatcaggaggaaaccacgggcgtggtatctacccctctcatccggaacggtgactggacattccagatactcgtgatgctggaaatgacgccacagcgcggtgatgtatatacatgccacgtggagcatcccagtctgcaaaatcccatcattgtggagtggcggctgttacattag

SEQ ID NO: 125407 - DNA, 435 bp, Artificial Sequence
  derived and/or modified sequence
atgagctggaagaaggccctgcggatccccggcgacctgcgggtggccaccgtgacaccgcagggtcggcccgatgccgagtattggaatagtcagaaagaggtcctggagggaacgcgagctgagttagatacagtgtgcagacacaactatgaagtggccttccgtggaattctacaacggcgcgtcgaaccaacagtaacaatttcaccatcccggacggaagcactgaatcaccacaatctgctggtctgttcggttaccgatttctaccccggacagatcaaagtaagatggttccgcaacgatcaggaagagaccgcaggagtggtcagtacgcctcttattaggaacggcgactggacctttcagatacttgtgatgctggagatgactccccagcggggtgacgtttacacttgccatgtggagtag

SEQ ID NO: 125408 - DNA, 411 bp, Artificial Sequence
  derived and/or modified sequence
atgagctggaagaaggccctgcggatccccggcggcctgcgggccgcaactgtgaccctcatgttggcgatgttatccactcccgtcgccgaaggacgcgactcccccgaggattttgtttaccagttcaaggccatgtgttattttactaacgggacagaaagagtgagatacgtgacgagatatatttacaacagggaagagtacgccagatttgattccgacgtggaagtataccgcgccgtcacccccttgggcccacctgatgccgagtactggaatagtcaaaaagaggtgctcgagaggacaagagcagagctggacaccgtttgccgtcataactatcaactcgagttgaggacaactttacagcggcggggcactgtcacaggccctagcaggagttggtag

SEQ ID NO: 125409 - DNA, 411 bp, Artificial Sequence
  derived and/or modified sequence
atgagctggaagaaggccctgcggatccccggcgacctgcgggtggccacagtgacgctgatgctggccatgctgagcagcctcctggcggaaggcagagactccccggaggacttcgtttttcagtttaagggcatgtgctattttacgaatgggactgaaagagtgaggctagttacacgatacatctacaacagagaggagtacgcaaggttcgacagcgatgtaggggtataccgggccgtcaccccccaagggcgccccgacgccgaatactggaacagccaaaaggaggtgctcgagggcaccagagccgagttagacaccgtgtgtagacacaattacgaggtggcgttcagaggtatccttcagagaagggggatggtcaccggcctgagccggagttggtag

SEQ ID NO: 125410 - DNA, 543 bp, Artificial Sequence
  derived and/or modified sequence
atgtgctacttcaccaacggcaccgagcgggtgcggggcgtgacccgctatatctacaatcgagaggagtacgccagatttgatagcgatgtgggtgtttaccgggcggtgaccccactgggacctccggctgcagaatattggaattcacagaaggaggtgctcgaaaggactcgtgccgagctggatacagtgtgtagacacaactaccagctcgagctcaggactactctacaaaggcgagtggagcctacagtgacaatcagcccaagtcggacggaagctttaaatcatcacaacctgctggtgtgttcggtgaccgacttctacccagctcagattaaggtgcggtggttcaggaacgaccaggaggagaccacgggtgtcgtaagtactcccctgattcgaaacggagattggacatttcagatcctggtcatgctcgaaatgaccccccagaggggagatgtgtatacatgccacgtagagcaccccagtttacagaatcccatcatcgttgagtggcgtatggacgaattctag

SEQ ID NO: 125411 - DNA, 675 bp, Artificial Sequence
  derived and/or modified sequence
atgtcatggaaaaaagccctgcgcatccccggagacttgcgggttgctacagtgactctgatgctggctatgctttctagtctcttggctgaggggcgtgatagtcccgaagatttcgtgtttcagttcaagggtatgtgttattttacgaacggcaccgaaagagtgcgcctcgtgacccgttatatttataatcgagaggaatacgcaagatttgatagtgacgttggcgtgtatagggccgtcactccccaggggcgaccagacgccgaatactggaatagccagaaggaagtcttggaaggcacgagggctgagcttgatacagtatgcaggcataattacgaagtcgccttccggggtattcttcagcgcagggtggagcccactgttactatctcccccagccgaacagaggctcttaaccatcataatctgctggtgtgtagcgtgacagatttttaccccggtcagatcaaggtccggtggttcagaaacgatcaagaagaaactgcgggagttgtgtcaacccctctcatcaggaacggcgattggaccttccagatactggtgatgctggagatgactccccagaggggtgatgtgtacacatgtcacgtcgaacacccgtctcttcaatcacctatcactgtcgaatggcgacttcttcattag

SEQ ID NO: 125412 - DNA, 786 bp, Artificial Sequence
  derived and/or modified sequence
atgagctggaagaaagcactgagaattccaggcgaccttagggtggccacggttacactgatgctggctatgctctcatcactgctcgccgaggggcgtgatagccctgaggattttgtgtttcagtttaaagggatgtgctacttcactaatggcactgaacgcgtgcggctggtgacccgctacatttacaatcgcgaggagtacgccaggttcgactcagacgtaggagtgtatagagctgttaccccccaggggcgtcccgacgctgaatactggaactcacagaaagaagtgctggagggcacccgcgcagaacttgacaccgtttgccgccacaactacgaagttgctttccggggtatccttcagagacgcgtagaaccaactgtgacaattagtccgtcccgaacggaggcccttaatcaccacaacctgctcgtgtgcagcgtgactgatttctaccccggtcaaatcaaggtacgctggtttcggaatgaccaggaggagacagccggagtagtcagtactcccctgattagaaacggagactggacattccagattctcgtgatgctggaaatgacaccacagcgcggagacgtttatacttgccacgttgaacacccgtccttgcagtcacccattacagtggaatggagagcccagagcgagtccgctcagagcaagatgttgagtggagtggggggtttcgtgctcggtctcatcttcctgggcctgggcctcatcatacggcagagaagtcagaagggcttgctccactag

SEQ ID NO: 125413 - DNA, 675 bp, Artificial Sequence
  derived and/or modified sequence
atgtcctggaagaaagcccttcggattccaggaggcctccgggcagctacagtgaccctcatgctcgcaatgctcagcacccccgttgcagagggcagggacagtccagaggactttgtgtatcagtttaaagcgatgtgttattttacaaatggcaccgaaagagttcggtatgtgacacgctacatctacaatcgagaggagtacgctcggtttgacagcgacgtggaagtgtatagggcggttacacccctcggtccgccagacgcagagtattggaactcccagaaggaggtgctggagagaaccagagcggagctggacacagtgtgcagacacaattaccagttggagctgcgcaccactctacagaggcgagtcgagccgacggtgactataagcccaagccgaaccgaagcactgaaccatcataacttactggtttgttccgtgacagatttttatccagcccagatcaaagtcagatggttcagaaacgatcaggaagagacgactggggtagtcagtaccccactgattagaaatggggactggacctttcagatcctggtaatgctcgagatgactccacagcacggagatgtgtatacctgtcatgtggagcacccatcgctacaaaatccaatcaccgtggaatggagattactccactag

SEQ ID NO: 125414 - DNA, 786 bp, Artificial Sequence
  derived and/or modified sequence
atgagctggaaaaaagccctccgtataccaggggaccttagggtggctacagtgacattaatgctggcgatgttgagctcactcttagcggaaggcagggacagcccagaggattttgtatttcagttcaagggcatgtgctactttactaacgggactgaacgggttcggctggtcactcggtatatatataatcgagaggagtacgcgagatttgatagtgacgtgggagtgtatcgcgcagttacaccccagggaaggcctgatgccgaatactggaatagtcagaaagaagtccttgaaggtacacgggctgaactggacacggtgtgccgacacaattatgaagtagcctttcgaggcatactccagaggcgggtagagcccacagtgacaatttcgccaagtcgcacagaggcactgaaccatcataatctgctagtgtgctctgtgacagacttctaccctgggcagataaaagtccggtggttcagaaacgatcaggaggagactgccggagtagtctccacacctttgattagaaatggggactggacatttcagattctagttatgctggaaatgacgccccagagaggagatgtctatacttgccacgtagagcaccctagcctccaatcaccaatcactgttgagtggcgcgcacagtccgaatccgctcagagcaagatgctaagtggagtgggcggattcgttctgggcctgatctttttaggcctaggcctgatcatccggcagcggtctcaaaaagggctgctccattag

SEQ ID NO: 125415 - DNA, 675 bp, Artificial Sequence
  derived and/or modified sequence
atgagttggaaaaaggccctgcgaatacccggtgggctcagagtcgcaacggttacgctgatgcttgccatgctcagcacgcctgtggccgaagggcgagattctcctgaagattttgtgtaccagttcaaagggatgtgctattttactaacggcactgaacgcgtgaggctggtgaccaggtatatctataatagggaggaatacgctcgttttgactccgatgtgggagtctaccgggctgtcacacccctaggcccacccgatgcagaatactggaatagccagaaggaggtgctcgaaagaaccagagccgagctggataccgtttgtaggcataattatcaactcgagctgagaactactcttcaacgccgagtggaaccaactgtgacgatcagcccctcacgaacagaggccctgaatcaccataacttattagtgtgctcagtgacagatttctatcctgcacagatcaaagttaggtggttccgcaacgatcaggaggaaaccaccggggtcgtttccaccccgctgataaggaacggagactggacctttcaaatcctggtaatgctggaaatgaccccacaacgaggggatgtttatacgtgccacgtggagcaccccagcttgcagaacccaataattgtggagtggaggcttctgcactag

SEQ ID NO: 125416 - DNA, 435 bp, Artificial Sequence
  derived and/or modified sequence
atgagttggaagaaggctttgcgcattccgggtgatctccgtgttgctactgtgaccccgcaggggaggcccgatgcggaatactggaattctcagaaggaggttctggaaggtacccgcgcagaattggatacggtctgccgccacaactatgaggtagcattccgtggtatactgcagagacgggtagagcctaccgtgaccatcagcccatccagaacagaggccctgaaccaccacaacctgcttgtgtgctccgtaacagatttttatcccggtcaaattaaggttcgatggtttcggaatgaccaggaagagacggccggtgtcgtttccaccccactcatcagaaacggagattggacttttcagattctggtgatgctcgagatgaccccacagcgcggagatgtctatacttgtcatgtagagtag

SEQ ID NO: 125417 - DNA, 411 bp, Artificial Sequence
  derived and/or modified sequence
atgtcctggaaaaaggccctccgcattcctggtgggcttcgcgctgcaactgtcaccctcatgttagcgatgctgtcaacacccgtggccgaaggacgcgacagccccgaggattttgtataccaattcaaggccatgtgctattttacaaatgggacagaacgcgtgcgttatgttacaagatacatttacaacagggaggagtatgctagattcgacagcgatgtggaagtctatagggccgtgacccccctcgggccaccagacgccgaatactggaacagccagaaagaagtgctagaacgaacacgcgcagagttggataccgtctgtcgacacaattaccagcttgagctgcgcactactcttcaaaggcgcggaaccgtgacaggaccgtcccgctcatggtag

SEQ ID NO: 125418 - DNA, 411 bp, Artificial Sequence
  derived and/or modified sequence
atgagctggaagaaagctttgaggatccctggcgaccttagagtcgcaaccgttactttgatgctggccatgctctcctctctactggcggaaggtcgtgattcccctgaagatttcgtgtttcagttcaaggggatgtgctactttactaacggaacggagcgagtgcgtttggtgacccgatacatctacaatagagaagaatacgccaggttcgactcagatgtgggggtttatcgagcagtgaccccccaggggaggcccgacgctgaatactggaactctcagaaggaggttctagagggtaccagagcagaactcgataccgtctgcaggcataattacgaggtagcttttcggggaattctgcaaagaagaggtatggtgacaggactctctcgtagctggtag

SEQ ID NO: 125419 - DNA, 543 bp, Artificial Sequence
  derived and/or modified sequence
atgtgttacttcaccaacggaacggaacgcgtgcggggagtgactaggtacatttataatcgggaggagtatgctcgttttgactccgacgttggcgtctatcgggcagtgacgcccctcggtcccccagccgctgaatactggaactcccagaaagaggttctggagcgcacacgggctgagctcgatactgtgtgtcgccacaattaccagctcgagctgcggacaaccctgcagcggagggttgagcccacggttacgatctcgccatcccgtacggaagctctgaaccatcacaatttgctcgtctgctctgtcacagatttttatccagcacaaatcaaggtaaggtggtttaggaatgaccaggaagaaaccactggcgtcgtatctactcctctgattcggaacggagattggacattccaaatattggttatgctggaaatgactccccagcgtggcgacgtgtacacatgtcatgtggagcaccccagtctgcagaatcccattatcgtggagtggcgcatggatgagttttag

SEQ ID NO: 125420 - DNA, 675 bp, Artificial Sequence
  derived and/or modified sequence
atgagctggaagaaggccctgagaatccccggcgacctgagagtggccaccgtgaccctgatgctggccatgctgagcagcctgctggccgagggcagagacagccccgaggacttcgtgttccagttcaagggcatgtgctacttcaccaacggcaccgagagagtgagactggtgaccagatacatctacaacagagaggagtacgccagattcgacagcgacgtgggcgtgtacagagccgtgaccccccagggcagacccgacgccgagtactggaacagccagaaggaggtgctggagggcaccagagccgagctggacaccgtgtgcagacacaactacgaggtggccttcagaggcatcctgcagagaagagtggagcccaccgtgaccatcagccccagcagaaccgaggccctgaaccaccacaacctgctggtgtgcagcgtgaccgacttctaccccggccagatcaaggtgagatggttcagaaacgaccaggaggagaccgccggcgtggtgagcacccccctgatcagaaacggcgactggaccttccagatcctggtgatgctggagatgaccccccagagaggcgacgtgtacacctgccacgtggagcaccccagcctgcagagccccatcaccgtggagtggagactgctgcactag

SEQ ID NO: 125421 - DNA, 786 bp, Artificial Sequence
  derived and/or modified sequence
atgagctggaagaaggccctgagaatccccggcgacctgagagtggccaccgtgaccctgatgctggccatgctgagcagcctgctggccgagggcagagacagccccgaggacttcgtgttccagttcaagggcatgtgctacttcaccaacggcaccgagagagtgagactggtgaccagatacatctacaacagagaggagtacgccagattcgacagcgacgtgggcgtgtacagagccgtgaccccccagggcagacccgacgccgagtactggaacagccagaaggaggtgctggagggcaccagagccgagctggacaccgtgtgcagacacaactacgaggtggccttcagaggcatcctgcagagaagagtggagcccaccgtgaccatcagccccagcagaaccgaggccctgaaccaccacaacctgctggtgtgcagcgtgaccgacttctaccccggccagatcaaggtgagatggttcagaaacgaccaggaggagaccgccggcgtggtgagcacccccctgatcagaaacggcgactggaccttccagatcctggtgatgctggagatgaccccccagagaggcgacgtgtacacctgccacgtggagcaccccagcctgcagagccccatcaccgtggagtggagagcccagagcgagagcgcccagagcaagatgctgagcggcgtgggcggcttcgtgctgggcctgatcttcctgggcctgggcctgatcatcagacagagaagccagaagggcctgctgcactag

SEQ ID NO: 125422 - DNA, 675 bp, Artificial Sequence
  derived and/or modified sequence
atgagctggaagaaggccctgagaatccccggcggcctgagagccgccaccgtgaccctgatgctggccatgctgagcacccccgtggccgagggcagagacagccccgaggacttcgtgtaccagttcaaggccatgtgctacttcaccaacggcaccgagagagtgagatacgtgaccagatacatctacaacagagaggagtacgccagattcgacagcgacgtggaggtgtacagagccgtgacccccctgggcccccccgacgccgagtactggaacagccagaaggaggtgctggagagaaccagagccgagctggacaccgtgtgcagacacaactaccagctggagctgagaaccaccctgcagagaagagtggagcccaccgtgaccatcagccccagcagaaccgaggccctgaaccaccacaacctgctggtgtgcagcgtgaccgacttctaccccgcccagatcaaggtgagatggttcagaaacgaccaggaggagaccaccggcgtggtgagcacccccctgatcagaaacggcgactggaccttccagatcctggtgatgctggagatgaccccccagcacggcgacgtgtacacctgccacgtggagcaccccagcctgcagaaccccatcaccgtggagtggagactgctgcactag

SEQ ID NO: 125423 - DNA, 675 bp, Artificial Sequence
  derived and/or modified sequence
atgagctggaagaaggccctgagaatccccggcggcctgagagtggccaccgtgaccctgatgctggccatgctgagcacccccgtggccgagggcagagacagccccgaggacttcgtgtaccagttcaagggcatgtgctacttcaccaacggcaccgagagagtgagactggtgaccagatacatctacaacagagaggagtacgccagattcgacagcgacgtgggcgtgtacagagccgtgacccccctgggcccccccgacgccgagtactggaacagccagaaggaggtgctggagagaaccagagccgagctggacaccgtgtgcagacacaactaccagctggagctgagaaccaccctgcagagaagagtggagcccaccgtgaccatcagccccagcagaaccgaggccctgaaccaccacaacctgctggtgtgcagcgtgaccgacttctaccccgcccagatcaaggtgagatggttcagaaacgaccaggaggagaccaccggcgtggtgagcacccccctgatcagaaacggcgactggaccttccagatcctggtgatgctggagatgaccccccagagaggcgacgtgtacacctgccacgtggagcaccccagcctgcagaaccccatcatcgtggagtggagactgctgcactag

SEQ ID NO: 125424 - DNA, 435 bp, Artificial Sequence
  derived and/or modified sequence
atgagctggaagaaggccctgagaatccccggcgacctgagagtggccaccgtgaccccccagggcagacccgacgccgagtactggaacagccagaaggaggtgctggagggcaccagagccgagctggacaccgtgtgcagacacaactacgaggtggccttcagaggcatcctgcagagaagagtggagcccaccgtgaccatcagccccagcagaaccgaggccctgaaccaccacaacctgctggtgtgcagcgtgaccgacttctaccccggccagatcaaggtgagatggttcagaaacgaccaggaggagaccgccggcgtggtgagcacccccctgatcagaaacggcgactggaccttccagatcctggtgatgctggagatgaccccccagagaggcgacgtgtacacctgccacgtggagtag

SEQ ID NO: 125425 - DNA, 411 bp, Artificial Sequence
  derived and/or modified sequence
atgagctggaagaaggccctgagaatccccggcggcctgagagccgccaccgtgaccctgatgctggccatgctgagcacccccgtggccgagggcagagacagccccgaggacttcgtgtaccagttcaaggccatgtgctacttcaccaacggcaccgagagagtgagatacgtgaccagatacatctacaacagagaggagtacgccagattcgacagcgacgtggaggtgtacagagccgtgacccccctgggcccccccgacgccgagtactggaacagccagaaggaggtgctggagagaaccagagccgagctggacaccgtgtgcagacacaactaccagctggagctgagaaccaccctgcagagaagaggcaccgtgaccggccccagcagaagctggtag

SEQ ID NO: 125426 - DNA, 411 bp, Artificial Sequence
  derived and/or modified sequence
atgagctggaagaaggccctgagaatccccggcgacctgagagtggccaccgtgaccctgatgctggccatgctgagcagcctgctggccgagggcagagacagccccgaggacttcgtgttccagttcaagggcatgtgctacttcaccaacggcaccgagagagtgagactggtgaccagatacatctacaacagagaggagtacgccagattcgacagcgacgtgggcgtgtacagagccgtgaccccccagggcagacccgacgccgagtactggaacagccagaaggaggtgctggagggcaccagagccgagctggacaccgtgtgcagacacaactacgaggtggccttcagaggcatcctgcagagaagaggcatggtgaccggcctgagcagaagctggtag

SEQ ID NO: 125427 - DNA, 543 bp, Artificial Sequence
  derived and/or modified sequence
atgtgctacttcaccaacggcaccgagagagtgagaggcgtgaccagatacatctacaacagagaggagtacgccagattcgacagcgacgtgggcgtgtacagagccgtgacccccctgggcccccccgccgccgagtactggaacagccagaaggaggtgctggagagaaccagagccgagctggacaccgtgtgcagacacaactaccagctggagctgagaaccaccctgcagagaagagtggagcccaccgtgaccatcagccccagcagaaccgaggccctgaaccaccacaacctgctggtgtgcagcgtgaccgacttctaccccgcccagatcaaggtgagatggttcagaaacgaccaggaggagaccaccggcgtggtgagcacccccctgatcagaaacggcgactggaccttccagatcctggtgatgctggagatgaccccccagagaggcgacgtgtacacctgccacgtggagcaccccagcctgcagaaccccatcatcgtggagtggagaatggacgagttctag

SEQ ID NO: 125428 - DNA, 1656 bp, Artificial Sequence
  derived and/or modified sequence
tttttattctttctgccaggtacatcagatccatcaggtccgagctgtgttgactaccactgcttttcccttcgtctcagttatgtcttggaagaaggctttgcggatccccggagaccttcgggtagcaactgtcaccttgatgctggcgatgctgagctccctactggctgagggcagagactctcccgaggatttcgtgttccagtttaagggcatgtgctacttcaccaacgggacggagcgcgtgcgtcttgtgaccagatacatctataaccgagaggagtacgcgcgcttcgacagcgacgtgggggtgtaccgcgcggtgacgccgcaggggcggcctgatgccgagtactggaacagccagaaggaagtcctggaggggacccgggcggagttggacacggtgtgcagacacaactacgaggtggcgttccgcgggatcttgcagaggagagtggagcccacagtgaccatctccccatccaggacagaggccctcaaccaccacaacctgctggtctgctcggtgacagatttctatccaggccagatcaaagtccggtggtttcggaatgatcaggaggagacagccggcgttgtgtccaccccccttattaggaatggtgactggactttccagatcctggtgatgctggaaatgactccccagcgtggagatgtctacacctgccacgtggagcaccccagcctccagagccccatcaccgtggagtggcgggctcagtctgaatctgcccagagcaagatgctgagtggcgttggaggcttcgtgctggggctgatcttccttgggctgggccttatcatccgtcaaaggagtcagaaagggcttctgcactgactcctgagactattttaactaggattggttatcactcttctgtgatgcctgcttatgcctgcccagaattcccagctgcctgtgtcagcttgtccccctgagatcaaagtcctacagtggctgtcacgcagccaccaggtcatctcctttcatccccaccccaaggcgctggctgtgactctgcttcctgcactgacccagagcctctgcctgtgcatggccagctgcgtctactcaggtcccaaggggtttctgtttctattctttcctcagactgctcaagagaagcacatgaaaaacattacctgactttagagcttttttacataattaaacatgatcctgagttatctgtattctgaactttcttaattgagaagaggcaggaaatcactgcagaatgaaggaacatcccttgaggtgacccagcaaacctgtggccagaaggaggattgtaccttgaaaagacactgaaagcattttggggtgtgaagtaagggtgggcagaggaggtagaaaataattcaattgtcgcatcattcatggttctttaatactgatgctcagtgcattggccttagaatatcccagcctctcttctggtttggtgagtgctgtgtaaataagcatggtagaattgtttggagacatatatagtgatccttggtcactggtgtttcaaacattctggaaagtcacatcgatcaagaatattttttatttttaagaaagcataaccagcaataaaaatactatttttgagtctaaatgaaaaaaaaaaaaaaaaa

SEQ ID NO: 125429 - DNA, 1664 bp, Artificial Sequence
  derived and/or modified sequence
tttttattctttctgccaggtacatcagatccatcaggtccgagctgtgttgactaccactgcttttcccttcgtctcagttatgtcttggaagaaggctttgcggatccccggagaccttcgggtagcaactgtcaccttgatgctggcgatgctgagctccctactggctgagggcagagactctcccgaggatttcgtgttccagtttaagggcatgtgctacttcaccaacgggacggagcgcgtgcgtcttgtgaccagatacatctataaccgagaggagtacgcgcgcttcgacagcgacgtgggggtgtaccgcgcggtgacgccgcaggggcggcctgatgccgagtactggaacagccagaaggaagtcctggaggggacccgggcggagttggacacggtgtgcagacacaactacgaggtggcgttccgcgggatcttgcagaggagagtggagcccacagtgaccatctccccatccaggacagaggccctcaaccaccacaacctgctggtctgctcggtgacagatttctatccaggccagatcaaagtccggtggtttcggaatgatcaggaggagacagccggcgttgtgtccaccccccttattaggaatggtgactggactttccagatcctggtgatgctggaaatgactccccagcgtggagatgtctacacctgccacgtggagcaccccagcctccagagccccatcaccgtggagtggcgggctcagtctgaatctgcccagagcaagatgctgagtggcgttggaggcttcgtgctggggctgatcttccttgggctgggccttatcatccgtcaaaggagtcagaaaggacctcaagggcctccaccagcagggcttctgcactgactcctgagactattttaactaggattggttatcactcttctgtgatgcctgcttatgcctgcccagaattcccagctgcctgtgtcagcttgtccccctgagatcaaagtcctacagtggctgtcacgcagccaccaggtcatctcctttcatccccaccccaaggcgctggctgtgactctgcttcctgcactgacccagagcctctgcctgtgcatggccagctgcgtctactcaggtcccaaggggtttctgtttctattctttcctcagactgctcaagagaagcacatgaaaaacattacctgactttagagcttttttacataattaaacatgatcctgagttatctgtattctgaactttcttaattgagaagaggcaggaaatcactgcagaatgaaggaacatcccttgaggtgacccagcaaacctgtggccagaaggaggattgtaccttgaaaagacactgaaagcattttggggtgtgaagtaagggtgggcagaggaggtagaaaataattcaattgtcgcatcattcatggttctttaatactgatgctcagtgcattggccttagaatatcccagcctctcttctggtttggtgagtgctgtgtaaataagcatggtagaattgtttggagacatatatagtgatccttggtcactggtgtttcaaacattctggaaagtcacatcgatcaagaatattttttatttttaagaaagcataaccagcaataaaaatactatttttgagtctaaatga

SEQ ID NO: 125430 - protein, 266 aa, Artificial Sequence
  derived and/or modified sequence
MVCLKLPGGSCMTALTVTLMVLSSPLALSGDTRPRFLWQPKRECHFFNGTERVRFLDRYFYNQEESVRFDSDVGEFRAVTELGRPDAEYWNSQKDILEQARAAVDTYCRHNYGVVESFTVQRRVQPKVTVYPSKTQPLQHHNLLVCSVSGFYPGSIEVRWFLNGQEEKAGMVSTGLIQNGDWTFQTLVMLETVPRSGEVYTCQVEHPSVTSPLTVEWRARSESAQSKMLSGVGGFVLGLLFLGAGLFIYFRNQKGHSGLQPTGFLS

SEQ ID NO: 125431 - protein, 250 aa, Artificial Sequence
  derived and/or modified sequence
LLKLTRDFPQRHEKYQSWAGTFHLCLKKNKYPDSRSTFIKHAGSYLKRGEFLSIHTAITCFFLQISARFLEQVKHECHFFNGTERVRFLDRYFYHQEEYVRFDSDVGEYRAVTELGRPDAEYWNSQKDLLEQRRAEVDTYCRHNYGVVESFTVQRRVYPEVTVYPAKTQPLQHHNLLVCSVNGFYPGSIEVRWFRNGQEEKTGVVSTGLIQNGDWTFQTLVMLETVPRSGEVYTCQVEHPSLTSPLTVEW

SEQ ID NO: 125432 - protein, 266 aa, Artificial Sequence
  derived and/or modified sequence
MVCLKFPGGSCMAALTVTLMVLSSPLALAGDTRPRFLEQVKHECHFFNGTERVRFLDRYFYHQEEYVRFDSDVGEYRAVTELGRPDAEYWNSQKDLLEQRRAEVDTYCRHNYGVVESFTVQRRVYPEVTVYPAKTQPLQHHNLLVCSVNGFYPGSIEVRWFRNGQEEKTGVVSTGLIQNGDWTFQTLVMLETVPRSGEVYTCQVEHPSLTSPLTVEWRARSESAQSKMLSGVGGFVLGLLFLGAGLFIYFRNQKGHSGLQPTGFLS

SEQ ID NO: 125433 - protein, 263 aa, Artificial Sequence
  derived and/or modified sequence
MVCLKFPGGSCMAALTVTLMVLSSPLALAGDTRPRFLEQVKHECHFFNGTERVRFLDRYFYHQEEYVRFDSDVGEYRAVTELGRPDAEYWNSQKDLLEQRRAEVDTYCRHNYGVVESFTVQRRVYPEVTVYPAKTQPLQHHNLLVCSVNGFYPGSIEVRWFRNGQEEKTGVVSTGLIQNGDWTFQTLVMLETVPRSGEVYTCQVEHPSLTSPLTVEWRARSESAQSKMLSGVGGFVLGLLFLGAGLFIYFRNQKGHSGLQPTG

SEQ ID NO: 125434 - protein, 296 aa, Artificial Sequence
  derived and/or modified sequence
MVCLKFPGGSCMAALTVTLMVLSSPLALAGDTRPRFLEQVKHECHFFNGTERVRFLDRYFYHQEEYVRFDSDVGEYRAVTELGRPDAEYWNSQKDLLEQRRAEVDTYCRHNYGVVESFTVQRRVYPEVTVYPAKTQPLQHHNLLVCSVNGFYPGSIEVRWFRNGQEEKTGVVSTGLIQNGDWTFQTLVMLETVPRSGEVYTCQVEHPSLTSPLTVEWRARSESAQSKMLSGVGGFVLGLLFLGAGLFIYFRNQKGHSGLQPTGNTFSSSLRNRFGGQAQWLTPVIPALWEAEAGES

SEQ ID NO: 125435 - DNA, 801 bp, Artificial Sequence
  derived and/or modified sequence
atggtgtgtctgaagctcccaggcggcagttgcatgactgccttgacggtcaccttgatggttttaagcagccccctggccctcagtggggacacccgccctagattcctgtggcagcctaaaagagagtgccattttttcaatggcacagagagagtgcggttccttgaccgctacttttataaccaagaagagtcagtgagatttgatagtgacgtgggagagtttagagctgtaacagagctggggcggcctgatgctgagtactggaattcccagaaagacattctggagcaggcccgcgctgccgtagatacctattgccgacacaattacggagtcgtcgagtccttcaccgtgcagagaagggtgcaacccaaggtgacagtgtatcctagtaagacccagccactgcagcatcataatttgctagtctgttcagtttccggtttctaccctggctccatcgaagtgagatggttcctcaatggacaagaagagaaggcaggtatggtgagtactggcctgattcagaatggggattggacttttcagactctggtgatgttagagactgtccccaggtccggggaggtgtacacttgccaggtcgagcacccgtccgtcaccagcccccttaccgtggaatggagagcacggagcgagagcgctcagtcaaagatgttaagcggtgtcggagggttcgtactggggctgctgttccttggggctggtttgttcatatactttcgcaaccaaaagggacattctggattgcagccgactggtttcctgtcttag

SEQ ID NO: 125436 - DNA, 753 bp, Artificial Sequence
  derived and/or modified sequence
ctgctgaaattgacacgagattttcctcagcgccatgagaagtaccaaagctgggcaggcacctttcacctttgcttaaaaaagaataagtatcccgattctcggagcacattcattaagcatgctggtagctacctgaagagaggggaatttttaagcatacataccgcaatcacttgtttctttctgcagatcagcgcacgttttctggaacaggttaaacacgagtgccattttttcaacgggaccgaaagagtaagatttctagaccgctacttctaccaccaggaggaatatgtccggtttgactccgacgtgggcgagtatcgggctgtgaccgagctcggaaggcccgacgcggaatactggaacagccagaaggatcttctagagcagcgccgcgcggaagtggacacatattgtcggcacaattatggtgtagtcgagtctttcacggtgcagaggagagtgtaccctgaagttactgtctaccccgctaaaacccagcctcttcagcaccacaatttactggtctgcagcgtcaatggcttttacccaggcagtattgaggttagatggttcagaaatggacaagaagaaaaaaccggtgtggtatcaacaggcctaattcaaaacggtgactggacatttcagactctggtgatgctggaaaccgtcccacggtctggtgaggtgtacacctgtcaggtggaacatccatcccttacatcgcctctgaccgtggagtggtag

SEQ ID NO: 125437 - DNA, 801 bp, Artificial Sequence
  derived and/or modified sequence
atggtttgcctgaagttcccaggcggatcttgcatggccgcgctgacagtaacactgatggtgctctcttcccctctggccctcgctggggatacaagaccaaggttcctggaacaggtgaaacatgaatgtcacttctttaacggcacagaaagagtgcgttttctagaccgctacttctaccaccaggaagagtatgtacgtttcgatagtgatgttggcgaatacagggcagttaccgagctaggtcgcccagatgcggaatactggaactcgcagaaagacctgttggaacagagaagggccgaggtggatacgtattgtaggcacaactacggggtagtggagagctttaccgtccaaaggcgcgtgtaccctgaggtgactgtgtatcccgctaagacccagcctctccaacaccataatcttcttgtgtgctcagtgaatggtttctaccctgggagcattgaagtacgctggttccggaacggccaggaagaaaaaactggagtggtgagcacagggctcatccagaatggcgattggactttccagacccttgtgatgcttgagactgtgccacggtccggggaagtgtatacctgtcaggtagaacacccatcgcttaccagccccctgaccgtcgagtggagggcacggagcgagtcagcgcaaagcaagatgctttcaggagtggggggctttgtgctcgggctgctctttctgggggctggcctgtttatctacttccgaaatcagaagggccactcagggcttcaacctaccggttttttgtcctag

SEQ ID NO: 125438 - DNA, 792 bp, Artificial Sequence
  derived and/or modified sequence
atggtgtgcctgaaattccccggaggatcttgcatggctgccctgactgtgaccttgatggtgctcagtagcccactggctctagccggtgacaccaggcctagattcctcgagcaggtgaaacacgaatgccactttttcaacggcaccgagagggtgcggttccttgatcgatacttttaccaccaggaagagtacgttagatttgattctgatgtcggagaatatcgggccgttactgagttagggcgaccagacgccgaatactggaatagccaaaaggatctcttggagcagcgacgagcggaagtcgacacgtattgcaggcacaactacggggtggtggagtcttttacggtgcagagaagggtctatccagaagtaacagtgtaccccgcaaaaacacagccgcttcagcaccacaacttgctcgtctgctctgtgaacggattttaccccggctccatagaggtccggtggtttaggaatggtcaggaagaaaaaaccggagtggtctccacgggtctgatccagaacggcgattggaccttccagacccttgtgatgctggaaactgttcccaggagcggcgaagtgtatacatgtcaggttgaacacccgtctctgacctctccgttgacagttgagtggcgcgctagatccgaaagtgcccagtcaaaaatgctcagcggggtgggaggttttgtgctagggctactcttcctaggggcaggcctttttatttatttccgaaaccaaaagggccattctggcctacagcctacggggtag

SEQ ID NO: 125439 - DNA, 891 bp, Artificial Sequence
  derived and/or modified sequence
atggtctgtctgaagttcccgggcgggtcctgcatggccgcactgactgtcactctgatggttctgtcaagtcctcttgctttggctggtgacactagaccacggtttctcgaacaggtgaagcatgagtgccacttttttaatggaaccgagcgcgtgagatttttggacagatacttttaccatcaggaggaatacgtcaggttcgacagtgatgtgggagaataccgggctgtgactgaactgggcagacccgacgctgagtattggaatagtcagaaggatctgctggagcagcgtagggccgaggttgatacttattgtagacacaattatggcgtcgtggaatctttcactgtgcaacgccgagtttacccagaagtaaccgtgtaccccgccaaaacacaaccgctgcaacatcacaatttgctggtgtgttcggttaacggtttttacccaggcagcatcgaagtgaggtggttccggaacggccaggaagagaaaacaggcgtcgtctcaactggcctgattcaaaatggtgactggacattccagacactggtgatgcttgaaacggttccaagatccggagaagtttatacgtgccaggttgagcatccctccctgacttctcctctgacggtggaatggcgagcaaggagcgagtctgcacaatctaaaatgctgtctggtgtcggcggatttgtgcttggtttgctgttccttggtgcggggctctttatttacttccggaatcagaagggccactctggtttacaaccgacaggtaatacctttagctcatctcttcggaatcgctttggcggtcaggcacagtggctgactcccgtcatcccagctctttgggaggccgaggctggcgagagttag

SEQ ID NO: 125440 - DNA, 801 bp, Artificial Sequence
  derived and/or modified sequence
atggtgtgcctgaagctgcccggcggcagctgcatgacagccctgactgtgaccctgatggtgctgagcagccccctggccctgagcggggacacccggccccgcttcctgtggcagcccaagcgggagtgccacttcttcaacggcacagagcgggtgcgcttcctggaccgctacttctacaaccaggaggagagcgtgcgctttgacagtgatgtgggggagttccgggctgtgacagagctgggccgcccagatgctgagtactggaacagccagaaggacatcctggagcaggcccgggctgctgtggacacctactgccgccacaactacggcgtggtggagagcttcaccgtgcagaggagagtgcagcccaaggtgacagtgtaccccagcaagacccagcccctgcagcaccacaacctgctggtgtgcagcgtgtctggcttctacccaggcagcattgaggtgcgctggttcctgaatggccaggaggagaaggccggcatggtgtccacaggcctcatccagaatggagactggaccttccagaccctggtgatgctggagaccgtgcccaggtctggagaggtgtacacctgccaggtggagcaccccagcgtgaccagccccctgactgtggagtggagggcccggtctgagagcgcccagagcaagatgctgagcggcgtgggcggctttgtgctgggcctgctcttcctgggcgccggcctcttcatctacttcaggaaccagaagggccacagcggcctgcagcccaccggcttcctgtcctag

SEQ ID NO: 125441 - DNA, 753 bp, Artificial Sequence
  derived and/or modified sequence
ctgctgaagctgacccgggacttcccccagagacatgagaagtaccagagctgggccggcaccttccacctgtgcctgaagaagaacaagtacccagacagccgcagcaccttcatcaagcacgccggcagctacctgaagagaggagagttcctgagcatccacacagccatcacctgcttcttcctgcagatcagcgcccgcttcctggagcaggtgaagcatgagtgccacttcttcaatggaacagagcgggtgcgcttcctggaccgctacttctaccaccaggaggagtatgtgcgctttgacagtgatgtgggggagtacagagctgtgacagagctgggccgcccagatgctgagtactggaacagccagaaggacctgctggagcagaggagagctgaggtggacacctactgccgccacaactatggagtggtggagagcttcaccgtgcagaggagagtgtacccagaggtgacagtgtacccagccaagacccagcccctgcagcaccacaacctgctggtgtgcagcgtgaatggcttctacccaggcagcattgaggtgcgctggttcagaaatggccaggaggagaagacaggagtggtgtccacaggcctcatccagaatggagactggaccttccagaccctggtgatgctggagaccgtgcccaggtctggagaggtgtacacctgccaggtggagcaccccagcctgaccagccccctgactgtggagtggtag

SEQ ID NO: 125442 - DNA, 801 bp, Artificial Sequence
  derived and/or modified sequence
atggtgtgcctgaagtttcctgggggcagctgcatggccgccctgactgtgaccctgatggtgctgagcagccccctggccctggccggggacacccggccccgcttcctggagcaggtgaagcatgagtgccacttcttcaacggcacagagcgggtgcgcttcctggaccgctacttctaccaccaggaggagtatgtgcgctttgacagtgatgtgggggagtacagagctgtgacagagctgggccgcccagatgctgagtactggaacagccagaaggacctgctggagcagaggagagctgaggtggacacctactgccgccacaactacggcgtggtggagagcttcaccgtgcagaggagagtgtacccagaggtgacagtgtacccagccaagacccagcccctgcagcaccacaacctgctggtgtgcagcgtgaatggcttctacccaggcagcattgaggtgcgctggttcagaaatggccaggaggagaagacaggagtggtgtccacaggcctcatccagaatggagactggaccttccagaccctggtgatgctggagaccgtgcccaggtctggagaggtgtacacctgccaggtggagcaccccagcctgaccagccccctgactgtggagtggagggcccggtctgagagcgcccagagcaagatgctgagcggcgtgggcggctttgtgctgggcctgctcttcctgggcgccggcctcttcatctacttcaggaaccagaagggccacagcggcctgcagcccaccggcttcctgtcctag

SEQ ID NO: 125443 - DNA, 792 bp, Artificial Sequence
  derived and/or modified sequence
atggtgtgcctgaagtttcctgggggcagctgcatggccgccctgactgtgaccctgatggtgctgagcagccccctggccctggccggggacacccggccccgcttcctggagcaggtgaagcatgagtgccacttcttcaacggcacagagcgggtgcgcttcctggaccgctacttctaccaccaggaggagtatgtgcgctttgacagtgatgtgggggagtacagagctgtgacagagctgggccgcccagatgctgagtactggaacagccagaaggacctgctggagcagaggagagctgaggtggacacctactgccgccacaactacggcgtggtggagagcttcaccgtgcagaggagagtgtacccagaggtgacagtgtacccagccaagacccagcccctgcagcaccacaacctgctggtgtgcagcgtgaatggcttctacccaggcagcattgaggtgcgctggttcagaaatggccaggaggagaagacaggagtggtgtccacaggcctcatccagaatggagactggaccttccagaccctggtgatgctggagaccgtgcccaggtctggagaggtgtacacctgccaggtggagcaccccagcctgaccagccccctgactgtggagtggagggcccggtctgagagcgcccagagcaagatgctgagcggcgtgggcggctttgtgctgggcctgctcttcctgggcgccggcctcttcatctacttcaggaaccagaagggccacagcggcctgcagcccaccggctag

SEQ ID NO: 125444 - DNA, 891 bp, Artificial Sequence
  derived and/or modified sequence
atggtgtgcctgaagtttcctgggggcagctgcatggccgccctgactgtgaccctgatggtgctgagcagccccctggccctggccggggacacccggccccgcttcctggagcaggtgaagcatgagtgccacttcttcaacggcacagagcgggtgcgcttcctggaccgctacttctaccaccaggaggagtatgtgcgctttgacagtgatgtgggggagtacagagctgtgacagagctgggccgcccagatgctgagtactggaacagccagaaggacctgctggagcagaggagagctgaggtggacacctactgccgccacaactacggcgtggtggagagcttcaccgtgcagaggagagtgtacccagaggtgacagtgtacccagccaagacccagcccctgcagcaccacaacctgctggtgtgcagcgtgaatggcttctacccaggcagcattgaggtgcgctggttcagaaatggccaggaggagaagacaggagtggtgtccacaggcctcatccagaatggagactggaccttccagaccctggtgatgctggagaccgtgcccaggtctggagaggtgtacacctgccaggtggagcaccccagcctgaccagccccctgactgtggagtggagggcccggtctgagagcgcccagagcaagatgctgagcggcgtgggcggctttgtgctgggcctgctcttcctgggcgccggcctcttcatctacttcaggaaccagaagggccacagcggcctgcagcccaccggcaacaccttcagcagcagcctgaggaacagatttggaggccaggcccagtggctgacccctgtgatcccagccctgtgggaggccgaggccggggagagctag

SEQ ID NO: 125445 - DNA, 1229 bp, Artificial Sequence
  derived and/or modified sequence
agtaacttcctccctataacttggaatgtgggtggaggggttcatagttctccctgagtgagacttgcctgcttctctggcccctggtcctgtcctgttctccagcatggtgtgtctgaagctccctggaggctcctgcatgacagcgctgacagtgacactgatggtgctgagctccccactggctttgtctggggacacccgaccacgtttcctgtggcagcctaagagggagtgtcatttcttcaatgggacggagcgggtgcggttcctggacagatacttctataaccaggaggagtccgtgcgcttcgacagcgacgtgggggagttccgggcggtgacggagctggggcggcctgacgctgagtactggaacagccagaaggacatcctggagcaggcgcgggccgcggtggacacctactgcagacacaactacggggttgtggagagcttcacagtgcagcggcgagtccaacctaaggtgactgtatatccttcaaagacccagcccctgcagcaccacaacctcctggtctgctctgtgagtggtttctatccaggcagcattgaagtcaggtggttcctgaacggccaggaagagaaggctgggatggtgtccacaggcctgatccagaatggagactggaccttccagaccctggtgatgctggaaacagttcctcgaagtggagaggtttacacctgccaagtggagcacccaagcgtgacaagccctctcacagtggaatggagagcacggtctgaatctgcacagagcaagatgctgagtggagtcgggggctttgtgctgggcctgctcttccttggggccgggctgttcatctacttcaggaatcagaaaggacactctggacttcagccaacaggattcctgagctgaaatgcagatgaccacattcaaggaagaactttctgccccggctttgcaggatgaaaagctttcctgcttggcagttattcttccacaagagagggctttctcaggacctggttgctactggttcggcaactgcagaaaatgtcctcccttgtggcttcctcagctcctgcccttggcctgaagtcccagcattgatggcagcgcctcatcttcaacttttgtgctcccctttgcctaaaccgtatggcctcccgtgcatctgtattcaccctgtatgacaaacacattacattattaaatgtttctcaaagatggagttaaa

SEQ ID NO: 125446 - DNA, 751 bp, Artificial Sequence
  derived and/or modified sequence
cttttaaaactcaccagggacttcccacagaggcatgaaaaatatcagtcctgggcagggactttccacctatgtctgaaaaagaacaagtatcctgattcacgctctacattcattaagcatgctggatcttacttgaaaaggggagagttcttgtcaatccacacagctatcacctgtttctttctacaaatttcagcacgtttcttggagcaggttaaacatgagtgtcatttcttcaacgggacggagcgggtgcggttcctggacagatacttctatcaccaagaggagtacgtgcgcttcgacagcgacgtgggggagtaccgggcggtgacggagctggggcggcctgatgccgagtactggaacagccagaaggacctcctggagcagaggcgggccgaggtggacacctactgcagacacaactacggggttgtggagagcttcacagtgcagcggcgagtctatcctgaggtgactgtgtatcctgcaaagacccagcccctgcagcaccacaacctcctggtctgctctgtgaatggtttctatccaggcagcattgaagtcaggtggttccggaacggccaggaagagaagactggggtggtgtccacaggcctgatccagaatggagactggaccttccagaccctggtgatgctggaaacagttcctcggagtggagaggtttacacctgccaagtggagcacccaagcctgacgagccctctcacagtggaatgga

SEQ ID NO: 125447 - DNA, 1191 bp, Artificial Sequence
  derived and/or modified sequence
atagttctccctgagtgagactcacctgctcctctggcccctggtcctgtcctgttctccagcatggtgtgtctgaagttccctggaggctcctgcatggcagctctgacagtgacactgatggtgctgagctccccactggctttggctggggacacccgaccacgtttcttggagcaggttaaacatgagtgtcatttcttcaacgggacggagcgggtgcggttcctggacagatacttctatcaccaagaggagtacgtgcgcttcgacagcgacgtgggggagtaccgggcggtgacggagctggggcggcctgatgccgagtactggaacagccagaaggacctcctggagcagaggcgggccgaggtggacacctactgcagacacaactacggggttgtggagagcttcacagtgcagcggcgagtctatcctgaggtgactgtgtatcctgcaaagacccagcccctgcagcaccacaacctcctggtctgctctgtgaatggtttctatccaggcagcattgaagtcaggtggttccggaacggccaggaagagaagactggggtggtgtccacaggcctgatccagaatggagactggaccttccagaccctggtgatgctggaaacagttcctcggagtggagaggtttacacctgccaagtggagcacccaagcctgacgagccctctcacagtggaatggagagcacggtctgaatctgcacagagcaagatgctgagtggagtcgggggcttcgtgctgggcctgctcttccttggggccgggctgttcatctacttcaggaatcagaaaggacactctggacttcagccaacaggattcctgagctgaagtgaagatgaccacattcaaggaagaaccttctgccccagctttgcaggatgaaacacttccccgcttggctctcattcttccacaagagagacctttctccggacctggttgctactggttcagcagctctgcagaaaatgtcctcccttgtggctgcctcagctcgtacctttggcctgaagtcccagcattaatggcagcccctcatcttccaagttttgtgctcccctttacctaatgcttcctgcctcccatgcatctgtactcctgctgtgccacaaacacattacattattaaatgtttctcaaacatggagttaaaaa

SEQ ID NO: 125448 - DNA, 798 bp, Artificial Sequence
  derived and/or modified sequence
ttctccagcatggtgtgtctgaagttccctggaggctcctgcatggcagctctgacagtgacactgatggtgctgagctccccactggctttggctggggacacccgaccacgtttcttggagcaggttaaacatgagtgtcatttcttcaacgggacggagcgggtgcggttcctggacagatacttctatcaccaagaggagtacgtgcgcttcgacagcgacgtgggggagtaccgggcggtgacggagctggggcggcctgatgccgagtactggaacagccagaaggacctcctggagcagaggcgggccgaggtggacacctactgcagacacaactacggggttgtggagagcttcacagtgcagcggcgagtctatcctgaggtgactgtgtatcctgcaaagacccagcccctgcagcaccacaacctcctggtctgctctgtgaatggtttctatccaggcagcattgaagtcaggtggttccggaacggccaggaagagaagactggggtggtgtccacaggcctgatccagaatggagactggaccttccagaccctggtgatgctggaaacagttcctcggagtggagaggtttacacctgccaagtggagcacccaagcctgacgagccctctcacagtggaatggagagcacggtctgaatctgcacagagcaagatgctgagtggagtcgggggcttcgtgctgggcctgctcttccttggggccgggctgttcatctacttcaggaatcagaaaggacactctggacttcagccaacaggt

SEQ ID NO: 125449 - DNA, 1167 bp, Artificial Sequence
  derived and/or modified sequence
tctccctgagtgagactcacctgctcctctggcccctggtcctgtcctgttctccagcatggtgtgtctgaagttccctggaggctcctgcatggcagctctgacagtgacactgatggtgctgagctccccactggctttggctggggacacccgaccacgtttcttggagcaggttaaacatgagtgtcatttcttcaacgggacggagcgggtgcggttcctggacagatacttctatcaccaagaggagtacgtgcgcttcgacagcgacgtgggggagtaccgggcggtgacggagctggggcggcctgatgccgagtactggaacagccagaaggacctcctggagcagaggcgggccgaggtggacacctactgcagacacaactacggggttgtggagagcttcacagtgcagcggcgagtctatcctgaggtgactgtgtatcctgcaaagacccagcccctgcagcaccacaacctcctggtctgctctgtgaatggtttctatccaggcagcattgaagtcaggtggttccggaacggccaggaagagaagactggggtggtgtccacaggcctgatccagaatggagactggaccttccagaccctggtgatgctggaaacagttcctcggagtggagaggtttacacctgccaagtggagcacccaagcctgacgagccctctcacagtggaatggagagcacggtctgaatctgcacagagcaagatgctgagtggagtcgggggcttcgtgctgggcctgctcttccttggggccgggctgttcatctacttcaggaatcagaaaggacactctggacttcagccaacaggtaataccttttcatcctctttaagaaacagatttggaggccaggcgcagtggctcacgcctgtaatcccagcactttgggaggccgaggcgggcgaatcatgaggtcaggagttcgagaccagcctgaccaacgtggtgaaaccccgtctctactaaaaatacaaaaaaaaatcagtcgggcgtggtggtgtgcgcctgtaatcccagctactcaggaggccaaggcaggagaatcgctggaacccgggaggcagaggttgcagtgagccgagattgggccactgcactccagcctaggtgacagagtgagaccccatctc

SEQ ID NO: 125450 - DNA, 801 bp, Artificial Sequence
  derived and/or modified sequence
atggtgtgcctgaagctgcccggcggcagctgcatgaccgccctgacagtgaccctcatggtcttaagttcgcccctcgcccttagcggcgacacccggccgaggttcctttggcagccaaagcgtgaatgtcattttttcaacggcaccgaacgcgttcgattcctggataggtacttctacaatcaggaagaaagcgtcagatttgacagcgacgttggggaatttcgggcagtgacagagctcggtaggcccgatgctgaatactggaatagccagaaagatatactcgaacaggctagggctgcagttgatacgtactgtagacataactatggtgtcgtggagagcttcacggttcagcgacgggtgcagcctaaggtaactgtatacccatcaaaaacccaaccactgcagcatcacaacttgctggtctgctccgttagcggtttctatcctggaagcatcgaggtgagatggttcctcaatggccaggaggagaaagccggtatggtgagcacaggactgattcagaacggagactggaccttccagactctggtgatgctcgagaccgtgccccgatctggagaagtctacacttgtcaagtggaacaccctagcgtaacaagtccgctaacagtagagtggagagccaggtctgagtcagcccagtccaagatgctgtctggtgtcggaggtttcgtgctgggactgctcttcctgggcgccggtctgttcatctacttcaggaaccaaaaggggcattcgggcctgcaaccgaccggtttcttgtcgtag

SEQ ID NO: 125451 - DNA, 753 bp, Artificial Sequence
  derived and/or modified sequence
ctgctgaagctgacccgggacttcccccagcggcacgagaagtaccagtcttgggccggcacctttcatttgtgcctgaagaagaacaagtacccagatagtagatcgaccttcattaagcacgcaggctcttacctgaagcggggcgaattcctttcaatccatactgcaatcacctgctttttcctgcagatctcagcgagatttctggagcaagtgaagcatgagtgtcatttttttaatggcactgagagagttcgcttcctggaccgctacttttatcatcaagaggaatatgtgcgttttgatagcgacgtgggggaatatagggctgtgacagagctgggtcgcccggacgcagagtactggaattcccagaaggatctcctcgagcaaagacgggctgaggtggatacatactgccgtcataattatggagtggttgagagctttacagttcagcgaagggtttacccagaggtgacagtgtaccccgccaagactcagcccttacagcaccacaacctcttagtgtgctccgtaaatgggttttatcccggcagtatcgaagtgcggtggttccgtaacgggcaagaagaaaaaactggggtggtttctacaggtctgatccaaaacggggattggacctttcagaccttggtgatgctggagacagtgccacgtagcggtgaggtgtatacttgccaggtcgaacacccaagtctcacatctccactgaccgtggagtggtag

SEQ ID NO: 125452 - DNA, 801 bp, Artificial Sequence
  derived and/or modified sequence
atggtgtgcctgaagttccccggcggcagctgcatggccgccctgaccgtgaccctcatggtgctgtcatcccctctggccctggccggggatactaggcctcgctttctggaacaggttaaacacgagtgtcactttttcaacggtactgagagggtgcgctttttagaccggtacttctatcatcaggaggaatacgttcgttttgatagcgatgttggagaatatcgagctgtgacagaactgggcagaccagatgccgagtactggaactcccagaaagaccttttggaacagaggcgcgctgaggtggacacctactgtaggcataattacggggtcgtggagtcctttacagtgcagcgtcgggtgtacccagaagtcacagtatatcctgctaagacccagcccctacaacaccacaatctgctcgtctgctctgttaacggattctatcccggttcaatcgaagtgcgatggtttcggaatggccaagaagagaaaacaggcgtggtatctaccgggctcattcagaatggcgactggacgttccaaaccctcgtgatgctcgagactgttccaaggtcaggagaggtgtacacctgccaggtagagcatccttccttgacttctccacttacggtagaatggagagcaaggtccgagagcgcccagagcaagatgctttccggtgtgggggggttcgttctgggactgctgtttctgggagctgggttatttatctactttagaaaccaaaagggccactcgggactacaaccgacagggtttctgagttag

SEQ ID NO: 125453 - DNA, 792 bp, Artificial Sequence
  derived and/or modified sequence
atggtgtgcctgaagttccccggcggcagctgcatggccgccctgactgtgacactaatggtgctgtcctcacctctcgcactagctggtgacaccaggcctagattcctggagcaggtcaagcacgaatgtcacttctttaatggcacagagcgagtgcgatttctggatagatacttctaccatcaggaggagtacgttcgctttgacagtgacgttggcgagtatagagcagtcacagaactgggtcggcccgatgctgagtattggaacagtcagaaggatctgctcgaacagcgtagggccgaggttgacacttattgccgacataattacggcgtcgtggagagctttaccgtacagcgccgcgtgtaccccgaagtgaccgtctacccggctaaaacccagcccctgcagcaccacaatttactggtctgtagcgtcaatggtttctatccgggaagcattgaagtcagatggtttcgaaacggacaagaggaaaaaacgggagtagtgagcaccggcctgatccaaaacggcgactggacatttcaaacattagtgatgcttgagaccgtccctcgctcgggtgaggtgtacacatgccaggtggaacacccaagtctgacatcacccctaactgtggaatggcgggccaggtctgagagtgcacagtctaagatgctcagcggcgttggtggctttgtcctaggactgctcttcttgggtgctggcttgttcatttatttccgcaatcaaaaaggacacagtggcttgcagccaacaggatag

SEQ ID NO: 125454 - DNA, 891 bp, Artificial Sequence
  derived and/or modified sequence
atggtgtgcctgaagttccccggcggcagctgcatggccgccctgactgtgactctgatggtgctctcttcccccttggcactggcgggtgacaccagaccacgttttttagagcaggtcaagcacgaatgccacttttttaatggtaccgagcgcgtgcgcttcttagaccgctacttctatcaccaggaggagtatgtaagatttgattctgacgtgggtgagtacagggccgtgaccgagctgggccgcccagacgcagagtattggaacagccaaaaggatctcttggagcaacgccgtgctgaagtggacacctattgcaggcacaactatggcgtggtggagtccttcaccgtccagcggcgggtgtacccggaagttaccgtttaccctgcaaagacccagcctctgcagcaccacaatctcctggtgtgcagcgtcaatggcttctaccctggatcaatcgaggtccgctggttcaggaatggccaggaggaaaagactggtgtagtatcaactggacttatccagaatggcgactggaccttccagaccctggtgatgctggaaacagtaccacgaagtggcgaagtttatacgtgtcaggtggagcacccctccttgacttccccactgaccgtcgagtggagagccaggtctgagtccgctcagtcaaaaatgctctctggggtggggggatttgttctgggcctgctttttctgggagctggactttttatctacttccgcaaccagaagggacactctggtctgcagccaactggcaatactttctcctcttctctgcgtaacagattcggaggacaggcgcaatggttaaccccagtgatacctgcgctctgggaggccgaggcgggggagagctag

SEQ ID NO: 125455 - DNA, 801 bp, Artificial Sequence
  derived and/or modified sequence
atggtgtgcctgaagttgcctgggggatcctgcatgactgccttaacagtgaccctgatggtcctctctagcccgctggccttgtcaggggacactcgccctcgatttctctggcagccaaaaagggaatgtcacttcttcaacggcacggagagggtgcggtttttggacaggtatttctacaatcaggaggaatcagtgcgtttcgatagtgatgtgggtgagttcagagcggtaaccgagctcggtagaccggacgccgaatattggaatagccagaaagatatcttggagcaagccagggcggcagtcgacacttactgccgtcacaactacggcgtcgttgagtcgttcaccgtccagagaagagttcaacctaaagtgacggtgtatccttcaaaaacccagcctctacagcatcacaaccttctggtgtgctccgtctctgggttttacccaggcagcatcgaagtgcgatggtttctcaatggacaggaggaaaaggctggcatggtgtcaacggggctcattcagaatggcgattggacgtttcaaacgctggtgatgctcgagaccgttcctcggtccggcgaggtatacacttgccaggtcgaacatccaagtgtgacatcgcctctgaccgttgaatggagggctcggtccgagagtgctcagtctaaaatgctgagtggagtcgggggtttcgtccttggtttgctctttctgggcgcaggccttttcatttacttcaggaatcaaaaaggccatagcggacttcagccaacagggttcctgtcatag

SEQ ID NO: 125456 - DNA, 753 bp, Artificial Sequence
  derived and/or modified sequence
ctgcttaagctgacccgggacttcccccagcgacatgaaaaatatcagagctgggcgggaacctttcatctgtgcctgaagaagaacaagtatccagacagccgctctacctttatcaagcacgcgggaagctatctaaaacgcggtgagtttttgtctatccacactgccatcacatgtttcttcttgcagatttctgccagatttctggaacaggtgaaacatgagtgtcattttttcaatggcacagaaagggtgcgtttcctggatcgatatttttaccaccaggaggagtatgtacgtttcgatagcgatgtgggcgagtatcgggcagtaaccgagcttggacgtcccgatgccgagtactggaacagtcagaaggatctcttggagcagcggagagctgaagttgacacctattgccgccataattatggcgttgtggaaagcttcaccgtgcaacggcgtgtctaccctgaagtcacagtctacccggctaagactcagcccctccagcaccacaatttactggtttgttccgtgaatgggttctatccaggctccatcgaagtgagatggtttaggaatgggcaggaagagaaaactggcgtcgtgtctaccggcctgattcagaacggggattggacatttcaaacactggtcatgctggaaactgtccccaggtccggggaggtgtatacctgccaagtggaacatcccagtctgacttcaccactgactgtagagtggtag

SEQ ID NO: 125457 - DNA, 801 bp, Artificial Sequence
  derived and/or modified sequence
atggtatgcctgaaatttcctggcggatcctgcatggcggctctcaccgtgacgctcatggtacttagttcccccttggccctggccggtgatactcgcccacgattcctggaacaagtaaagcatgagtgtcacttctttaacggcactgagagagtccggtttttagacagatacttttatcaccaggaggagtacgtccgatttgacagcgacgtgggggagtatcgggcagtgaccgaacttggacggcctgacgctgagtattggaattcccagaaagacctgctagaacagagacgcgctgaagtggatacctactgcaggcacaactatggcgtggtcgagtcgtttaccgtgcaacggcgagtgtacccagaggtgaccgtatatcccgcaaaaacgcagccattgcagcatcataatctccttgtttgctctgtcaatgggttttatccaggaagcattgaggtgagatggtttcgaaacggacaggaggagaagacaggcgtcgtcagcactgggttaattcagaatggggattggaccttccagactctggtgatgctagagacagtcccaaggtccggagaggtgtacacatgccaggtggaacacccctcgcttacatcaccgttaacggtggaatggcgggctcgtagcgaatccgcccagtctaagatgctgagtggggtgggcggatttgtgctcgggttgttgtttctgggtgcgggactgttcatctactttaggaaccagaaggggcattcaggactccagcctaccggcttcctgagttag

SEQ ID NO: 125458 - DNA, 792 bp, Artificial Sequence
  derived and/or modified sequence
atggtgtgtctgaaattcccagggggaagctgtatggcagccctcaccgttacactgatggtgttatccagtcccttagccctagcgggagatactcggcctaggttcttggaacaggtgaagcacgaatgtcatttctttaacgggaccgaaagggtaagattcctcgaccgttatttttaccatcaggaagagtacgtgaggtttgacagcgacgtcggggaataccgagcagtcacagagttaggcaggccagatgcagagtactggaattcccagaaagacttacttgagcagagacgggctgaagtcgatacctattgtagacataattatggagtagtggagagctttacggtccagaggcgcgtttacccagaagtgaccgtctatccagcgaaaacacagccgttgcagcaccataatctgctcgtctgcagcgttaatggattctaccccggttcaatagaggtgcggtggtttcgcaatggtcaggaagaaaagaccggcgtggtatcaacaggacttattcaaaacggagattggacttttcaaacactcgtaatgttggaaacagtgcctagatccggtgaagtctatacttgccaggttgaacatccatcactcacttcccctttgacagtagagtggcgagccagaagtgaatcagcgcagtctaagatgctctctggcgtcggaggctttgtcctgggactgctgttcctgggcgcagggttatttatctattttcgcaaccagaaagggcacagcggcctgcagccaactgggtag

SEQ ID NO: 125459 - DNA, 891 bp, Artificial Sequence
  derived and/or modified sequence
atggtgtgtttgaagttcccgggtgggagctgtatggccgctctgactgtcaccctgatggtgctgagctctccgctggctcttgcaggggatacacggccaagatttctagagcaggtgaagcacgagtgccatttttttaatgggactgaacgagtcaggtttctcgaccgctacttctaccatcaggaggagtacgtgcgcttcgatagtgatgtaggtgaatatagggccgtcaccgaattgggacgtcccgacgccgaatattggaatagccaaaaggatctgctggagcaaagacgggcagaggtggacacgtattgccgacacaattacggcgtggtcgagtcttttaccgtccagcgtagggtataccctgaagtgaccgtttaccccgctaagacacaacccctccagcaccacaacctgctagtctgctctgtgaatggattctacccaggaagcatagaggttcgctggttcagaaacggacaggaggaaaaaactggcgtcgtgagtacaggactaatacaaaatggagattggactttccagactctggtaatgttggaaaccgtccctcggtccggcgaggtctacacatgccaggtggagcacccgtctttgacgtcacctctgactgttgaatggcgagcacgcagcgaatcagcacagtctaagatgctttcgggggtgggaggttttgtcctcggcctcctgtttttaggggctggattgttcatttattttcggaaccagaaaggtcattccgggctccaaccaaccggaaatacatttagctcttctctgcggaaccgctttggaggacaggctcagtggttgaccccagtcattccagctctctgggaggccgaggcgggtgagtcttag

SEQ ID NO: 125460 - DNA, 801 bp, Artificial Sequence
  derived and/or modified sequence
atggtgtgcctgaagctgcccggcggcagctgcatgaccgccctgaccgtgaccctgatggtgctgagcagccccctggccctgagcggcgacaccagacccagattcctgtggcagcccaagagagagtgccacttcttcaacggcaccgagagagtgagattcctggacagatacttctacaaccaggaggagagcgtgagattcgacagcgacgtgggcgagttcagagccgtgaccgagctgggcagacccgacgccgagtactggaacagccagaaggacatcctggagcaggccagagccgccgtggacacctactgcagacacaactacggcgtggtggagagcttcaccgtgcagagaagagtgcagcccaaggtgaccgtgtaccccagcaagacccagcccctgcagcaccacaacctgctggtgtgcagcgtgagcggcttctaccccggcagcatcgaggtgagatggttcctgaacggccaggaggagaaggccggcatggtgagcaccggcctgatccagaacggcgactggaccttccagaccctggtgatgctggagaccgtgcccagaagcggcgaggtgtacacctgccaggtggagcaccccagcgtgaccagccccctgaccgtggagtggagagccagaagcgagagcgcccagagcaagatgctgagcggcgtgggcggcttcgtgctgggcctgctgttcctgggcgccggcctgttcatctacttcagaaaccagaagggccacagcggcctgcagcccaccggcttcctgagctag

SEQ ID NO: 125461 - DNA, 753 bp, Artificial Sequence
  derived and/or modified sequence
ctgctgaagctgaccagagacttcccccagagacacgagaagtaccagagctgggccggcaccttccacctgtgcctgaagaagaacaagtaccccgacagcagaagcaccttcatcaagcacgccggcagctacctgaagagaggcgagttcctgagcatccacaccgccatcacctgcttcttcctgcagatcagcgccagattcctggagcaggtgaagcacgagtgccacttcttcaacggcaccgagagagtgagattcctggacagatacttctaccaccaggaggagtacgtgagattcgacagcgacgtgggcgagtacagagccgtgaccgagctgggcagacccgacgccgagtactggaacagccagaaggacctgctggagcagagaagagccgaggtggacacctactgcagacacaactacggcgtggtggagagcttcaccgtgcagagaagagtgtaccccgaggtgaccgtgtaccccgccaagacccagcccctgcagcaccacaacctgctggtgtgcagcgtgaacggcttctaccccggcagcatcgaggtgagatggttcagaaacggccaggaggagaagaccggcgtggtgagcaccggcctgatccagaacggcgactggaccttccagaccctggtgatgctggagaccgtgcccagaagcggcgaggtgtacacctgccaggtggagcaccccagcctgaccagccccctgaccgtggagtggtag

SEQ ID NO: 125462 - DNA, 801 bp, Artificial Sequence
  derived and/or modified sequence
atggtgtgcctgaagttccccggcggcagctgcatggccgccctgaccgtgaccctgatggtgctgagcagccccctggccctggccggcgacaccagacccagattcctggagcaggtgaagcacgagtgccacttcttcaacggcaccgagagagtgagattcctggacagatacttctaccaccaggaggagtacgtgagattcgacagcgacgtgggcgagtacagagccgtgaccgagctgggcagacccgacgccgagtactggaacagccagaaggacctgctggagcagagaagagccgaggtggacacctactgcagacacaactacggcgtggtggagagcttcaccgtgcagagaagagtgtaccccgaggtgaccgtgtaccccgccaagacccagcccctgcagcaccacaacctgctggtgtgcagcgtgaacggcttctaccccggcagcatcgaggtgagatggttcagaaacggccaggaggagaagaccggcgtggtgagcaccggcctgatccagaacggcgactggaccttccagaccctggtgatgctggagaccgtgcccagaagcggcgaggtgtacacctgccaggtggagcaccccagcctgaccagccccctgaccgtggagtggagagccagaagcgagagcgcccagagcaagatgctgagcggcgtgggcggcttcgtgctgggcctgctgttcctgggcgccggcctgttcatctacttcagaaaccagaagggccacagcggcctgcagcccaccggcttcctgagctag

SEQ ID NO: 125463 - DNA, 792 bp, Artificial Sequence
  derived and/or modified sequence
atggtgtgcctgaagttccccggcggcagctgcatggccgccctgaccgtgaccctgatggtgctgagcagccccctggccctggccggcgacaccagacccagattcctggagcaggtgaagcacgagtgccacttcttcaacggcaccgagagagtgagattcctggacagatacttctaccaccaggaggagtacgtgagattcgacagcgacgtgggcgagtacagagccgtgaccgagctgggcagacccgacgccgagtactggaacagccagaaggacctgctggagcagagaagagccgaggtggacacctactgcagacacaactacggcgtggtggagagcttcaccgtgcagagaagagtgtaccccgaggtgaccgtgtaccccgccaagacccagcccctgcagcaccacaacctgctggtgtgcagcgtgaacggcttctaccccggcagcatcgaggtgagatggttcagaaacggccaggaggagaagaccggcgtggtgagcaccggcctgatccagaacggcgactggaccttccagaccctggtgatgctggagaccgtgcccagaagcggcgaggtgtacacctgccaggtggagcaccccagcctgaccagccccctgaccgtggagtggagagccagaagcgagagcgcccagagcaagatgctgagcggcgtgggcggcttcgtgctgggcctgctgttcctgggcgccggcctgttcatctacttcagaaaccagaagggccacagcggcctgcagcccaccggctag

SEQ ID NO: 125464 - DNA, 891 bp, Artificial Sequence
  derived and/or modified sequence
atggtgtgcctgaagttccccggcggcagctgcatggccgccctgaccgtgaccctgatggtgctgagcagccccctggccctggccggcgacaccagacccagattcctggagcaggtgaagcacgagtgccacttcttcaacggcaccgagagagtgagattcctggacagatacttctaccaccaggaggagtacgtgagattcgacagcgacgtgggcgagtacagagccgtgaccgagctgggcagacccgacgccgagtactggaacagccagaaggacctgctggagcagagaagagccgaggtggacacctactgcagacacaactacggcgtggtggagagcttcaccgtgcagagaagagtgtaccccgaggtgaccgtgtaccccgccaagacccagcccctgcagcaccacaacctgctggtgtgcagcgtgaacggcttctaccccggcagcatcgaggtgagatggttcagaaacggccaggaggagaagaccggcgtggtgagcaccggcctgatccagaacggcgactggaccttccagaccctggtgatgctggagaccgtgcccagaagcggcgaggtgtacacctgccaggtggagcaccccagcctgaccagccccctgaccgtggagtggagagccagaagcgagagcgcccagagcaagatgctgagcggcgtgggcggcttcgtgctgggcctgctgttcctgggcgccggcctgttcatctacttcagaaaccagaagggccacagcggcctgcagcccaccggcaacaccttcagcagcagcctgagaaacagattcggcggccaggcccagtggctgacccccgtgatccccgccctgtgggaggccgaggccggcgagagctag

SEQ ID NO: 125465 - DNA, 1280 bp, Artificial Sequence
  derived and/or modified sequence
cctataacttggaatgtgggtggaggggttcatagttctccctgagtgagacttgcctgcttctctggcccctggtcctgtcctgttctccagcatggtgtgtctgaagctccctggaggctcctgcatgacagcgctgacagtgacactgatggtgctgagctccccactggctttgtctggggacacccgaccacgtttcctgtggcagcctaagagggagtgtcatttcttcaatgggacggagcgggtgcggttcctggacagatacttctataaccaggaggagtccgtgcgcttcgacagcgacgtgggggagttccgggcggtgacggagctggggcggcctgacgctgagtactggaacagccagaaggacatcctggagcaggcgcgggccgcggtggacacctactgcagacacaactacggggttgtggagagcttcacagtgcagcggcgagtccaacctaaggtgactgtatatccttcaaagacccagcccctgcagcaccacaacctcctggtctgctctgtgagtggtttctatccaggcagcattgaagtcaggtggttcctgaacggccaggaagagaaggctgggatggtgtccacaggcctgatccagaatggagactggaccttccagaccctggtgatgctggaaacagttcctcgaagtggagaggtttacacctgccaagtggagcacccaagcgtgacaagccctctcacagtggaatggagagcacggtctgaatctgcacagagcaagatgctgagtggagtcgggggctttgtgctgggcctgctcttccttggggccgggctgttcatctacttcaggaatcagaaaggacactctggacttcagccaacaggattcctgagctgaaatgcagatgaccacattcaaggaagaactttctgccccggctttgcaggatgaaaagctttcctgcttggcagttattcttccacaagagagggctttctcaggacctggttgctactggttcggcaactgcagaaaatgtcctcccttgtggcttcctcagctcctgcccttggcctgaagtcccagcattgatggcagcgcctcatcttcaacttttgtgctcccctttgcctaaaccgtatggcctcccgtgcatctgtattcaccctgtatgacaaacacattacattattaaatgtttctcaaagatggagttaaaaaaaaaaaaaaaaaaaaaaaaaaaaaaaaaaaaaaaaaaaaaaaaaaaaaaaaaaaaaaaaaa

SEQ ID NO: 125466 - protein, 266 aa, Artificial Sequence
  derived and/or modified sequence
MVCLKLPGGSYMAKLTVTLMVLSSPLALAGDTRPRFLQQDKYECHFFNGTERVRFLHRDIYNQEEDLRFDSDVGEYRAVTELGRPDAEYWNSQKDFLEDRRAAVDTYCRHNYGVGESFTVQRRVEPKVTVYPARTQTLQHHNLLVCSVNGFYPGSIEVRWFRNSQEEKAGVVSTGLIQNGDWTFQTLVMLETVPRSGEVYTCQVEHPSVTSPLTVEWRAQSESAQSKMLSGVGGFVLGLLFLGAGLFIYFKNQKGHSGLHPTGLVS

SEQ ID NO: 125467 - DNA, 801 bp, Artificial Sequence
  derived and/or modified sequence
atggtctgtctcaaactgcccggaggcagctacatggctaagttgacggtgacactgatggtgctgtcctcccccttagccctggccggggatacccgaccgaggttcctgcagcaggataagtacgagtgccactttttcaacggaaccgaaagagttagattcctgcaccgcgatatctataaccaagaggaagatcttcggtttgactctgacgttggggaatacagagctgtaacagaattgggaagacctgacgctgagtattggaactctcagaaagactttctcgaagataggcgcgccgctgtggatacatattgtcgacacaactatggagtgggagagagcttcaccgtacaacggcgcgttgaacctaaagtcaccgtgtacccagcgaggacacagacgttacagcaccataatcttttagtgtgttctgtcaatggattttaccccgggtccatagaagtccggtggtttcggaatagccaagaggaaaaagcaggggtcgtttccaccggcctgatccagaacggcgattggacctttcagacactcgtgatgctggagaccgtcccccggtctggagaagtgtacacctgccaggtcgagcatccctctgtcacgtctccactcactgtggaatggcgtgctcagtcagagtcagcccaatcaaagatgttgtccggggtggggggcttcgtgttgggtctgttatttctgggggccggccttttcatttatttcaagaaccagaaaggacattctggactgcatccaacaggcttagtgtcctag

SEQ ID NO: 125468 - DNA, 801 bp, Artificial Sequence
  derived and/or modified sequence
atggtgtgcctgaagctgcccggcggcagctacatggccaagctgactgtgaccctgatggtgctgagcagccccctggccctggccggggacacccggccccgcttcctgcagcaggacaagtatgagtgccacttcttcaacggcacagagcgggtgcgcttcctgcaccgggacatctacaaccaggaggaggacctgcgctttgacagtgatgtgggggagtacagagctgtgacagagctgggccgcccagatgctgagtactggaacagccagaaggacttcctggaggaccggcgggctgctgtggacacctactgccgccacaactacggcgtgggggagagcttcaccgtgcagaggagagtggagcccaaggtgacagtgtacccagcccggacccagaccctgcagcaccacaacctgctggtgtgcagcgtgaatggcttctacccaggcagcattgaggtgcgctggttcaggaacagccaggaggagaaggccggcgtggtgtccacaggcctcatccagaatggagactggaccttccagaccctggtgatgctggagaccgtgcccaggtctggagaggtgtacacctgccaggtggagcaccccagcgtgaccagccccctgactgtggagtggagggcccagagcgagagcgcccagagcaagatgctgagcggcgtgggcggctttgtgctgggcctgctcttcctgggcgccggcctcttcatctacttcaagaaccagaagggccacagcggcctgcaccccaccggcctggtgtcctag

SEQ ID NO: 125469 - DNA, 1260 bp, Artificial Sequence
  derived and/or modified sequence
atagttctccctgagtgagacttgcctgctcctctggcccctggtcctgtcctgttctccagcatggtgtgtctgaagctccctggaggttcctacatggcaaagctgacagtgacactgatggtgctgagctccccactggctttggctggggacacccgaccacgtttcttgcagcaggataagtatgagtgtcatttcttcaacgggacggagcgggtgcggttcctgcacagagacatctataaccaagaggaggacttgcgcttcgacagcgacgtgggggagtaccgggcggtgacggagctggggcggcctgacgctgagtactggaacagccagaaggacttcctggaagacaggcgcgccgcggtggacacctactgcagacacaactacggggttggtgagagcttcacagtgcagcggcgagttgagcctaaggtgactgtgtatcctgcaaggacccagaccctgcagcaccacaacctcctggtctgctctgtgaatggtttctatccaggcagcattgaagtcaggtggttccggaacagccaggaagagaaggctggggtggtgtccacaggcctgattcagaatggagactggaccttccagaccctggtgatgctggaaacagttcctcgaagtggagaggtttacacctgccaagtggagcacccaagcgtgacgagccctctcacagtggaatggagagcacagtctgaatctgcacagagcaagatgctgagtggagtcgggggctttgtgctgggcctgctcttccttggggccgggctattcatctacttcaagaatcagaaagggcactctggacttcacccaacaggactcgtgagctgaagtgcagatgaccacattcaagggggaaccttctgccccagctttgcatgatgaaaagctttcctgcttggctcttattcttccacaagagaggactttctcaggccctggttgctaccggttcagcaactctgcagaaaatgtccatccttgtggcttcctcagctcctgcccttggcctgaagtcccagcattgatggcagtgcctcatcttcaactttagtgctcccctttacctaaccctacggcctcccatgcatctgtactccccctgtgtgccacaaatgcactacgttattaaatttttctgaagcccagagttaaaaatcatctgtccacctggctccaaagacaaaaaataaaaagaaaagaaaaagggaagattatttcctaata

SEQ ID NO: 125470 - DNA, 801 bp, Artificial Sequence
  derived and/or modified sequence
atggtgtgcctgaagctgcccggcggcagctacatggccaagctgaccgtgacactcatggtgctctccagcccgctggctctggctggcgataccaggccaaggttcttgcagcaggataaatacgagtgccatttcttcaacggtaccgaaagagtgcgctttctacaccgcgatatttataatcaggaggaggacctgagatttgattccgatgtgggtgaatatcgagctgtgacggagctaggccgacccgacgcagagtattggaattcccagaaggattttctggaggatcgcagagctgctgtcgacacatattgcaggcataattacggcgtgggggagagttttactgtgcaacgcagggtcgagcccaaggtcactgtgtatcctgcaagaacccagactctgcagcatcataacctgctggtctgcagtgtcaatggcttctacccaggcagtatagaggtgcgttggttcagaaactctcaggaagaaaaggccggagttgtgtccacaggcttaattcagaatggcgattggacctttcagaccctggtgatgttggaaactgtgccacgctcaggggaggtgtacacctgtcaggtggaacacccgagcgtgactagccccctgaccgtggagtggcgtgcccagagcgagagtgcacagtccaagatgctctctggggttggcgggttcgtgctcggccttctgtttctcggagccgggctatttatatactttaagaaccagaaaggtcattctggactacaccctaccggtttggtctcctag

SEQ ID NO: 125471 - DNA, 801 bp, Artificial Sequence
  derived and/or modified sequence
atggtgtgtcttaaattacccggaggatcttacatggccaagcttacagtgactttaatggtcctgtctagtcccttagcactggcaggggacacccgaccgcgattccttcagcaggataaatatgaatgtcatttctttaacggcacagagagggtccggttcctgcaccgagatatttacaaccaggaggaggacctgaggtttgacagtgacgttggtgagtatagagccgtgactgagctcggtaggccagacgcagagtattggaattctcaaaaagattttcttgaagatcggagagctgctgtggatacgtactgccggcataactatggtgttggcgagtctttcacagtccagcgcagagtggaaccaaaggtgactgtgtacccggcacgtacgcagacgttgcaacatcacaacttgctggtgtgcagcgtgaatggattctatccaggaagcatcgaagtcaggtggttccgcaactcccaagaggagaaagccggtgtagtgagtactggccttattcagaacggcgattggacttttcagacgttagtgatgcttgaaaccgttcctaggtcgggagaagtgtacacatgccaggtggagcatccatctgtcactagtccactgaccgtggaatggcgcgctcagagtgagtcagcccaatccaaaatgttgagcggcgtcggcggatttgtgctagggttgctcttcttgggggctgggttgttcatttacttcaagaatcagaaagggcactctgggctgcaccctaccggcctagtgtcgtag

SEQ ID NO: 125472 - DNA, 801 bp, Artificial Sequence
  derived and/or modified sequence
atggtgtgcctgaagctgcccggcggcagctacatggccaagctgaccgtgaccctgatggtgctgagcagccccctggccctggccggcgacaccagacccagattcctgcagcaggacaagtacgagtgccacttcttcaacggcaccgagagagtgagattcctgcacagagacatctacaaccaggaggaggacctgagattcgacagcgacgtgggcgagtacagagccgtgaccgagctgggcagacccgacgccgagtactggaacagccagaaggacttcctggaggacagaagagccgccgtggacacctactgcagacacaactacggcgtgggcgagagcttcaccgtgcagagaagagtggagcccaaggtgaccgtgtaccccgccagaacccagaccctgcagcaccacaacctgctggtgtgcagcgtgaacggcttctaccccggcagcatcgaggtgagatggttcagaaacagccaggaggagaaggccggcgtggtgagcaccggcctgatccagaacggcgactggaccttccagaccctggtgatgctggagaccgtgcccagaagcggcgaggtgtacacctgccaggtggagcaccccagcgtgaccagccccctgaccgtggagtggagagcccagagcgagagcgcccagagcaagatgctgagcggcgtgggcggcttcgtgctgggcctgctgttcctgggcgccggcctgttcatctacttcaagaaccagaagggccacagcggcctgcaccccaccggcctggtgagctag

SEQ ID NO: 125473 - DNA, 1171 bp, Artificial Sequence
  derived and/or modified sequence
ccagcatggtgtgtctgaagctccctggaggttcctacatggcaaagctgacagtgacactgatggtgctgagctccccactggctttggctggggacacccgaccacgtttcttgcagcaggataagtatgagtgtcatttcttcaacgggacggagcgggtgcggttcctgcacagagacatctataaccaagaggaggacttgcgcttcgacagcgacgtgggggagtaccgggcggtgacggagctggggcggcctgacgctgagtactggaacagccagaaggacttcctggaagacaggcgcgccgcggtggacacctactgcagacacaactacggggttggtgagagcttcacagtgcagcggcgagttgagcctaaggtgactgtgtatcctgcaaggacccagaccctgcagcaccacaacctcctggtctgctctgtgaatggtttctatccaggcagcattgaagtcaggtggttccggaacagccaggaagagaaggctggggtggtgtccacaggcctgattcagaatggagactggaccttccagaccctggtgatgctggaaacagttcctcgaagtggagaggtttacacctgccaagtggagcacccaagcgtgacgagccctctcacagtggaatggagagcacagtctgaatctgcacagagcaagatgctgagtggagtcgggggctttgtgctgggcctgctcttccttggggccgggctattcatctacttcaagaatcagaaagggcactctggacttcacccaacaggactcgtgagctgaagtgcagatgaccacattcaagggggaaccttctgccccagctttgcatgatgaaaagctttcctgcttggctcttattcttccacaagagaggactttctcaggccctggttgctaccggttcagcaactctgcagaaaatgtccatccttgtggcttcctcagctcctgcccttggcctgaagtcccagcattgatggcagtgcctcatcttcaactttagtgctcccctttacctaaccctacggcctcccatgcatctgtactccccctgtgtgccacaaatgcactacgttattaaatttttctgaagcccagagttaaaaatcatctgtccacctggctccaaagacaaaaaataaaaa

SEQ ID NO: 125474 - protein, 295 aa, Artificial Sequence
  derived and/or modified sequence
MEKMSRPLPLNPTFIPPPYGVLRSLLENPLKLPLHHEDAFSKDKDKEKKLDDESNSPTVPQSAFLGPTLWDKTLPYDGDTFQLEYMDLEEFLSENGIPPSPSQHDHSPHPPGLQPASSAAPSVMDLSSRASAPLHPGIPSPNCMQSPIRPGQLLPANRNTPSPIDPDTIQVPVGYEPDPADLALSSIPGQEMFDPRKRKFSEEELKPQPMIKKARKVFIPDDLKDDKYWARRRKNNMAAKRSRDARRLKENQIAIRASFLEKENSALRQEVADLRKELGKCKNILAKYEARHGPL

SEQ ID NO: 125475 - protein, 210 aa, Artificial Sequence
  derived and/or modified sequence
MDLEEFLSENGIPPSPSQHDHSPHPPGLQPASSAAPSVMDLSSRASAPLHPGIPSPNCMQSPIRPGQLLPANRNTPSPIDPDTIQVPVGYEPDPADLALSSIPGQEMFDPRKRKFSEEELKPQPMIKKARKVFIPDDLKDDKYWARRRKNNMAAKRSRDARRLKENQIAIRASFLEKENSALRQEVADLRKELGKCKNILAKYEARHGPL

SEQ ID NO: 125476 - DNA, 5607 bp, Artificial Sequence
  derived and/or modified sequence
actcttgtcagggccgcggcacatgggcggccggatgcgctgagcccggcgctgcggggccgcggagcgctggggagcagcggccgccggcgcggggaggggggtggggtgggacggcgcaccgcctccggtgctggcactaggggctggggtcggcgcggtgtcttctgcccttctgcagccgtcgacatttttttttctttctttttttcaattttgaacattttgcaaaacgaggggttcgaggcaggtgagagcatcctgcacgtcgccggggagcccgcgggcacttggcgcgctctcctgggaccgtctgcactggaaacccgaaagtttttttttaatatatatttttatgcagatgtatttataaagatataagtaatttttttcttcccttttctccaccgccttgagagcgagtacttttggcaaaggacggaggaaaagctcagcaacattttagggggcggttgtttctttcttatttctttttttaaggggaaaaaatttgagtgcatcgcgatggagaaaatgtcccgaccgctccccctgaatcccacctttatcccgcctccctacggcgtgctcaggtccctgctggagaacccgctgaagctcccccttcaccacgaagacgcatttagtaaagataaagacaaggaaaagaagctggatgatgagagtaacagcccgacggtcccccagtcggcattcctggggcctaccttatgggacaaaacccttccctatgacggagatactttccagttggaatacatggacctggaggagtttttgtcagaaaatggcattccccccagcccatctcagcatgaccacagccctcaccctcctgggctgcagccagcttcctcggctgccccctcggtcatggacctcagcagccgggcctctgcaccccttcaccctggcatcccatctccgaactgtatgcagagccccatcagaccaggtcagctgttgccagcaaaccgcaatacaccaagtcccattgatcctgacaccatccaggtcccagtgggttatgagccagacccagcagatcttgccctttccagcatccctggccaggaaatgtttgaccctcgcaaacgcaagttctctgaggaagaactgaagccacagcccatgatcaagaaagctcgcaaagtcttcatccctgatgacctgaaggatgacaagtactgggcaaggcgcagaaagaacaacatggcagccaagcgctcccgcgacgcccggaggctgaaagagaaccagatcgccatccgggcctcgttcctggagaaggagaactcggccctccgccaggaggtggctgacttgaggaaggagctgggcaaatgcaagaacatacttgccaagtatgaggccaggcacgggcccctgtaggatggcatttttgcaggctggctttggaatagatggacagtttgtttcctgtctgatagcaccacacgcaaaccaacctttctgacatcagcactttaccagaggcataaacacaactgactcccattttggtgtgcatctgtgtgtgtgtgcgtgtatatgtgcttgtgctcatgtgtgtggtcagcggtatgtgcgtgtgcgtgttcctttgctcttgccattttaaggtagccctctcatcgtcttttagttccaacaaagaaaggtgccatgtctttactagactgaggagccctctcgcgggtctcccatcccctccctccttcactcctgcctcctcagctttgcttcatgttcgagcttacctactcttccaggactctctgcttggattcactaaaaagggccctggtaaaatagtggatctcagtttttaagagtacaagctcttgtttctgtttagtccgtaagttaccatgctaatgaggtgcacacaataacttagcactactccgcagctctagtcctttataagttgctttcctcttactttcagttttggtgataatcgtcttcaaattaaagtgctgtttagatttattagatcccatatttacttactgctatctactaagtttccttttaattctaccaaccccagataagtaagagtactattaatagaacacagagtgtgtttttgcactgtctgtacctaaagcaataatcctattgtacgctagagcatgctgcctgagtattactagtggacgtaggatattttccctacctaagaatttcactgtcttttaaaaaacaaaaagtaaagtaatgcatttgagcatggccagactattccctaggacaaggaagcagagggaaatgggaggtctaaggatgaggggttaatttatcagtacatgagccaaaaactgcgtcttggattagcctttgacattgatgtgttcggttttgttgttccccttccctcacaccctgcctcgcccccacttttctagttaactttttccatatccctcttgacattcaaaacagttacttaagattcagttttcccactttttggtaatatatatatttttgtgaattatactttgttgtttttaaaaagaaaatcagttgattaagttaataagttgatgttttctaaggccctttttcctagtggtgtcatttttgaatgcctcataaattaatgattctgaagcttatgtttcttattctctgtttgcttttgaacgtatgtgctcttataaagtggacttctgaaaaatgaatgtaaaagacactggtgtatctcagaaggggatggtgttgtcacaaactgtggttaatccaatcaatttaaatgtttactatagaccaaaaggagagattattaaatcgtttaatgtttatacagagtaattataggaagttcttttttgtacagtatttttcagatataaatactgacaatgtattttggaagacatatattatatatagaaaagaggagaggaaaactattccatgttttaaaattatatagcaaagatatatattcaccaatgttgtacagagaagaagtgcttgggggtttttgaagtctttaatattttaagccctatcactgacacatcagcatgttttctgctttaaattaaaattttatgacagtatcgaggcttgtgatgacgaatcctgctctaaaatacacaaggagctttcttgtttcttattaggcctcagaaagaagtcagttaacgtcacccaaaagcacaaaatggattttagtcaaatatttattggatgatacagtgttttttaggaaaagcatctgccacaaaaatgttcacttcgaaattctgagttcctggaatggcacgttgctgccagtgccccagacagttcttttctaccctgcgggcccgcacgttttatgaggttgatatcggtgctatgtgtttggtttataatttgatagatgtttgactttaaagatgattgttcttttgtttcattaagttgtaaaatgtcaagaaattctgctgttacgacaaagaaacattttacgctagattaaaatatcctttcatcaatgggattttctagtttcctgccttcagagtatctaatcctttaatgatctggtggtctcctcgtcaatccatcagcaatgcttctctcatagtgtcatagacttgggaaacccaaccagtaggatatttctacaaggtgttcattttgtcacaagctgtagataacagcaagagatgggggtgtattggaattgcaatacattgttcaggtgaataataaaatcaaaaacttttgcaatcttaagcagagataaataaaagatagcaatatgagacacaggtggacgtagagttggcctttttacaggcaaagaggcgaattgtagaattgttagatggcaatagtcattaaaaacatagaaaaatgatgtctttaagtggagaattgtggaaggattgtaacatggaccatccaaatttatggccgtatcaaatggtagctgaaaaaactatatttgagcactggtctctcttggaattagatgtttatatcaaatgagcatctcaaatgttttctgcagaaaaaaataaaaagattctaataaaatgtattctcttgtgtgccaggagaggtttcagaaacctacctcgtcttacaaatttaaacactttggagtctgtacaggtgccttatatgtaggtcattgtcacgatacacacacacgaacactccctctggactggctgcctctccatccagggcagttaactagcaaacaaggcagatctgcttcatggagcgggaggccatggcttgactctgagtgatttgggtcaaccggagtcagacgcatgtctgcacgctgcagctattatgagagtccctttgtcatttttcaccttttcatcctaagcatctttcagagattaattatttggccattaacaatgaatccaaatcatatcatactgacatcatctagacatgatttggaaggaacagcttaggacctcctgatgaggtcacattgttgtttcttttaactagacttggcaaagaaaggcaaaaattgaccagcctatctttctgctggtgctgccttaaggaggtagtttgttgaggggagggctgtagatcattacttctttctcttcaggaagtggccactttgaaccattcaaataccacattaggcaagactgtgataggccttttgtcttcaaatacaacaggcctccactgacccatccctcaaagcagaaggaccctttgaggagagtacagatgggattccacagtggggtgggtggaatggaaacctgtactagaccacccagaggttccttctaacccactggtttggtggggaactcacagtaattccaaatgtacaatcagatgtctagggtctgttttcggaagaagcaagaattatcagtggcaccctccccactgcccccagtgtaaaacaatagacattctgtgaaatgcaaagctattctttggtttttctagtagtttatctcattttaccctattcttcctttaaggaaaactcaatctttatcacagtcaattagagcgatcccaaggcatgggaccaggcctgcttgcctatgtgtgatggcaattggagatctggatttagcactggggtctcagcaccctgcaggtgtctgagactaagtgatctgccctccaggtggcgatcaccttctgctcctaggtacccccactggcaaggccaaggtctcctccacgttttttctgcaattaataatgtcatttaaaaaatgagcaaagccttatccgaatcggatatagcaactaaagtcaatacattttgcaggaggctaagtgtaagagtgtgtgtgtgtgtgtgtgcgtgcatgtgtgtgtgtgtgtatgtgtgtgaataagtcgacataaagtctttaattttgagcaccttaccaaacataacaataatccattatccttttggcaacaccacaaagatcgcatctgttaaacaggtacaagttgacatgaggttagtttaattgtacaccatgatattggtggtatttatgctgttaagtccaaacctttatctgtctgttattcttaatgttgaataaactttgaattttttcctttcaaaaaaaa

SEQ ID NO: 125477 - DNA, 888 bp, Artificial Sequence
  derived and/or modified sequence
atggagaagatgtctcgcccactccccctcaatcccacttttataccccccccatacggcgtgctgcgctccttgctggagaaccctcttaaattgccattgcaccacgaagatgctttctccaaggataaggataaggaaaagaagctggatgacgaatccaatagtcccacagtgccccagagcgctttcctcggtccaactctgtgggacaagacacttccttacgatggagatacattccagcttgaatacatggacctggaagaatttctcagtgagaatggcatcccacccagtccttcacagcacgaccacagcccccaccctcccggcctccagcccgccagctccgcggccccctctgtgatggacctctcctcacgcgcgagcgctcctttgcatcctggaattccgagcccaaactgcatgcaatcgccaatcaggccagggcaacttctgccagccaacaggaacacccctagtcctatcgatcctgatacgatccaggtgccagtgggttacgagccagaccccgcggatttggctctttcttcgatccccggacaggagatgtttgatccccgcaagagaaaattctcagaagaggaattaaagccacagccaatgatcaaaaaggcccgtaaggtgtttattccagacgacctgaaggatgacaaatactgggcccgaaggcggaaaaacaatatggccgcgaagcgatcccgggacgcccggagactgaaagaaaatcagatagcgattcgtgcatctttcctggagaaggaaaacagtgccctgagacaggaagttgcggacttacgcaaggaactcggaaaatgcaaaaatattttggcaaagtacgaagcaagacacgggccactctag

SEQ ID NO: 125478 - DNA, 633 bp, Artificial Sequence
  derived and/or modified sequence
atggacctcgaggagttcttgagcgagaatgggatcccacccagcccttctcagcatgatcactcaccacatccccccggcctccagccggccagttcggccgctccaagcgtgatggacttgtcatctcgtgcaagtgctccactacaccctgggatccctagtccaaattgtatgcagagcccaataaggccagggcaacttctgccagccaaccggaacaccccaagtcctatcgatcccgatacgatccaggtaccagtcggatacgagcccgaccccgccgacctagcactgtcgagcatcccaggccaggagatgttcgaccctcggaagcgaaaatttagcgaagaagagctaaagccacagcctatgattaaaaaagcgagaaaagtctttatccccgacgacttaaaagatgacaagtactgggcccgccgcaggaaaaataacatggcagcgaagcggtcaagagacgcccgacggttaaaggaaaaccagattgccatcagggcctcctttttagagaaagagaattccgctctgaggcaggaagtcgctgatctccggaaggaactggggaaatgcaagaacattctggccaagtacgaagccagacatggccctctttag

SEQ ID NO: 125479 - DNA, 5599 bp, Artificial Sequence
  derived and/or modified sequence
actcttgtcagggccgcggcacatgggcggccggatgcgctgagcccggcgctgcggggccgcggagcgctggggagcagcggccgccggcgcggggaggggggtggggtgggacggcgcaccgcctccggtgctggcactaggggctggggtcggcgcggtgtcttctgcccttctgcagccgtcgacatttttttttctttctttttttcaattttgaacattttgcaaaacgaggggttcgaggcaggtgagagcatcctgcacgtcgccggggagcccgcgggcacttggcgcgctctcctgggaccgtctgcactggaaacccgaaagtttttttttaatatatatttttatgcagatgtatttataaagatataagtaatttttttcttcccttttctccaccgccttgagagcgagtacttttggcaaaggacggaggaaaagctcagcaacattttagggggcggttgtttctttcttatttctttttttaaggggaaaaaatttgagtgcatcgcgatggagaaaatgtcccgaccgctccccctgaatcccacctttatcccgcctccctacggcgtgctcaggtccctgctggagaacccgctgaagctcccccttcaccacgaagacgcatttagtaaagataaagacaaggaaaagaagctggatgatgagagtaacagcccgacggtcccccagtcggcattcctggggcctaccttatgggacaaaacccttccctatgacggagatactttccagttggaatacatggacctggaggagtttttgtcagaaaatggcattccccccagcccatctcagcatgaccacagccctcaccctcctgggctgcagccagcttcctcggctgccccctcggtcatggacctcagcagccgggcctctgcaccccttcaccctggcatcccatctccgaactgtatgcagagccccatcagaccaggtcagctgttgccagcaaaccgcaatacaccaagtcccattgatcctgacaccatccaggtcccagtgggttatgagccagacccagcagatcttgccctttccagcatccctggccaggaaatgtttgaccctcgcaaacgcaagttctctgaggaagaactgaagccacagcccatgatcaagaaagctcgcaaagtcttcatccctgatgacctgaaggatgacaagtactgggcaaggcgcagaaagaacaacatggcagccaagcgctcccgcgacgcccggaggctgaaagagaaccagatcgccatccgggcctcgttcctggagaaggagaactcggccctccgccaggaggtggctgacttgaggaaggagctgggcaaatgcaagaacatacttgccaagtatgaggccaggcacgggcccctgtaggatggcatttttgcaggctggctttggaatagatggacagtttgtttcctgtctgatagcaccacacgcaaaccaacctttctgacatcagcactttaccagaggcataaacacaactgactcccattttggtgtgcatctgtgtgtgtgtgcgtgtatatgtgcttgtgctcatgtgtgtggtcagcggtatgtgcgtgtgcgtgttcctttgctcttgccattttaaggtagccctctcatcgtcttttagttccaacaaagaaaggtgccatgtctttactagactgaggagccctctcgcgggtctcccatcccctccctccttcactcctgcctcctcagctttgcttcatgttcgagcttacctactcttccaggactctctgcttggattcactaaaaagggccctggtaaaatagtggatctcagtttttaagagtacaagctcttgtttctgtttagtccgtaagttaccatgctaatgaggtgcacacaataacttagcactactccgcagctctagtcctttataagttgctttcctcttactttcagttttggtgataatcgtcttcaaattaaagtgctgtttagatttattagatcccatatttacttactgctatctactaagtttccttttaattctaccaaccccagataagtaagagtactattaatagaacacagagtgtgtttttgcactgtctgtacctaaagcaataatcctattgtacgctagagcatgctgcctgagtattactagtggacgtaggatattttccctacctaagaatttcactgtcttttaaaaaacaaaaagtaaagtaatgcatttgagcatggccagactattccctaggacaaggaagcagagggaaatgggaggtctaaggatgaggggttaatttatcagtacatgagccaaaaactgcgtcttggattagcctttgacattgatgtgttcggttttgttgttccccttccctcacaccctgcctcgcccccacttttctagttaactttttccatatccctcttgacattcaaaacagttacttaagattcagttttcccactttttggtaatatatatatttttgtgaattatactttgttgtttttaaaaagaaaatcagttgattaagttaataagttgatgttttctaaggccctttttcctagtggtgtcatttttgaatgcctcataaattaatgattctgaagcttatgtttcttattctctgtttgcttttgaacgtatgtgctcttataaagtggacttctgaaaaatgaatgtaaaagacactggtgtatctcagaaggggatggtgttgtcacaaactgtggttaatccaatcaatttaaatgtttactatagaccaaaaggagagattattaaatcgtttaatgtttatacagagtaattataggaagttcttttttgtacagtatttttcagatataaatactgacaatgtattttggaagacatatattatatatagaaaagaggagaggaaaactattccatgttttaaaattatatagcaaagatatatattcaccaatgttgtacagagaagaagtgcttgggggtttttgaagtctttaatattttaagccctatcactgacacatcagcatgttttctgctttaaattaaaattttatgacagtatcgaggcttgtgatgacgaatcctgctctaaaatacacaaggagctttcttgtttcttattaggcctcagaaagaagtcagttaacgtcacccaaaagcacaaaatggattttagtcaaatatttattggatgatacagtgttttttaggaaaagcatctgccacaaaaatgttcacttcgaaattctgagttcctggaatggcacgttgctgccagtgccccagacagttcttttctaccctgcgggcccgcacgttttatgaggttgatatcggtgctatgtgtttggtttataatttgatagatgtttgactttaaagatgattgttcttttgtttcattaagttgtaaaatgtcaagaaattctgctgttacgacaaagaaacattttacgctagattaaaatatcctttcatcaatgggattttctagtttcctgccttcagagtatctaatcctttaatgatctggtggtctcctcgtcaatccatcagcaatgcttctctcatagtgtcatagacttgggaaacccaaccagtaggatatttctacaaggtgttcattttgtcacaagctgtagataacagcaagagatgggggtgtattggaattgcaatacattgttcaggtgaataataaaatcaaaaacttttgcaatcttaagcagagataaataaaagatagcaatatgagacacaggtggacgtagagttggcctttttacaggcaaagaggcgaattgtagaattgttagatggcaatagtcattaaaaacatagaaaaatgatgtctttaagtggagaattgtggaaggattgtaacatggaccatccaaatttatggccgtatcaaatggtagctgaaaaaactatatttgagcactggtctctcttggaattagatgtttatatcaaatgagcatctcaaatgttttctgcagaaaaaaataaaaagattctaataaaatgtattctcttgtgtgccaggagaggtttcagaaacctacctcgtcttacaaatttaaacactttggagtctgtacaggtgccttatatgtaggtcattgtcacgatacacacacacgaacactccctctggactggctgcctctccatccagggcagttaactagcaaacaaggcagatctgcttcatggagcgggaggccatggcttgactctgagtgatttgggtcaaccggagtcagacgcatgtctgcacgctgcagctattatgagagtccctttgtcatttttcaccttttcatcctaagcatctttcagagattaattatttggccattaacaatgaatccaaatcatatcatactgacatcatctagacatgatttggaaggaacagcttaggacctcctgatgaggtcacattgttgtttcttttaactagacttggcaaagaaaggcaaaaattgaccagcctatctttctgctggtgctgccttaaggaggtagtttgttgaggggagggctgtagatcattacttctttctcttcaggaagtggccactttgaaccattcaaataccacattaggcaagactgtgataggccttttgtcttcaaatacaacaggcctccactgacccatccctcaaagcagaaggaccctttgaggagagtacagatgggattccacagtggggtgggtggaatggaaacctgtactagaccacccagaggttccttctaacccactggtttggtggggaactcacagtaattccaaatgtacaatcagatgtctagggtctgttttcggaagaagcaagaattatcagtggcaccctccccactgcccccagtgtaaaacaatagacattctgtgaaatgcaaagctattctttggtttttctagtagtttatctcattttaccctattcttcctttaaggaaaactcaatctttatcacagtcaattagagcgatcccaaggcatgggaccaggcctgcttgcctatgtgtgatggcaattggagatctggatttagcactggggtctcagcaccctgcaggtgtctgagactaagtgatctgccctccaggtggcgatcaccttctgctcctaggtacccccactggcaaggccaaggtctcctccacgttttttctgcaattaataatgtcatttaaaaaatgagcaaagccttatccgaatcggatatagcaactaaagtcaatacattttgcaggaggctaagtgtaagagtgtgtgtgtgtgtgtgtgcgtgcatgtgtgtgtgtgtgtatgtgtgtgaataagtcgacataaagtctttaattttgagcaccttaccaaacataacaataatccattatccttttggcaacaccacaaagatcgcatctgttaaacaggtacaagttgacatgaggttagtttaattgtacaccatgatattggtggtatttatgctgttaagtccaaacctttatctgtctgttattcttaatgttgaataaactttgaattttttcctttc

SEQ ID NO: 125480 - DNA, 1385 bp, Artificial Sequence
  derived and/or modified sequence
acatttaaaagagcttcgggcacccggcctccctgggtcccgctcctgcggcgcgggtgggaggtgtaacttgacagcatttagtaaagataaagacaaggaaaagaagctggatgatgagagtaacagcccgacggtcccccagtcggcattcctggggcctaccttatgggacaaaacccttccctatgacggagatactttccagttggaatacatggacctggaggagtttttgtcagaaaatggcattccccccagcccatctcagcatgaccacagccctcaccctcctgggctgcagccagcttcctcggctgccccctcggtcatggacctcagcagccgggcctctgcaccccttcaccctggcatcccatctccgaactgtatgcagagccccatcagaccaggtcagctgttgccagcaaaccgcaatacaccaagtcccattgatcctgacaccatccaggtcccagtgggttatgagccagacccagcagatcttgccctttccagcatccctggccaggaaatgtttgaccctcgcaaacgcaagttctctgaggaagaactgaagccacagcccatgatcaagaaagctcgcaaagtcttcatccctgatgacctgaaggatgacaagtactgggcaaggcgcagaaagaacaacatggcagccaagcgctcccgcgacgcccggaggctgaaagagaaccagatcgccatccgggcctcgttcctggagaaggagaactcggccctccgccaggaggtggctgacttgaggaaggagctgggcaaatgcaagaacatacttgccaagtatgaggccaggcacgggcccctgtaggatggcatttttgcaggctggctttggaatagatggacagtttgtttcctgtctgatagcaccacacgcaaaccaacctttctgacatcagcactttaccagaggcataaacacaactgactcccattttggtgtgcatctgtgtgtgtgtgcgtgtatatgtgcttgtgctcatgtgtgtggtcagcggtatgtgcgtgtgcgtgttcctttgctcttgccattttaaggtagccctctcatcgtcttttagttccaacaaagaaaggtgccatgtctttactagactgaggagccctctcgcgggtctcccatcccctccctccttcactcctgcctcctcagctttgcttcatgttcgagcttacctactcttccaggactctctgcttggattcactaaaaagggccctggtaaaatagtggatctcagtttttaagagtacaagctcttgtttctgtttagtccgtaagttaccatgctaatgaggtgcacacaataacttagcactactccgcagctctagtcctttat

SEQ ID NO: 125481 - DNA, 888 bp, Artificial Sequence
  derived and/or modified sequence
atggagaagatgagccggcccctgcccctgaaccccaccttcatccccccaccctatggagtgctgcggagcctgctggagaaccccctgaagctgcccctgcaccatgaagatgccttcagcaaggacaaggacaaggagaagaagctggatgatgagagcaacagccccaccgtgccccagagcgccttcctgggccccaccctgtgggacaagaccctgccctatgatggagacaccttccagctggagtacatggacctggaggagttcctgtctgaaaatggcatcccccccagccccagccagcacgaccacagcccccaccccccaggcctgcagcctgccagcagcgctgcccccagcgtgatggacctgagcagccgggccagcgcccccctgcaccctggcatccccagccccaactgcatgcagagccccatccggcccggccagctgctgcctgccaacagaaacacccccagccccatcgaccctgacaccatccaggtgcctgtgggctatgagccagaccctgctgacctggccctgagcagcatccctggccaggagatgtttgaccccaggaagaggaagttcagcgaggaggagctgaagccccagcccatgatcaagaaggccaggaaggtgttcatcccagatgacctgaaggatgacaagtactgggcccggcggaggaagaacaacatggccgccaagaggagcagagatgcccggcggctgaaggagaaccagatcgccatccgggccagcttcctggagaaggaaaattctgccctgcggcaggaggtggccgacctgaggaaggagctgggcaagtgcaagaacatcctggccaagtatgaggcccggcacggccccctgtag

SEQ ID NO: 125482 - DNA, 633 bp, Artificial Sequence
  derived and/or modified sequence
atggacctggaggagttcctgtctgaaaatggcatcccccccagccccagccagcacgaccacagcccccaccccccaggcctgcagcctgccagcagcgctgcccccagcgtgatggacctgagcagccgggccagcgcccccctgcaccctggcatccccagccccaactgcatgcagagccccatccggcccggccagctgctgcctgccaacagaaacacccccagccccattgatcctgacaccatccaggtgcctgtgggctatgagccagaccctgctgacctggccctgagcagcatccctggccaggagatgtttgaccccaggaagaggaagttcagcgaggaggagctgaagccccagcccatgatcaagaaggccaggaaggtgttcatcccagatgacctgaaggatgacaagtactgggcccggcggaggaagaacaacatggccgccaagaggagcagagatgcccggcggctgaaggagaaccagatcgccatccgggccagcttcctggagaaggagaacagcgccctgcggcaggaggtggccgacctgaggaaggagctgggcaagtgcaagaacatcctggccaagtatgaggcccggcacggccccctgtag

SEQ ID NO: 125483 - DNA, 888 bp, Artificial Sequence
  derived and/or modified sequence
atggagaagatgagccggcccctgcccctgaaccccaccttcatcccacccccctatggcgtgctgcgctctctcctagagaacccactaaaactaccgttgcaccacgaggatgcttttagtaaagataaagataaagagaagaagctagacgacgagtccaacagccctaccgtgccgcaatccgcgttcctcgggcccacactgtgggacaaaacactcccctatgacggcgacacctttcagctggagtatatggatctggaagagttcctttctgagaatggaattcctccaagccctagtcaacacgatcacagtcctcatcctccgggcctgcagcctgcatcttcagccgccccaagcgtcatggatttgtcttccagagcgtccgcccctctccatcctggcattccaagccctaactgtatgcagtcgcctatcagacccggccagcttctgcctgctaatagaaatactcccagtccgatcgatcccgacacaatccaggtgcccgttgggtacgagcctgaccctgctgaccttgccttgtcctctatcccaggccaggaaatgtttgaccctcgaaaacgaaagttctctgaagaggaactgaagccgcagccaatgatcaagaaggctcgaaaagtcttcatacccgacgacctgaaagacgacaagtattgggcgcggcggcgcaagaacaacatggcggctaagcggtcacgagacgctagacggctcaaggagaatcaaatcgccatccgggcctctttcctggagaaggagaattccgctctccgccaggaggtcgcagacttacggaaggaacttggtaaatgtaagaatattttagctaagtacgaggccagacatggccccctgtag

SEQ ID NO: 125484 - DNA, 633 bp, Artificial Sequence
  derived and/or modified sequence
atggacctggaggagttcctgagcgagaacggcatcccccccagcccgtctcagcatgatcactctccacatccacctggattacagccagcttccagcgccgcccctagcgtcatggatttaagtagccgcgcatctgcccctctgcaccccgggattccatctccaaattgcatgcagtctccaattcgtcctgggcagttactgcccgcaaacagaaatacgccaagcccaatcgaccctgataccatacaggtgccagtcgggtatgaaccagaccccgcggatctcgccctgtctagcattccaggacaggaaatgtttgatcccagaaaacgtaaattttccgaggaggaactgaaacctcagcctatgattaaaaaagctcgaaaggtctttatccccgatgatctgaaggatgacaagtactgggcacggagaaggaaaaataatatggcggctaaacgaagtcgcgacgccaggcggctaaaagaaaatcagatcgcaatccgagcctcgttcctggaaaaggagaatagcgcgctgcgacaggaagtcgctgacctgcgcaaggagttgggaaaatgtaagaatattttggctaagtacgaggcaagacatgggcccctgtag

SEQ ID NO: 125485 - DNA, 888 bp, Artificial Sequence
  derived and/or modified sequence
atggagaagatgagtcgaccactacctctgaaccctactttcataccccctccctatggcgttctgagatctctattggaaaatccactgaagctaccacttcaccacgaggatgcgttcagcaaagataaggataaggaaaaaaaactggacgacgagagcaacagtcccacagtcccgcagtccgcattccttggtcccacactgtgggacaaaacattaccttacgacggcgatacatttcagctggagtatatggatctggaagagtttctttccgaaaacggcatccctccctctccctcgcagcacgatcattctccacatccccctgggctccagcccgctagcagcgccgctcctagtgttatggatctctcctcgcgggcttctgcgcctctccaccccggaatcccttccccaaattgtatgcagtctcccatccggcctggccagttactcccggcaaatagaaatacaccttccccaatagaccctgacaccatccaggttccagtaggctacgagcctgacccagccgacctggcgctctcctctatccccggtcaggagatgtttgatcctcgtaaaaggaagttctctgaggaggaactcaagccacaaccaatgatcaagaaagcacgtaaagtgtttatccccgatgacctgaaggatgacaaatattgggcacgcagaagaaagaataatatggccgcaaagcggagtagggatgccagacgtctaaaggagaaccagatagccataagagcatccttcctggaaaaggaaaattccgctcttaggcaggaagtggcagacttaagaaaagagttaggaaaatgcaaaaacatcttagcaaaatacgaggccagacatggacccctttag

SEQ ID NO: 125486 - DNA, 633 bp, Artificial Sequence
  derived and/or modified sequence
atggacttggaagagtttctgtccgagaatggcatcccccctagcccatcccagcacgatcacagcccccatccccctggacttcagccagcctccagtgcagccccttctgtgatggacctgtccagtcgggcttccgcccctctgcacccaggcatccctagcccaaactgcatgcagagccctatacggcctggccaactactcccagctaacaggaatacaccgagtcccattgatcccgacaccattcaagtccccgtaggttacgaacccgatcccgcagacttagccttgagcagcatccctggccaggagatgttcgacccaaggaagagaaaattttccgaggaagagcttaagccccagcccatgatcaaaaaagccaggaaggtttttatccctgatgatttaaaagatgacaagtactgggcccgtagacgtaaaaacaacatggcagctaagaggtctagagatgccagaaggttgaaagaaaatcagatcgccatacgagcgagtttcttagaaaaagaaaatagcgccctcaggcaagaagtggcagacctcaggaaagagttgggaaaatgcaaaaacatactcgcaaaatatgaggccaggcatggaccactgtag

SEQ ID NO: 125487 - DNA, 888 bp, Artificial Sequence
  derived and/or modified sequence
atggagaagatgagcagacccctgcccctgaaccccaccttcatcccccccccctacggcgtgctgagaagcctgctggagaaccccctgaagctgcccctgcaccacgaggacgccttcagcaaggacaaggacaaggagaagaagctggacgacgagagcaacagccccaccgtgccccagagcgccttcctgggccccaccctgtgggacaagaccctgccctacgacggcgacaccttccagctggagtacatggacctggaggagttcctgagcgagaacggcatcccccccagccccagccagcacgaccacagcccccacccccccggcctgcagcccgccagcagcgccgcccccagcgtgatggacctgagcagcagagccagcgcccccctgcaccccggcatccccagccccaactgcatgcagagccccatcagacccggccagctgctgcccgccaacagaaacacccccagccccatcgaccccgacaccatccaggtgcccgtgggctacgagcccgaccccgccgacctggccctgagcagcatccccggccaggagatgttcgaccccagaaagagaaagttcagcgaggaggagctgaagccccagcccatgatcaagaaggccagaaaggtgttcatccccgacgacctgaaggacgacaagtactgggccagaagaagaaagaacaacatggccgccaagagaagcagagacgccagaagactgaaggagaaccagatcgccatcagagccagcttcctggagaaggagaacagcgccctgagacaggaggtggccgacctgagaaaggagctgggcaagtgcaagaacatcctggccaagtacgaggccagacacggccccctgtag

SEQ ID NO: 125488 - DNA, 633 bp, Artificial Sequence
  derived and/or modified sequence
atggacctggaggagttcctgagcgagaacggcatcccccccagccccagccagcacgaccacagcccccacccccccggcctgcagcccgccagcagcgccgcccccagcgtgatggacctgagcagcagagccagcgcccccctgcaccccggcatccccagccccaactgcatgcagagccccatcagacccggccagctgctgcccgccaacagaaacacccccagccccatcgaccccgacaccatccaggtgcccgtgggctacgagcccgaccccgccgacctggccctgagcagcatccccggccaggagatgttcgaccccagaaagagaaagttcagcgaggaggagctgaagccccagcccatgatcaagaaggccagaaaggtgttcatccccgacgacctgaaggacgacaagtactgggccagaagaagaaagaacaacatggccgccaagagaagcagagacgccagaagactgaaggagaaccagatcgccatcagagccagcttcctggagaaggagaacagcgccctgagacaggaggtggccgacctgagaaaggagctgggcaagtgcaagaacatcctggccaagtacgaggccagacacggccccctgtag

SEQ ID NO: 125489 - protein, 338 aa, Artificial Sequence
  derived and/or modified sequence
MVVMAPRTLFLLLSGALTLTETWAGSHSMRYFSAAVSRPGRGEPRFIAMGYVDDTQFVRFDSDSACPRMEPRAPWVEQEGPEYWEEETRNTKAHAQTDRMNLQTLRGYYNQSEASSHTLQWMIGCDLGSDGRLLRGYEQYAYDGKDYLALNEDLRSWTAADTAAQISKRKCEAANVAEQRRAYLEGTCVEWLHRYLENGKEMLQRADPPKTHVTHHPVFDYEATLRCWALGFYPAEIILTWQRDGEDQTQDVELVETRPAGDGTFQKWAAVVVPSGEEQRYTCHVQHEGLPEPLMLRWKQSSLPTIPIMGIVAGLVVLAAVVTGAAVAAVLWRKKSSD

SEQ ID NO: 125490 - protein, 154 aa, Artificial Sequence
  derived and/or modified sequence
MVVMAPRTLFLLLSGALTLTETWAGSHSMRYFSAAVSRPGRGEPRFIAMGYVDDTQFVRFDSDSACPRMEPRAPWVEQEGPEYWEEETRNTKAHAQTDRMNLQTLRGYYNQSEAKQSSLPTIPIMGIVAGLVVLAAVVTGAAVAAVLWRKKSSD

SEQ ID NO: 125491 - DNA, 1017 bp, Artificial Sequence
  derived and/or modified sequence
atggtggtgatggcccccagaaccctgttcctgctgctgagcggcgccctgaccctgaccgagacctgggccggcagccacagcatgagatacttcagcgccgccgtgagcagacccggcagaggcgagcccagattcatcgccatgggctacgtggacgacacccagttcgtgagattcgacagcgacagcgcctgccccagaatggagcccagagccccctgggtggagcaggagggccccgagtactgggaggaggagaccagaaacaccaaggcccacgcccagaccgacagaatgaacctgcagaccctgagaggctactacaaccagagcgaggccagcagccacaccctgcagtggatgatcggctgcgacctgggcagcgacggcagactgctgagaggctacgagcagtacgcctacgacggcaaggactacctggccctgaacgaggacctgagaagctggaccgccgccgacaccgccgcccagatcagcaagagaaagtgcgaggccgccaacgtggccgagcagagaagagcctacctggagggcacctgcgtggagtggctgcacagatacctggagaacggcaaggagatgctgcagagagccgacccccccaagacccacgtgacccaccaccccgtgttcgactacgaggccaccctgagatgctgggccctgggcttctaccccgccgagatcatcctgacctggcagagagacggcgaggaccagacccaggacgtggagctggtggagaccagacccgccggcgacggcaccttccagaagtgggccgccgtggtggtgcccagcggcgaggagcagagatacacctgccacgtgcagcacgagggcctgcccgagcccctgatgctgagatggaagcagagcagcctgcccaccatccccatcatgggcatcgtggccggcctggtggtgctggccgccgtggtgaccggcgccgccgtggccgccgtgctgtggagaaagaagagcagcgactag

SEQ ID NO: 125492 - DNA, 1017 bp, Artificial Sequence
  derived and/or modified sequence
atggtcgttatggcccctaggactctttttctccttctttctggggccctgacattgactgaaacttgggctggaagtcatagcatgcggtacttctccgcagctgtctcccgccccggccgaggggagcctagattcattgccatggggtatgttgatgacacacagttcgtccgcttcgacagcgactctgcttgccctcgtatggaaccccgggctccctgggtggagcaggaggggcccgagtattgggaggaagaaacacgcaacaccaaggcccacgcgcaaacggaccgcatgaatctgcagaccctccgtgggtactataaccagtctgaagcaagctcgcacaccctccagtggatgatcggatgtgaccttggctcggatggtcggctgctacgaggctacgaacaatacgcttacgacggtaaggattacctggccctgaatgaagacctacgaagttggaccgccgccgataccgctgcgcagatctcaaagaggaagtgcgaggctgccaacgtcgcagagcaaaggcgggcctatctggaggggacttgcgtcgagtggctgcatagatacctcgagaacggcaaggaaatgctccagcgggccgaccccccgaagacgcatgtcactcaccacccagtcttcgattatgaggcgacgctgcgctgttgggctctgggattttaccctgctgagatcattctgacgtggcaaagggatggagaggaccagactcaggatgtggaactcgttgaaaccaggccggcaggagatggcacctttcagaaatgggctgccgtcgtcgtaccaagtggtgaggaacagcgttacacatgccacgtacaacatgagggacttcccgaaccccttatgctgcggtggaaacaatcctccctgccgaccattcccatcatgggaattgtggctggattagttgtgctcgcagccgtggttaccggtgccgcggtggctgccgttctctggagaaaaaagagcagtgattag

SEQ ID NO: 125493 - DNA, 1017 bp, Artificial Sequence
  derived and/or modified sequence
atggtcgttatggcccctcgaacactcttcctcctactctccggggccctgactctgaccgaaacttgggccggctctcacagcatgagatatttctccgcagctgtgtccagacctgggcggggggaacctcgtttcattgccatgggctatgtagacgatactcagttcgtacgatttgacagcgattctgcttgtcctcgcatggagccccgggctccttgggtggaacaagagggaccggaatactgggaggaagagacaaggaataccaaggcgcacgctcagaccgataggatgaatcttcagacactgagaggctattataaccagtcggaagccagctcccacactctccagtggatgatcgggtgtgatctcggtagtgacggcaggctactgcggggctatgagcagtacgcctacgacggcaaagactacctggcattgaacgaagacctcaggagctggaccgcagccgacactgccgcgcaaatttccaaacggaagtgtgaagccgctaatgtcgccgagcagcgtagggcatatctcgaggggacatgtgtggagtggctgcatcgctacttggaaaatggaaaggaaatgcttcagagagctgatccacccaaaactcacgtgacccaccatccagtgttcgactatgaagccaccctgcggtgctgggccttgggtttctatccagccgagattatcctgacatggcagcgtgacggtgaggaccagactcaggacgttgagctggttgaaacacggcccgcaggcgacgggacattccagaagtgggcagcagtcgtcgttcctagtggtgaagaacaacgttatacttgtcatgtgcagcatgagggcttgcccgagcccctgatgctccggtggaagcagagctccttgcccactatacctattatgggaatcgtggctggactcgtggtactggcagccgtggtcaccggcgcagctgtggccgccgtcctgtggcggaagaagtcctcagattag

SEQ ID NO: 125494 - DNA, 1017 bp, Artificial Sequence
  derived and/or modified sequence
atggtggtgatggcccctcggaccttattcctccttctctccggggccctgactctcaccgagacatgggctgggtcacactcaatgcggtactttagcgcagcagtgtctcgcccaggcaggggagagccccggttcatcgctatggggtacgttgatgacacacagttcgtgaggtttgattctgattctgcatgcccacgcatggaacctagagccccctgggtggaacaggaagggcctgagtactgggaagaggagactcgcaataccaaagcacacgcccaaaccgataggatgaatctgcagacgctaaggggctactacaaccagagcgaggcttccagtcacactctacagtggatgatcggctgcgacctgggctccgacgggcggctcctccgcgggtacgagcaatatgcctatgacggaaaggactacctggctctcaatgaggatctccggtcttggaccgctgctgatactgccgcacaaatttccaaaaggaagtgcgaagctgcgaatgtagccgagcagcggcgcgcatacctcgagggaacctgcgtggaatggttgcaccggtaccttgaaaacggaaaagaaatgctgcaacgggccgatccgcctaagactcacgtgacgcaccatccagtattcgactatgaggcaactctacgctgctgggcactgggcttctacccagccgagataatcttgacatggcagcgcgatggtgaggaccagacacaggacgttgagctcgttgagaccagaccagccggcgatgggactttccagaagtgggcagccgttgtggtaccgtctggtgaagagcagaggtacacatgtcacgtgcagcatgaaggactaccggagccgctgatgttaaggtggaaacaaagcagcctacctactattcccatcatgggcattgtggccggtttggtggtcttggccgcagtagtcaccggtgcagccgtagcggctgttctgtggaggaagaaatccagtgattag

SEQ ID NO: 125495 - DNA, 1017 bp, Artificial Sequence
  derived and/or modified sequence
atggtcgtaatggcccctagaacgctgttcctgctgctcagtggggcactgacacttaccgaaacgtgggccggatcccactctatgagatattttagtgcagccgtttccagacccgggcgcggcgaaccacggtttattgccatgggatatgtggacgacacccagtttgtgagattcgattctgactctgcatgcccacgcatggagccccgtgcaccatgggtggagcaggaaggtcccgaatactgggaggaagagaccaggaatacaaaagcccacgctcagactgatcgaatgaatctccagaccctccggggatactataaccaatctgaagccagctctcatacacttcagtggatgattggttgcgatctcggctctgacgggaggctccttagaggttatgagcaatacgcctatgatggtaaagattacttagcattgaatgaggatttgaggtcatggactgccgccgacactgcggcccagatttcaaaacgaaagtgcgaagccgcaaatgtggctgagcagaggcgggcatatctcgagggtacctgcgtcgagtggctgcatcgatacctggagaatggaaaagagatgctccaacgagccgacccaccgaaaacacatgtgacacaccatcctgttttcgactatgaggccaccctacgctgttgggcactgggcttttatccagcggaaatcattctcacgtggcagagggacggcgaggatcagacccaagatgtagagctcgtcgaaactcgccctgcaggcgacggaacattccagaagtgggccgctgtcgtcgtgccttcaggagaagaacagcgttacacatgtcacgtgcagcacgaaggcctacccgagccactgatgcttcgctggaaacagagtagccttccgacaatccccatcatggggatcgtggcaggtttggtggtactcgcggccgtggtgaccggtgccgcggtggcggcagtgctctggcggaaaaaatcttctgactag

SEQ ID NO: 125496 - DNA, 1017 bp, Artificial Sequence
  derived and/or modified sequence
atggtggtaatggccccaagaacactgttcctgctgctatcaggagcgctgaccctaacagagacttgggcaggctcgcactcaatgcgatacttttcggcagctgtcagccggccgggtcggggagagcccaggttcattgccatgggatacgtggatgacacgcagttcgtgcgctttgacagcgacagcgcctgtccgcggatggagccacgtgcaccgtgggttgagcaagaaggccccgagtactgggaggaggaaactaggaacacgaaggcgcacgcccagacagacaggatgaatctgcaaacactgaggggttactacaaccaatcagaagcatcaagtcacacactgcagtggatgatcgggtgcgatctgggtagtgacggccgcctcctgagggggtatgaacagtacgcatatgatggcaaggactacctggcattgaacgaggacctgagatcatggactgcagcggacaccgccgcacagatcagtaaacgaaaatgcgaagccgctaatgtcgctgaacagcgcagagcctacctggaaggaacctgcgtagagtggctgcacaggtacttggagaatggaaaggagatgctccagagagcagatcctcccaaaactcacgtgacccaccatccagtttttgattatgaggccaccttaagatgctgggctctggggttctaccctgctgaaatcatcctcacgtggcagcgagacggtgaagaccagacacaggatgtggaactggtagagacacggccagctggcgacggaacgttccagaagtgggctgccgttgtcgtgccatctggcgaggagcagcgatatacctgtcatgtccagcacgagggcctccctgagcctctgatgttgcgttggaagcagagcagcctgcctactatcccaattatgggtatcgtagctggcctagtcgtgctggcggcagtcgtcaccggcgcggccgtagctgctgtgctctggaggaagaagagcagcgactag

SEQ ID NO: 125497 - DNA, 1017 bp, Artificial Sequence
  derived and/or modified sequence
atggtggtgatggctcccaggaccctcttcctgctgcttagtggggccctgaccctgacggagacctgggccgggtcccatagtatgcgatatttttccgcggcagtgagtcgcccgggaagaggcgaaccccgtttcatcgctatgggatatgtggatgatacccagtttgttcgctttgactctgactctgcatgtccccgaatggagccacgagctccttgggtggagcaggaaggccccgaatactgggaggaggagacacggaacacgaaggcccatgcacagaccgatagaatgaatctccagaccttgcgagggtactataatcagagcgaggcctcaagtcatactctacagtggatgattggctgtgaccttggcagcgacgggagattgctgcgcggctacgagcagtacgcctacgacggcaaagactacctcgccctcaacgaagaccttcgcagttggaccgccgccgataccgcagcacaaatctccaaacgcaagtgtgaagccgccaacgtagcggagcagaggagagcatacctggagggaacctgcgtcgagtggctccaccgctatcttgagaacgggaaggagatgctgcagagggccgatccccccaagacacatgtgacgcatcacccagttttcgactatgaggccaccctgcgctgctgggctcttggtttttaccctgccgaaattatactcacttggcagcgtgatggtgaagaccagacgcaggacgttgagttggtggaaacccgaccggctggagatgggacatttcagaaatgggccgccgtggtggtcccgtcaggcgaggagcagcgatatacctgtcacgtccagcatgagggcttgcccgaacccctgatgctccggtggaagcagagttccctgcccaccatcccaattatgggtatcgtggctgggctggtggtactcgctgcagtggttacgggggccgccgtcgcagcggtgctgtggagaaagaagtctagcgactag

SEQ ID NO: 125498 - DNA, 1017 bp, Artificial Sequence
  derived and/or modified sequence
atggtagttatggctccgagaaccttgttcctcctgctgagtggggcgttgacgctgaccgagacatgggccggatcacactccatgagatacttctccgccgccgtttctcgccctggaaggggcgaacctagatttatcgctatgggatacgtggacgatacgcaattcgtgagatttgactctgactcagcatgtccccgcatggagcccagagctccctgggtagagcaggaggggcccgagtattgggaagaagagactagaaacacgaaagcccatgcacaaacagatcgcatgaatcttcagaccttgcggggctattataatcagtccgaggcctcctcccacaccttacaatggatgattggatgtgatctgggatcagacggaaggctactgaggggttacgagcaatacgcatacgacggaaaggactatctggccctcaacgaggatctgcggtcctggacagcagctgatacagccgcacagatctcgaaaaggaagtgtgaggcagcgaatgtggctgagcagaggcgtgcctacctcgaaggaacatgcgtagaatggcttcaccgctacctcgaaaacggtaaagagatgctccagcgtgcagatcccccaaaaacccacgtgactcatcaccccgtgtttgattacgaagcgacactaaggtgctgggccttaggcttctaccccgccgagattatcctcacatggcagcgcgatggagaagatcagacacaagacgttgagttggtggaaactaggccggccggagacggcacgttccagaagtgggccgccgtggtggttccttcgggcgaggagcagcggtacacctgccacgtgcagcatgaggggctgcccgaacctttgatgttgcggtggaagcagtcatccctccctacaattcccattatgggtatcgttgcaggattagtggtgctagctgccgtggtcacaggagctgccgtggccgctgtcctctggagaaagaagtcgtccgattag

SEQ ID NO: 125499 - DNA, 1017 bp, Artificial Sequence
  derived and/or modified sequence
atggtcgtcatggcgcctcgaacgctcttcctactactaagcggcgctctcaccttaactgagacctgggctggaagccacagcatgcggtacttctctgcagccgtgagccgccccggcaggggcgagcccagatttatcgctatggggtacgtggacgacactcagttcgtgcgtttcgattccgattccgcatgtccccgtatggaacctcgagcaccatgggtagaacaggagggaccagagtattgggaggaggagacgcggaacaccaaagcacacgctcaaaccgaccgaatgaacttgcagacactgcggggatattacaatcaatccgaagcctccagtcatacactgcagtggatgatcggttgtgacttgggaagtgatgggcgactgctccgcggctatgagcagtatgcctatgatggcaaagattacctagctcttaacgaggacttgcgatcttggactgctgccgatacagctgcacagatcagtaagagaaagtgtgaagcagcaaacgtcgcagagcagcggagggcctacctcgagggtacatgtgttgaatggctccacaggtaccttgagaatggaaaagaaatgttgcagcgagctgatcctcccaagacccatgtgacacatcatcctgtgttcgactatgaggctacactgcgttgctgggccctcggcttttatcccgccgaaatcatcctgacatggcaaagagatggagaggaccagactcaggacgttgagctcgttgaaacccggcccgccggcgacggcacatttcaaaaatgggccgcagtcgtggtcccatcaggcgaggagcagagatacacatgccacgtccaacatgaggggctcccagagcctctcatgctccgatggaagcagagttctctgcccactattccgattatgggaattgttgcgggactcgtagtgctggccgctgtggtaaccggcgctgcagtggcggctgtgctgtggcggaagaagtccagcgactag

SEQ ID NO: 125500 - DNA, 1017 bp, Artificial Sequence
  derived and/or modified sequence
atggtggtcatggcacctcgaacgttattccttctcttatccggggctctgaccctgaccgaaacctgggcaggttctcactctatgaggtacttcagtgctgccgtttcgcgtccaggtcgcggcgagcctcggttcatagcgatgggttatgtcgatgatacacagtttgtgcggttcgattccgactccgcatgccctcggatggagccccgcgctccctgggtggagcaggaggggcctgaatactgggaggaggagacacggaacaccaaagcacatgcccagactgataggatgaatcttcaaacgcttcgaggatactacaaccaatcagaggctagttcgcatacactacagtggatgattggttgcgatctgggttctgatggacgcctgcttaggggatatgaacagtacgcgtatgatggcaaggactatctggccctgaacgaggatctgaggagctggactgccgctgatacagcggcacagattagtaaaaggaaatgcgaagctgcgaacgtggccgagcaaaggcgagcttatcttgaagggacatgcgtggagtggttgcaccggtacctggagaatggtaaggagatgctgcagagggccgaccctcctaaaactcacgtgactcaccatcctgtcttcgattacgaggctacactgagatgctgggccttggggttttacccagctgagattatcctgacatggcaacgagatggggaggatcagacgcaagacgtcgaattggttgagacccggcccgccggtgacgggacgtttcagaagtgggccgcggtggtggttccatccggcgaggagcagagatatacgtgccatgtacagcatgaagggctgccggagccactaatgctgcgatggaaacagtcatcgctccctaccattcccattatggggattgtggccggtcttgtggtcctggctgctgtcgtgacaggcgccgcagtggccgccgtgctgtggcgtaagaagtcctccgattag

SEQ ID NO: 125501 - DNA, 1017 bp, Artificial Sequence
  derived and/or modified sequence
atggtggtaatggccccaagaactctgttcctgcttttatccggcgccctgacactcaccgaaacttgggccggcagtcactccatgcgctatttttccgcggccgtgagccggcctggacggggagagccaagattcatcgctatggggtacgtcgacgatactcaattcgtgcggttcgactccgactcggcttgtccgcgcatggagcccagggccccttgggttgaacaggaagggcccgagtattgggaagaggaaactaggaacactaaggctcatgcccagacagaccgaatgaacttgcagacactgcgcggctactacaatcagtccgaagcctcatctcacactcttcagtggatgataggctgtgacttgggttctgacggtagactcctcagaggctacgagcaatacgcctatgatggcaaagattatctggcgctcaacgaagatttgcgctcttggactgccgctgacacagcggctcagataagcaaaaggaagtgtgaggccgcgaatgtggcggagcaacgccgtgcttaccttgaaggcacgtgcgtggaatggctccacaggtacttagaaaatggaaaagaaatgcttcagcgtgcggaccctccaaagacacatgttacacatcaccccgtttttgattacgaggccacgcttcggtgttgggctctggggttttatcccgccgagattatcctgacgtggcagagagacggggaggaccagacccaggacgtggaattagtcgagacaagacctgcaggcgacggaactttccagaagtgggcagctgtcgtggtcccttccggcgaagaacagaggtatacctgccacgtgcagcatgaaggtcttccggagcctctgatgttgcggtggaagcagagcagtttacccactattccaatcatgggtatcgtcgcaggtctcgttgtgctggctgctgtggtgacaggagccgcggtggcggcagtgctgtggcggaaaaagtcttctgactag

SEQ ID NO: 125502 - DNA, 1017 bp, Artificial Sequence
  derived and/or modified sequence
atggtagtcatggcaccgagaactcttttcctgctcttgtcgggtgcgctgactcttaccgaaacgtgggccgggtcccattccatgagatattttagcgcagcggtgtcacgccctggccgaggagaaccgaggttcattgctatggggtacgtcgatgatacgcagtttgttcgatttgacagcgactccgcgtgccctaggatggagcccagggccccctgggtggagcaagagggaccagagtattgggaggaggagactcgcaacactaaagctcacgcacaaacagaccgaatgaaccttcagaccctccgcgggtattataatcagtccgaggcttcctcccacaccttacagtggatgataggatgtgacctgggctcagatggcaggctcctacgcgggtacgagcagtacgcatatgatggtaaagactaccttgcactcaatgaggacttgaggtcctggaccgcagccgatacagcagctcagatttccaagaggaaatgtgaggcagccaacgtcgccgagcagaggcgcgcatacctggagggcacttgcgtggaatggctccatcgatacctggaaaacgggaaagagatgctccagagagcagatcccccaaagacacacgttacacatcatcccgtatttgactatgaagccacactcaggtgctgggcgcttggcttctatcccgccgaaatcatactcacctggcagcgggacggggaagaccagactcaggatgtcgaactggtggaaacacggccagctggagatggcacgttccagaagtgggcagccgtcgttgtgccatccggagaggagcagagatatacatgtcatgtgcagcacgaaggcttgcctgaaccgcttatgctcagatggaaacagtcttctcttcctacaataccaataatgggaatagtcgctggtctggtggtcttagcggccgtggtcaccggagctgcggtggctgcagttttgtggcgcaagaagtcctccgactag

SEQ ID NO: 125503 - DNA, 1017 bp, Artificial Sequence
  derived and/or modified sequence
atggtcgtgatggcccccagaaccctctttctgctgctgtccggcgctctgacactaactgagacctgggccggatcccactcgatgcggtacttcagcgccgcagtctcacgccctggacggggagaaccacgctttatcgccatgggctacgtcgacgatacacagttcgtccggttcgacagcgatagcgcctgcccgcgcatggagcctagagccccctgggtcgagcaggaaggaccggaatattgggaagaggaaacacgcaatacgaaggcccatgcccagacagataggatgaacctacagaccctgcgggggtattataatcaatccgaggcttcttcacatactcttcagtggatgattgggtgcgatctgggctcagacggaaggctacttcgaggatatgagcagtatgcctatgatggcaaggattacttggcgctgaatgaagacctccgatcgtggacggcagcagacacggccgcccagattagcaaacgcaagtgcgaagccgcaaatgtggcagagcagcgtcgtgcatatttggaaggaacctgtgttgagtggttgcatcgctatctggaaaacggtaaagaaatgctgcaacgggcagatccccccaagacccacgtcactcaccatccagtgtttgattatgaggccaccctgcgatgttgggcattgggtttctacccagctgaaatcattcttacatggcaacgggacggagaagaccagactcaagatgtggagctggtcgagacccgcccagcaggggatgggacgtttcagaagtgggccgccgttgtggttccctctggagaagagcagcgatacacgtgccacgtgcagcatgaaggcctgccagagccgctcatgctccggtggaaacagtcatctctgcctaccattcccattatgggcatcgtagcagggctggtggtgctggccgctgttgtgaccggcgccgcggtggccgctgtgctgtggaggaagaaatcatccgactag

SEQ ID NO: 125504 - DNA, 1017 bp, Artificial Sequence
  derived and/or modified sequence
atggtggtgatggccccacgaacactgtttctcttgctttccggcgcgttgactttaaccgaaacttgggcaggatcccactctatgagatatttctccgccgcagtgtcacgacctggaagaggagaacctaggtttattgccatgggctacgtggatgacactcagttcgtgaggtttgactcggattctgcttgcccaaggatggaacccagagcaccatgggttgagcaagagggcccagaatactgggaggaggagacccgcaacaccaaagcccacgcccagacagacagaatgaatctgcaaacactgagaggctactacaatcagagtgaggctagctcacacacgcttcaatggatgatcggctgcgacctcggttccgacggacgcctgttacgtggatatgagcagtacgcctatgatggaaaagattatctagcccttaatgaggacctgaggagttggacagctgctgatactgccgcccagatttctaagagaaaatgtgaggccgccaatgtggcagagcagcggcgcgcttacttggagggcacctgcgtagagtggttgcaccggtatctggagaacggtaaagagatgctgcaacgggcagacccccctaaaacgcatgtgacacaccatcccgtgtttgactatgaggccactctgcgatgctgggccctgggcttctaccccgcagagatcattctgacatggcagagagatggcgaagatcagactcaggatgttgagctcgtagagactaggcctgcaggcgacgggacattccagaaatgggccgccgtcgtggtcccctccggggaggagcaaaggtatacttgtcacgtgcagcacgagggactccctgaacccttgatgctccgatggaagcagtcatcactccctactatccctattatggggattgtggcaggattggttgtgctggccgctgtggtgactggcgctgccgtggcggctgtcctgtggcgaaaaaagagttctgactag

SEQ ID NO: 125505 - DNA, 1017 bp, Artificial Sequence
  derived and/or modified sequence
atggtagtgatggccccgcggacactgttcctgctgctatcaggcgcgctgacgcttactgagacttgggcaggaagccactcgatgcgttatttttccgctgccgtgtcacgacccggaaggggggagcctaggtttatagcaatggggtatgtggatgacacccagttcgtgaggtttgactccgattccgcctgtccccggatggagcctagagcgccttgggtggagcaagaaggacccgagtactgggaggaagaaaccaggaacacaaaggcccacgctcagaccgatcggatgaacctccagactctgcgcggttactacaaccaatcagaggccagtagtcacacgttacagtggatgatcggatgcgacctaggatccgacgggcgactgctgcgcggttatgagcagtacgcctacgatggaaaggactatctggcgctcaatgaagacctccgtagttggaccgcggcggataccgcggcccagatttctaagaggaaatgtgaagctgcgaacgtggctgaacagcggcgcgcttacctggagggtacatgcgtggaatggctgcatagatacctggaaaatgggaaagagatgttgcagcgggccgaccctccaaaaacgcacgtcacccaccatcctgtgttcgactacgaggctaccctccgctgttgggctttgggtttttatcctgcggagattatcctaacttggcagagagacggggaggaccaaacccaggatgtggaattggttgagacccgacctgctggcgacgggacatttcaaaaatgggcagctgtggtggttccgagcggagaagagcagcggtatacctgccatgttcagcacgagggcctgccagagcccctcatgttgagatggaaacagtcatctctacctaccattcccattatgggcatagtggctggacttgtggtgctggcagccgttgtgaccggcgccgccgtggccgccgtgctgtggcgtaagaagagtagtgactag

SEQ ID NO: 125506 - DNA, 1017 bp, Artificial Sequence
  derived and/or modified sequence
atggtggtgatggcccccaggaccctcttcctgctgctgagcggggccctgaccctgacagagacctgggccggcagccacagcatgagatacttctctgctgctgtgtccaggcctggccgcggggagccccgcttcatcgccatgggctacgtggatgacacccagtttgtgcgctttgacagcgacagcgcctgccccaggatggagccccgggccccctgggtggagcaggagggccctgagtactgggaggaggagaccaggaacaccaaggcccacgcccagacagacaggatgaacctgcagaccctgcggggctactacaaccagagcgaggccagcagccacaccctgcagtggatgattggctgtgacctgggcagtgatggccgcctgctgcggggctatgagcagtatgcctatgatggcaaggactacctggccctgaatgaagacctgcgctcctggacagctgctgacacagctgcccagatcagcaagaggaaatgtgaggccgccaacgtggccgagcagaggcgggcctacctggagggcacctgtgtggagtggctgcaccgctacctggagaatggcaaggagatgctgcagagagctgacccccccaagacccacgtgacccaccaccctgtgtttgattatgaggccaccctgcgctgctgggccctgggcttctacccagctgagatcatcctgacctggcagagagatggagaggaccagacccaggatgtggagctggtggagaccaggcctgctggagatggcaccttccagaagtgggccgctgtggtggtgcccagcggggaggagcagcgctacacctgccacgtgcagcacgagggcctgcctgagcccctgatgctgcgctggaagcagagcagcctgcccaccatccccatcatgggcatcgtggccggcctggtggtgctggccgctgtggtgactggagctgctgtggccgctgtgctgtggaggaagaagagcagtgactag

SEQ ID NO: 125507 - DNA, 1017 bp, Artificial Sequence
  derived and/or modified sequence
atggtggtgatggccccccggaccctgttcctgctgctgagcggcgctctaacgctgacggagacatgggccgggtctcactccatgagatatttcagcgccgccgtgagtaggcctggaagaggcgaaccacgtttcattgcaatgggttatgtggacgacacccaatttgtgcgatttgacagcgacagcgcctgcccaaggatggagccccgggctccctgggtagaacaggaaggacctgagtattgggaagaggagaccagaaacacaaaagcccatgcccagaccgaccgtatgaatctgcaaacactgcggggttattacaaccaatcagaggcctccagtcacacactgcaatggatgatcggatgtgacctggggtctgatggacggttactgcggggttatgaacaatatgcttacgacggcaaggattaccttgcccttaacgaggacctgaggagctggactgctgcggacacagcagcccagatcagcaaaaggaaatgcgaagctgctaacgtcgctgagcagcgtcgcgcgtacctggagggcacttgcgttgagtggctccacagatacctggaaaacggcaaggagatgctacaacgggccgacccacccaaaactcatgttactcaccatcctgtcttcgattatgaggccacgctgcgctgctgggcactaggcttctatccagctgagattatactgacgtggcagagagatggcgaggatcagacacaggacgtagagcttgtggagacacgccccgctggcgacggcacattccagaagtgggcagctgttgtggttccctctggagaggaacaacgctacacctgccatgttcaacatgagggtcttccagaaccactcatgttgcggtggaaacagtccagcttgcccacaattcctatcatggggatcgttgctgggctggtggtgttggccgccgttgtgacaggggctgcggtagctgcagtgttgtggaggaagaaatcctccgattag

SEQ ID NO: 125508 - DNA, 1017 bp, Artificial Sequence
  derived and/or modified sequence
atggtggtgatggccccccggaccctgttcctgctgctgagcggcgcactgactctcactgagacttgggccggcagccactctatgagatattttagcgcagccgtgagcaggccagggaggggggagccacgctttatagccatgggatatgtagacgatacccaattcgtcaggttcgattctgactctgcttgtccaagaatggagcctagggccccatgggtggagcaggaaggacctgaatattgggaagaggaaactcgcaatactaaagctcacgctcagacggatcgtatgaaccttcagactctacgggggtactacaatcagtctgaggcctcttcacatactttacagtggatgatcggatgtgaccttggcagcgatggccggttgctgcggggttacgaacaatacgcctatgatggaaaagactaccttgcactgaatgaagatctgcggtcgtggactgccgcagataccgcagctcaaatatccaaaagaaagtgtgaggccgccaatgtcgctgaacagagacgcgcttatcttgaggggacttgcgtcgaatggttgcacaggtacctggagaacggtaaagagatgctacagcgtgcggacccccccaagacccatgtaacccaccacccggtctttgactacgaggcaaccctcaggtgttgggctctagggttttatccagccgaaattattctgacttggcagcgggatggcgaagatcaaacgcaagatgtggagctggttgagacaagaccagccggcgacgggacatttcagaaatgggccgcagttgttgtaccaagcggcgaggaacaacgatatacatgccatgttcagcacgagggattgcctgaacctctaatgctccgctggaagcagtcgagcctgcctaccattcccatcatgggcattgttgcagggctcgtcgtgctggccgccgtggtgacgggagctgccgtcgcagccgtgctgtggcgtaaaaaaagtagcgactag

SEQ ID NO: 125509 - DNA, 1017 bp, Artificial Sequence
  derived and/or modified sequence
atggtggtgatggccccccggaccctgttcctgctgctgagcggcgcccttaccctcacagagacctgggcaggatcacatagcatgaggtactttagcgcggctgtgagccggccaggtaggggagagccaagatttatcgccatggggtatgtggacgatacacagttcgtgaggtttgactccgatagtgcgtgccctaggatggagcctcgggccccctgggtggagcaggagggtcctgagtattgggaggaggagaccaggaatacgaaggcccacgctcagacagaccgaatgaatttacagaccctgagagggtattataaccagtctgaggcttcgagtcataccctgcagtggatgataggatgcgacctgggctcagacggtaggttattacgcggatatgaacagtacgcatacgacggcaaagattacctggcgttgaatgaggatctgagaagttggaccgcagctgacaccgctgcccagatcagtaaacgcaagtgtgaggcggcgaacgtggccgaacagcggcgagcgtacttagagggtacatgtgtggagtggctgcatcgctacctggagaacgggaaggaaatgttgcagcgggccgaccctcctaagacgcacgtgactcatcaccccgtctttgactatgaggccacattgcgttgttgggcccttggattctaccccgccgagattattctgacatggcaaagagacggagaggaccaaacgcaggatgtcgaactagtggagacacggcccgcaggcgacggaacatttcagaaatgggctgctgtggtggttcccagcggcgaagagcagcggtatacatgccacgtgcagcacgaagggctacctgagccattaatgctgcggtggaagcagagctcactgccgacaatcccgattatgggtatcgtcgcaggcctggtggttctggcggctgtggtgactggcgctgccgtcgctgccgtactgtggaggaagaaaagttctgattag

SEQ ID NO: 125510 - DNA, 1017 bp, Artificial Sequence
  derived and/or modified sequence
atggtggtgatggccccccggaccctgttcctgctgctgagcggcgctctcacactgacagagacctgggctggatcccactcgatgcggtatttttccgcagccgtgagtaggcctggacgaggtgagccccgctttatcgccatgggttacgtggatgacacccagtttgttcgatttgacagcgactccgcttgtccccggatggagcctcgtgccccgtgggtggaacaggagggtcccgagtattgggaggaggagacacgtaacaccaaggcccacgcccaaacggaccgcatgaatctgcagactctccggggctactataatcagtcggaagcaagctctcacacactgcaatggatgattggatgtgaccttggctctgacggacggctgctccgtggctatgagcagtacgcttatgatggcaaagactatctggcactcaacgaggacctgaggtcttggaccgccgctgatacagcggctcagatatccaaacgcaagtgcgaggccgctaatgtcgcagaacagcgcagggcatatttggaggggacctgcgtggaatggctgcacagatatctggaaaacggtaaagaaatgctgcaacgcgcagacccaccgaaaacccacgtgacccaccacccagttttcgactacgaggccaccctgaggtgttgggcccttggcttctaccccgctgaaatcattttgacttggcaacgtgatggtgaggaccaaacccaagacgtcgaactggtcgaaacaagacctgccggggatggtacttttcagaaatgggctgcggtcgtagtaccatctggggaggagcagagatacacctgccatgttcagcacgaaggcctgcccgagccccttatgctgaggtggaagcagtcctcactgccgactatccccatcatgggaattgtcgctggccttgtcgtgttggcggcagtcgtcacaggggcagcagtggcggcagttctgtggcgtaaaaagtcatcggactag

SEQ ID NO: 125511 - DNA, 1017 bp, Artificial Sequence
  derived and/or modified sequence
atggtggtgatggccccccggaccctgttcctgctgctgagcggcgctttgactctcacagaaacctgggcaggcagccatagtatgaggtacttctcggcagcagtatcaagaccggggcgaggcgagcccaggttcatagcaatggggtatgtggacgacacacagttcgtgcggttcgactcagattcagcctgccctcgaatggagccaagggctccctgggttgagcaagagggtcccgagtactgggaagaggaaacccggaacacaaaagcccacgcccagacagaccggatgaacctccagacgctccggggctactacaaccagagcgaggcgagttcccacacactccagtggatgattggttgcgacttaggatctgatggccgactgttgaggggctacgaacagtacgcatacgatggcaaagattatctggcgctgaatgaagatcttcggagctggacggccgcagatacagccgcccaaatcagcaaacgaaagtgcgaagcggccaatgtcgctgagcagcgccgcgcatatctagaggggacctgcgtcgaatggcttcaccggtatttagaaaacggaaaggagatgcttcagcgagccgaccccccgaaaacacacgtcacccatcaccccgtgttcgactatgaagccactctgaggtgctgggccctgggtttctatccagcagagattatccttacgtggcagcgggacggagaggatcagacacaggacgtggagctcgtagagacccggcccgccggcgacggcacgtttcagaagtgggctgcagtagttgtgccatctggagaggagcagcgatacacatgtcacgttcagcatgagggattgccggagccactgatgctaagatggaagcaatcttccctacccactatcccgattatgggcattgtcgccggtctggttgtgctggctgctgtagtaaccggcgccgcggttgcagcagtgctttggaggaagaaaagctccgattag

SEQ ID NO: 125512 - DNA, 1017 bp, Artificial Sequence
  derived and/or modified sequence
atggtggtgatggccccccggaccctgttcctgctgctgagcggcgccctgactcttaccgagacctgggctgggagccattctatgcgatatttttcagcggcggtctcacgcccaggacggggtgagccgcgatttatcgcaatgggttatgtagatgatactcagtttgtgcgtttcgacagtgactcagcctgtcccaggatggagccacgggccccctgggtcgagcaggaggggcccgaatactgggaagaggagacccgtaacaccaaggcacatgctcaaaccgataggatgaaccttcagactctgagggggtattacaaccaatcagaggctagtagccatactttgcaatggatgattggctgcgacttaggatcagacggtcgtttgcttcggggctatgagcagtacgcctacgatggcaaggattacctcgcgctgaatgaggacctaaggtcatggactgccgcagacaccgcggctcagatcagcaaaagaaaatgtgaggccgcaaatgtagcagagcagcggcgcgcctatctggaaggaacatgcgttgagtggctacaccgctacctggagaacgggaaggaaatgctgcaacgggctgacccgcctaagacccacgtgacgcaccatcccgttttcgactacgaagccaccttgagatgctgggctctgggattttatcctgcggagattatcctcacctggcagcgagacggagaagaccagacacaggatgtggaactggtcgagacgcgaccggccggagacggaaccttccagaagtgggctgcggtagtcgtcccatcaggcgaagagcagaggtacacttgtcacgtccagcacgaagggcttccagaaccactgatgcttcggtggaagcaatcttctctaccaaccatcccaatcatggggatcgttgcaggactggtggtgctcgccgcagtcgtaactggagccgccgtggccgctgtgctgtggaggaagaagtcaagtgattag

SEQ ID NO: 125513 - DNA, 1017 bp, Artificial Sequence
  derived and/or modified sequence
atggtggtgatggccccccggaccctgttcctgctgctgagcggcgccctgacgctgacggagacatgggccggtagccactccatgaggtacttttctgccgctgtgtcccggcctgggagaggcgagcctcgctttatcgcaatgggatacgtggatgatactcagttcgtcagatttgatagcgattccgcctgtcctagaatggaaccgcgggctccatgggtggagcaggaaggacctgagtattgggaggaagagactaggaacaccaaggcacacgcccaaactgatcgcatgaatctgcagacactgcggggttactacaatcagagtgaggctagcagtcacacactgcagtggatgatcggttgcgatctgggcagcgatggtcggctgctgcgaggttacgaacagtacgcttacgatggaaaggactatttagccctgaatgaggaccttaggtcctggacagccgccgataccgctgcacagatttccaagcggaagtgcgaagcagcaaacgtcgcagagcagaggcgcgcgtatctagaaggtacttgtgtggaatggttgcacaggtacctggagaacggcaaagagatgctacagagggccgacccccccaagacccacgtaacccatcacccagtctttgactatgaagccacgttgcggtgctgggcgctggggttctacccagccgaaatcattctcacctggcagagagacggcgaagatcagactcaggacgtcgaactggtagagacccgtccggccggagacggtacttttcagaaatgggctgcggttgtggtgccgagcggggaggaacagcgctatacatgtcacgtgcagcacgaaggactgccagaacctttgatgttgcgttggaagcagtcttccctgcccaccattcccattatgggcatcgtggccggcctggttgttctggcagctgtcgtcaccggggccgctgtggctgcagtgctatggagaaagaagagcagcgattag

SEQ ID NO: 125514 - DNA, 1017 bp, Artificial Sequence
  derived and/or modified sequence
atggtggtgatggccccccggaccctgttcctgctgctgagcggcgcacttacgctcactgaaacttgggcaggcagtcactctatgagatattttagcgcagccgtctcccgcccaggcagaggcgaacccagattcattgccatggggtatgtggacgacacacagttcgtcagattcgactccgacagtgcctgccctaggatggaacccagagcaccctgggtggaacaggagggcccagagtactgggaggaagaaactcgtaatactaaggcacatgcccaaactgacaggatgaacctgcagaccctccggggttactacaaccagagtgaagcttcttctcataccttgcagtggatgatcgggtgtgacctcggcagcgatggtaggttactgagaggttatgagcagtacgcgtacgacgggaaggattatttggctctgaacgaagatctaagaagctggacggcggccgacactgccgctcagatctccaaaagaaaatgcgaagcggccaatgtggcggagcagcggagggcctacctggaaggaacctgcgtagaatggctccatcgatacctggaaaacggaaaagaaatgctacaacgcgccgacccccctaaaacacacgtgacacaccatcccgttttcgactatgaggcaaccctgcggtgctgggccttggggttttatccagcagagatcattctgacttggcaaagggatggtgaagatcagacacaggacgttgagcttgtggagacacgacctgctggcgacggcaccttccagaaatgggctgcagtggttgtcccatctggtgaagagcagcgttatacctgccatgtccagcacgagggactcccggaaccactgatgctgcgatggaaacaaagctccttacctaccatccccatcatggggatagtggcaggtctcgtcgtgctcgccgctgttgtcacaggcgccgcagtggcagccgtactctggaggaagaaatcttcagactag

SEQ ID NO: 125515 - DNA, 1017 bp, Artificial Sequence
  derived and/or modified sequence
atggtggtgatggccccccggaccctgttcctgctgctgagcggcgccctgacactgaccgaaacatgggctggctctcactccatgcggtattttagtgccgccgttagccgtccaggacggggcgagccacgatttattgccatgggatacgttgacgacacccagttcgtgaggtttgactcagactctgcatgcccgaggatggaacctcgggccccttgggtcgaacaagaaggtccagaatactgggaggaggaaactcgcaacacgaaagcacacgcacagacagaccggatgaatctgcaaaccctccggggctattataaccagtccgaggcatctagccacactctccaatggatgataggctgtgacctggggtctgatggccggcttctgcgcgggtacgagcagtacgcgtacgacggtaaagattatctggcgctgaatgaggatttgagaagttggactgccgcagacaccgctgcacagatatccaaaaggaaatgcgaagccgccaacgtagccgagcagaggagagcctaccttgagggaacatgtgtcgaatggctgcatcggtatctagaaaacggaaaagaaatgctccagcgggccgatccaccaaagacccacgtgacacatcaccctgtgtttgattacgaggccacactacggtgctgggctctaggcttttatccagctgaaattatcctgacctggcagagggacggggaggatcagactcaagacgtggagttagtcgagacccggccagcaggcgatggcacattccagaaatgggccgctgtcgtcgttccttctggcgaggaacagcggtatacctgtcacgttcagcatgaaggactgccagagcccctgatgctgagatggaagcagagttccctacccacaattcccataatggggattgttgctgggctggtggtccttgccgcggtggtgacgggcgcagccgttgcggccgtcctgtggaggaaaaagtccagcgattag

SEQ ID NO: 125516 - DNA, 1017 bp, Artificial Sequence
  derived and/or modified sequence
atggtggtgatggccccccggaccctgttcctgctgctgagcggcgccctcacactgacagagacttgggccggctcacactccatgaggtatttcagcgccgcggtgtctagacctggccgcggggagccaagatttatcgcaatggggtatgtcgatgatacgcaatttgtccgtttcgactctgattcagcttgtccgcggatggaacctcgggctccctgggtggagcaggaagggcctgaatactgggaggaggagacaaggaacaccaaagcacacgcccagaccgacagaatgaatctgcagaccctccggggatattacaaccagtccgaagctagttctcataccctgcaatggatgataggctgtgatctgggtagcgacggaagactgctgaggggatacgagcagtacgcctacgatggcaaggattaccttgctctgaatgaggacctgcgctcatggacagcagccgatacggctgcccagatcagcaaaaggaagtgcgaggctgcgaacgttgctgaacagcgtcgcgcttacctggaggggacctgcgtggagtggctgcaccgatatctggagaacggaaaagaaatgcttcagagggctgacccgcctaaaacccatgttacgcaccacccagtcttcgattacgaagccacactgcgctgctgggcactgggattctaccccgccgagattatcctcacttggcaaagggatggagaagaccagacacaggacgtggaactcgtcgagaccagaccagcgggggatggtacctttcaaaaatgggcagctgtggtggtgcccagtggggaagaacaacgatatacctgtcacgtccagcatgaagggcttccagagcctctgatgctaaggtggaaacaaagctccctacctaccataccgatcatgggcattgttgcagggctggtggtgctggccgccgtggtgactggggccgcagttgccgcagtgctgtggaggaaaaagagttccgattag

SEQ ID NO: 125517 - DNA, 1017 bp, Artificial Sequence
  derived and/or modified sequence
atggtggtgatggccccccggaccctgttcctgctgctgagcggcgccctgactctgaccgaaacctgggccgggtcccactccatgcgctacttctcagccgcagtctccagacccgggaggggtgaacctagattcatagcaatgggttacgtcgatgacacccagtttgtccgttttgatagcgacagcgcttgcccccgcatggagccccgtgccccgtgggttgagcaagaaggaccagagtactgggaggaagagacaagaaacacaaaggcccatgcccagactgaccgaatgaacctgcagacgctacgggggtattacaaccaaagcgaagcctcaagtcatactctgcagtggatgatcggatgtgatttgggaagcgacggcagactcctgcgcggctatgaacaatatgcttacgatggcaaagattatctggcactgaatgaggatttaagaagttggacagccgccgatactgctgctcagatctccaaaagaaaatgcgaggcggcaaacgtggccgagcagcgcagggcttatctagagggcacctgtgttgagtggctgcacaggtatttggagaacggaaaggaaatgctgcagcgggccgaccctcctaaaacccatgtaacgcaccatccagtgtttgattacgaggctaccttaagatgttgggcccttggattttatcccgcggagataatcctgacgtggcagcgagacggtgaggaccaaacccaggacgtcgagctggtagagaccaggccagccggcgacggtaccttccagaagtgggcagctgtggtggtaccttctggcgaagaacagaggtacacgtgccatgtgcagcacgaggggctgccagagccgctcatgttgcgatggaagcagtccagcctgcccaccatccccatcatgggtattgtcgcaggtctagtagtgcttgccgcagtggtgaccggcgcagctgtggcagccgtcctttggcgtaagaagtcaagcgattag

SEQ ID NO: 125518 - DNA, 1017 bp, Artificial Sequence
  derived and/or modified sequence
atggtggtgatggccccccggaccctgttcctgctgctgagcggcgcacttactctgacggaaacctgggcagggtctcattcaatgcggtattttagcgcggccgtctcacggcctgggaggggcgagcccaggttcattgccatggggtatgtcgacgacacacagtttgtgcgtttcgacagtgactcggcgtgtcctaggatggagcctagggcaccctgggtagaacaagaggggcctgaatactgggaagaggaaacgaggaacactaaagctcacgctcagactgacaggatgaacctgcagaccctgaggggctactacaatcagtcagaggccagctctcatacactacaatggatgattggttgtgacctgggcagcgacggccggttgctgcggggctacgaacaatacgcctacgacggcaaagattatttagccttgaatgaagacctgcgatcatggaccgccgcagacactgctgcacagatcagcaagcgaaaatgtgaggctgcaaatgtggcagagcaacggcgagcctatctggaagggacgtgcgtcgagtggctccacagatacctcgaaaatggaaaggagatgctccaacgcgccgacccgcctaagacccacgtgacccatcaccccgtattcgattatgaggcaaccctaaggtgctgggccctggggttttaccctgcggaaataattctcacctggcagcgcgacggagaggaccagacccaggacgtcgaattagtcgagaccaggccggccggagacgggacattccagaaatgggcggccgttgtagtgcccagcggagaggaacaacggtacacatgccacgtccagcatgagggtctcccagagccactgatgttacgctggaagcagagctccctgcccaccatccccattatgggtattgtggcaggcttagtggttctggctgccgttgtcactggtgctgccgtggctgccgtgctctggagaaaaaaatcgagtgattag

SEQ ID NO: 125519 - DNA, 1017 bp, Artificial Sequence
  derived and/or modified sequence
atggtggtgatggccccccggaccctgttcctgctgctgagcggcgcccttaccttaactgaaacctgggctgggagccactccatgcgttattttagcgcagctgtatctagaccaggccgtggcgaaccccggttcattgcaatgggttatgtcgatgacactcaattcgtgcgttttgacagtgactctgcatgcccacgcatggagccgcgtgctccctgggtggagcaggaggggcccgagtattgggaggaagagacccgtaacaccaaggcgcatgcgcagacagaccgcatgaaccttcagaccttgcgaggatactataatcagagtgaagcctcaagtcacaccctgcagtggatgatcggatgcgacctcggatcagatggtcgcctgttgcgtgggtacgaacagtatgcatacgacgggaaagattacttggcccttaacgaagacctcagatcttggactgctgcggacactgcagcccaaatatcgaagcgaaagtgtgaagccgcaaacgtggccgagcaaaggagagcttatctggagggaacttgcgttgagtggttacacaggtacctcgagaatggcaaagagatgctacaaagagcagatcccccgaagacccatgtcacccaccatccagtctttgactatgaggccactctgaggtgttgggccctggggttttatccggccgaaataattctgacctggcagagagacggtgaggaccaaacccaggatgtcgaactagtcgaaacacgtcccgccggcgatggcacgttccagaaatgggcagctgtggtcgttccctccggggaagagcaaagatacacatgccatgtgcagcacgaagggctgcctgaacccctcatgctccgatggaagcagtcaagcctgcctacgataccaattatgggaatcgtggccgggttggttgtcctggcagcagtagtcaccggcgccgcagtggccgctgtactgtggagaaagaagagctccgattag

SEQ ID NO: 125520 - DNA, 1017 bp, Artificial Sequence
  derived and/or modified sequence
atggtggtgatggccccccggaccctgttcctgctgctgagcggcgctctgacactgaccgaaacctgggcaggcagtcattctatgcgctacttttctgccgctgttagcaggccagggcgaggcgagcccagattcatcgccatggggtacgttgatgatactcagttcgttcggtttgactccgatagcgcatgtccccgaatggagccccgggcaccctgggtggaacaggagggacccgaatactgggaggaggaaacgagaaacacaaaggcccacgcccaaactgatcggatgaatcttcagaccctccggggctactataatcagtcagaagcttctagtcacacactgcagtggatgattgggtgcgatttgggaagtgatggacggctcctgagaggatatgaacagtacgcctatgatggcaaagactaccttgctctgaatgaggatctgcgctcatggactgcagcagatacagccgctcagatcagcaaacgcaaatgcgaggccgcgaatgtcgctgaacaaagacgagcctacctggagggaacttgtgtagagtggctgcatcgatacctggagaatggtaaggaaatgctccagcgggccgatcctccaaaaacacatgtcacacaccatccagtgtttgattatgaggccacactgcgctgctgggctctgggcttttatccagccgaaattattctcacttggcagagggatggtgaagaccaaacgcaggatgttgagctggtggaaacgcggcccgctggtgatggtacattccagaaatgggctgctgtcgtcgtgccaagcggtgaggagcaacgctatacctgtcatgtccaacacgagggcctccctgagccgctgatgttgcgctggaaacagtcctccctgccaactatcccgattatggggatcgtggctggtttggtggtgctggctgcggtcgtaacgggcgccgctgtcgctgccgtactgtggcgtaagaaaagtagcgattag

SEQ ID NO: 125521 - DNA, 1017 bp, Artificial Sequence
  derived and/or modified sequence
atggtggtgatggcgcctcgcactttgtttctgctgctcagtggcgctctgacattaactgagacatgggctggaagccactcaatgaggtacttcagcgccgcagtcagccgccctggccgaggagagccacggtttatcgctatgggctacgtagatgacacgcagtttgtgcggttcgactcagactccgcatgcccacgtatggaacctcgggctccgtgggtcgaacaggagggccctgaatattgggaggaggaaaccagaaatactaaagctcatgcacagaccgaccgcatgaatcttcagactctccgcggttattataatcagagcgaagcctctagtcataccctacagtggatgatcggttgcgacctgggttccgacggcaggttgctgagagggtacgaacagtatgcctacgatgggaaggactatctggccctgaacgaagatctgcggtcctggactgccgcagacacagcagcccagatctccaagaggaagtgcgaggccgcaaatgtcgcagaacagcggagggcttaccttgaaggtacctgcgtcgagtggctgcacaggtatctagaaaacgggaaagagatgttgcagcgggctgacccacctaagacacacgtaacacatcaccccgtgttcgactatgaggctacgctgcggtgctgggcccttggattctaccctgcagaaatcattctgacctggcagcgggacggcgaggaccagacccaggatgtcgagcttgtcgaaacccggcctgccggagatggtacctttcagaaatgggccgcagttgtcgtgccttcaggggaagagcagcggtatacttgccatgtacagcatgagggtcttcctgagccactgatgctcagatggaagcagtcctcactgccaacaatacctatcatgggaattgtggccggattggtcgtcctagctgcagttgtgaccggcgctgccgtggctgcggtactatggaggaaaaaaagttccgactag

SEQ ID NO: 125522 - DNA, 1017 bp, Artificial Sequence
  derived and/or modified sequence
atggttgtaatggccccacgcactctgtttttgctgctgtctggtgctctgactctcaccgaaacatgggcagggagccattccatgcgctacttcagcgccgctgtgagtagacctgggaggggggagcctcgatttattgcgatgggctatgtagatgacacacagtttgtacgtttcgattccgattccgcatgtccaagaatggagcccagagccccatgggtagaacaggagggccctgagtactgggaagaggagacgcgcaatactaaggcacacgctcagactgacaggatgaacctccaaacactgcgcggatattacaatcagagcgaggcctcatcccatactctgcagtggatgattggttgcgacctgggttccgatgggagattacttaggggatatgaacagtacgcgtatgatggcaaggactacctggcgcttaatgaggaccttcggtcatggactgctgcagataccgccgcacagattagcaagcgaaagtgcgaagccgcaaatgtcgcagagcagaggcgcgcatatctagaaggcacatgcgtagagtggctgcataggtatcttgagaatgggaaggagatgctgcagagagcagatccacctaagacacatgtgacacaccatcccgtgtttgattatgaggccaccctcagatgctgggccctgggattctacccagctgagattattctgacttggcagagagacggggaggaccaaacccaggacgtcgagcttgtcgaaactcgacccgctggtgatggcacctttcagaagtgggctgcagttgttgttccgtccggcgaagagcagaggtacacctgtcacgtgcagcacgaggggcttcctgagcctttgatgctacggtggaaacagtcatcattgccaacaatccctatcatggggatcgtggcaggcctagtggtgttagcggctgtagttacaggggctgctgttgctgcagtgctgtggcgcaagaaatctagtgactag

SEQ ID NO: 125523 - DNA, 1017 bp, Artificial Sequence
  derived and/or modified sequence
atggtggtgatggcgcctagaacactgttcttgctgctgagcggtgctcttaccctgactgaaacatgggccggatcccactccatgaggtatttctctgcggcagtgagccgtccaggcaggggtgaaccaagatttattgccatggggtatgtggatgacacccaatttgtgcgttttgactcggactccgcatgccctcgcatggaaccacgcgctccttgggtggaacaggaaggtcccgagtattgggaggaggagacgcgcaataccaaagctcacgctcagaccgataggatgaacctgcagaccctacgcggatactataaccagtctgaagcctcaagtcacaccctgcagtggatgatcgggtgcgacctaggttctgatggcaggctgctaaggggctatgagcaatatgcctacgatggaaaggattacctcgcactgaacgaagacctgcgcagttggaccgccgcagatactgcggcacagatttcaaagcggaagtgcgaagcggcaaatgtcgccgagcagcggagagcctatcttgagggaacttgtgtggagtggttgcaccgatacctcgagaacggaaaggaaatgctacagcgcgctgaccctcctaagacgcacgttactcatcatcccgttttcgattacgaggccacactgaggtgttgggcactgggtttctaccctgcagaaatcatcttgacttggcaaagggatggagaggaccagacacaggacgtggagctggtggaaacgcgacccgcaggcgacggcacattccagaagtgggccgcagtggtggtcccttccggagaagagcaacggtatacatgtcacgttcagcacgaggggctgcccgagccgctgatgctaagatggaagcaatccagcctgcccacaatccctattatgggcattgtcgctggactcgtcgtgctggccgctgttgtgacaggggctgccgttgcggctgtgctgtggaggaagaaaagctccgattag

SEQ ID NO: 125524 - DNA, 1017 bp, Artificial Sequence
  derived and/or modified sequence
atggtcgtcatggctccaagaaccctcttcttactgttaagcggagcccttacccttaccgaaacgtgggccggttcgcacagcatgcggtacttctccgctgcagtgagcagaccaggacgcggtgaacctagatttatcgcaatgggatacgtggatgacacgcaattcgtaagattcgattctgactctgcatgccccagaatggagcctagggctccttgggtagagcaggagggacccgagtattgggaagaggagacacgcaatacaaaagctcacgcacagaccgaccggatgaatctgcagaccctgcggggatattataaccagtccgaggcgtccagccacacactgcagtggatgatcggctgcgatctggggtccgatggcagactgctgcggggatacgagcagtacgcctacgacgggaaggattacttggccctgaacgaggacttgcgctcgtggacagcagcggacaccgccgctcaaataagcaagcgaaagtgcgaagcagccaatgtggcggaacaacgccgagcttatctcgaaggaacttgtgtcgagtggctgcatcggtatctggaaaacggtaaagagatgctgcagcgagctgatcctcctaaaacacacgtgacacaccacccagtgttcgactacgaagctacactccgatgttgggctctgggattctatcccgcagagatcatcctcacctggcaaagagatggcgaggaccagacccaggatgtggagcttgtggagacccggccagccggagatggcacattccaaaagtgggcggctgtggtggtcccgtcaggggaagagcaaaggtacacatgtcatgtccaacatgaaggcctacctgaaccgctgatgttaagatggaaacaatccagcttgcccaccatccccatcatgggcatagtggctggattagtggtccttgccgcagtggtcactggtgccgctgtcgcagccgtcttgtggcgcaaaaagagtagtgattag

SEQ ID NO: 125525 - DNA, 1017 bp, Artificial Sequence
  derived and/or modified sequence
atggtggtcatggccccaagaacactttttcttctattgtctggtgctctcactttaaccgaaacttgggcagggtcacactccatgcgctatttcagtgctgcagtatcaaggccaggccgaggagagcccagatttatcgcaatgggctatgttgatgacacccagtttgtgagatttgacagcgatagtgcatgccctcgaatggagccaagagctccatgggtggaacaggagggccctgagtattgggaagaggagacacgaaacactaaggcacacgcccagacggatcgtatgaaccttcagactctgcgcggatactataatcagtcagaggcttcatctcacactctgcagtggatgattggatgcgacctgggtagcgatggcagattgttgaggggctatgagcagtatgcctacgacggcaaggattatcttgcactgaatgaagacctcaggtcctggactgcagctgacactgctgcccagataagtaaaaggaagtgcgaggctgctaacgtggccgaacagcggagagcgtatctggagggaacctgcgtcgagtggctacacaggtatttagaaaacggcaaggaaatgctgcagcgggcagaccccccaaaaacccacgttacgcaccatcccgtgtttgactatgaagctacactgcggtgttgggctctaggtttttatcctgccgagataattttaacgtggcagagggacggcgaggatcagacccaggatgtcgagctggtggaaacccgccctgccggagacggaacctttcagaaatgggccgctgtcgtggtcccttctggagaggagcaacggtacacttgtcacgtgcagcacgaaggattgccagaacctctcatgctgcgatggaaacagtcctctctccctactatacccatcatgggaatcgtcgccggacttgtggtgttagcggctgtggtcactggagcagctgtggctgctgtgctgtggcgaaaaaaatcctcagactag

SEQ ID NO: 125526 - DNA, 1017 bp, Artificial Sequence
  derived and/or modified sequence
atggtggtgatggccccaaggactctgttcctactgctcagtggggctttaacccttactgaaacatgggcaggatctcactccatgcggtacttttctgctgcagtgtcccgcccagggcgaggggagccccgattcatcgccatgggttatgtggatgatacacaatttgttcgctttgacagcgactccgcgtgcccaaggatggagccaagagctccgtgggtggagcaggaggggccagagtattgggaggaggagactcggaatacgaaagcccatgcacagacggatcgcatgaacctccagacgttaagagggtactacaatcagtctgaggcctcatcacatacactacaatggatgataggctgtgacctgggcagtgatgggaggctcctgagagggtacgaacagtatgcctacgacggaaaagactacctcgccctcaacgaggacctccggtcgtggactgcagccgatacagcagctcagatctccaagcggaaatgcgaggcagctaacgtcgctgagcagcgcagggcttacctcgaaggtacctgtgtcgagtggctccaccggtatctcgaaaacggcaaggagatgctgcagcgtgccgatccgcctaagacccacgtcacccatcaccccgtttttgattatgaagcaacacttcggtgctgggccctgggcttttaccctgcagagatcatcctcacttggcaacgggatggagaggatcagacgcaggacgtcgagctagtggaaactcggccagccggtgacgggacatttcagaagtgggcagccgtggttgtgccttccggagaagagcagagatatacatgtcacgttcaacatgagggtttgcctgagcctctcatgctccgctggaagcaatccagtctgcctacaattcctatcatgggcatcgttgctggattggtcgttctggccgcagttgtcacaggcgctgctgtggcggctgttctgtggaggaaaaaatctagtgactag

SEQ ID NO: 125527 - DNA, 1017 bp, Artificial Sequence
  derived and/or modified sequence
atggtggtcatggccccaaggactctgtttctcttattatctggggctctaaccctgacagagacatgggccggttcacatagcatgagatacttctcagccgctgtgtctcggccagggaggggcgaaccgaggttcattgccatggggtatgttgatgacactcaattcgtgcgttttgactctgactctgcctgtccccgtatggagcccagagctccttgggtcgagcaggaggggcctgaatattgggaggaggaaactagaaatactaaggctcacgcgcaaactgaccgaatgaatctccagaccctgcgaggttattataaccaatccgaagctagcagccatactctgcagtggatgatcggttgcgatctcggaagtgatgggaggctgttacggggttacgaacagtacgcatacgatggaaaagattacctggctttgaatgaggatcttcggagttggactgctgccgacaccgcagcgcaaatctccaaacgcaagtgtgaggccgcaaacgtggccgaacaacgacgggcatatctggaaggtacctgtgtggaatggctgcacagatatttggagaacggaaaagaaatgttgcagagggcagacccaccaaagacacacgtgacccatcacccggtgttcgattatgaagccacattacgttgctgggcactgggtttctatccggctgagatcatacttacttggcagcgtgatggggaagatcaaacacaggacgtcgaacttgtcgagacaagacccgcaggggatgggacatttcagaagtgggcggctgtggtggtgccttcaggggaagaacagaggtacacctgtcatgtccagcacgaaggactgcccgaacctttaatgctgaggtggaagcagtctagtcttccaactatccctattatgggcatcgttgccggacttgtggtcttggcagccgtcgtgaccggagccgctgtcgccgctgtcttgtggaggaaaaaaagttcagactag

SEQ ID NO: 125528 - DNA, 1017 bp, Artificial Sequence
  derived and/or modified sequence
atggtggtaatggccccaagaacactttttcttctgctgtcaggcgcactgacactcactgaaacatgggcaggatcacacagtatgcggtatttttcggctgcagttagcagacccggtcgtggtgagccacgctttatcgcaatgggatatgttgacgacacacagtttgtgaggttcgattctgattccgcttgtccaaggatggagccaagagcaccctgggttgaacaggagggaccagagtactgggaagaggaaactcgtaatacaaaagctcacgcccagacagaccggatgaatcttcagacactgagggggtattacaatcagtctgaagcatctagtcatacactccagtggatgataggatgtgacctcggatccgacggtcggctgttgaggggctatgagcagtacgcttacgacggaaaggattacttagcactcaatgaagatctcaggtcttggacagccgcagacacagctgcgcaaatttctaagcgcaagtgcgaagccgcaaatgtggccgagcagaggcgagcctaccttgaaggaacgtgtgtggaatggctgcaccggtatctggaaaacggcaaggaaatgctgcaacgggcagatcctccgaagactcacgtcacccaccatcctgtctttgattacgaggccacactaagatgttgggccctcggattttaccccgcagagatcatactgacctggcaaagggacggcgaggaccagacgcaagatgtggaactcgtagaaacccggcctgccggtgatgggacattccaaaaatgggcagccgttgtggtcccgtcgggggaagagcagcgttacacatgccatgtccagcatgaggggcttcccgagcctctgatgttgcgctggaaacagtcttccttgccaacaattccaatcatgggcattgtggcaggactggtggtcctagctgcagtggtaactggggctgctgtggccgctgtactctggcggaagaaatcatccgactag

SEQ ID NO: 125529 - DNA, 1017 bp, Artificial Sequence
  derived and/or modified sequence
atggttgtgatggcccctcggactctgttcctcctactcagcggtgctctaacattgaccgaaacatgggctggcagtcactctatgcgctatttctcggctgcagtgtctcgccctggcaggggagagcctcggtttatagcaatgggatacgtcgacgatacgcagttcgtgcggtttgattctgactcggcctgcccaaggatggaacctagggcaccctgggttgaacaggaaggaccggagtattgggaagaggaaactcgcaatactaaggcccatgcccaaacagacagaatgaatctgcagactttgaggggatattataaccagtccgaagcctcctctcacactctgcaatggatgatcggatgcgacctgggctcagatggaaggctcctaagagggtacgaacagtatgcatacgatggcaaggactacctcgctctgaacgaggatctgcgctcatggaccgcggcagataccgccgcacagatctcaaaaagaaagtgtgaagcagcaaatgttgccgaacagcgccgagcctatctcgagggcacatgtgtggagtggctgcaccgctacctggagaatgggaaagagatgttacaacgggcagatccacccaaaacacacgtgactcaccaccccgtcttcgactatgaagctactctcaggtgttgggctctgggcttctatccagcggaaatcatcctcacttggcagagggatggagaggatcagacacaggatgtcgaactggttgagacccggcctgccggagacgggacattccagaagtgggctgcagtcgtagtcccatctggcgaggagcagcgctatacttgccacgtccagcacgagggactcccggagcccttgatgctgcggtggaaacagagttctctgcccaccatcccgatcatgggcatcgtggccggactggtggtgctcgcggctgtggttacaggtgctgccgtcgctgctgtgctctggaggaagaagtccagcgactag

SEQ ID NO: 125530 - DNA, 1017 bp, Artificial Sequence
  derived and/or modified sequence
atggtggtgatggccccacggacactgtttctcctactgagcggagcattgacactcaccgaaacatgggccggtagccatagcatgcgctatttttctgccgctgtgagccgtccgggaaggggtgaaccccgattcattgcaatgggctacgtggacgacactcagttcgtgcggttcgacagtgactcagcttgcccccgtatggaacctcgcgcaccttgggtggaacaggaaggacctgagtattgggaagaagaaacacgcaatacaaaggcacacgcacagacagacaggatgaacttgcagaccctgaggggctactacaaccagtccgaggcgtctagtcacacccttcagtggatgattgggtgcgaccttggatccgacggtagactcctaagagggtatgaacagtatgcctacgacggcaaagattatttggcactgaacgaggacctgcgcagctggacggcagcggatacggctgcccagatctctaaacgcaaatgcgaggctgcaaatgtagccgaacagcgtcgcgcatacttggagggaacgtgcgtggaatggcttcaccgataccttgaaaacgggaaggagatgctgcagcgcgctgatccccctaaaacccacgtgacccaccaccctgtttttgattacgaggccaccctgcggtgctgggctttgggcttctaccccgctgagatcattctgacttggcagagagacggagaggaccagactcaagacgtagagctggtagaaactagacccgctggagacggtacattccaaaagtgggcggctgtggtagttccttctggcgaggagcaaagatatacatgtcacgtccagcacgagggtcttccagaacccttgatgctaagatggaagcagtcatccctgcctactataccaattatgggcatcgtggccggacttgtggtgcttgccgcagtcgtcactggagcagccgtcgccgcagtcctctggcgcaaaaagtcatctgactag

SEQ ID NO: 125531 - DNA, 1017 bp, Artificial Sequence
  derived and/or modified sequence
atggtagtgatggcaccaagaacattatttctgttactgagtggcgcactcacgctcacagaaacctgggctggctcccattcaatgaggtactttagcgctgccgtgtcccgtccagggagaggagaacccagattcatcgccatgggctatgttgacgatactcagtttgtgagatttgattccgactcagcttgtccacgcatggaacccagagctccctgggtggaacaggagggcccagagtactgggaggaggagacccgcaatactaaggcacacgctcagacggatagaatgaaccttcagacacttcggggatactacaaccagagcgaagcgagcagccatacactacagtggatgatcggctgtgacctgggtagcgacggacgcttacttcgtgggtacgagcagtacgcttatgatggcaaagattatctggcactgaacgaagatttaaggtcttggacagcagcagacacagcagcgcagatctcaaagaggaaatgtgaagcggcaaacgtggctgagcagcgacgggcttatctcgagggaacttgcgtggaatggttgcatcgctatcttgagaacggcaaggagatgctccagcgggctgacccccctaaaacccacgtaacacaccaccctgtgtttgattacgaagccactcttaggtgctgggccttaggcttctatccggcagaaatcatcctgacctggcaaagagacggagaagaccagacacaggacgtcgaactggtagagactagaccagccggagacggcacattccagaaatgggccgcagttgtagtgccatctggcgaggagcagaggtatacctgccacgtacaacatgagggcctccccgagcccctaatgctgaggtggaaacagtcttccctgccgactattcccattatggggattgttgccggtctggtggtactggccgcagtagtcacgggagcagcagtggccgctgtcctttggaggaaaaagagctcagattag

SEQ ID NO: 125532 - DNA, 1017 bp, Artificial Sequence
  derived and/or modified sequence
atggttgttatggcgcctaggacactgtttctgcttctaagtggggcactcaccttaactgagacttgggcgggttctcactccatgagatactttagtgctgctgtttcgagacccggacgcggagagcccaggttcatcgccatggggtatgtggatgacactcaatttgtgcgcttcgattcagactccgcctgtcctcgcatggaaccccgagcaccatgggtggagcaggaggggccagaatactgggaggaggaaacacgcaatacaaaggcccatgcacagactgaccgcatgaacctgcagaccctccgaggttactacaatcagtccgaggcctcaagccacacacttcagtggatgatagggtgcgatctgggttccgacggcaggctgctgcgaggatacgagcagtacgcatacgacggaaaggactatctggcccttaacgaggacctgcgatcatggaccgcagcggatacagcagctcagatatctaagcggaaatgtgaagcggctaatgtcgcagaacagcggagggcctacctggaaggtacttgtgtggagtggcttcatcgctacctggagaatggcaaagagatgttacagcgggctgacccaccaaagactcatgtgacccatcaccccgtgtttgattacgaagctactctccgatgctgggcactgggattttacccagccgagataattctcacctggcagagggatggtgaggaccagacccaggatgtggagctagtagaaacccggcctgccggagatggaacgtttcagaaatgggcggctgtggtggtgccttcgggcgaagaacagcgctacacctgtcacgtacaacatgagggacttcctgagcctcttatgctgagatggaagcagtccagcctccccaccatcccaatcatgggtatagtggctgggctagtggtgctggcagctgttgttacaggcgctgccgtggccgcagtattgtggaggaagaagtcatctgactag

SEQ ID NO: 125533 - DNA, 1017 bp, Artificial Sequence
  derived and/or modified sequence
atggtggttatggctcccagaacattgttccttctcctttccggcgctctaactctcaccgaaacctgggctggaagccatagcatgcggtactttagtgccgctgtttctagacccggtcgcggagagcccaggttcatcgccatgggatatgtggatgacacgcaatttgtgaggtttgactctgatagtgcatgccccaggatggaaccacgtgccccatgggtagaacaagaaggtcccgaatattgggaagaagaaaccagaaatacaaaagcacatgcccaaacggaccgtatgaatctccaaaccctccgcggttactataaccagtccgaggctagtagtcacacccttcagtggatgattgggtgtgacctcggcagcgatggtcggctcttgagaggctacgagcagtatgcctacgacggcaaagactacctagctctaaatgaggacttgagatcatggacagccgcagacacagcagcacagattagcaagcgcaaatgcgaggccgctaacgtcgctgagcaacgcagggcctacctggagggaacttgtgttgagtggcttcatcggtacctggagaatggcaaggagatgctgcagcgcgcagaccccccaaaaacccacgtaacgcatcatcctgttttcgattacgaggccaccctcaggtgttgggccctcgggttttatccagccgaaatcatcctgacatggcaacgagacggggaagatcaaacgcaggacgtggaactcgtggaaaccagaccagccggagatggcacttttcagaaatgggcagctgtcgttgtgccatcaggagaagagcagaggtatacctgtcacgtgcagcacgaggggctgcccgaaccactaatgctgcggtggaaacagtcttcgctcccgacaattcccattatgggcatagtcgccggtctcgtggtcctcgccgcagttgtgacgggggcagctgtggcggcagtcctatggaggaaaaagagcagtgactag

SEQ ID NO: 125534 - DNA, 1017 bp, Artificial Sequence
  derived and/or modified sequence
atggtggtgatggcacctagaactttgtttctgctcttatccggggcactcacgctcacggaaacgtgggccggtagccatagcatgcggtatttctctgccgctgtgagtcggcctggtagaggcgaacctagattcattgcaatgggctatgtagacgatacccaattcgtgaggtttgactcagattcagcctgcccacggatggagcctagggccccatgggtcgaacaggaaggccctgaatactgggaggaggagacacggaacacgaaggcccacgcacaaaccgatcgaatgaacttgcagacgcttcgcggttactacaatcaatcggaagcctcctcccacaccctgcaatggatgatagggtgcgacctgggctctgatggccgtcttctccggggttacgagcaatacgcttatgatggaaaggattatcttgcattgaacgaggacttgagatcctggaccgcagctgatacagccgcacagatatcaaaacgaaaatgcgaagcggctaacgttgccgagcaaaggcgagcctatcttgagggaacatgcgttgagtggttgcacaggtatctagagaacggtaaggagatgttgcagagggcagacccacctaaaacgcacgttacccaccaccctgtcttcgactatgaggcgactttgaggtgctgggcacttggcttttacccagctgaaattattctcacctggcagagggacggggaagatcaaacacaggacgttgagctggtggaaactagacctgcgggtgatgggactttccagaaatgggcggctgtggtggtcccttccggtgaggagcagaggtatacgtgtcacgtgcagcatgaaggactgcctgaacctctgatgttacgctggaaacagtcctcactgcccaccatccccattatgggcatcgtcgctgggctggtggtcctggctgccgttgtgacaggggctgccgtggctgcagtgttatggagaaagaagagttctgattag

SEQ ID NO: 125535 - protein, 520 aa, Artificial Sequence
  derived and/or modified sequence
MPGSLPLNAEACWPKDVGIVALEIYFPSQYVDQAELEKYDGVDAGKYTIGLGQAKMGFCTDREDINSLCMTVVQNLMERNNLSYDCIGRLEVGTETIIDKSKSVKTNLMQLFEESGNTDIEGIDTTNACYGGTAAVFNAVNWIESSSWDGRYALVVAGDIAVYATGNARPTGGVGAVALLIGPNAPLIFERGLRGTHMQHAYDFYKPDMLSEYPIVDGKLSIQCYLSALDRCYSVYCKKIHAQWQKEGNDKDFTLNDFGFMIFHSPYCKLVQKSLARMLLNDFLNDQNRDKNSIYSGLEAFGDVKLEDTYFDRDVEKAFMKASSELFSQKTKASLLVSNQNGNMYTSSVYGSLASVLAQYSPQQLAGKRIGVFSYGSGLAATLYSLKVTQDATPGSALDKITASLCDLKSRLDSRTGVAPDVFAENMKLREDTHHLVNYIPQGSIDSLFEGTWYLVRVDEKHRRTYARRPTPNDDTLDEGVGLVHSNIATEHIPSPAKKVPRLPATAAEPEAAVISNGEH

SEQ ID NO: 125536 - protein, 509 aa, Artificial Sequence
  derived and/or modified sequence
MPGSLPLNAEACWPKDVGIVALEIYFPSQYVDQAELEKYDGVDAGKYTIGLGQAKMGFCTDREDINSLCMTVVQNLMERNNLSYDCIGRLEVGTETIIDKSKSVKTNLMQLFEESGNTDIEGIDTTNAVNWIESSSWDGRYALVVAGDIAVYATGNARPTGGVGAVALLIGPNAPLIFERGLRGTHMQHAYDFYKPDMLSEYPIVDGKLSIQCYLSALDRCYSVYCKKIHAQWQKEGNDKDFTLNDFGFMIFHSPYCKLVQKSLARMLLNDFLNDQNRDKNSIYSGLEAFGDVKLEDTYFDRDVEKAFMKASSELFSQKTKASLLVSNQNGNMYTSSVYGSLASVLAQYSPQQLAGKRIGVFSYGSGLAATLYSLKVTQDATPGSALDKITASLCDLKSRLDSRTGVAPDVFAENMKLREDTHHLVNYIPQGSIDSLFEGTWYLVRVDEKHRRTYARRPTPNDDTLDEGVGLVHSNIATEHIPSPAKKVPRLPATAAEPEAAVISNGEH

SEQ ID NO: 125537 - DNA, 1563 bp, Artificial Sequence
  derived and/or modified sequence
atgcctggctccctgccattgaacgccgaagcctgttggcccaaggacgtaggcattgtagccctcgagatctactttccgtcacaatatgtggaccaggctgaactggagaagtacgatggtgtggacgctggcaaatatactatcgggctaggccaggccaagatgggattttgcacggatagggaggacatcaattcactctgtatgacagtcgtgcagaatctgatggagcgaaataatttgtcatacgactgcatcgggcggcttgaggtagggactgagacaatcattgacaagagcaagtccgtgaagacaaatttgatgcagctgttcgaagagagcggcaacaccgacatagaggggatcgatacaacaaatgcctgctatggaggaaccgccgccgtcttcaatgctgtgaattggatagagtcctccagctgggatggtcgctatgcccttgttgttgctggagatattgctgtgtatgccactgggaacgctaggcccacaggaggcgttggcgccgtggccctgctcattggcccaaacgcacccctgattttcgagcggggactccgcggaacacacatgcagcacgcctacgacttctataagccagatatgttatccgagtaccccatagttgacggcaagttaagcatccagtgctacctctcagctctcgatcgatgctactccgtatattgcaagaagattcacgctcagtggcaaaaggagggcaatgacaaggacttcaccctgaatgactttgggtttatgattttccattcgccttattgcaaactggtgcagaaaagcttagctcggatgcttttgaacgactttcttaacgaccagaaccgcgataaaaactcaatttattccgggctggaagcctttggagatgtgaagttagaagacacctacttcgaccgggatgtggagaaggcattcatgaaggcatcatcagagttgttttcacagaagacgaaggcgtcattgctggtgtccaaccagaatgggaacatgtatacgtcgagcgtatatggatctctggcttctgtactggcacagtactctccccagcagcttgccggtaaacgaattggggtgttcagctacggctccggcttggccgccacactgtactccctgaaagtaacacaagacgccactcccggcagtgccttagataaaataaccgctagtctgtgcgacctgaaatcaagactggattcacgcacgggcgtggcccctgatgttttcgctgaaaatatgaaactccgagaagatactcaccatctggtgaactacatccctcaggggtcaattgattctttatttgaagggacgtggtacctcgtcagggtcgacgaaaagcatcgcaggacctatgctaggcgtccgacacccaatgacgacacactggatgaaggcgtgggactggtgcactcgaatattgccactgagcatattcccagccccgcgaagaaagtgccgagactccctgccacagctgcggaacctgaagccgctgtgatctcaaatggagaacattag

SEQ ID NO: 125538 - DNA, 1563 bp, Artificial Sequence
  derived and/or modified sequence
atgccaggttccctccctctgaacgccgaggcgtgttggccgaaggacgttggaatcgttgcacttgaaatttattttccctcccagtacgtggatcaggccgaactggaaaaatatgacggagtcgacgctggcaagtacactattgggctcggacaggctaaaatgggcttctgcacagaccgggaagatatcaattcattgtgtatgacagtcgtgcagaatttgatggagaggaacaatctcagctacgactgcatcggtcgcctggaagtcgggactgaaaccattattgataagtccaagagcgtcaaaaccaacctcatgcagctctttgaagaatctggcaatacggatatcgagggtatcgacaccacgaatgcatgttatggcgggactgctgctgtattcaacgcggtgaattggattgaaagttctagctgggacggtcgatacgcactggtagtcgccggggatattgctgtgtatgcaactggcaacgcccgacctactggcggagtgggggcagtggctctgctgattgggcccaacgcccccctcatctttgagagaggcctgcggggaacccacatgcaacacgcttatgacttctacaaaccggacatgctatctgaataccccatagtggatggcaagctgtccatccagtgctacctgtctgccctggatcggtgctacagtgtttattgcaaaaaaattcatgctcagtggcagaaggagggaaacgacaaagattttacactaaacgactttggattcatgatttttcacagcccatactgcaaattggtgcagaagtctctggcccgtatgctgctgaatgactttctcaatgatcagaaccgcgataagaattcaatctactcggggcttgaggccttcggtgatgtcaagcttgaagatacttactttgatagagacgtggagaaagcatttatgaaggcatcctcagagctgttcagccaaaagaccaaggctagtctgctggtgtccaaccaaaatgggaacatgtacacctcctcagtttatggctccctggccagcgtgcttgcccaatactcacctcagcaattggctggaaagcggattggtgttttttcttacggtagcggcctcgcggcgactttatattcactgaaggtgacccaggatgccacacccggctctgccttagacaagatcaccgcctcactgtgcgatcttaaatctagattagacagtagaaccggtgttgcaccagatgtgttcgcagagaacatgaagctcagagaagatactcaccatctggtgaactatattccacaggggtccatcgactctcttttcgagggtacatggtacttggtgagagttgacgagaaacatcggcggacctatgctcggaggccaacacccaacgatgacactcttgacgaaggggtggggctggtccattccaacatcgccacagaacacattccaagtccagcaaagaaagtgccccgccttccagctactgccgctgagcctgaggccgcagtgatttctaatggcgaacactag

SEQ ID NO: 125539 - DNA, 1530 bp, Artificial Sequence
  derived and/or modified sequence
atgccgggctccctgcccctaaacgcagaggcttgctggcccaaggatgtgggcattgtggcactggagatctacttccccagtcaatatgtggaccaggcagagcttgagaagtatgacggcgtggacgcggggaagtacactatcggactcgggcaagcgaaaatggggttctgtaccgaccgcgaggatattaactctctgtgcatgacagtggtccaaaatctaatggagcggaataacctctcctatgattgcatcggcaggcttgaagtgggaactgaaaccataatcgataaatctaagtcagtgaaaacaaatttaatgcagcttttcgaagagtctggcaacactgatatagaaggaattgacaccaccaacgccgtaaattggatcgagagttcctcatgggacggccggtacgccctagtggtcgccggggatattgctgtgtacgcgacaggcaacgcgagacccaccgggggagtgggcgcagttgccctcctgattggacccaacgcaccactaatttttgagagggggcttcgagggactcacatgcaacatgcttacgacttttataagcccgatatgctgtccgagtacccaattgtggacgggaaactgtcaatccagtgctacctcagcgccttggaccggtgctattcagtgtactgtaaaaagattcatgcccagtggcaaaaggagggcaacgacaaagatttcacactgaacgactttgggtttatgatctttcactccccttactgtaaactcgtacagaaaagcctggcacggatgctgcttaatgattttctgaatgatcagaacagggataagaactctatctactcgggcctggaagcattcggtgatgtgaagctagaggatacttattttgaccgggatgtggaaaaggccttcatgaaggcgtcctctgaactcttctcccagaagactaaagctagtctgctggtctcaaaccagaacgggaacatgtacacctctagcgtatacggctccttagcttctgtcctcgctcaatactcccctcagcagctcgctggaaagcgcatcggtgtgttctcatacgggtccgggctcgccgccacactgtactccctcaaggtgacacaagacgctacacctggctctgcactcgataagatcaccgctagtctctgcgacttgaaaagtaggctagacagtcgtaccggcgttgctcccgatgtgttcgccgagaacatgaagttgcgggaagacacccaccacctcgttaactatattcctcagggctcaattgactcactcttcgagggcacatggtatttggtgcgtgtggatgaaaaacaccggaggacatacgctagaagacctacccccaatgatgatacactagatgagggggttggcttggtgcactccaatatagctactgagcatatcccttccccagccaaaaaggtgccccggctgccggccaccgcagctgaacctgaagctgcagtcatctccaatggtgaacattag

SEQ ID NO: 125540 - DNA, 1563 bp, Artificial Sequence
  derived and/or modified sequence
atgcctggcagcctgcccctgaatgctgaggcctgctggcccaaggatgtgggcatcgtggccctggagatctacttccccagccagtatgtggaccaggccgagctggagaagtatgatggagtggatgctgggaagtacaccatcggcctgggccaggccaagatgggcttctgcacagaccgggaggacatcaacagcctgtgcatgacagtggtgcagaacctgatggagaggaacaacctgtcctatgactgcatcggccgcctggaggtgggcacagagaccatcatcgacaagagcaagtctgtgaagaccaacctgatgcagctgtttgaggagagcggcaacacagacatcgagggcatcgacaccaccaatgcctgctacggcggcacagctgctgtgttcaatgctgtgaactggattgagagcagctcctgggatggccgctatgccctggtggtggccggggacattgctgtgtatgccactggaaatgcccggcccactggaggagtgggcgctgtggccctgctgattggccccaatgcccccctcatctttgagcggggcctgcggggcacccacatgcagcacgcctatgacttctacaagccagacatgctgtctgagtaccccatcgtggatggcaagctgagcatccagtgctacctgagcgccctggaccgctgctacagcgtgtactgcaagaagatccacgcccagtggcagaaggagggcaatgacaaggacttcaccctgaatgactttggcttcatgatcttccacagcccctactgcaagctggtgcagaagagcctggccaggatgctgctgaatgacttcctgaatgaccagaacagagacaagaacagcatctacagcggcctggaggcctttggagatgtgaagctggaggacacctactttgacagagatgtggagaaggccttcatgaaggccagcagcgagctgttcagccagaagaccaaggccagcctgctggtgagcaaccagaatggaaacatgtacaccagctctgtgtatggcagcctggcctctgtgctggcccagtacagcccccagcagctggccggcaagagaattggagtcttctcctatggcagcggcctggccgccaccctgtacagcctgaaggtgacccaggatgccaccccaggcagcgccctggacaagatcacagccagcctgtgtgacctgaagagccggctggacagcaggactggagtggccccagatgtgtttgctgagaacatgaagctgcgggaggacacccaccacctggtgaactacatcccccagggcagcattgacagcctgtttgagggcacctggtacctggtgcgggtggatgagaagcacaggaggacctacgcccggcggcccaccccaaatgatgacaccctggatgagggcgtgggcctggtgcacagcaacatcgccacagagcacatccccagccctgccaagaaggtgccccggctgcctgccacagctgctgagcctgaggccgctgtgatcagcaatggagagcactag

SEQ ID NO: 125541 - DNA, 1530 bp, Artificial Sequence
  derived and/or modified sequence
atgcctggcagcctgcccctgaatgctgaggcctgctggcccaaggatgtgggcatcgtggccctggagatctacttccccagccagtatgtggaccaggccgagctggagaagtatgatggagtggatgctgggaagtacaccatcggcctgggccaggccaagatgggcttctgcacagaccgggaggacatcaacagcctgtgcatgacagtggtgcagaacctgatggagaggaacaacctgtcctatgactgcatcggccgcctggaggtgggcacagagaccatcatcgacaagagcaagtctgtgaagaccaacctgatgcagctgtttgaggagagcggcaacacagacatcgagggcatcgacaccaccaatgctgtgaactggattgagagcagctcctgggatggccgctatgccctggtggtggccggggacattgctgtgtatgccactggaaatgcccggcccaccggcggcgtgggcgctgtggccctgctgattggccccaatgcccccctcatctttgagcggggcctgcggggcacccacatgcagcacgcctatgacttctacaagccagacatgctgtctgagtaccccatcgtggatggcaagctgagcatccagtgctacctgagcgccctggaccgctgctacagcgtgtactgcaagaagatccacgcccagtggcagaaggagggcaatgacaaggacttcaccctgaatgactttggcttcatgatcttccacagcccctactgcaagctggtgcagaagagcctggccaggatgctgctgaatgacttcctgaatgaccagaacagagacaagaacagcatctacagcggcctggaggcctttggagatgtgaagctggaggacacctactttgacagagatgtggagaaggccttcatgaaggccagcagcgagctgttcagccagaagaccaaggccagcctgctggtgagcaaccagaatggaaacatgtacaccagctctgtgtatggcagcctggcctctgtgctggcccagtacagcccccagcagctggccggcaagagaattggagtcttctcctatggcagcggcctggccgccaccctgtacagcctgaaggtgacccaggatgccaccccaggcagcgccctggacaagatcacagccagcctgtgtgacctgaagagccggctggacagcaggactggagtggccccagatgtgtttgctgagaacatgaagctgcgggaggacacccaccacctggtgaactacatcccccagggcagcattgacagcctgtttgagggcacctggtacctggtgcgggtggatgagaagcacaggaggacctacgcccggcggcccaccccaaatgatgacaccctggatgaaggagtgggcctggtgcacagcaacatcgccacagagcacatccccagccctgccaagaaggtgccccggctgcctgccacagctgctgagcctgaggccgccgtcatcagcaatggagagcactag

SEQ ID NO: 125542 - DNA, 1563 bp, Artificial Sequence
  derived and/or modified sequence
atgcccggcagcctgcccctgaacgccgaggcctgctggcccaaggatgtgggcattgtcgcactggagatctacttcccatcacagtatgtggatcaggccgagcttgaaaagtacgacggcgttgacgccggtaaatatactattggtctggggcaggctaaaatggggttttgcactgatagagaggatatcaattcactatgcatgaccgttgtacagaatctcatggagcgaaacaacttgtcatacgactgcatcgggcgcctggaggtgggaacagaaactatcattgataagtcaaaatccgtcaagactaacctgatgcagctttttgaagagtctggtaacactgacattgaaggcatcgacacaactaacgcctgctatgggggcacagccgctgtctttaatgcagtgaattggatagagtcaagttcttgggacggcagatacgccttggttgtggcgggggacattgcggtctacgcgactggcaacgctcggccaaccggaggtgtgggagctgtcgccctgctgattgggccgaacgcccctttgatctttgaacgtggactccgcggcactcatatgcaacacgcgtatgacttttataagcccgatatgctgtctgaatatcctatcgtcgatgggaagctctccatccagtgctacctgtccgctttggaccgctgttacagcgtgtattgcaaaaaaattcatgcccagtggcagaaggagggcaatgacaaggatttcacgctaaatgactttggatttatgatctttcactccccttactgtaagctggttcagaaatctttggcaagaatgctcttgaatgactttctcaacgaccagaatagagataaaaactccatctactctgggctggaggccttcggtgacgtgaagcttgaggacacctactttgaccgggacgttgagaaagcctttatgaaggcctcgagtgagctgttttctcagaagacgaaagccagcttactggtcagtaatcagaatggaaatatgtacacctcatccgtgtacggatcactggcctcagtgctggctcagtatagtccccagcagcttgccggcaaacgaattggggtcttcagctatggttcaggcctggccgctaccctctactctctgaaagtcacgcaggatgcgaccccaggcagcgcgttggacaaaatcactgcatccctatgtgacttaaaaagccgactagacagtaggaccggcgtcgcacctgacgtcttcgctgaaaacatgaaacttcgcgaggatacccaccacctagtaaattacattccccagggctcaattgactcactgttcgaaggaacatggtatctcgtgcgtgttgacgaaaagcataggcgaacttatgcgcggcggccgactcccaatgatgacactctggacgagggagttggccttgtgcactcgaacatcgccacggagcatatcccttctcctgccaagaaagtccccagattaccagctactgcagctgagcctgaggccgccgtgatttcaaacggggagcactag

SEQ ID NO: 125543 - DNA, 1563 bp, Artificial Sequence
  derived and/or modified sequence
atgcccggcagcctgcccctgaacgccgaggcctgctggcccaaggatgtgggcattgtggccctcgaaatttatttcccatcgcagtacgtggaccaggcagagctcgaaaagtatgacggtgtggatgctggtaagtataccattggcctcggacaggccaaaatgggattctgcaccgatcgagaagacatcaactcactgtgcatgacagttgtgcagaatctgatggaaaggaataatttgagttatgattgtataggtcgactggaggtgggaacagaaacaatcatcgacaagtccaagtctgtgaaaacgaatcttatgcaactgttcgaggaatccggcaatacggatatcgaagggatcgataccacaaacgcatgttacggtgggacagccgcggtctttaacgctgtcaactggattgagtcctcttcttgggacggccgttatgcactggtagtggctggagacattgcagtatacgccacgggaaacgcacgccctaccggcggggtgggggccgtggctttgttgattggccccaacgctcctctgattttcgaacggggactcagaggaactcatatgcaacatgcatacgatttctataaacccgacatgctctccgagtatcctattgtcgatggaaagctgagtatccagtgctacttaagtgctctggatcgttgttactcggtgtattgcaagaaaatccacgcgcagtggcaaaaggaggggaacgataaagattttactcttaatgattttggctttatgatatttcacagtccctattgcaagcttgtgcagaagtcactcgcgaggatgctgctgaacgacttcctaaacgatcagaaccgggacaagaacagtatttatagcgggttggaagcctttggcgatgtaaaactggaggacacatactttgatagagatgtggagaaagcctttatgaaagccagcagtgagctgttttcacagaaaactaaagccagtctgctcgtgtccaaccagaatggaaatatgtacacaagctccgtgtacggaagccttgcttcggtgctggctcagtactccccgcaacagctcgcaggaaagcggatcggtgtgtttagctacggctccgggttagccgctacgctgtactcactcaaggtaacccaagacgcgactccgggaagcgcactggataaaatcaccgcctctctttgtgatctgaaatctaggcttgactcaagaaccggagtggcgcccgacgtctttgccgagaatatgaagctgcgggaggatacacatcatctagtgaattacattccacaaggatctatagactcgctgtttgaaggaacttggtatctggtgcgagtagacgagaagcatcggcggacgtacgcccgacgtcctacccccaacgatgacactctggacgagggagttgggctggtccattctaatatcgcaactgagcatatacctagccccgcgaaaaaggtcccgagactgccggcgaccgccgcagaaccagaagcggcggtgatcagcaatggcgaacattag

SEQ ID NO: 125544 - DNA, 1530 bp, Artificial Sequence
  derived and/or modified sequence
atgcccggcagcctgcccctgaacgccgaggcctgctggcccaaggatgtggggatagtcgcactcgagatttatttcccgagccagtacgtagaccaggccgaactggagaagtatgatggcgtggacgcagggaagtatactatcggcttaggccaggcaaaaatgggtttctgcaccgacagggaggatatcaattccctgtgtatgacggtagtgcagaacttaatggagcgcaacaatctgtcttacgattgtatcggacgccttgaggttggaaccgagaccataatcgataagtctaagagtgtgaagactaacctgatgcagctcttcgaagagtcagggaataccgacatcgaaggaattgacacaacgaatgcagttaactggattgaatcatccagctgggatgggaggtacgccctggtggttgcaggagatattgcggtgtacgccacggggaacgcacgccctacgggcggggtaggggcagttgcactcctgatcggacctaatgcccccctgatcttcgagcgagggttgagagggactcatatgcaacatgcgtacgacttttataagccagatatgctgtcggagtaccctatcgtcgacggaaagctgagcattcagtgctacctgagtgcgctcgatcggtgctattctgtatactgcaaaaagattcacgcccaatggcaaaaggagggcaatgataaagatttcaccctcaacgacttcggcttcatgatctttcactcaccttactgtaagctggttcagaagtctctggcaagaatgctgctaaacgatttcttgaatgaccagaaccgggacaagaacagcatttacagcgggctcgaggcctttggtgatgtaaagctggaagacacctatttcgatcgggacgtcgagaaagcattcatgaaagcaagcagtgagctgttctcccagaaaacaaaggcgagtctgctcgtaagcaatcagaatggaaacatgtatacctccagtgtgtatgggagtcttgcctccgtgctggcacaatactcccctcagcagctagcgggtaagcgtataggagtgttcagctacgggtccgggctggccgcaacactatactctctcaaagtcacacaagatgccacccccgggagcgctctcgataaaatcactgcttcactctgtgacttgaaaagtagactggactcccggactggagtcgcaccagatgtgtttgcggagaacatgaagctgagagaggacacgcatcatctggtcaactacattcctcagggcagtatcgattctctctttgaaggcacatggtatctggtgcgggtcgatgagaaacataggcgaacctatgccaggcggcctaccccaaacgatgataccttggacgaaggtgtcgggttagtgcacagcaatattgccaccgagcatattccctcaccagccaagaaagtgccccgcctgccagctactgctgcggagccagaggctgcagttattagcaatggtgaacactag

SEQ ID NO: 125545 - DNA, 1563 bp, Artificial Sequence
  derived and/or modified sequence
atgcctggatctttgccactaaatgctgaagcctgctggcctaaggacgtcggaattgtcgccctagaaatttacttcccctcacagtacgttgatcaggcggagctggaaaagtacgacggtgtagacgccggtaagtacacaatcggactcggccaggcaaagatgggattttgcactgacagagaagacataaattctctgtgtatgacggtggtgcagaatttgatggaaaggaataatttaagttatgattgcatcgggagactggaagtgggaacagagacaatcattgacaaatccaaaagcgtgaaaacaaatttaatgcaactgtttgaagagtcaggaaatacggacatcgaggggatagatacgacaaacgcgtgctacggcggtacagcagccgtgttcaacgccgtgaattggatcgagagtagctcttgggacggccgatacgctttggtggttgctggggatatcgcagtctatgctactggtaatgccagaccaacaggtggcgtgggcgcagtggcactattgatcggacctaatgctccattaattttcgagcgcggtctccggggaactcatatgcagcatgcctacgatttttataagcccgatatgctctcagagtatccgatcgtagacgggaagctgtctattcaatgctacctctctgccttggatcgatgttacagtgtttattgtaaaaagattcacgctcagtggcagaaggaaggcaatgacaaggacttcacacttaatgacttcgggttcatgatcttccactccccttattgcaagctggtacagaagtctttagcaaggatgctgctcaatgatttcttgaatgaccagaacagagataagaactcaatctatagcggtctggaggcgttcggcgatgtcaagcttgaggatacttatttcgacagggacgtcgagaaggcattcatgaaagctagctccgagttgttctcccagaaaacgaaagcttcacttctggtgtctaaccagaacggaaacatgtacacgagctcagtctacggttccttggcttctgtgcttgctcagtacagtccacagcagcttgctggtaagcggataggtgtgttctcgtacggaagcgggcttgcagctaccctctactctttaaaggtcacacaggacgccactcccggtagtgcattagacaaaattactgcctccctttgtgatctgaagtctcggttggatagcagaaccggagtcgcgccagatgtgtttgctgagaacatgaaactgcgggaagacacacatcaccttgtgaattatatcccacaagggtcaatcgatagtctattcgaggggacttggtatttagtaagagttgatgagaaacacaggcgaacatacgccaggcgacctacacctaacgatgacacacttgacgagggcgtcggcctggtgcattcaaatatcgccacagagcacatacccagtcctgctaagaaggtcccgaggctccctgccaccgccgctgagccggaggctgctgtaatttccaatggagaacactag

SEQ ID NO: 125546 - DNA, 1563 bp, Artificial Sequence
  derived and/or modified sequence
atgcctggatcactgcctctcaacgccgaggcgtgttggccgaaagatgtgggaattgtggcgctcgaaatttacttcccttcccaatacgtggatcaagccgagttagaaaagtatgatggcgtggatgcaggtaagtacaccattggactcggccaggctaagatgggtttctgtactgatcgcgaagatatcaactcattgtgcatgaccgtggtgcagaatctgatggagcgaaataacctgagctacgattgtattgggaggcttgaagtaggaactgagactatcattgacaaatcaaagagtgtcaaaacaaatttgatgcagttatttgaggaaagcggaaacactgatatcgagggcattgacaccacgaacgcatgttatggcggaactgcagcagtgtttaacgctgtcaactggattgagtcgagtagctgggacggaagatacgcactagtcgtcgccggtgatatcgctgtgtacgccacaggtaacgctcggccaacaggcggagtcggagccgtggcgctgctgattggacctaacgctccgttgattttcgagcggggactcaggggaactcacatgcagcacgcctatgatttctataaacctgacatgctgtccgagtatcccattgtggacggcaaactttccatccaatgttacctgtcggcactggaccgttgttacagcgtttactgtaagaaaattcacgcgcaatggcagaaagaaggtaacgacaaggacttcaccctgaatgactttggatttatgatttttcactcaccgtactgtaaacttgtgcaaaagagtctggccaggatgctgttgaacgattttctcaatgatcagaaccgggacaaaaactcgatctacagtggcctggaagcttttggcgacgttaagctagaggatacctatttcgacagggatgtggagaaagccttcatgaaggcctcatcagagttgttctcccaaaagaccaaggcgtctcttttggtctcaaaccagaatggcaacatgtatacttccagcgtctatgggtcactcgccagtgttctggctcagtactcaccccagcagttggctggcaaaaggatcggcgtgtttagttatggaagcgggctcgcggcaactctgtactctctcaaggttacacaggacgcaacaccgggaagtgctctcgacaagatcaccgcctctctttgtgacctaaagtcgaggcttgattcccgaactggtgtcgctccggacgtgtttgccgaaaatatgaaactgcgagaggacacccaccatttggtgaactacatacctcaaggaagcatcgattctcttttcgagggaacctggtatctggtgcgggtggacgaaaagcacagaagaacgtacgctcggaggccaacccccaacgacgatacacttgatgaaggcgtggggttagtacactctaacattgccaccgaacatattccctcaccagctaagaaagtccctcggctgcccgcaactgctgcagaaccggaggctgcagtcatctctaatggcgagcactag

SEQ ID NO: 125547 - DNA, 1530 bp, Artificial Sequence
  derived and/or modified sequence
atgccaggaagcctgccactgaacgcagaagcttgttggccgaaggatgtcggcattgtcgctctggagatctacttcccatcacagtatgtcgatcaggcagagctcgagaagtacgacggcgtggacgccggaaagtataccattgggctgggccaggcaaaaatgggcttctgcactgacagagaagatattaacagtctgtgcatgaccgtcgtccagaacttgatggaacggaataatctgtcgtacgactgcattggcaggctcgaggttggaacagagacaatcatagataagtctaaatctgtcaagactaatcttatgcaactgttcgaggagtcgggcaacacagacatcgaggggattgacactactaacgccgttaactggatcgaaagcagcagctgggatggacgctatgctctcgttgtggcgggtgacatcgccgtgtacgccactggaaatgccaggcccaccggcggtgtgggagccgtggccctactgataggaccaaatgcacctcttatcttcgaaagggggctgcggggtactcacatgcagcacgcttatgacttttataaacccgatatgttgtccgaataccctattgtcgatgggaagttgtcgatccaatgttatctgtccgctctggacagatgctacagtgtgtactgtaagaaaatccatgcccagtggcagaaagaggggaacgataaggactttacactgaatgatttcggattcatgatttttcattcgccttattgtaaactggtgcagaagtccctggctcggatgttattgaacgattttctgaacgatcaaaaccgcgataagaacagtatatacagcggactggaggcttttggggacgtgaagcttgaagacacctacttcgatcgggatgtggagaaggcctttatgaaggcttctagtgaattattcagccagaagaccaaggcatccctgctggtaagcaaccaaaacggtaatatgtacacctccagcgtctacggctcgcttgcctctgtgttggcacagtattctccccaacagctggcagggaagagaattggtgtttttagctacggatccggccttgctgcaactctgtatagtctgaaggtcacgcaggatgctacgccaggaagcgcgctcgacaagattacggcgagcctctgcgatcttaaaagcagactcgactctcgcaccggcgtggcacctgatgtgttcgctgagaacatgaagctccgcgaggacactcaccaccttgttaactacattcctcaggggtctattgatagtctgtttgaggggacctggtacctggttcgcgtggacgagaaacatcgcagaacctatgccaggcggccaaccccgaacgatgacacattagacgaaggagtgggtctggtgcacagcaacattgccacagagcatatcccatctcccgcaaagaaggtaccgaggctaccggctacggcagccgaacccgaagccgcagtaataagcaacggcgaacattag

SEQ ID NO: 125548 - DNA, 3506 bp, Artificial Sequence
  derived and/or modified sequence
gtcccgcctcccagcgactctcggcggtgccggagtcgggtgggttggcggctataaagctggtggcgaaggggaggcgccgcggactgtcctttcgtggctcactccctttcctctgctgccgctcggtcacgcttgtgcccgaaggaggaaacagtgacagacctggagactgcagttctctatccttcacacagctctttcaccatgcctggatcacttcctttgaatgcagaagcttgctggccaaaagatgtgggaattgttgcccttgagatctattttccttctcaatatgttgatcaagcagagttggaaaaatatgatggtgtagatgctggaaagtataccattggcttgggccaggccaagatgggcttctgcacagatagagaagatattaactctctttgcatgactgtggttcagaatcttatggagagaaataacctttcctatgattgcattgggcggctggaagttggaacagagacaatcatcgacaaatcaaagtctgtgaagactaatttgatgcagctgtttgaagagtctgggaatacagatatagaaggaatcgacacaactaatgcatgctatggaggcacagctgctgtcttcaatgctgttaactggattgagtccagctcttgggatggacggtatgccctggtagttgcaggagatattgctgtatatgccacaggaaatgctagacctacaggtggagttggagcagtagctctgctaattgggccaaatgctcctttaatttttgaacgagggcttcgtgggacacatatgcaacatgcctatgatttttacaagcctgatatgctatctgaatatcctatagtagatggaaaactctccatacagtgctacctcagtgcattagaccgctgctattctgtctactgcaaaaagatccatgcccagtggcagaaagagggaaatgataaagattttaccttgaatgattttggcttcatgatctttcactcaccatattgtaaactggttcagaaatctctagctcggatgttgctgaatgacttccttaatgaccagaatagagataaaaatagtatctatagtggcctggaagcctttggggatgttaaattagaagacacctactttgatagagatgtggagaaggcatttatgaaggctagctctgaactcttcagtcagaaaacaaaggcatctttacttgtatcaaatcaaaatggaaatatgtacacatcttcagtatatggttcccttgcatctgttctagcacagtactcacctcagcaattagcagggaagagaattggagtgttttcttatggttctggtttggctgccactctgtactctcttaaagtcacacaagatgctacaccggggtctgctcttgataaaataacagcaagtttatgtgatcttaaatcaaggcttgattcaagaactggtgtggcaccagatgtcttcgctgaaaacatgaagctcagagaggacacccatcatttggtcaactatattccccagggttcaatagattcactctttgaaggaacgtggtacttagttagggtggatgaaaagcacagaagaacttacgctcggcgtcccactccaaatgatgacactttggatgaaggagtaggacttgtgcattcaaacatagcaactgagcatattccaagccctgccaagaaagtaccaagactccctgccacagcagcagaacctgaagcagctgtcattagtaatggggaacattaagatactctgtgaggtgcaagacttcagggtggggtgggcatggggtgggggtatgggaacagttggaggaatgggatatctggggataattttaaaggattacatgttatgtaaatttttatgtgactgacatggagcctggatgactatcgtgtacttgggaaagtctctttgctctatttgctgacatgcttcctgttgtggtctggccaatgccaaatgtactcgaatgatgttaagggctctgtaaaacttcatacctctttggccatttgtatgcatgatgtttggtttttaaacatggtataatgaattgtgtacttctgtcagaagaaagcagaggtactaatctccaattaaaaaattttttaacatgtaagaattttgtactttgaacaacaagattacagaaagtacctgtggtttttggaaaacatttctagcttggggaatgtgacaacattccccagtgtggtaaaattggggtaaaatgtggtaaaatgtgatacgcacaaaccctttgaaaatagcaaaacaaacatgccctttttctaaaattgataaatcctaaagaggaagaaaagagctgggacaataaaacactggctctggaatctggaatgttaagtccaggccagcagtgacaaaagttattgtaatgacctctgaacagagaaacactgccattgaagaggcttctggtatagaaaacatggtacattcaggagctgtgaatatagctctaggtgtgctcctgaatcagttcatggtagattatgctgaacaacagtgagatgttattggaggtgtggatgagggagtttgttgttgcagtccttctttgcaccttattttaaagaataaatgaaacatttttctggttacttttttaaaaatttaaaatggaagggaagaataggggcagggcattattaggctatttctgatgcttcagtgttataaattcaacatagaggctgacaacctaaattcatggtgtaacacagctcttttccttttccttttttttttttttttggtatctgttcaatgaaaataaggtatgacccaagtttttacctagtctgactagaagtattccacttcaaggtctgaagtaggacttttaccttaaaaaacaacaacaaacaaaactatcacacaggatagataagaagattggttaaacagttttgtgtagatctttttggtgctgaactatgacatgagccttatagattgtaaaatagggatagttggaactaatgtacagaactaaattttttaaactttatttgctgttaaattctgtgaagtttcagttatctaaaataaatatacacaaatatgaaatataatgtttcagattgcaaggtaatatgtaatagtagtgtttgtaagatactcttgtctaatattaactagtagtattttgatttgtacagtcataatttgttaaaatgacttcatttaacattcactgatgtagattaataatgtaagttctgatttaaagaatggtggcaaaatggtgcatgtaatacttttgcaagtgttggggagatcggtatgttttgaaaagagtaatttaacttttgggtgccaggaaatgggttttctcaaagtccattgccggcaatgggcaggcctgcaaatactggcacagagcattaatcatacaccttattaacggtgaggtgaataactttgaaataaagttttagagaaatgtttca

SEQ ID NO: 125549 - DNA, 3466 bp, Artificial Sequence
  derived and/or modified sequence
attggctgtgggagccaccgtcccgcctcccagcgactctcggcggtgccggagtcgggtgggttggcggctataaagctggtggcgaaggggaggcgccgcggactgtcctttcgtggctcactccctttcctctgctgccgctcggtcacgcttgctctttcaccatgcctggatcacttcctttgaatgcagaagcttgctggccaaaagatgtgggaattgttgcccttgagatctattttccttctcaatatgttgatcaagcagagttggaaaaatatgatggtgtagatgctggaaagtataccattggcttgggccaggccaagatgggcttctgcacagatagagaagatattaactctctttgcatgactgtggttcagaatcttatggagagaaataacctttcctatgattgcattgggcggctggaagttggaacagagacaatcatcgacaaatcaaagtctgtgaagactaatttgatgcagctgtttgaagagtctgggaatacagatatagaaggaatcgacacaactaatgcatgctatggaggcacagctgctgtcttcaatgctgttaactggattgagtccagctcttgggatggacggtatgccctggtagttgcaggagatattgctgtatatgccacaggaaatgctagacctacaggtggagttggagcagtagctctgctaattgggccaaatgctcctttaatttttgaacgagggcttcgtgggacacatatgcaacatgcctatgatttttacaagcctgatatgctatctgaatatcctatagtagatggaaaactctccatacagtgctacctcagtgcattagaccgctgctattctgtctactgcaaaaagatccatgcccagtggcagaaagagggaaatgataaagattttaccttgaatgattttggcttcatgatctttcactcaccatattgtaaactggttcagaaatctctagctcggatgttgctgaatgacttccttaatgaccagaatagagataaaaatagtatctatagtggcctggaagcctttggggatgttaaattagaagacacctactttgatagagatgtggagaaggcatttatgaaggctagctctgaactcttcagtcagaaaacaaaggcatctttacttgtatcaaatcaaaatggaaatatgtacacatcttcagtatatggttcccttgcatctgttctagcacagtactcacctcagcaattagcagggaagagaattggagtgttttcttatggttctggtttggctgccactctgtactctcttaaagtcacacaagatgctacaccggggtctgctcttgataaaataacagcaagtttatgtgatcttaaatcaaggcttgattcaagaactggtgtggcaccagatgtcttcgctgaaaacatgaagctcagagaggacacccatcatttggtcaactatattccccagggttcaatagattcactctttgaaggaacgtggtacttagttagggtggatgaaaagcacagaagaacttacgctcggcgtcccactccaaatgatgacactttggatgaaggagtaggacttgtgcattcaaacatagcaactgagcatattccaagccctgccaagaaagtaccaagactccctgccacagcagcagaacctgaagcagctgtcattagtaatggggaacattaagatactctgtgaggtgcaagacttcagggtggggtgggcatggggtgggggtatgggaacagttggaggaatgggatatctggggataattttaaaggattacatgttatgtaaatttttatgtgactgacatggagcctggatgactatcgtgtacttgggaaagtctctttgctctatttgctgacatgcttcctgttgtggtctggccaatgccaaatgtactcgaatgatgttaagggctctgtaaaacttcatacctctttggccatttgtatgcatgatgtttggtttttaaacatggtataatgaattgtgtacttctgtcagaagaaagcagaggtactaatctccaattaaaaaattttttaacatgtaagaattttgtactttgaacaacaagattacagaaagtacctgtggtttttggaaaacatttctagcttggggaatgtgacaacattccccagtgtggtaaaattggggtaaaatgtggtaaaatgtgatacgcacaaaccctttgaaaatagcaaaacaaacatgccctttttctaaaattgataaatcctaaagaggaagaaaagagctgggacaataaaacactggctctggaatctggaatgttaagtccaggccagcagtgacaaaagttattgtaatgacctctgaacagagaaacactgccattgaagaggcttctggtatagaaaacatggtacattcaggagctgtgaatatagctctaggtgtgctcctgaatcagttcatggtagattatgctgaacaacagtgagatgttattggaggtgtggatgagggagtttgttgttgcagtccttctttgcaccttattttaaagaataaatgaaacatttttctggttacttttttaaaaatttaaaatggaagggaagaataggggcagggcattattaggctatttctgatgcttcagtgttataaattcaacatagaggctgacaacctaaattcatggtgtaacacagctcttttccttttccttttttttttttttttggtatctgttcaatgaaaataaggtatgacccaagtttttacctagtctgactagaagtattccacttcaaggtctgaagtaggacttttaccttaaaaaacaacaacaaacaaaactatcacacaggatagataagaagattggttaaacagttttgtgtagatctttttggtgctgaactatgacatgagccttatagattgtaaaatagggatagttggaactaatgtacagaactaaattttttaaactttatttgctgttaaattctgtgaagtttcagttatctaaaataaatatacacaaatatgaaatataatgtttcagattgcaaggtaatatgtaatagtagtgtttgtaagatactcttgtctaatattaactagtagtattttgatttgtacagtcataatttgttaaaatgacttcatttaacattcactgatgtagattaataatgtaagttctgatttaaagaatggtggcaaaatggtgcatgtaatacttttgcaagtgttggggagatcggtatgttttgaaaagagtaatttaacttttgggtgccaggaaatgggttttctcaaagtccattgccggcaatgggcaggcctgcaaatactggcacagagcattaatcatacaccttattaacggtgaggtgaataactttgaaataaagttttagagaaatgtttca

SEQ ID NO: 125550 - DNA, 3195 bp, Artificial Sequence
  derived and/or modified sequence
gcggactgtcctttcgtggctcactccctttcctctgctgccgctcggtcacgcttgctctttcaccatgcctggatcacttcctttgaatgcagaagcttgctggccaaaagatgtgggaattgttgcccttgagatctattttccttctcaatatgttgatcaagcagagttggaaaaatatgatggtgtagatgctggaaagtataccattggcttgggccaggccaagatgggcttctgcacagatagagaagatattaactctctttgcatgactgtggttcagaatcttatggagagaaataacctttcctatgattgcattgggcggctggaagttggaacagagacaatcatcgacaaatcaaagtctgtgaagactaatttgatgcagctgtttgaagagtctgggaatacagatatagaaggaatcgacacaactaatgctgttaactggattgagtccagctcttgggatggacggtatgccctggtagttgcaggagatattgctgtatatgccacaggaaatgctagacctacaggtggagttggagcagtagctctgctaattgggccaaatgctcctttaatttttgaacgagggcttcgtgggacacatatgcaacatgcctatgatttttacaagcctgatatgctatctgaatatcctatagtagatggaaaactctccatacagtgctacctcagtgcattagaccgctgctattctgtctactgcaaaaagatccatgcccagtggcagaaagagggaaatgataaagattttaccttgaatgattttggcttcatgatctttcactcaccatattgtaaactggttcagaaatctctagctcggatgttgctgaatgacttccttaatgaccagaatagagataaaaatagtatctatagtggcctggaagcctttggggatgttaaattagaagacacctactttgatagagatgtggagaaggcatttatgaaggctagctctgaactcttcagtcagaaaacaaaggcatctttacttgtatcaaatcaaaatggaaatatgtacacatcttcagtatatggttcccttgcatctgttctagcacagtactcacctcagcaattagcagggaagagaattggagtgttttcttatggttctggtttggctgccactctgtactctcttaaagtcacacaagatgctacaccggggtctgctcttgataaaataacagcaagtttatgtgatcttaaatcaaggcttgattcaagaactggtgtggcaccagatgtcttcgctgaaaacatgaagctcagagaggacacccatcatttggtcaactatattccccagggttcaatagattcactctttgaaggaacgtggtacttagttagggtggatgaaaagcacagaagaacttacgctcggcgtcccactccaaatgatgacactttggatgaaggagtaggacttgtgcattcaaacatagcaactgagcatattccaagccctgccaagaaagtaccaagactccctgccacagcagcagaacctgaagcagctgtcattagtaatggggaacattaagatactctgtgaggtgcaagacttcagggtggggtgggcatggggtgggggtatgggaacagttggaggaatgggatatctggggataattttaaaggattacatgttatgtaaatttttatgtgactgacatggagcctggatgactatcgtgtacttgggaaagtctctttgctctatttgctgacatgcttcctgttgtggtctggccaatgccaaatgtactcgaatgatgttaagggctctgtaaaacttcatacctctttggccatttgtatgcatgatgtttggtttttaaacatggtataatgaattgtgtacttctgtcagaagaaagcagaggtactaatctccaattaaaaaattttttaacatgtaagaattttgtactttgaacaacaagattacagaaagtacctgtggtttttggaaaacatttctagcttggggaatgtgacaacattccccagtgtggtaaaattggggtaaaatgtggtaaaatgtgatacgcacaaaccctttgaaaatagcaaaacaaacatgccctttttctaaaattgataaatcctaaagaggaagaaaagagctgggacaataaaacactggctctggaatctggaatgttaagtccaggccagcagtgacaaaagttattgtaatgacctctgaacagagaaacactgccattgaagaggcttctggtatagaaaacatggtacattcaggagctgtgaatatagctctaggtgtgctcctgaatcagttcatggtagattatgctgaacaacagtgagatgttattggaggtgtggatgagggagtttgttgttgcagtccttctttgcaccttattttaaagaataaatgaaacatttttctggttacttttttttttttttttggtatctgttcaatgaaaataaggtatgacccaagtttttacctagtctgactagaagtattccacttcaaggtctgaagtaggacttttaccttaaaaaacaacaacaaacaaaactatcacacaggatagataagaagattggttaaacagttttgtgtagatctttttggtgctgaactatgacatgagccttatagattgtaaaatagggatagttggaactaatgtacagaactaaattttttaaactttatttgctgttaaattctgtgaagtttcagttatctaaaataaatatacacaaatatgaaatataatgtttcagattgcaaggtaatatgtaatagtagtgtttgtaagatactcttgtctaatattaactagtagtattttgatttgtacagtcataatttgttaaaatgacttcatttaacattcactgatgtagattaataatgtaagttctgatttaaagaatggtggcaaaatggtgcatgtaatacttttgcaagtgttggggagatcggtatgttttgaaaagagtaatttaacttttgggtgccaggaaatgggttttctcaaagtccattgccggcaatgggcaggcctgcaaatactggcacagagcattaatcatacaccttattaacggtgaggtgaataactttgaaataaagttttagagaaatgtttc

SEQ ID NO: 125551 - DNA, 1563 bp, Artificial Sequence
  derived and/or modified sequence
atgcccggcagcctgcccctgaacgccgaggcctgctggcccaaggacgtgggcatcgtggccctggagatctacttccccagccagtacgtggaccaggccgagctggagaagtacgacggcgtggacgccggcaagtacaccatcggcctgggccaggccaagatgggcttctgcaccgacagagaggacatcaacagcctgtgcatgaccgtggtgcagaacctgatggagagaaacaacctgagctacgactgcatcggcagactggaggtgggcaccgagaccatcatcgacaagagcaagagcgtgaagaccaacctgatgcagctgttcgaggagagcggcaacaccgacatcgagggcatcgacaccaccaacgcctgctacggcggcaccgccgccgtgttcaacgccgtgaactggatcgagagcagcagctgggacggcagatacgccctggtggtggccggcgacatcgccgtgtacgccaccggcaacgccagacccaccggcggcgtgggcgccgtggccctgctgatcggccccaacgcccccctgatcttcgagagaggcctgagaggcacccacatgcagcacgcctacgacttctacaagcccgacatgctgagcgagtaccccatcgtggacggcaagctgagcatccagtgctacctgagcgccctggacagatgctacagcgtgtactgcaagaagatccacgcccagtggcagaaggagggcaacgacaaggacttcaccctgaacgacttcggcttcatgatcttccacagcccctactgcaagctggtgcagaagagcctggccagaatgctgctgaacgacttcctgaacgaccagaacagagacaagaacagcatctacagcggcctggaggccttcggcgacgtgaagctggaggacacctacttcgacagagacgtggagaaggccttcatgaaggccagcagcgagctgttcagccagaagaccaaggccagcctgctggtgagcaaccagaacggcaacatgtacaccagcagcgtgtacggcagcctggccagcgtgctggcccagtacagcccccagcagctggccggcaagagaatcggcgtgttcagctacggcagcggcctggccgccaccctgtacagcctgaaggtgacccaggacgccacccccggcagcgccctggacaagatcaccgccagcctgtgcgacctgaagagcagactggacagcagaaccggcgtggcccccgacgtgttcgccgagaacatgaagctgagagaggacacccaccacctggtgaactacatcccccagggcagcatcgacagcctgttcgagggcacctggtacctggtgagagtggacgagaagcacagaagaacctacgccagaagacccacccccaacgacgacaccctggacgagggcgtgggcctggtgcacagcaacatcgccaccgagcacatccccagccccgccaagaaggtgcccagactgcccgccaccgccgccgagcccgaggccgccgtgatcagcaacggcgagcactag

SEQ ID NO: 125552 - DNA, 1530 bp, Artificial Sequence
  derived and/or modified sequence
atgcccggcagcctgcccctgaacgccgaggcctgctggcccaaggacgtgggcatcgtggccctggagatctacttccccagccagtacgtggaccaggccgagctggagaagtacgacggcgtggacgccggcaagtacaccatcggcctgggccaggccaagatgggcttctgcaccgacagagaggacatcaacagcctgtgcatgaccgtggtgcagaacctgatggagagaaacaacctgagctacgactgcatcggcagactggaggtgggcaccgagaccatcatcgacaagagcaagagcgtgaagaccaacctgatgcagctgttcgaggagagcggcaacaccgacatcgagggcatcgacaccaccaacgccgtgaactggatcgagagcagcagctgggacggcagatacgccctggtggtggccggcgacatcgccgtgtacgccaccggcaacgccagacccaccggcggcgtgggcgccgtggccctgctgatcggccccaacgcccccctgatcttcgagagaggcctgagaggcacccacatgcagcacgcctacgacttctacaagcccgacatgctgagcgagtaccccatcgtggacggcaagctgagcatccagtgctacctgagcgccctggacagatgctacagcgtgtactgcaagaagatccacgcccagtggcagaaggagggcaacgacaaggacttcaccctgaacgacttcggcttcatgatcttccacagcccctactgcaagctggtgcagaagagcctggccagaatgctgctgaacgacttcctgaacgaccagaacagagacaagaacagcatctacagcggcctggaggccttcggcgacgtgaagctggaggacacctacttcgacagagacgtggagaaggccttcatgaaggccagcagcgagctgttcagccagaagaccaaggccagcctgctggtgagcaaccagaacggcaacatgtacaccagcagcgtgtacggcagcctggccagcgtgctggcccagtacagcccccagcagctggccggcaagagaatcggcgtgttcagctacggcagcggcctggccgccaccctgtacagcctgaaggtgacccaggacgccacccccggcagcgccctggacaagatcaccgccagcctgtgcgacctgaagagcagactggacagcagaaccggcgtggcccccgacgtgttcgccgagaacatgaagctgagagaggacacccaccacctggtgaactacatcccccagggcagcatcgacagcctgttcgagggcacctggtacctggtgagagtggacgagaagcacagaagaacctacgccagaagacccacccccaacgacgacaccctggacgagggcgtgggcctggtgcacagcaacatcgccaccgagcacatccccagccccgccaagaaggtgcccagactgcccgccaccgccgccgagcccgaggccgccgtgatcagcaacggcgagcactag

SEQ ID NO: 125553 - protein, 288 aa, Artificial Sequence
  derived and/or modified sequence
MERPQPDSMPQDLSEALKEATKEVHTQAENAEFMRNFQKGQVTRDGFKLVMASLYHIYVALEEEIERNKESPVFAPVYFPEELHRKAALEQDLAFWYGPRWQEVIPYTPAMQRYVKRLHEVGRTEPELLVAHAYTRYLGDLSGGQVLKKIAQKALDLPSSGEGLAFFTFPNIASATKFKQLYRSRMNSLEMTPAVRQRVIEEAKTAFLLNIQLFEELQELLTHDTKDQSPSRAPGLRQRASNKVQDSAPVETPRGKPPLNTRSQAPLLRWVLTLSFLVATVAVGLYAM

SEQ ID NO: 125554 - protein, 187 aa, Artificial Sequence
  derived and/or modified sequence
MERPQPDSMPQDLSEALKEATKEVHTQAENAEFMRNFQKGQVTRDGFKLVMASLYHIYVALEEEIERNKESPVFAPVYFPEELHRKAALEQDLAFWYGPRWQEVIPYTPAMQRYVKRLHEVGRTEPELLVAHAYTRYLGDLSGGQVLKKIAQKALDLPSSGEGLAFFTFPNIASATKFKQLYRSRMN

SEQ ID NO: 125555 - DNA, 564 bp, Artificial Sequence
  derived and/or modified sequence
atggagagaccccagcccgacagcatgccccaggacctgagcgaggccctgaaggaggccaccaaggaggtgcacacccaggccgagaacgccgagttcatgagaaacttccagaagggccaggtgaccagagacggcttcaagctggtgatggccagcctgtaccacatctacgtggccctggaggaggagatcgagagaaacaaggagagccccgtgttcgcccccgtgtacttccccgaggagctgcacagaaaggccgccctggagcaggacctggccttctggtacggccccagatggcaggaggtgatcccctacacccccgccatgcagagatacgtgaagagactgcacgaggtgggcagaaccgagcccgagctgctggtggcccacgcctacaccagatacctgggcgacctgagcggcggccaggtgctgaagaagatcgcccagaaggccctggacctgcccagcagcggcgagggcctggccttcttcaccttccccaacatcgccagcgccaccaagttcaagcagctgtacagaagcagaatgaactag

SEQ ID NO: 125556 - DNA, 564 bp, Artificial Sequence
  derived and/or modified sequence
atggaacgacctcagcctgacagcatgccccaggacctgtcagaagctctaaaagaggctactaaggaagtgcacacacaggcggagaacgcggagtttatgaggaatttccagaaaggccaggttacacgcgatggattcaaactagtcatggctagtctctaccacatctatgttgcgttggaggaagagatcgagagaaataaagagtccccagttttcgctcccgtttatttcccagaggagcttcaccgtaaggccgcattggaacaagatctcgctttctggtacgggccaagatggcaggaagtgataccgtacaccccggccatgcaacgttatgtgaagaggttacacgaggtgggcaggaccgaacccgaactgttagtggctcacgcctacacgagataccttggggacttatccggcgggcaggttctcaaaaagatcgcgcagaaggcattggacctcccttcaagtggcgagggtctcgctttcttcacattccctaacatcgcatcagccactaaattcaaacaattgtatcggtcaagaatgaattag

SEQ ID NO: 125557 - DNA, 1822 bp, Artificial Sequence
  derived and/or modified sequence
gtgtgtgtgtgtgtgtgtgtgtgtgtgtgtatgtgtgtgtgtgtgtgtgtgtgtgtgtgttttctctaaaagtcctatggccagactttgtttcccaagggtcatatgactgctcctctccaccccacactggcccggggcgggctgggcgcgggcccctgcgggtgttgcaacgcccggccagaaagtgggcatcagctgttccgcctggcccacgtgacccgccgagcataaatgtgaccggccgcggctccggcagtcaacgcctgcctcctctcgagcgtcctcagcgcagccgccgcccgcggagccagcacgaacgagcccagcaccggccggatggagcgtccgcaacccgacagcatgccccaggatttgtcagaggccctgaaggaggccaccaaggaggtgcacacccaggcagagaatgctgagttcatgaggaactttcagaagggccaggtgacccgagacggcttcaagctggtgatggcctccctgtaccacatctatgtggccctggaggaggagattgagcgcaacaaggagagcccagtcttcgcccctgtctacttcccagaagagctgcaccgcaaggctgccctggagcaggacctggccttctggtacgggccccgctggcaggaggtcatcccctacacaccagccatgcagcgctatgtgaagcggctccacgaggtggggcgcacagagcccgagctgctggtggcccacgcctacacccgctacctgggtgacctgtctgggggccaggtgctcaaaaagattgcccagaaagccctggacctgcccagctctggcgagggcctggccttcttcaccttccccaacattgccagtgccaccaagttcaagcagctctaccgctcccgcatgaactccctggagatgactcccgcagtcaggcagagggtgatagaagaggccaagactgcgttcctgctcaacatccagctctttgaggagttgcaggagctgctgacccatgacaccaaggaccagagcccctcacgggcaccagggcttcgccagcgggccagcaacaaagtgcaagattctgcccccgtggagactcccagagggaagcccccactcaacacccgctcccaggctccgcttctccgatgggtccttacactcagctttctggtggcgacagttgctgtagggctttatgccatgtgaatgcaggcatgctggctcccagggccatgaactttgtccggtggaaggccttctttctagagagggaattctcttggctggcttccttaccgtgggcactgaaggctttcagggcctccagccctctcactgtgtccctctctctggaaaggaggaaggagcctatggcatcttccccaacgaaaagcacatccaggcaatggcctaaacttcagagggggcgaagggatcagccctgcccttcagcatcctcagttcctgcagcagagcctggaagacaccctaatgtggcagctgtctcaaacctccaaaagccctgagtttcaagtatccttgttgacacggccatgaccactttccccgtgggccatggcaatttttacacaaacctgaaaagatgttgtgtcttgtgtttttgtcttatttttgttggagccactctgttcctggctcagcctcaaatgcagtatttttgttgtgttctgttgtttttatagcagggttggggtggtttttgagccatgcgtgggtggggagggaggtgtttaacggcactgtggccttggtctaacttttgtgtgaaataataaacaacattgtctgatagtagcttgaa

SEQ ID NO: 125558 - DNA, 921 bp, Artificial Sequence
  derived and/or modified sequence
cggggacttagtctcctccctgggtttggacactggcatcctgctttatgtgtgacaccactgcacccctctgagcctcggtttccccatctgtaaaatagaagcgatctaccctcacagggtcatatgactgctcctctccaccccacactggcccggggcgggctgggcgcgggcccctgcgggtgttgcaacgcccggccagaaagtgggcatcagctgttccgcctggcccacgtgacccgccgagcataaatgtgaccggccgcggctccggcagtcaacgcctgcctcctctcgagcgtcctcagcgcagccgccgcccgcggagccagcacgaacgagcccagcaccggccggatggagcgtccgcaacccgacagcatgccccaggatttgtcagaggccctgaaggaggccaccaaggaggtgcacacccaggcagagaatgctgagttcatgaggaactttcagaagggccaggtgacccgagacggcttcaagctggtgatggcctccctgtaccacatctatgtggccctggaggaggagattgagcgcaacaaggagagcccagtcttcgcccctgtctacttcccagaagagctgcaccgcaaggctgccctggagcaggacctggccttctggtacgggccccgctggcaggaggtcatcccctacacaccagccatgcagcgctatgtgaagcggctccacgaggtggggcgcacagagcccgagctgctggtggcccacgcctacacccgctacctgggtgacctgtctgggggccaggtgctcaaaaagattgcccagaaagccctggacctgcccagctctggcgagggcctggccttcttcaccttccccaacattgccagtgccaccaagttcaagcagctctaccgctcccgcatgaac

SEQ ID NO: 125559 - DNA, 564 bp, Artificial Sequence
  derived and/or modified sequence
atggagcggccccagcctgacagcatgccccaggacctgtctgaggccctgaaggaggccaccaaggaggtgcacacccaggctgaaaatgctgagttcatgaggaacttccagaagggccaggtgaccagagatggcttcaagctggtgatggccagcctgtaccacatctacgtggccctggaggaggagattgaaagaaacaaggagagccctgtgtttgcccctgtgtacttccctgaggagctgcacaggaaggccgccctggagcaggacctggccttctggtacggcccccgctggcaggaggtgatcccctacaccccagccatgcagcgctacgtgaagaggctgcacgaggtgggccgcacagagcctgagctgctggtggcccacgcctacacccgctacctgggggacctgagcggcggccaggtgctgaagaagatcgcccagaaggccctggacctgcccagcagcggggagggcctggccttcttcaccttccccaacatcgccagcgccaccaagttcaagcagctgtaccgcagcaggatgaactag

SEQ ID NO: 125560 - DNA, 564 bp, Artificial Sequence
  derived and/or modified sequence
atggagcggccccagcccgacagcatgccccaggacctgagcgaggctctgaaggaggcgactaaggaagtgcatactcaggccgaaaacgccgagtttatgcgaaattttcagaagggtcaagtgactagagatggctttaagctggtgatggccagcctgtaccacatctacgtcgcactcgaggaggagattgaacggaataaagagtcacccgtgttcgcccccgtttacttcccagaggagctccatagaaaagcggccctcgaacaggatctcgcattctggtacggtccccggtggcaagaagttatcccttataccccagccatgcagcgctatgtgaaaaggctgcatgaagtaggccgtactgaacccgagctgcttgtagcccacgcctacacccggtatctaggtgacttgtctggaggtcaggtgttgaagaaaatagcccagaaagccctggatcttccttcatctggcgaaggactcgcatttttcacattcccgaatatagcctctgccacaaagtttaaacagctataccggtcacggatgaactag

SEQ ID NO: 125561 - DNA, 564 bp, Artificial Sequence
  derived and/or modified sequence
atggaacgccctcagccagactccatgccccaggacttgtccgaagcgctgaaagaggcaaccaaggaggtgcacacgcaggctgagaacgccgaattcatgagaaacttccagaagggccaggttaccagagacgggttcaaactggttatggcgtccctgtaccacatctatgtagccctggaggaggagatagaaaggaacaaggaatctccagtgtttgcccctgtctacttccctgaggaattgcatagaaaagccgcactggagcaagacctggctttttggtatgggccaagatggcaggaggtcattccatacaccccggctatgcagagatacgtgaaaagattgcatgaagtagggcgaactgagcccgagctgcttgtggcccatgcttacactaggtacctgggagacctgtccggcggtcaggtactgaagaaaattgctcagaaggccttggacctgcctagcagcggagaaggcctagctttttttacttttcctaatatcgctagtgcaaccaaattcaaacagctctacaggtcccgcatgaactag

SEQ ID NO: 125562 - DNA, 867 bp, Artificial Sequence
  derived and/or modified sequence
atggagaggccacaaccagacagcatgcctcaggacttgagtgaggctcttaaagaggctacaaaggaagtacacacacaggcagaaaacgcggaattcatgagaaatttccagaaaggacaggtcaccagagacgggtttaagctcgttatggctagcctgtaccacatttacgtggccctcgaagaagaaattgaacgaaataaggaatcacccgtattcgcacccgtgtacttcccggaagagttgcataggaaagcagccctggagcaagacctcgcattttggtacggtcccaggtggcaagaggtgatcccatatacgcctgctatgcagcgctatgtcaagcggcttcacgaggtggggcgtactgagcccgagctgcttgtcgctcatgcttatacacgttacctgggcgatctatctggtgggcaggtgctgaagaaaattgcacagaaggccctcgatctgcctagtagcggcgagggacttgctttcttcacattcccgaacatagcctcagcaacaaaatttaagcagttgtaccggtcaaggatgaactccctcgagatgaccccagcagtccggcagcgcgtcattgaggaagcaaaaacggctttcctcctgaatatccagctgtttgaggagcttcaagagctcttgacccatgatactaaagaccagtctcccagtcgcgcccccggattgcgtcagagggcaagtaataaggtacaggactctgcaccagtcgagacacctagaggcaaaccccccctgaatacccgttcccaggctccgctgttgagatgggttctcacgctttcttttttagtggcaacagttgccgtgggtctttatgccatgtag

SEQ ID NO: 125563 - DNA, 867 bp, Artificial Sequence
  derived and/or modified sequence
atggagcggccccagcctgacagcatgccccaggacctgtctgaggccctgaaggaggccaccaaggaggtgcacacccaggctgaaaatgctgagttcatgaggaacttccagaagggccaggtgaccagagatggcttcaagctggtgatggccagcctgtaccacatctacgtggccctggaggaggagattgaaagaaacaaggagagccctgtgtttgcccctgtgtacttccctgaggagctgcacaggaaggccgccctggagcaggacctggccttctggtacggcccccgctggcaggaggtgatcccctacaccccagccatgcagcgctacgtgaagaggctgcacgaggtgggccgcacagagcctgagctgctggtggcccacgcctacacccgctacctgggggacctgagcggcggccaggtgctgaagaagatcgcccagaaggccctggacctgcccagcagcggggagggcctggccttcttcaccttccccaacatcgccagcgccaccaagttcaagcagctgtaccgcagcaggatgaacagcctggagatgaccccagctgtgcggcagagggtcatcgaggaggccaagacagccttcctgctgaacatccagctgtttgaggagctgcaggagctgctgacccatgacaccaaggaccagagccccagccgggcccctggcctgcggcagagggccagcaacaaggtgcaggacagcgcccctgtggagaccccccggggcaagccacccctgaacaccaggagccaggcccccctgctgcgctgggtgctgaccctgtccttcctggtggccaccgtggccgtgggcctgtatgccatgtag

SEQ ID NO: 125564 - DNA, 867 bp, Artificial Sequence
  derived and/or modified sequence
atggagcggccccagcccgacagcatgccccaggacctgagcgaggcactgaaagaagctacaaaggaggtccacacccaggccgagaatgccgagtttatgcggaattttcagaagggtcaggtcacccgggacgggttcaagctagtcatggcttcgctgtatcatatttacgtggccctggaggaagagatcgagcggaacaaggagagcccagtcttcgcccctgtttactttccagaagagttacatcggaaggccgccctggagcaggatttggctttctggtacgggcccaggtggcaagaggtgataccctatacacccgccatgcagcggtacgttaaacggctccacgaggtggggaggactgaaccggaacttctcgttgctcacgcctataccaggtacttaggagacctcagcggagggcaggtgctgaagaagatcgcccagaaagcattggacttgcccagctcgggcgaggggctcgccttttttaccttccccaatattgcgagcgccaccaaattcaagcagctttatagaagcaggatgaactcgctggagatgacacctgcggtacggcagcgggtgattgaagaggccaaaaccgccttcctcctcaatatccagctttttgaggagctgcaagagcttctgactcatgacaccaaggatcagtcaccatccagggctccagggctcagacagagggcctctaataaagtgcaggacagcgccccagtagagacacctagaggcaaacctccactgaataccaggagtcaggcccctctcctgcggtgggttctgacactgtccttcttagttgcaaccgtcgcagtggggctctacgccatgtag

SEQ ID NO: 125565 - DNA, 867 bp, Artificial Sequence
  derived and/or modified sequence
atggagcgccctcagccggatagtatgcctcaggatttgtctgaagccctgaaggaggctaccaaagaggtacacacacaagctgagaatgctgagtttatgcggaattttcaaaagggacaggtgacacgggacggcttcaaacttgtaatggcatctctttaccatatctacgtggctctcgaagaggaaatcgaaagaaacaaagagtcccccgtattcgcccctgtgtactttcccgaagagctgcataggaaggcagccttggaacaggatctcgctttctggtacggcccacgctggcaagaggttatcccttacaccccagccatgcagcgatacgtgaagaggctgcacgaggttggcaggaccgaacctgaactgctcgtcgcacacgcctatactagatacctgggcgacctaagtggtggtcaggtgctgaagaagatcgcacaaaaggccctcgacctcccctcgtcaggtgaaggcctcgctttcttcacattccctaatatcgccagcgccaccaaattcaagcagctctacaggagtagaatgaacagccttgaaatgaccccggctgttcgccagagggtgatcgaggaggcgaagaccgcttttctgctcaatattcaattgtttgaggagctgcaggagctgctgacccatgacacaaaagaccagagcccttcaagggcacccggtctccggcagcgggcaagtaataaagtgcaggacagtgctccagttgagactcctcggggaaagccaccactgaatacaagaagccaggcaccactgttgaggtgggtgctgactttgagctttttggtggctactgtcgccgtcggactgtatgccatgtag

SEQ ID NO: 125566 - DNA, 867 bp, Artificial Sequence
  derived and/or modified sequence
atggagagaccccagcccgacagcatgccccaggacctgagcgaggccctgaaggaggccaccaaggaggtgcacacccaggccgagaacgccgagttcatgagaaacttccagaagggccaggtgaccagagacggcttcaagctggtgatggccagcctgtaccacatctacgtggccctggaggaggagatcgagagaaacaaggagagccccgtgttcgcccccgtgtacttccccgaggagctgcacagaaaggccgccctggagcaggacctggccttctggtacggccccagatggcaggaggtgatcccctacacccccgccatgcagagatacgtgaagagactgcacgaggtgggcagaaccgagcccgagctgctggtggcccacgcctacaccagatacctgggcgacctgagcggcggccaggtgctgaagaagatcgcccagaaggccctggacctgcccagcagcggcgagggcctggccttcttcaccttccccaacatcgccagcgccaccaagttcaagcagctgtacagaagcagaatgaacagcctggagatgacccccgccgtgagacagagagtgatcgaggaggccaagaccgccttcctgctgaacatccagctgttcgaggagctgcaggagctgctgacccacgacaccaaggaccagagccccagcagagcccccggcctgagacagagagccagcaacaaggtgcaggacagcgcccccgtggagacccccagaggcaagccccccctgaacaccagaagccaggcccccctgctgagatgggtgctgaccctgagcttcctggtggccaccgtggccgtgggcctgtacgccatgtag

SEQ ID NO: 125567 - DNA, 1606 bp, Artificial Sequence
  derived and/or modified sequence
aaatgtgaccggccgcggctccggcagtcaacgcctgcctcctctcgagcgtcctcagcgcagccgccgcccgcggagccagcacgaacgagcccagcaccggccggatggagcgtccgcaacccgacagcatgccccaggatttgtcagaggccctgaaggaggccaccaaggaggtgcacacccaggcagagaatgctgagttcatgaggaactttcagaagggccaggtgacccgagacggcttcaagctggtgatggcctccctgtaccacatctatgtggccctggaggaggagattgagcgcaacaaggagagcccagtcttcgcccctgtctacttcccagaagagctgcaccgcaaggctgccctggagcaggacctggccttctggtacgggccccgctggcaggaggtcatcccctacacaccagccatgcagcgctatgtgaagcggctccacgaggtggggcgcacagagcccgagctgctggtggcccacgcctacacccgctacctgggtgacctgtctgggggccaggtgctcaaaaagattgcccagaaagccctggacctgcccagctctggcgagggcctggccttcttcaccttccccaacattgccagtgccaccaagttcaagcagctctaccgctcccgcatgaactccctggagatgactcccgcagtcaggcagagggtgatagaagaggccaagactgcgttcctgctcaacatccagctctttgaggagttgcaggagctgctgacccatgacaccaaggaccagagcccctcacgggcaccagggcttcgccagcgggccagcaacaaagtgcaagattctgcccccgtggagactcccagagggaagcccccactcaacacccgctcccaggctccgcttctccgatgggtccttacactcagctttctggtggcgacagttgctgtagggctttatgccatgtgaatgcaggcatgctggctcccagggccatgaactttgtccggtggaaggccttctttctagagagggaattctcttggctggcttccttaccgtgggcactgaaggctttcagggcctccagccctctcactgtgtccctctctctggaaaggaggaaggagcctatggcatcttccccaacgaaaagcacatccaggcaatggcctaaacttcagagggggcgaagggatcagccctgcccttcagcatcctcagttcctgcagcagagcctggaagacaccctaatgtggcagctgtctcaaacctccaaaagccctgagtttcaagtatccttgttgacacggccatgaccactttccccgtgggccatggcaatttttacacaaacctgaaaagatgttgtgtcttgtgtttttgtcttatttttgttggagccactctgttcctggctcagcctcaaatgcagtatttttgttgtgttctgttgtttttatagcagggttggggtggtttttgagccatgcgtgggtggggagggaggtgtttaacggcactgtggccttggtctaacttttgtgtgaaataataaacaacattgtctgatagtagcttgaaaaaaaaaaaaaaaaaa

SEQ ID NO: 125568 - protein, 320 aa, Artificial Sequence
  derived and/or modified sequence
MSKSESPKEPEQLRKLFIGGLSFETTDESLRSHFEQWGTLTDCVVMRDPNTKRSRGFGFVTYATVEEVDAAMNARPHKVDGRVVEPKRAVSREDSQRPGAHLTVKKIFVGGIKEDTEEHHLRDYFEQYGKIEVIEIMTDRGSGKKRGFAFVTFDDHDSVDKIVIQKYHTVNGHNCEVRKALSKQEMASASSSQRGRSGSGNFGGGRGGGFGGNDNFGRGGNFSGRGGFGGSRGGGGYGGSGDGYNGFGNDGNNFGGGGSYNDFGNYNNQSSNFGPMKGGNFGGRSSGPYGGGGQYFAKPRNQGGYGGSSSSSSYGSGRRF

SEQ ID NO: 125569 - protein, 320 aa, Artificial Sequence
  derived and/or modified sequence
MSKSESPKEPEQLRKLFIGGLSFETTDESLRSHFEQWGTLTDCVVMRDPNTKRSRGFGFVTYATVEEVDAAMNARPHKVDGRVVEPKRAVSREDSQRPGAHLTVKKIFVGGIKEDTEEHHLRDYFEQYGKIEVIEIMTDRGSGKKRGFAFVTFDDHDSVDKIVIQKYHTVNGHNCEVRKALSKQEMASASSSQRGRSGSGNFGGGRGGGFGGNDNFGRGGNFSGRGGFGGSRGGGGYGGSGDGYNGFGNDGSNFGGGGSYNDFGNYNNQSSNFGPMKGGNFGGRSSGPYGGGGQYFAKPRNQGGYGGSSSSSSYGSGRRF

SEQ ID NO: 125570 - protein, 191 aa, Artificial Sequence
  derived and/or modified sequence
KIEVIEIMTDRGSGKKRGFAFVTFDDHDSVDKIVIQKYHTVNGHNCEVRKALSKQEMASASSSQRGRSGSGNFGGGRGGGFGGNDNFGRGGNFSGRGGFGGSRGGGGYGGSGDGYNGFGNDGSNFGGGGSYNDFGNYNNQSSNFGPMKGGNFGGRSSGPYGGGGQYFAKPRNQGGYGGSSSSSSYGSGRRF

SEQ ID NO: 125571 - DNA, 963 bp, Artificial Sequence
  derived and/or modified sequence
atgagcaagagcgagagccccaaggagcccgagcagctgagaaagctgttcatcggcggcctgagcttcgagaccaccgacgagagcctgagaagccacttcgagcagtggggcaccctgaccgactgcgtggtgatgagagaccccaacaccaagagaagcagaggcttcggcttcgtgacctacgccaccgtggaggaggtggacgccgccatgaacgccagaccccacaaggtggacggcagagtggtggagcccaagagagccgtgagcagagaggacagccagagacccggcgcccacctgaccgtgaagaagatcttcgtgggcggcatcaaggaggacaccgaggagcaccacctgagagactacttcgagcagtacggcaagatcgaggtgatcgagatcatgaccgacagaggcagcggcaagaagagaggcttcgccttcgtgaccttcgacgaccacgacagcgtggacaagatcgtgatccagaagtaccacaccgtgaacggccacaactgcgaggtgagaaaggccctgagcaagcaggagatggccagcgccagcagcagccagagaggcagaagcggcagcggcaacttcggcggcggcagaggcggcggcttcggcggcaacgacaacttcggcagaggcggcaacttcagcggcagaggcggcttcggcggcagcagaggcggcggcggctacggcggcagcggcgacggctacaacggcttcggcaacgacggcaacaacttcggcggcggcggcagctacaacgacttcggcaactacaacaaccagagcagcaacttcggccccatgaagggcggcaacttcggcggcagaagcagcggcccctacggcggcggcggccagtacttcgccaagcccagaaaccagggcggctacggcggcagcagcagcagcagcagctacggcagcggcagaagattctag

SEQ ID NO: 125572 - DNA, 1706 bp, Artificial Sequence
  derived and/or modified sequence
cccgtggacgccgccgaagaagcatcgttaaagtctctcttcaccctgccgtcatgtctaagtcagagtctcctaaagagcccgaacagctgaggaagctcttcattggagggttgagctttgaaacaactgatgagagcctgaggagccattttgagcaatggggaacgctcacggactgtgtggtaatgagagatccaaacaccaagcgctccaggggctttgggtttgtcacatatgccactgtggaggaggtggatgcagctatgaatgcaaggccacacaaggtggatggaagagttgtggaaccaaagagagctgtctccagagaagattctcaaagaccaggtgcccacttaactgtgaaaaagatatttgttggtggcattaaagaagacactgaagaacatcacctaagagattattttgaacagtatggaaaaattgaagtgattgaaatcatgactgaccgaggcagtggcaagaaaaggggctttgcctttgtaacctttgacgaccatgactccgtggataagattgtcattcagaaataccatactgtgaatggccacaactgtgaagttagaaaagccctgtcaaagcaagagatggctagtgcttcatccagccaaagaggtcgaagtggttctggaaactttggtggtggtcgtggaggtggtttcggtgggaatgacaacttcggtcgtggaggaaacttcagtggtcgtggtggctttggtggcagccgtggtggtggtggatatggtggcagtggggatggctataatggatttggtaatgatggtaacaattttggaggtggtggaagctacaatgattttgggaattacaacaatcagtcttcaaattttggacccatgaagggaggaaattttggaggcagaagctctggcccctatggcggtggaggccaatactttgcaaaaccacgaaaccaaggtggctatggcggttccagcagcagcagtagctatggcagtggcagaagattttaattaggaaacaaagcttagcaggagaggagagccagagaagtgacagggaagctacaggttacaacagatttgtgaactcagccaagcacagtggtggcagggcctagctgctacaaagaagacatgttttagacaaatactcatgtgtatgggcaaaaaactcgaggactgtatttgtgactaattgtataacaggttattttagtttctgttctgtggaaagtgtaaagcattccaacaaagggttttaatgtagatttttttttttgcaccccatgctgttgattgctaaatgtaacagtctgatcgtgacgctgaataaatgtcttttttttaatgtgctgtgtaaagttagtctactcttaagccatcttggtaaatttccccaacagtgtgaagttagaattccttcagggtgatgccaggttctatttggaatttatatacaacctgcttgggtggagaagccattgtcttcggaaaccttggtgtagttgaactgatagttactgttgtgacctgaagttcaccattaaaagggattacccaagcaaaatcatggaatggttataaaagtgattgttggcacatcctatgcaatatatctaaattgaataatggtaccagataaaattatagatgggaatgaagcttgtgtatccattatcatgtgtaatcaataaacgattt

SEQ ID NO: 125573 - DNA, 1119 bp, Artificial Sequence
  derived and/or modified sequence
atgagcaagagcgagagccccaaggagcccgagcagctgagaaagctgttcatcggcggcctgagcttcgagaccaccgacgagagcctgagaagccacttcgagcagtggggcaccctgaccgactgcgtggtgatgagagaccccaacaccaagagaagcagaggcttcggcttcgtgacctacgccaccgtggaggaggtggacgccgccatgaacgccagaccccacaaggtggacggcagagtggtggagcccaagagagccgtgagcagagaggacagccagagacccggcgcccacctgaccgtgaagaagatcttcgtgggcggcatcaaggaggacaccgaggagcaccacctgagagactacttcgagcagtacggcaagatcgaggtgatcgagatcatgaccgacagaggcagcggcaagaagagaggcttcgccttcgtgaccttcgacgaccacgacagcgtggacaagatcgtgatccagaagtaccacaccgtgaacggccacaactgcgaggtgagaaaggccctgagcaagcaggagatggccagcgccagcagcagccagagaggcagaagcggcagcggcaacttcggcggcggcagaggcggcggcttcggcggcaacgacaacttcggcagaggcggcaacttcagcggcagaggcggcttcggcggcagcagaggcggcggcggctacggcggcagcggcgacggctacaacggcttcggcaacgacggcggctacggcggcggcggccccggctacagcggcggcagcagaggctacggcagcggcggccagggctacggcaaccagggcagcggctacggcggcagcggcagctacgacagctacaacaacggcggcggcggcggcttcggcggcggcagcggcagcaacttcggcggcggcggcagctacaacgacttcggcaactacaacaaccagagcagcaacttcggccccatgaagggcggcaacttcggcggcagaagcagcggcccctacggcggcggcggccagtacttcgccaagcccagaaaccagggcggctacggcggcagcagcagcagcagcagctacggcagcggcagaagattctag

SEQ ID NO: 125574 - DNA, 1842 bp, Artificial Sequence
  derived and/or modified sequence
cccgtggacgccgccgaagaagcatcgttaaagtctctcttcaccctgccgtcatgtctaagtcagagtctcctaaagagcccgaacagctgaggaagctcttcattggagggttgagctttgaaacaactgatgagagcctgaggagccattttgagcaatggggaacgctcacggactgtgtggtaatgagagatccaaacaccaagcgctccaggggctttgggtttgtcacatatgccactgtggaggaggtggatgcagctatgaatgcaaggccacacaaggtggatggaagagttgtggaaccaaagagagctgtctccagagaagattctcaaagaccaggtgcccacttaactgtgaaaaagatatttgttggtggcattaaagaagacactgaagaacatcacctaagagattattttgaacagtatggaaaaattgaagtgattgaaatcatgactgaccgaggcagtggcaagaaaaggggctttgcctttgtaacctttgacgaccatgactccgtggataagattgtcattcagaaataccatactgtgaatggccacaactgtgaagttagaaaagccctgtcaaagcaagagatggctagtgcttcatccagccaaagaggtcgaagtggttctggaaactttggtggtggtcgtggaggtggtttcggtgggaatgacaacttcggtcgtggaggaaacttcagtggtcgtggtggctttggtggcagccgtggtggtggtggatatggtggcagtggggatggctataatggatttggtaatgatggtggttatggaggaggcggccctggttactctggaggaagcagaggctatggaagtggtggacagggttatggaaaccagggcagtggctatggcgggagtggcagctatgacagctataacaacggaggcggaggcggctttggcggtggtagtggaagcaattttggaggtggtggaagctacaatgattttgggaattacaacaatcagtcttcaaattttggacccatgaagggaggaaattttggaggcagaagctctggcccctatggcggtggaggccaatactttgcaaaaccacgaaaccaaggtggctatggcggttccagcagcagcagtagctatggcagtggcagaagattttaattaggaaacaaagcttagcaggagaggagagccagagaagtgacagggaagctacaggttacaacagatttgtgaactcagccaagcacagtggtggcagggcctagctgctacaaagaagacatgttttagacaaatactcatgtgtatgggcaaaaaactcgaggactgtatttgtgactaattgtataacaggttattttagtttctgttctgtggaaagtgtaaagcattccaacaaagggttttaatgtagatttttttttttgcaccccatgctgttgattgctaaatgtaacagtctgatcgtgacgctgaataaatgtcttttttttaatgtgctgtgtaaagttagtctactcttaagccatcttggtaaatttccccaacagtgtgaagttagaattccttcagggtgatgccaggttctatttggaatttatatacaacctgcttgggtggagaagccattgtcttcggaaaccttggtgtagttgaactgatagttactgttgtgacctgaagttcaccattaaaagggattacccaagcaaaatcatggaatggttataaaagtgattgttggcacatcctatgcaatatatctaaattgaataatggtaccagataaaattatagatgggaatgaagcttgtgtatccattatcat

SEQ ID NO: 125575 - DNA, 963 bp, Artificial Sequence
  derived and/or modified sequence
atgagcaagagcgagagccccaaggagcccgagcagctgagaaagctgttcatcggcggcctgagcttcgagaccaccgacgagagcctgagaagccacttcgagcagtggggcaccctgaccgactgcgtggtgatgagagaccccaacaccaagagaagcagaggcttcggcttcgtgacctacgccaccgtggaggaggtggacgccgccatgaacgccagaccccacaaggtggacggcagagtggtggagcccaagagagccgtgagcagagaggacagccagagacccggcgcccacctgaccgtgaagaagatcttcgtgggcggcatcaaggaggacaccgaggagcaccacctgagagactacttcgagcagtacggcaagatcgaggtgatcgagatcatgaccgacagaggcagcggcaagaagagaggcttcgccttcgtgaccttcgacgaccacgacagcgtggacaagatcgtgatccagaagtaccacaccgtgaacggccacaactgcgaggtgagaaaggccctgagcaagcaggagatggccagcgccagcagcagccagagaggcagaagcggcagcggcaacttcggcggcggcagaggcggcggcttcggcggcaacgacaacttcggcagaggcggcaacttcagcggcagaggcggcttcggcggcagcagaggcggcggcggctacggcggcagcggcgacggctacaacggcttcggcaacgacggcagcaacttcggcggcggcggcagctacaacgacttcggcaactacaacaaccagagcagcaacttcggccccatgaagggcggcaacttcggcggcagaagcagcggcccctacggcggcggcggccagtacttcgccaagcccagaaaccagggcggctacggcggcagcagcagcagcagcagctacggcagcggcagaagattctag

SEQ ID NO: 125576 - DNA, 804 bp, Artificial Sequence
  derived and/or modified sequence
atgagcaagagcgagagccccaaggagcccgagcagctgagaaagctgttcatcggcggcctgagcttcgagaccaccgacgagagcctgagaagccacttcgagcagtggggcaccctgaccgactgcgtggtgatgagagaccccaacaccaagagaagcagaggcttcggcttcgtgacctacgccaccgtggaggaggtggacgccgccatgaacgccagaccccacaaggtggacggcagagtggtggagcccaagagagccgtgagcagagaggacagccagagacccggcgcccacctgaccgtgaagaagatcttcgtgggcggcatcaaggaggacaccgaggagcaccacctgagagactacttcgagcagtacggcaagatcgaggtgatcgagatcatgaccgacagaggcagcggcaagaagagaggcttcgccttcgtgaccttcgacgaccacgacagcgtggacaagatcgtgatccagaagtaccacaccgtgaacggccacaactgcgaggtgagaaaggccctgagcaagcaggagatggccagcgccagcagcagccagagaggcagaagcggcagcggcaacttcggcggcggcagctacaacgacttcggcaactacaacaaccagagcagcaacttcggccccatgaagggcggcaacttcggcggcagaagcagcggcccctacggcggcggcggccagtacttcgccaagcccagaaaccagggcggctacggcggcagcagcagcagcagcagctacggcagcggcagaagattctag

SEQ ID NO: 125577 - DNA, 576 bp, Artificial Sequence
  derived and/or modified sequence
aagatcgaggtgatcgagatcatgaccgacagaggcagcggcaagaagagaggcttcgccttcgtgaccttcgacgaccacgacagcgtggacaagatcgtgatccagaagtaccacaccgtgaacggccacaactgcgaggtgagaaaggccctgagcaagcaggagatggccagcgccagcagcagccagagaggcagaagcggcagcggcaacttcggcggcggcagaggcggcggcttcggcggcaacgacaacttcggcagaggcggcaacttcagcggcagaggcggcttcggcggcagcagaggcggcggcggctacggcggcagcggcgacggctacaacggcttcggcaacgacggcagcaacttcggcggcggcggcagctacaacgacttcggcaactacaacaaccagagcagcaacttcggccccatgaagggcggcaacttcggcggcagaagcagcggcccctacggcggcggcggccagtacttcgccaagcccagaaaccagggcggctacggcggcagcagcagcagcagcagctacggcagcggcagaagattctag

SEQ ID NO: 125578 - DNA, 963 bp, Artificial Sequence
  derived and/or modified sequence
atgagtaaatctgagagccctaaggaacccgaacaactgaggaaattgtttatagggggactctcttttgaaacaaccgacgagtcactgcgatcccacttcgaacaatgggggacactgaccgattgcgtggttatgagggatcccaacactaagcgaagcagaggcttcggttttgtgacttacgcaaccgtggaagaagtggatgccgccatgaatgcgagacctcataaggtcgacggtcgcgttgtcgaacctaagcgggccgtctcaagggaagacagccagcggccaggagcgcatctgactgtgaaaaaaatatttgtgggcgggataaaagaggataccgaggaacaccatttgagggactacttcgagcagtacggcaagattgaggtgatagaaattatgactgatcgtggcagtggaaaaaagcgcggcttcgcatttgttacattcgacgaccacgatagtgtcgacaaaatcgtcatccagaaatatcacaccgtgaacgggcataattgtgaagtgaggaaagccctgagcaaacaagaaatggccagcgctagttcttcccagagaggccgttccggatctgggaacttcgggggaggccgtggaggcgggtttgggggcaatgataactttggcagggggggcaatttctctggcaggggggggtttggcggcagtcgggggggcggcgggtacggtgggtcgggggatggttacaatggatttggcaacgatggtaacaactttggaggcggcgggtcttacaacgacttcggcaactacaacaaccagtcaagtaatttcggtcccatgaaaggcggaaatttcggcgggcgctcttctgggccgtacgggggcggaggacagtacttcgccaaaccgaggaaccagggcgggtacgggggttccagttcctcttcaagttacgggagcgggaggcgattttag

SEQ ID NO: 125579 - DNA, 1119 bp, Artificial Sequence
  derived and/or modified sequence
atgtcgaagtctgagtcacccaaggagcccgagcaacttcgaaaactgtttatcggaggtttatctttcgagaccaccgatgagtctctcaggtcacactttgagcagtggggtacgctcacagactgcgtcgtaatgcgggatcccaacaccaagcgttctcggggtttcggttttgtcacatacgctaccgtggaggaagttgatgctgccatgaacgccaggcctcacaaggtggacggcagagtggtggaacctaagcgggccgttagcagagaagactctcagcggccaggcgcccacttaacagttaaaaaaatattcgttgggggtattaaagaggatactgaagagcaccacctcagggactactttgagcagtatgggaagatcgaagttatagaaatcatgaccgatcgaggatccggaaagaagcggggattcgccttcgtcacctttgatgatcatgatagcgttgataaaatcgtgatccaaaagtatcacaccgtgaacggccacaattgtgaagttagaaaggccctgtccaagcaggaaatggctagcgcctcaagttctcagcggggccgtagcggcagcggcaactttggcggcggccgaggaggcgggttcgggggaaacgacaattttggacgcggcgggaattttagtggcagggggggatttggagggtcccgcggtggcgggggatatggtggaagcggcgacggctacaacgggtttggcaacgacggagggtatggcggagggggacccggctatagcggtgggtctcgggggtacggttcaggcgggcagggatacggaaatcagggcagcgggtacggagggtcaggaagctatgattcttacaacaacggtggcggcggcggctttgggggggggagtggatctaacttcgggggggggggatcctataacgactttggtaattacaacaaccaatcttcaaactttggtcccatgaagggcgggaacttcggtggcagatcctcaggcccttacgggggtggaggccaatactttgctaaaccacgaaaccagggcggttatggcgggtcctcctcgtcatcttcttatggttccgggcggcgcttttag

SEQ ID NO: 125580 - DNA, 963 bp, Artificial Sequence
  derived and/or modified sequence
atgtctaagtcggagtccccaaaagagcccgaacagttaaggaagctgttcatcggaggcctgagtttcgaaaccacagatgaatccttaaggtctcacttcgagcaatggggcacccttacggattgcgtggtaatgagagaccccaacactaaacgtagccggggctttggcttcgtgacttacgctactgtagaagaggtggatgctgcgatgaatgcacgccctcacaaggtggacggacgggtggtcgagcctaagcgggcagtgagccgcgaggacagccagaggccgggtgcacacttgactgtgaagaagattttcgttggaggcatcaaggaagataccgaggagcaccatcttagagactacttcgaacagtatggtaagattgaggtgatcgagatcatgactgatagggggtcaggaaaaaaacggggatttgcctttgtgacgtttgatgaccatgatagcgtcgataagatcgtaattcagaagtatcacaccgtaaatggacacaattgcgaggtgcgtaaggctctcagcaaacaggagatggcctctgcgtcctccagccagcgcggtaggtctggtagcggcaacttcgggggcggcagaggtggaggttttgggggaaacgacaacttcggaagaggtggaaattttagtgggcggggagggttcggtggatcccggggaggcggtggatatgggggatctggggacggatataatggcttcgggaacgacggtagcaattttggaggaggaggcagttacaatgattttggcaattacaataatcagagctcaaactttggccctatgaagggagggaacttcggagggagatcaagcggaccatacggcgggggtggacagtactttgccaagcctaggaatcagggtgggtacggaggcagctcctcgagctcatcctatggttcaggacgtagattctag

SEQ ID NO: 125581 - DNA, 804 bp, Artificial Sequence
  derived and/or modified sequence
atgagtaaatccgaaagcccaaaggagcccgagcagctaaggaaactgttcattggcggattgtcttttgaaaccactgatgagtcactcagatctcacttcgagcagtggggcacgttgacggactgcgtggtgatgcgcgatcccaacaccaagagatcaagaggtttcggattcgtgacatacgccactgtcgaggaagttgatgcagccatgaatgctcgtccgcacaaggtcgatgggcgcgtggtggagccaaagcgcgccgtctcccgtgaggatagccagagacctggggcccatctgactgtgaagaagatctttgttgggggaatcaaggaggacaccgaggagcaccacctgcgtgactattttgagcagtatgggaagatcgaggtaattgagataatgacggatcgtggatctggcaagaagcggggctttgcgttcgttaccttcgatgaccacgacagcgtggacaagatagtcattcagaagtaccacaccgtcaatgggcataattgtgaggtgcggaaagccctgagcaaacaagagatggcgtctgcatcatcatctcaaagaggccgatccggctccggcaattttggagggggcagctataacgattttggtaattataataatcagagctctaatttcggcccgatgaaaggtggcaacttcggcggcaggtcgagcggaccatatggtggcgggggtcagtacttcgccaaaccaaggaatcagggaggctatggaggctcctcttcttcttcctcttatggcagcgggaggcgattctag

SEQ ID NO: 125582 - DNA, 576 bp, Artificial Sequence
  derived and/or modified sequence
aagatagaagtaattgaaatcatgactgacagaggaagcgggaaaaagagaggcttcgccttcgtgacctttgacgaccatgacagtgtcgataagattgtgatccagaaatatcataccgtgaatggccataattgtgaggtccgcaaggcactctccaaacaggaaatggcctcggcatcatcctcccagcggggtcggagcgggagcgggaattttggcggggggcggggaggtggcttcggaggcaacgataactttggccggggaggaaacttttccggccgcggggggtttggaggtagccggggtgggggcggatatggcggttccggagatggatacaatggcttcggaaatgacggtagcaacttcggaggcggagggtcttacaatgacttcgggaattacaataaccagtcgtccaatttcgggcctatgaagggcggcaactttggtggacgaagttctggtccgtatggcggcggaggccagtatttcgccaagcccagaaaccaggggggctacggcgggtcatccagcagctcaagttacggatccggaagacgcttctag

SEQ ID NO: 125583 - DNA, 963 bp, Artificial Sequence
  derived and/or modified sequence
atgagcaagtctgagagccccaaggagcctgagcagctgaggaagctgttcatcggcggcctgagctttgagaccacagatgagagcctgcggagccactttgagcagtggggcaccctgacagactgtgtggtgatgagggaccccaacaccaagaggagccggggctttggatttgtgacctacgccaccgtggaggaggtggatgctgccatgaatgcccggccccacaaggtggatggccgggtggtggagcccaagagagctgtgtcccgggaggacagccagaggcctggggcccacctgactgtgaagaagatctttgtgggcggcatcaaggaggacacagaggagcaccacctgcgggactactttgagcagtatggcaagattgaagtcatcgagatcatgacagaccggggcagcggcaagaagaggggctttgcctttgtgacctttgatgaccatgacagcgtggacaagatcgtcatccagaagtaccacacagtgaatggccacaactgtgaggtgaggaaggccctgagcaagcaggagatggccagcgccagcagcagccagaggggccgcagcggcagcggcaactttggaggcggccggggcggcggctttggaggaaatgacaactttggccggggcggcaacttcagcggccggggcggctttggaggcagcagaggaggcggcggctatggaggcagcggagatggctacaatggatttggaaatgatggcaacaactttggaggcggcggcagctacaatgactttggaaactacaacaaccagagcagcaactttggccccatgaagggcggcaactttggaggccgcagcagcggcccctatggaggcggcggccagtactttgccaagcccaggaaccagggcggctatggaggcagcagcagcagcagcagctatggcagcggccgccgcttctag

SEQ ID NO: 125584 - DNA, 1119 bp, Artificial Sequence
  derived and/or modified sequence
atgagcaagtctgagagccccaaggagcctgagcagctgaggaagctgttcatcggcggcctgagctttgagaccacagatgagagcctgcggagccactttgagcagtggggcaccctgacagactgtgtggtgatgagggaccccaacaccaagaggagccggggctttggatttgtgacctacgccaccgtggaggaggtggatgctgccatgaatgcccggccccacaaggtggatggccgggtggtggagcccaagagagctgtgtcccgggaggacagccagaggcctggggcccacctgactgtgaagaagatctttgtgggcggcatcaaggaggacacagaggagcaccacctgcgggactactttgagcagtatggcaagattgaagtcatcgagatcatgacagaccggggcagcggcaagaagaggggctttgcctttgtgacctttgatgaccatgacagcgtggacaagatcgtcatccagaagtaccacacagtgaatggccacaactgtgaggtgaggaaggccctgagcaagcaggagatggccagcgccagcagcagccagaggggccgcagcggcagcggcaactttggaggcggccggggcggcggctttggaggaaatgacaactttggccggggcggcaacttcagcggccggggcggctttggaggcagcagaggaggcggcggctatggaggcagcggagatggctacaatggatttggaaatgatggcggctatggaggcggcggccctggctacagcggcggcagccggggctacggcagcggcggccagggctacggcaaccagggcagcggctatggaggcagcggcagctatgacagctacaacaacggcggcggcggcggctttggaggcggcagcggcagcaactttggaggcggcggcagctacaatgactttggaaactacaacaaccagagcagcaactttggccccatgaagggcggcaactttggaggccgcagcagcggcccctatggaggcggcggccagtactttgccaagcccaggaaccagggcggctatggaggcagcagcagcagcagcagctatggcagcggccgccgcttctag

SEQ ID NO: 125585 - DNA, 963 bp, Artificial Sequence
  derived and/or modified sequence
atgagcaagtctgagagccccaaggagcctgagcagctgaggaagctgttcatcggcggcctgagctttgagaccacagatgagagcctgcggagccactttgagcagtggggcaccctgacagactgtgtggtgatgagggaccccaacaccaagaggagccggggctttggatttgtgacctacgccaccgtggaggaggtggatgctgccatgaatgcccggccccacaaggtggatggccgggtggtggagcccaagagagctgtgtcccgggaggacagccagaggcctggggcccacctgactgtgaagaagatctttgtgggcggcatcaaggaggacacagaggagcaccacctgcgggactactttgagcagtatggcaagattgaagtcatcgagatcatgacagaccggggcagcggcaagaagaggggctttgcctttgtgacctttgatgaccatgacagcgtggacaagatcgtcatccagaagtaccacacagtgaatggccacaactgtgaggtgaggaaggccctgagcaagcaggagatggccagcgccagcagcagccagaggggccgcagcggcagcggcaactttggaggcggccggggcggcggctttggaggaaatgacaactttggccggggcggcaacttcagcggccggggcggctttggaggcagcagaggaggcggcggctatggaggcagcggagatggctacaatggatttggaaatgatggcagcaactttggaggcggcggcagctacaatgactttggaaactacaacaaccagagcagcaactttggccccatgaagggcggcaactttggaggccgcagcagcggcccctatggaggcggcggccagtactttgccaagcccaggaaccagggcggctatggaggcagcagcagcagcagcagctatggcagcggccgccgcttctag

SEQ ID NO: 125586 - DNA, 804 bp, Artificial Sequence
  derived and/or modified sequence
atgagcaagtctgagagccccaaggagcctgagcagctgaggaagctgttcatcggcggcctgagctttgagaccacagatgagagcctgcggagccactttgagcagtggggcaccctgacagactgtgtggtgatgagggaccccaacaccaagaggagccggggctttggatttgtgacctacgccaccgtggaggaggtggatgctgccatgaatgcccggccccacaaggtggatggccgggtggtggagcccaagagagctgtgtcccgggaggacagccagaggcctggggcccacctgactgtgaagaagatctttgtgggcggcatcaaggaggacacagaggagcaccacctgcgggactactttgagcagtatggcaagattgaagtcatcgagatcatgacagaccggggcagcggcaagaagaggggctttgcctttgtgacctttgatgaccatgacagcgtggacaagatcgtcatccagaagtaccacacagtgaatggccacaactgtgaggtgaggaaggccctgagcaagcaggagatggccagcgccagcagcagccagaggggccgcagcggcagcggcaactttggaggcggcagctacaatgactttggaaactacaacaaccagagcagcaactttggccccatgaagggcggcaactttggaggccgcagcagcggcccctacggcggcggcggccagtactttgccaagcccaggaaccagggcggctacggcggcagcagcagcagcagcagctatggcagcggccgccgcttctag

SEQ ID NO: 125587 - DNA, 576 bp, Artificial Sequence
  derived and/or modified sequence
aagattgaggtgattgagatcatgacagaccggggcagcggcaagaagaggggctttgcctttgtgacctttgatgaccatgattctgtggacaagatcgtcatccagaagtaccacacagtgaatggccacaactgtgaggtgaggaaggccctgagcaagcaggagatggccagcgccagcagcagccagaggggccgcagcggcagcggcaactttggaggcggccggggcggcggctttggaggaaatgacaactttggccggggcggcaacttcagcggccggggcggctttggaggcagccggggcggcggcggctacggcggcagcggagatggctacaacggctttggaaatgatggcagcaactttggaggcggcggcagctacaatgactttggaaactacaacaaccagagcagcaactttggccccatgaagggcggcaactttggaggccgcagcagcggcccctacggcggcggcggccagtactttgccaagcccaggaaccagggcggctacggcggcagcagcagcagcagcagctatggcagcggccgccgcttctag

SEQ ID NO: 125588 - DNA, 963 bp, Artificial Sequence
  derived and/or modified sequence
atgagcaagagcgagagccccaaggagcccgagcagctgcggaagttgttcattgggggactgtcgttcgagacaaccgatgaatcattgaggtcacattttgaacagtgggggactctgaccgattgtgtcgtcatgagagatcctaatacaaagcggagcaggggttttgggttcgtaacttacgccaccgtggaagaagtggacgccgcaatgaacgcaagacctcacaaggtagatggtcgcgttgtcgaaccaaagcgcgcggtctcaagggaggactctcagaggcccggcgcgcatctaaccgtgaagaagatctttgtgggcggcataaaggaggataccgaggagcatcatctccgggactactttgaacagtacggcaaaattgaggtcatcgagattatgacagataggggctcaggtaagaaacggggctttgccttcgtgacatttgacgatcacgatagcgtagacaaaatcgtcatacagaagtaccataccgtgaacggccataactgcgaagtgcggaaggctttatcgaaacaagaaatggcctccgccagtagttcccaacgcgggcgcagcggatctggaaatttcggagggggacggggcggaggattcggggggaatgacaatttcggacgcggaggcaacttctctgggaggggggggttcggaggaagtaggggggggggaggatatggagggagcggggatgggtataatgggttcggtaacgatggcaataactttggcggcgggggctcctacaatgatttcggcaactataataatcagagctcgaacttcggcccaatgaagggcggcaattttggaggcaggtcttcaggtccttacggcggtggaggccagtacttcgccaaaccacgtaatcagggcgggtatggaggaagcagcagctcttcctcatacgggtctggcagacgcttctag

SEQ ID NO: 125589 - DNA, 1119 bp, Artificial Sequence
  derived and/or modified sequence
atgagcaagagcgagagccccaaggagcccgagcagctgcggaagctctttatcggagggctctcctttgaaaccacggatgaatctctgcgaagtcattttgaacagtgggggactctgacggactgtgtcgtgatgcgagatccgaacactaagagatcacgggggtttgggttcgtgacttacgcgacggtggaggaggtagacgcagccatgaatgcccggccacataaggttgatggcagggtggtggagccaaagcgcgccgtgtcacgcgaggactcacagcggcctggggctcacctgacagtgaaaaaaatctttgtggggggcatcaaggaggatacagaggaacaccacctccgtgactactttgagcagtatggtaagatagaagttatcgagatcatgaccgatagaggcagcggcaaaaaaaggggctttgcgttcgtgacattcgatgatcatgactcagtggataagattgtcattcagaagtatcataccgtgaacgggcacaactgtgaagtgagaaaggcgcttagcaaacaagagatggcctccgcctcaagcagccaaaggggcagaagcggctccggaaacttcggcggcggtcgggggggaggttttggagggaacgacaatttcggccggggaggaaactttagcggaagagggggtttcgggggcagcagaggtgggggaggctacggcgggtctggcgacggttacaatggcttcggaaacgatgggggttacgggggtggtggcccgggctacagtggtggctctcgcggttatggatccggcggccagggctacggtaatcagggaagcggttatggaggctcaggaagctacgatagttacaacaatggtggaggcggaggttttggtggcggaagcggctccaactttggcgggggcggctcttacaatgactttggcaactataacaatcaaagttccaacttcgggcccatgaagggcggcaacttcggaggacgcagttccggtccatacggagggggtggccagtatttcgctaaacccagaaaccaggggggttatggtggctcttcctcatcatccagttacgggagcggcaggcggttttag

SEQ ID NO: 125590 - DNA, 963 bp, Artificial Sequence
  derived and/or modified sequence
atgagcaagagcgagagccccaaggagcccgagcagctgcggaagcttttcatcggggggctgtcttttgaaacaacggatgagtccctgcgctctcatttcgaacaatggggtaccctgaccgattgcgtagttatgcgcgaccctaataccaagcgctcaagaggcttcggattcgttacttacgcaactgtcgaggaggtcgacgccgcaatgaacgcccgaccacataaagtggacggccgagtggtcgaaccaaagcgggcagttagtcgagaggactcacaacgccccggcgcccatctgacagtgaagaagatctttgtggggggtattaaagaagataccgaagaacaccatcttagggattatttcgaacagtacggcaaaatagaagtgatagagattatgactgatagagggagtgggaagaagagaggcttcgcctttgttacttttgacgaccatgattccgtggacaaaattgtgattcaaaaataccacactgtcaacgggcacaattgcgaggttagaaaggccttgagcaagcaagaaatggccagcgcatcatctagccagcgcggccggtcagggtccgggaactttggcgggggacgaggaggggggttcggcggcaacgacaacttcgggaggggagggaactttagtgggcggggtggatttggaggctccaggggggggggaggctacggagggtcgggcgatgggtataacgggttcggaaatgacggctctaatttcggcgggggaggcagctataacgactttggaaattacaacaatcaaagttccaactttgggcctatgaagggtggaaatttcggtggacgctcatcaggaccatacgggggcgggggccagtactttgcaaagcccaggaatcaaggcggctatggtggctccagctcctcaagcagctatgggtccggcagacggttttag

SEQ ID NO: 125591 - DNA, 804 bp, Artificial Sequence
  derived and/or modified sequence
atgagcaagagcgagagccccaaggagcccgagcagctgcggaagttatttatcggtgggttatcgtttgaaactacagacgaatctttgcgctcccacttcgagcagtgggggacactcacagattgcgtagtcatgagggaccccaacaccaaacgcagcaggggatttggctttgtcacgtatgccactgtcgaagaggtggacgccgctatgaacgcacgcccccataaagtggacgggcgggtggtggagcccaaacgagctgtgtccagagaagattcccagaggccgggggcccatttaactgtgaagaagatctttgtgggtggtatcaaggaagatacggaagaacaccacctgagggattattttgagcagtacggtaaaatagaggtcatcgagattatgaccgatcgaggttctggcaagaaaaggggcttcgccttcgtgacctttgacgatcacgattccgttgacaaaatcgttatccagaagtaccatacagtgaatggccacaactgtgaggtaaggaaagccctctctaagcaagaaatggcatccgcttcaagttcccaacgtggccggagtgggagcggtaacttcggtggtgggtcttataatgactttgggaactacaacaaccagagctctaactttggaccaatgaaaggcgggaatttcggggggcggtccagcgggccgtacggtggtggtggccagtacttcgccaaaccccgcaaccagggcggatacggggggtcatctagctccagctcgtatgggtctggacgcaggttctag

SEQ ID NO: 125592 - DNA, 576 bp, Artificial Sequence
  derived and/or modified sequence
aagatcgaggtgatcgagatcatgaccgaccggggcagcggcaagaagcggggcttcgcctttgtgacttttgatgaccatgactccgttgataagatagtcatccagaaataccacacagtgaacgggcataattgcgaagtgcgcaaggcgctttcaaagcaggagatggcttccgcaagctccagccagcgggggcggagcggaagtgggaattttggtggggggcgaggtggcggattcggcggaaacgacaacttcggtcggggcggtaacttttccggacgaggggggtttggagggtcgagaggcggcggaggttatggcggcagcggtgatggttataatggcttcggaaatgatggttcaaacttcgggggtggaggctcatacaacgacttcggtaattataacaatcagagttctaattttggcccaatgaagggaggcaacttcgggggcagaagttctgggccctatggtggaggaggacaatattttgccaaacctcgtaatcagggtggttacgggggtagttcatcctcgtcaagctacgggagcggtagaaggttctag

SEQ ID NO: 125593 - DNA, 963 bp, Artificial Sequence
  derived and/or modified sequence
atgtctaagagcgaatccccaaaagaaccggaacagcttaggaaactgtttataggtggcctatcgtttgagactacagacgaatcactgcgatcccactttgaacaatggggaaccctcacagactgcgtggttatgcgcgaccccaacactaagcgttctagaggcttcggttttgttacctatgcaaccgtggaagaggtggacgccgcaatgaacgccaggccccataaggtggacggaagagtcgtagagcccaagagagcagtctccagggaggattcccaacggccaggagcgcatttaaccgtcaagaaaatttttgtggggggaatcaaagaagacacagaggaacaccacctgagggactacttcgaacagtacggaaaaatcgaggtgattgaaatcatgaccgatcgcggatcaggcaagaaacgcggttttgctttcgtgacttttgatgaccacgactccgtagataaaatcgtgatccaaaagtaccacactgtgaacggacacaattgtgaagtgaggaaagcattatctaagcaagagatggcaagtgcctcctcctcacagcgagggagatcagggtccggtaactttggaggtggacggggaggaggattcggcggaaatgacaattttgggaggggcggtaacttttctggtcggggagggtttggcggttccagaggaggcggtggctacggcggaagcggtgacggctataacgggtttggaaacgacgggaacaacttcggtggcggtggaagctataatgatttcgggaactataataaccagagctctaacttcgggccaatgaagggcggtaactttggcggacgctcctcaggcccttacgggggtgggggtcagtacttcgcgaaaccacgcaaccagggaggctatggcggatcctcaagttcctcttcgtacggatccggtagacggttttag

SEQ ID NO: 125594 - DNA, 1119 bp, Artificial Sequence
  derived and/or modified sequence
atgtccaaaagcgagagtccgaaagagcccgaacagctgcgaaagttgttcatagggggattatcttttgagactacagacgaatccctccggagccattttgagcaatggggtacgctcaccgactgtgtcgtcatgcgcgaccccaacacaaaacgttcccgcggttttggatttgtgacctacgccacggtagaggaggtggacgccgctatgaacgcgcgaccccacaaagtagatgggcgagttgtagagccaaagcgggcagtcagcagagaagattcccagaggccaggcgcacatcttacagttaagaaaatttttgttggaggaattaaagaggacactgaggaacaccatctccgggactactttgagcaatatggtaaaatcgaggttattgaaattatgacggaccgcggaagtgggaagaaaaggggtttcgcatttgtcaccttcgatgatcatgatagtgtggacaaaatcgtgattcagaagtaccacacggttaatgggcacaattgtgaggtacggaaggcactgtccaaacaagagatggcctccgcctcatccagtcagagagggcgatcaggcagtgggaactttggcggaggacggggaggcggatttggcggaaatgataattttgggcgagggggaaacttctccggcaggggcggttttgggggaagtcgaggcggaggcggatacggaggatcaggcgacgggtacaacggcttcgggaacgatggaggctacggaggaggagggccagggtattccggcggatcccgcggttatggctccggcggacaggggtacggaaaccaggggagcggatacggaggctcgggctcctatgacagttacaataatggcggtggaggaggttttgggggaggctccggttcaaactttgggggagggggatcctataacgatttcggtaactacaacaatcagagtagtaattttgggcctatgaagggcggaaattttggtggacgatccagcggtccttacggtggtgggggacagtactttgccaagccccgaaaccaaggcggatacgggggttcctcatcctcttccagctatggatccggtaggagattctag

SEQ ID NO: 125595 - DNA, 963 bp, Artificial Sequence
  derived and/or modified sequence
atgagcaagagcgagtcaccaaaggagccagaacagctccgaaagctctttattggtgggctatctttcgaaaccaccgatgaaagtctgagatctcacttcgagcagtggggcacgcttacagattgcgtagtcatgagagaccctaacaccaagaggagcagaggttttgggttcgtgacgtatgccacagtggaggaggtcgacgctgccatgaacgctcgaccgcacaaggtggacggacgggtggtggagcctaagcgggcagtttccagggaggactcgcaaagacctggcgctcatctcaccgtaaagaagatctttgtggggggaattaaggaggacaccgaggagcatcacctgagagattatttcgagcagtatgggaaaatcgaagtgattgagatcatgacagaccgagggagtggcaagaaacgcggattcgcatttgttactttcgacgaccatgattccgtggacaagattgtgatacagaaataccataccgttaatggtcacaattgtgaagtgcggaaggccctttctaagcaggaaatggcatcggccagctcctcccagagaggacgcagcggctcaggaaattttgggggaggtcgaggaggcggattcggcggtaacgataacttcgggcgtggcggtaatttctccggacggggaggtttcggcggatcccgcggagggggaggctacggaggcagcggcgatggttataatggatttggcaacgacggctccaatttcggcggtggaggaagctataacgactttggcaactacaataaccagtccagtaactttggtcctatgaaggggggaaattttggcggacgcagttcagggccatacggagggggagggcaatattttgctaaacctaggaaccagggtgggtatggtgggagtagcagcagtagctcctatggctcagggcgacggttctag

SEQ ID NO: 125596 - DNA, 804 bp, Artificial Sequence
  derived and/or modified sequence
atgtccaagagtgagtcacccaaggaaccagaacagctgaggaaactttttatcgggggactatcctttgagaccacggatgaatctttaaggtcacattttgagcagtggggaaccctgactgattgcgtggtgatgcgagaccccaataccaagcgcagtagaggtttcggcttcgtaacctatgctacggtggaggaagtggacgcagccatgaatgccagaccgcataaggtggacggacgggtagtcgagccaaaacgtgcggtgtccagggaagattcacagagaccaggcgctcacctgacagtgaagaaaatcttcgtcggcggaattaaagaggatacggaggagcaccatcttcgcgattattttgaacaatatggcaaaatcgaggtcatcgagattatgactgatcggggaagcggtaagaagaggggtttcgccttcgtcacttttgatgaccacgacagcgtggacaaaatcgtgattcagaagtatcacaccgtgaacggccacaattgtgaagtcagaaaggctctgtcaaagcaagagatggcctccgcatctagcagccaaaggggacgaagcggatctggaaactttggcggtggtagctacaacgattttggaaactataataaccaatctagcaactttggccctatgaagggaggaaattttgggggtcgctccagtggaccttacggagggggagggcagtacttcgctaagccaaggaaccaaggcggatacggaggttcaagcagttcgtctagctacggctccggaaggaggttctag

SEQ ID NO: 125597 - DNA, 576 bp, Artificial Sequence
  derived and/or modified sequence
aaaatcgaagtcatcgaaattatgacagaccggggtagtggaaagaagaggggctttgcctttgtgaccttcgatgatcacgactccgtcgataagatagtgatacagaaataccacacagttaatggccacaactgcgaagtgaggaaggctttgagcaagcaagagatggcttccgcctcctcatctcagaggggcagaagcgggtccggaaatttcggcggaggcaggggcggtgggttcggcggaaatgataacttcggacggggaggaaacttcagcggcaggggaggcttcggtggctcaagaggaggcggagggtacgggggtagtggtgacggatacaatggatttggaaacgacgggtctaatttcggcggagggggatcatacaacgactttgggaattacaataaccagtcttccaactttggtccaatgaaaggtggtaatttcggcggtcgttcttccggcccatacgggggtggtgggcagtacttcgctaaacccagaaatcagggaggatacggagggtcaagcagttccagctcctacggaagcggtagacgtttctag

SEQ ID NO: 125598 - DNA, 4121 bp, Artificial Sequence
  derived and/or modified sequence
aaagctaggacaaactcccgccaacacgcaggcgccgtaggttcactgcctactcctgcccgccatttcacgtgttctcagaggcaggtggaacttcttaatgcgcctgcgcaaaactcgccattttactacacgtgcggtcaacaagagttcattgcaaaaaaattgttacctcctggctgcttgtctaatacatagtgttaatcatgctttgccaagcgacttgactgtaatatttgcgcgtggaagattaaaaagatgttaaacacccaaggtagattcaaatgtgaatgattggtcggttggccaatcagactggttaacaataacattactcgggaaccaatggactccaaggggtggagacggcgtagaacgaccgaaggaatgacgttacacagcaatgtggcaccacaggccaatagcagggggaagcgatttcaagtatccaatcagagctgttccagggcggagtctaccaatgccgaaagcgaggaggcggggtaaaaaagagagggcgaaggtaggctggcagatacgttcgtcagcttgctcctttctgcccgtggacgccgccgaagaagcatcgttaaagtctctcttcaccctgccgtcatgtctaagtcagagtctcctaaagagcccgaacagctgaggaagctcttcattggagggttgagctttgaaacaactgatgagagcctgaggagccattttgagcaatggggaacgctcacggactgtgtggtaatgagagatccaaacaccaagcgctccaggggctttgggtttgtcacatatgccactgtggaggaggtggatgcagctatgaatgcaaggccacacaaggtggatggaagagttgtggaaccaaagagagctgtctccagagaagattctcaaagaccaggtgcccacttaactgtgaaaaagatatttgttggtggcattaaagaagacactgaagaacatcacctaagagattattttgaacagtatggaaaaattgaagtgattgaaatcatgactgaccgaggcagtggcaagaaaaggggctttgcctttgtaacctttgacgaccatgactccgtggataagattgtcattcagaaataccatactgtgaatggccacaactgtgaagttagaaaagccctgtcaaagcaagagatggctagtgcttcatccagccaaagaggtcgaagtggttctggaaactttggtggtggtcgtggaggtggtttcggtgggaatgacaacttcggtcgtggaggaaacttcagtggtcgtggtggctttggtggcagccgtggtggtggtggatatggtggcagtggggatggctataatggatttggtaatgatggaagcaattttggaggtggtggaagctacaatgattttgggaattacaacaatcagtcttcaaattttggacccatgaagggaggaaattttggaggcagaagctctggcccctatggcggtggaggccaatactttgcaaaaccacgaaaccaaggtggctatggcggttccagcagcagcagtagctatggcagtggcagaagattttaattaggaaacaaagcttagcaggagaggagagccagagaagtgacagggaagctacaggttacaacagatttgtgaactcagccaagcacagtggtggcagggcctagctgctacaaagaagacatgttttagacaaatactcatgtgtatgggcaaaaaactcgaggactgtatttgtgactaattgtataacaggttattttagtttctgttctgtggaaagtgtaaagcattccaacaaagggttttaatgtagatttttttttttgcaccccatgctgttgattgctaaatgtaacagtctgatcgtgacgctgaataaatgtcttttttttaatgtgctgtgtaaagttagtctactcttaagccatcttggtaaatttccccaacagtgtgaagttagaattccttcagggtgatgccaggttctatttggaatttatatacaacctgcttgggtggagaagccattgtcttcggaaaccttggtgtagttgaactgatagttactgttgtgacctgaagttcaccattaaaagggattacccaagcaaaatcatggaatggttataaaagtgattgttggcacatcctatgcaatatatctaaattgaataatggtaccagataaaattatagatgggaatgaagcttgtgtatccattatcatgtgtaatcaataaacgatttaattctcttgaatgaaatgacaactgtatggatttgggactggcagagatttggactttccctacccactccccctgataataatgttgaatgcttctatcacaattcaagttcaaagctctgccagggaatagaaactagctgctggctaatgccgctccataaatccgcagatttgaagtgtctgggaggccttttaaaaataactaatatcagaaagcattttaatgaacgtaaagataggcttacattaaaggaaaactgcagtttgactgggttctggttgggtgggccttcagaggttctatcagttaactatactaattaatttggagattcaaaccataccaatagaaactaaatttttctacataatttcatgttaactgcagtttccctttatggcacaaggggtcacacaacctacctaaaatgttaattgtatagaaaatgatttctaaacctttaacagttaatatccaataatgtgttatttgtacatagattcttttgagccttacctttggtgctctctcaatttcagtgctattgtacctagtagcatagagatttgtctatcaataggactgtatattccatcccatgggtgtgttggaagtttggggaggaggagggtggtgggaggtgggtgggaggtggtggtgggtgggaaagcatgggtgatagttccatgatactggctgagtttgcaatagcaggtggaaccctaactattgagggagtttgcagatacctcaggattcgtgacaatgcctttaaagatccaggagagatgttcagctactaggaactgctagcaagtatagcgcgaatggctccgagctcagacactctacagctgagagtagacacttgtggtatgtggagtacagataagccaggggcaggccacggcacgctccatgaaagctaggagggagtgaaatatcagtgatcatcgcaaggaaggaggcagacaagagtaaggcacacctgactcttaggactagcagtcagaaccaggaggaaaggttttattgctatgcgggtaggtaagaacagattttacttacatccatatagttacttaaagtccagttttctgttaaacatttttcttaatatattgagccaaaactagtccagttaagctgaacttggtttttctggagatgaattgttttaaattgacaccctattgatggctcccagttgaaggaagtgagcacattatttgtactgtgaatataaatttttgcccttttatttatcttcctttgacccatttccttaaaataatggctcaaagtaatagacttccccaaatggtggggggatgggtgggttattaatgggaggtatggggggtttagcttgagatgggacttggtcttagagctagttctaaaggttgtttacttttctagggaggagtctgctactagtcttatcagctcttaaaaacagaaactcatctgtccaagttcgtggcagaaaggtaagtttttacaaattagtgctcagcaaaagaatgccctgcgttcccaaagtaaaagaatgacaagctgtaccttaaaccaaaacacttcgtaatctcatccaattgcaaaaagagttattagccaaccaggtattcccagtagtgacagtggatataactgtgtagtcattcacctctgcttatatgaatactttacaacctcttttgccttttgcaggaacgtccttgtgaagacctttatctgagccactgtacttcgttatcactgccatgcagtttacatgagctgttctgcagctcaaattccattttgtgaatgggtttttttttttaataaactgtatttaactta

SEQ ID NO: 125599 - DNA, 1539 bp, Artificial Sequence
  derived and/or modified sequence
cgttaaagtctctcttcaccctgccgtcatgtctaagtcagagtctcctaaagagcccgaacagctgaggaagctcttcattggagggttgagctttgaaacaactgatgagagcctgaggagccattttgagcaatggggaacgctcacggactgtgtggtaatgagagatccaaacaccaagcgctccaggggctttgggtttgtcacatatgccactgtggaggaggtggatgcagctatgaatgcaaggccacacaaggtggatggaagagttgtggaaccaaagagagctgtctccagagaagattctcaaagaccaggtgcccacttaactgtgaaaaagatatttgttggtggcattaaagaagacactgaagaacatcacctaagagattattttgaacagtatggaaaaattgaagtgattgaaatcatgactgaccgaggcagtggcaagaaaaggggctttgcctttgtaacctttgacgaccatgactccgtggataagattgtcattcagaaataccatactgtgaatggccacaactgtgaagttagaaaagccctgtcaaagcaagagatggctagtgcttcatccagccaaagaggtcgaagtggttctggaaactttggtggtggaagctacaatgattttgggaattacaacaatcagtcttcaaattttggacccatgaagggaggaaattttggaggcagaagctctggcccctatggcggtggaggccaatactttgcaaaaccacgaaaccaaggtggctatggcggttccagcagcagcagtagctatggcagtggcagaagattttaattaggaaacaaagcttagcaggagaggagagccagagaagtgacagggaagctacaggttacaacagatttgtgaactcagccaagcacagtggtggcagggcctagctgctacaaagaagacatgttttagacaaatactcatgtgtatgggcaaaaaactcgaggactgtatttgtgactaattgtataacaggttattttagtttctgttctgtggaaagtgtaaagcattccaacaaagggttttaatgtagatttttttttttgcaccccatgctgttgattgctaaatgtaacagtctgatcgtgacgctgaataaatgtcttttttttaatgtgctgtgtaaagttagtctactcttaagccatcttggtaaatttccccaacagtgtgaagttagaattccttcagggtgatgccaggttctatttggaatttatatacaacctgcttgggtggagaagccattgtcttcggaaaccttggtgtagttgaactgatagttactgttgtgacctgaagttcaccattaaaagggattacccaagcaaaatcatggaatggttataaaagtgattgttggcacatcctatgcaatatatctaaattgaataatggtaccagataaaattatagatgggaatgaagcttgtgtatccattatcatgtgtaatcaataaacgatttaattctcttgaatgaaa

SEQ ID NO: 125600 - DNA, 832 bp, Artificial Sequence
  derived and/or modified sequence
aaaattgaagtgattgaaatcatgactgaccgaggcagtggcaagaaaaggggctttgcctttgtaacctttgacgaccatgactccgtggataagattgtcattcagaaataccatactgtgaatggccacaactgtgaagttagaaaagccctgtcaaagcaagagatggctagtgcttcatccagccaaagaggtcgaagtggttctggaaactttggtggtggtcgtggaggtggtttcggtgggaatgacaacttcggtcgtggaggaaacttcagtggtcgtggtggctttggtggcagccgtggtggtggtggatatggtggcagtggggatggctataatggatttggtaatgatggaagcaattttggaggtggtggaagctacaatgattttgggaattacaacaatcagtcttcaaattttggacccatgaagggaggaaattttggaggcagaagctctggcccctatggcggtggaggccaatactttgcaaaaccacgaaaccaaggtggctatggcggttccagcagcagcagtagctatggcagtggcagaagattttaattaggtaagtaagcacctttttgtgtgttgacataattttttaaattgctgatgaacccaataaccctaatgtagctgagcagtgcaacatagttaacattataattgcagtaattgtggatataaagttaatattcagatcagcaaaatttgtgggaaacaaacttgatattggattgtagccttgagtcttaatatgtttagattaacaactttattccatattgttcaacaggaaacaaagcttagcaggaga

SEQ ID NO: 125601 - protein, 341 aa, Artificial Sequence
  derived and/or modified sequence
MEREKEQFRKLFIGGLSFETTEESLRNYYEQWGKLTDCVVMRDPASKRSRGFGFVTFSSMAEVDAAMAARPHSIDGRVVEPKRAVAREESGKPGAHVTVKKLFVGGIKEDTEEHHLRDYFEEYGKIDTIEIITDRQSGKKRGFGFVTFDDHDPVDKIVLQKYHTINGHNAEVRKALSRQEMQEVQSSRSGRGGNFGFGDSRGGGGNFGPGPGSNFRGGSDGYGSGRGFGDGYNGYGGGPGGGNFGGSPGYGGGRGGYGGGGPGYGNQGGGYGGGYDNYGGGNYGSGNYNDFGNYNQQPSNYGPMKSGNFGGSRNMGGPYGGGNYGPGGSGGSGGYGGRSRY

SEQ ID NO: 125602 - protein, 249 aa, Artificial Sequence [sequence omitted]

SEQ ID NO: 125603 - DNA, 1026 bp, Artificial Sequence
  derived and/or modified sequence
atggagagagagaaggagcagttcagaaagctgttcatcggcggcctgagcttcgagaccaccgaggagagcctgagaaactactacgagcagtggggcaagctgaccgactgcgtggtgatgagagaccccgccagcaagagaagcagaggcttcggcttcgtgaccttcagcagcatggccgaggtggacgccgccatggccgccagaccccacagcatcgacggcagagtggtggagcccaagagagccgtggccagagaggagagcggcaagcccggcgcccacgtgaccgtgaagaagctgttcgtgggcggcatcaaggaggacaccgaggagcaccacctgagagactacttcgaggagtacggcaagatcgacaccatcgagatcatcaccgacagacagagcggcaagaagagaggcttcggcttcgtgaccttcgacgaccacgaccccgtggacaagatcgtgctgcagaagtaccacaccatcaacggccacaacgccgaggtgagaaaggccctgagcagacaggagatgcaggaggtgcagagcagcagaagcggcagaggcggcaacttcggcttcggcgacagcagaggcggcggcggcaacttcggccccggccccggcagcaacttcagaggcggcagcgacggctacggcagcggcagaggcttcggcgacggctacaacggctacggcggcggccccggcggcggcaacttcggcggcagccccggctacggcggcggcagaggcggctacggcggcggcggccccggctacggcaaccagggcggcggctacggcggcggctacgacaactacggcggcggcaactacggcagcggcaactacaacgacttcggcaactacaaccagcagcccagcaactacggccccatgaagagcggcaacttcggcggcagcagaaacatgggcggcccctacggcggcggcaactacggccccggcggcagcggcggcagcggcggctacggcggcagaagcagatactag

SEQ ID NO: 125604 - DNA, 750 bp, Artificial Sequence
  derived and/or modified sequence
atggagagagagaaggagcagttcagaaagctgttcatcggcggcctgagcttcgagaccaccgaggagagcctgagaaactactacgagcagtggggcaagctgaccgactgcgtggtgatgagagaccccgccagcaagagaagcagaggcttcggcttcgtgaccttcagcagcatggccgaggtggacgccgccatggccgccagaccccacagcatcgacggcagagtggtggagcccaagagagccgtggccagagaggagagcggcaagcccggcgcccacgtgaccgtgaagaagctgttcgtgggcggcatcaaggaggacaccgaggagcaccacctgagagactacttcgaggagtacggcaagatcgacaccatcgagatcatcaccgacagacagagcggcaagaagagaggcttcggcttcgtgaccttcgacgaccacgaccccgtggacaagatcgtgctgcagaagtaccacaccatcaacggccacaacgccgaggtgagaaaggccctgagcagacaggagatgcaggaggacctggaggtggccatcctggaggtggcccccgtgatggaggaggaggaggaggacatggtggtggaggacctggacatggccaccagagtgggcgccaccgaggtggtgatgaccaccatggaggaggagatcatggaggtggagatcaccatgatcctggagatcatcaccagcaacctgctgaccaccgtgcagtag

SEQ ID NO: 125605 - DNA, 1026 bp, Artificial Sequence
  derived and/or modified sequence
atggagagagaaaaagagcagtttaggaagctgttcattggaggtctatcttttgagaccaccgaagagtctctgagaaactattatgaacagtggggcaaactaactgactgtgtggtgatgcgggaccctgcaagtaaacggtcgagaggttttggcttcgtaacattttccagcatggcagaggtagacgccgccatggccgcccgcccgcattccatcgatggacgtgtggtggaaccaaaaagggcagtcgcccgagaggaatcggggaagccaggggcccacgtcaccgtcaagaaactcttcgtcggcgggatcaaggaggacacagaggagcaccacctgagagattacttcgaagagtatgggaagatcgataccatcgagatcataaccgatcgtcagagcggcaaaaagcgtggatttgggttcgtgacgtttgatgatcacgaccctgtggataagatcgttctccaaaaataccacactataaatgggcataacgcagaagtacggaaagctttaagccgtcaggaaatgcaggaggttcagtcgagccgatctggaaggggaggcaacttcggctttggtgactccagggggggcggcggcaacttcggacctggccccggcagcaacttccgcggggggtctgatggatacggaagcggacgcggttttggcgacggctataatggctacggaggaggcccaggtggaggaaatttcggagggtcccccggatatggaggcggcaggggcggctatggtgggggggggcctggatacgggaatcaggggggcgggtatggggggggctacgataactacggcggcggaaattacggctccggcaactacaatgactttgggaactacaaccagcagcctagtaactacggacccatgaaatctggaaacttcggtggaagcagaaatatgggcggcccttacggcgggggcaactatggcccgggggggtccggggggagtggtgggtatggagggcgcagccgctattag

SEQ ID NO: 125606 - DNA, 750 bp, Artificial Sequence
  derived and/or modified sequence
atggaacgcgaaaaagaacaatttaggaagctgttcatcggagggctgagtttcgaaactacagaagaatctctccgcaattactacgaacaatgggggaagttgacagattgtgttgtgatgcgagatcccgccagcaagagatcccggggttttggctttgtgacatttagcagcatggccgaagtagacgctgcaatggcggcccgtcctcatagtatagacggccgcgtcgtcgaacctaaaagagccgttgccagagaggagagtgggaaacccggcgcacacgtgaccgtaaagaaactattcgtcggagggatcaaagaggataccgaggagcaccacctgcgggactattttgaggagtatgggaaaattgacactatcgagataattacagacaggcaaagtggcaagaagaggggattcggttttgtcacgtttgacgatcacgatcccgtcgataagatcgtgcttcagaaataccacacaatcaatggtcataacgcagaagttcgtaaggctctttcaagacaggagatgcaggaagacttagaggtcgcaatcctagaagttgcgcctgtgatggaggaagaggaagaggacatggtggttgaagatcttgacatggccacaagggtcggcgcaacggaggtggtcatgaccacaatggaagaagaaataatggaggtggaaattacaatgattctggagatcatcacgtctaacctcctgactacagttcagtag

SEQ ID NO: 125607 - DNA, 1711 bp, Artificial Sequence
  derived and/or modified sequence
agtagcagcagcgccgggtcccgtgcggaggtgctcctcgcagagttgtttctcgagcagcggcagttctcactacagcgccaggacgagtccggttcgtgttcgtccgcggagatctctctcatctcgctcggctgcgggaaatcgggctgaagcgactgagtccgcgatggagagagaaaaggaacagttccgtaagctctttattggtggcttaagctttgaaaccacagaagaaagtttgaggaactactacgaacaatggggaaagcttacagactgtgtggtaatgagggatcctgcaagcaaaagatcaagaggatttggttttgtaactttttcatccatggctgaggttgatgctgccatggctgcaagacctcattcaattgatgggagagtagttgagccaaaacgtgctgtagcaagagaggaatctggaaaaccaggggctcatgtaactgtgaagaagctgtttgttggcggaattaaagaagatactgaggaacatcaccttagagattactttgaggaatatggaaaaattgataccattgagataattactgataggcagtctggaaagaaaagaggctttggctttgttacttttgatgaccatgatcctgtggataaaatcgtattgcagaaataccataccatcaatggtcataatgcagaagtaagaaaggctttgtctagacaagaaatgcaggaagttcagagttctaggagtggaagaggaggcaactttggctttggggattcacgtggtggcggtggaaatttcggaccaggaccaggaagtaactttagaggaggatctgatggatatggcagtggacgtggatttggggatggctataatgggtatggaggaggacctggaggtggcaattttggaggtagccccggttatggaggaggaagaggaggatatggtggtggaggacctggatatggcaaccagggtgggggctacggaggtggttatgacaactatggaggaggaaattatggaagtggaaattacaatgattttggaaattataaccagcaaccttctaactacggtccaatgaagagtggaaactttggtggtagcaggaacatggggggaccatatggtggaggaaactatggtccaggaggcagtggaggaagtgggggttatggtgggaggagccgatactgagcttcttcctatttgccatgggcttcactgtataaataggagaggatgagagcccagaggtaacagaacagcttcaggttatcgaaataacaatgttaaggaaactcttatctcagtcatgcataaatatgcagtgatatggcagaagacaccagagcagatgcagagagccattttgtgaatggattggattatttaataacattaccttactgtggaggaaggattgtaaaaaaaaatgcctttgagacagtttcttagctttttaattgttgtttctttctagtggtctttgtaagagtgtagaagcattccttctttgataatgttaaatttgtaagtttcaggtgacatgtgaaaccttttttaagatttttctcaaagttttgaaaagctattagccaggatcatggtgtaataagacataacgtttttcctttaaaaaaatttaagtgcgtgtgtagagttaagaagctgttgtacatttatgatttaataaaataattctaaaggaaa

SEQ ID NO: 125608 - DNA, 1523 bp, Artificial Sequence
  derived and/or modified sequence
gtgcggaggtgctcctcgcagagttgtttctcgagcagcggcagttctcactacagcgccaggacgagtccggttcgtgttcgtccgcggagatctctctcatctcgctcggctgcgggaaatcgggctgaagcgactgagtccgcgatggagagagaaaaggaacagttccgtaagctctttattggtggcttaagctttgaaaccacagaagaaagtttgaggaactactacgaacaatggggaaagcttacagactgtgtggtaatgagggatcctgcaagcaaaagatcaagaggatttggttttgtaactttttcatccatggctgaggttgatgctgccatggctgcaagacctcattcaattgatgggagagtagttgagccaaaacgtgctgtagcaagagaggaatctggaaaaccaggggctcatgtaactgtgaagaagctgtttgttggcggaattaaagaagatactgaggaacatcaccttagagattactttgaggaatatggaaaaattgataccattgagataattactgataggcagtctggaaagaaaagaggctttggctttgttacttttgatgaccatgatcctgtggataaaatcgtattgcagaaataccataccatcaatggtcataatgcagaagtaagaaaggctttgtctagacaagaaatgcaggaggacctggaggtggcaattttggaggtagccccggttatggaggaggaagaggaggatatggtggtggaggacctggatatggcaaccagggtgggggctacggaggtggttatgacaactatggaggaggaaattatggaagtggaaattacaatgattttggaaattataaccagcaaccttctaactacggtccaatgaagagtggaaactttggtggtagcaggaacatggggggaccatatggtggaggaaactatggtccaggaggcagtggaggaagtgggggttatggtgggaggagccgatactgagcttcttcctatttgccatgggcttcactgtataaataggagaggatgagagcccagaggtaacagaacagcttcaggttatcgaaataacaatgttaaggaaactcttatctcagtcatgcataaatatgcagtgatatggcagaagacaccagagcagatgcagagagccattttgtgaatggattggattatttaataacattaccttactgtggaggaaggattgtaaaaaaaaatgcctttgagacagtttcttagctttttaattgttgtttctttctagtggtctttgtaagagtgtagaagcattccttctttgataatgttaaatttgtaagtttcaggtgacatgtgaaaccttttttaagatttttctcaaagttttgaaaagctattagccaggatcatggtgtaataagacataacgtttttcctttaaaaaaatttaagtgcgtgtgtagagttaagaagctgttgtacatttatgatttaataaaataattctaaagg

SEQ ID NO: 125609 - DNA, 1026 bp, Artificial Sequence
  derived and/or modified sequence
atggagcgggagaaggagcagttcaggaagctgttcatcggcggcctgagctttgagaccacagaggagagcctgaggaactactatgagcagtggggcaagctgacagactgtgtggtgatgagggaccctgccagcaagaggagccggggcttcggctttgtgaccttcagctccatggccgaggtggatgctgccatggccgcccggccccacagcattgatggccgggtggtggagcccaagagagctgtggcccgggaggagagcggcaagccaggggcccacgtgacagtgaagaagctgtttgtgggcggcatcaaggaggacacagaggagcaccacctgcgggactactttgaggagtatggcaagattgacaccatcgagatcatcacagaccggcagagcggcaagaagaggggctttggatttgtgacctttgatgaccatgaccctgtggacaagatcgtgctgcagaagtaccacaccatcaatggccacaatgctgaggtgaggaaggccctgagccggcaggagatgcaggaggtgcagagcagccgcagcggccggggcggcaactttggatttggagacagccggggcggcggcggcaactttggacctggccctggcagcaacttccggggcggcagtgatggctacggcagcggccggggctttggagatggctacaacggctatggaggcggccctgggggcggcaactttggaggcagccctggctacggcggcggccggggcggctatggaggcggcggccctggctacggcaaccagggcggcggctatggaggcggctatgacaactacggcggcggcaactacggcagcggcaactacaatgactttggaaactacaaccagcagcccagcaactacggccccatgaagagcggcaactttggaggcagcaggaacatgggcggcccctatggaggcggcaactacggccctgggggcagcggcggcagcggcggctatggaggccgcagccgctactag

SEQ ID NO: 125610 - DNA, 750 bp, Artificial Sequence
  derived and/or modified sequence
atggagcgggagaaggagcagttcaggaagctgttcatcggcggcctgagctttgagaccacagaggagagcctgaggaactactatgagcagtggggcaagctgacagactgtgtggtgatgagggaccctgccagcaagaggagccggggcttcggctttgtgaccttcagctccatggccgaggtggatgctgccatggccgcccggccccacagcattgatggccgggtggtggagcccaagagagctgtggcccgggaggagagcggcaagccaggggcccacgtgacagtgaagaagctgtttgtgggcggcatcaaggaggacacagaggagcaccacctgcgggactactttgaggagtatggcaagattgacaccatcgagatcatcacagaccggcagagcggcaagaagaggggctttggatttgtgacctttgatgaccatgaccctgtggacaagatcgtgctgcagaagtaccacaccatcaatggccacaatgctgaggtgaggaaggccctgagccggcaggagatgcaggaggacctggaggtggccatcctggaggtggcccctgtgatggaggaggaggaggaggacatggtggtggaggacctggacatggccaccagggtgggcgccacagaggtggtgatgaccaccatggaggaggagatcatggaggtggagatcaccatgatcctggagatcatcaccagcaacctgctgaccaccgtgcagtag

SEQ ID NO: 125611 - DNA, 1026 bp, Artificial Sequence
  derived and/or modified sequence
atggagcgggagaaggagcagttccggaagctgttcatcggcggcctttccttcgaaacgaccgaggagagcttgcgtaattactacgaacagtggggcaaattgactgactgcgtggtgatgcgcgaccctgctagtaagaggtccagggggtttggctttgttacgttttcaagcatggcggaagttgacgcggccatggccgcccgcccacactcaattgacgggagggtcgttgagcccaaacgagcagttgctagggaggagtcgggcaagccaggggctcacgtaactgtgaagaaactgttcgtgggcgggatcaaagaagataccgaggaacatcacctgcgggattatttcgaagaatacggcaagattgacaccattgaaattattactgaccggcagagcggcaagaaaagaggctttggattcgtaactttcgatgaccacgatcccgtggacaaaatcgtgctgcaaaagtaccatacaattaacgggcacaatgctgaggtgagaaaagcccttagcaggcaggaaatgcaggaagtgcagtcctcccggagcgggcggggtggcaacttcgggttcggggattccaggggaggcggaggcaatttcgggcctggcccagggagcaacttcagagggggctccgacggttacggctctggtcgcgggttcggtgatggctacaacgggtatgggggaggacctggaggtgggaactttggcggatcaccaggttacggcggtggcaggggcggatatggaggaggtggccctggctacggtaatcagggcgggggttacggcggcgggtacgacaactatgggggcggcaactacggaagcggtaactacaatgatttcggcaattacaatcaacagcccagtaactacggtcccatgaagtccgggaacttcggcggctctcggaacatgggggggccttatggtggcgggaactatgggccagggggctctggtgggtccggcggctacggaggacggagccgctattag

SEQ ID NO: 125612 - DNA, 750 bp, Artificial Sequence
  derived and/or modified sequence
atggagcgggagaaggagcagttccggaagctgttcatcggcggcttatcatttgaaactaccgaggaatcacttcggaactattatgaacagtgggggaagttgactgactgtgttgtgatgagggaccctgcatctaagcggagtcggggttttggcttcgtgaccttctcttctatggcagaggtggatgcagcaatggccgctcgcccccatagcatcgatggtagagtagtggagcctaagcgggcagtggccagggaggaatcaggcaagccaggtgcacacgtcaccgtaaaaaagctgtttgtcggtggaatcaaagaggacaccgaggagcaccatctgcgcgactactttgaggaatacgggaagattgacactatcgaaataattacagatagacagtcaggaaagaagagaggcttcggctttgtcacatttgatgatcatgatccggtggacaagattgttctccaaaagtaccacacaattaatggccacaacgcggaggtgcgaaaagccctttctcgacaggagatgcaggaagatcttgaggtcgctattttggaagtggcccccgtcatggaggaggaggaagaggatatggtggtggaggacttagatatggctacccgagtgggcgccaccgaggtggtgatgactacaatggaggaggagatcatggaggtcgagatcactatgatcctggagatcatcacctcaaacttgctcactactgtgcagtag

SEQ ID NO: 125613 - DNA, 1026 bp, Artificial Sequence
  derived and/or modified sequence
atggagcgagagaaagagcagtttcggaagctgtttattgggggactgagctttgaaaccaccgaagaatctctacgaaactattacgaacagtggggcaaactgacggattgcgtagtgatgcgggacccagcctcaaaacgcagcaggggatttgggtttgtcactttttcttctatggccgaagtggacgctgcgatggcggctagaccgcattcgatcgacggaagagtggtcgaacctaagagagccgtggctagggaggaatcaggaaagccaggagctcacgtgacagtcaagaaactgttcgtgggaggcatcaaggaggacaccgaagagcaccatctgagagattacttcgaagagtacggcaaaattgacaccatcgaaattattacggatcgacaaagcggtaaaaagcgaggtttcgggttcgtaaccttcgatgatcacgatccagtcgacaagatcgtactgcagaaataccacaccatcaatggccataatgcagaggtccgcaaggctctaagtaggcaagaaatgcaagaagtgcagtcttcacgtagcggcaggggcggaaatttcggctttggcgattccagagggggaggtggcaatttcggcccaggaccgggaagcaactttagaggcggttcagatggttacgggtccggaaggggtttcggcgacggatacaacgggtatggcggtgggccagggggtggtaatttcggcggtagcccaggatacggtggcggacgcggaggatacgggggtggtggccctggatatgggaatcagggagggggatatggaggcggttatgataactatggcggagggaactatgggagcggcaattataatgattttggcaattacaaccagcagccctccaactacggtccaatgaagagcgggaacttcggtggtagcaggaacatgggcggaccatacggcggagggaattatggccctggcggatctgggggatccggcggttacggtgggagatcccgctactag

SEQ ID NO: 125614 - DNA, 750 bp, Artificial Sequence
  derived and/or modified sequence
atggagagagagaaggaacagttccgcaaactgtttatcggaggactgagtttcgagacgaccgaggagagtctgcggaattactacgagcagtgggggaagttgaccgattgcgtagtcatgcgcgaccctgcctccaaaaggtccagaggctttggcttcgtgacattctcgtcaatggcagaagtcgatgcggctatggctgcgcgacctcactccatcgatggccgagtagtggagcccaagcgggctgtggccagagaggagtccggcaagcctggagctcacgtcaccgtgaaaaaattatttgtgggagggattaaggaagataccgaagagcaccatctaagagattatttcgaagaatatggtaagattgatactattgaaatcatcacagaccggcagtctggcaagaaacgaggattcggatttgttacatttgacgaccatgaccctgtggataaaattgtgctgcagaagtaccacacaataaacggacataatgctgaggtcagaaaggccctgtcaagacaagagatgcaggaagacctggaagtggccattctcgaggtggctcccgtcatggaggaggaagaagaagacatggtggtggaagacttagatatggctacccgggtaggggctactgaggtggtcatgacaacaatggaggaggaaatcatggaggttgagatcaccatgatattggagatcatcacaagcaacttactcacaaccgtgcagtag

SEQ ID NO: 125615 - protein, 306 aa, Artificial Sequence
  derived and/or modified sequence
MSEEQFGGDGAAAAATAAVGGSAGEQEGAMVAATQGAAAAAGSGAGTGGGTASGGTEGGSAESEGAKIDASKNEEDEGHSNSSPRHSEAATAQREEWKMFIGGLSWDTTKKDLKDYFSKFGEVVDCTLKLDPITGRSRGFGFVLFKESESVDKVMDQKEHKLNGKVIDPKRAKAMKTKEPVKKIFVGGLSPDTPEEKIREYFGGFGEVESIELPMDNKTNKRRGFCFITFKEEEPVKKIMEKKYHNVGLSKCEIKVAMSKEQYQQQQQWGSRGGFAGRARGRGGDQQSGYGKVSRRGGHQNSYKPY

SEQ ID NO: 125616 - protein, 210 aa, Artificial Sequence
  derived and/or modified sequence
  misc_feature (1)..(1): Xaa can be any naturally occurring amino acid
XKMFIGGLSWDTTKKDLKDYFSKFGEVVDCTLKLDPITGRSRGFGFVLFKESESVDKVMDQKEHKLNGKVIDPKRAKAMKTKEPVKKIFVGGLSPDTPEEKIREYFGGFGEVESIELPMDNKTNKRRGFCFITFKEEEPVKKIMEKKYHNVGLSKCEIKVAMSKEQYQQQQQWGSRGGFAGRARGRGGDQQSGYGKVSRRGGHQNSYKPY

SEQ ID NO: 125617 - DNA, 921 bp, Artificial Sequence
  derived and/or modified sequence
atgagcgaggagcagttcggcggcgacggcgccgccgccgccgccaccgccgccgtgggcggcagcgccggcgagcaggagggcgccatggtggccgccacccagggcgccgccgccgccgccggcagcggcgccggcaccggcggcggcaccgccagcggcggcaccgagggcggcagcgccgagagcgagggcgccaagatcgacgccagcaagaacgaggaggacgagggccacagcaacagcagccccagacacagcgaggccgccaccgcccagagagaggagtggaagatgttcatcggcggcctgagctgggacaccaccaagaaggacctgaaggactacttcagcaagttcggcgaggtggtggactgcaccctgaagctggaccccatcaccggcagaagcagaggcttcggcttcgtgctgttcaaggagagcgagagcgtggacaaggtgatggaccagaaggagcacaagctgaacggcaaggtgatcgaccccaagagagccaaggccatgaagaccaaggagcccgtgaagaagatcttcgtgggcggcctgagccccgacacccccgaggagaagatcagagagtacttcggcggcttcggcgaggtggagagcatcgagctgcccatggacaacaagaccaacaagagaagaggcttctgcttcatcaccttcaaggaggaggagcccgtgaagaagatcatggagaagaagtaccacaacgtgggcctgagcaagtgcgagatcaaggtggccatgagcaaggagcagtaccagcagcagcagcagtggggcagcagaggcggcttcgccggcagagccagaggcagaggcggcgaccagcagagcggctacggcaaggtgagcagaagaggcggccaccagaacagctacaagccctactag

SEQ ID NO: 125618 - DNA, 666 bp, Artificial Sequence
  derived and/or modified sequence
atgagcgaggagcagttcggcggcgacggcgccgccgccgccgccaccgccgccgtgggcggcagcgccggcgagcaggagggcgccatggtggccgccacccagggcgccgccgccgccgccggcagcggcgccggcaccggcggcggcaccgccagcggcggcaccgagggcggcagcgccgagagcgagggcgccaagatcgacgccagcaagaacgaggaggacgagggccacagcaacagcagccccagacacagcgaggccgccaccgcccagagagaggagtggaagatgttcatcggcggcctgagctgggacaccaccaagaaggacctgaaggactacttcagcaagttcggcgaggtggtggactgcaccctgaagctggaccccatcaccggcagaagcagaggcttcggcttcgtgctgttcaaggagagcgagagcgtggacaaggtgatggaccagaaggagcacaagctgaacggcaaggtgatcgaccccaagagagccaaggccatgaagaccaaggagcccgtgaagaagatcttcgtgggcggcctgagccccgacacccccgaggagaagatcagagagtacttcggcggcttcggcgaggtggagagcatcgagctgcccatggacaacaagaccaacaagtag

SEQ ID NO: 125619 - DNA, 921 bp, Artificial Sequence
  derived and/or modified sequence
atgtcagaagaacagtttggcggtgacggggccgctgcggccgccaccgcggcagtgggcggctctgctggcgaacaggagggagcaatggtggcagccacacagggggcggccgcagctgcaggcagtggtgcaggaactggcgggggtacagcaagcggcggtacagagggcggcagcgctgagtccgagggggctaaaattgatgctagcaaaaatgaggaagatgagggccacagcaatagcagccctcggcatagcgaagcggcaactgcccagagggaggagtggaagatgttcattggggggctgtcctgggacacaaccaaaaaagacctcaaagactacttttcgaaattcggtgaagtggtggactgtacacttaaactcgaccctatcaccggacggtcccgcgggttcggattcgttctgttcaaagaatctgagagtgtggataaggtgatggaccagaaagaacacaagttaaacgggaaggttatagacccgaagagagcaaaggccatgaaaaccaaagagcctgtgaagaaaattttcgtcggggggttgagcccagacacacccgaggaaaaaattagggagtacttcggaggattcggcgaagttgagagcattgaactgcccatggacaataagacaaacaaacgcagggggttttgcttcattactttcaaagaggaagagcctgtgaaaaagatcatggaaaagaagtaccataatgtcggcctttccaagtgcgaaattaaggtggcaatgagtaaagagcagtaccaacaacaacagcagtggggctccagagggggattcgccggaagagcccgaggtaggggcggggatcagcaaagcgggtacgggaaggtaagccggagaggtggacaccagaactcctataaaccatattag

SEQ ID NO: 125620 - DNA, 666 bp, Artificial Sequence
  derived and/or modified sequence
atgtcggaagagcagttcgggggggatggcgctgctgccgctgccactgcagcagttggcggttccgccggggaacaggagggggcaatggtggccgcaacacaaggggccgccgccgcagctggatccggcgccgggactgggggcggtacagcttcaggcggcacggaaggaggtagtgccgaaagcgaaggtgctaaaattgatgccagcaaaaatgaagaagacgaaggccatagcaattccagtccccggcactcagaagctgccactgctcagagggaggaatggaagatgttcataggcggcctcagctgggatactaccaagaaagatctgaaagattatttttctaagttcggtgaggtcgtcgattgcacactgaaactagatcccataacggggcgcagcagaggcttcgggtttgtgttgttcaaagagtccgagagcgtcgataaggtcatggaccagaaagaacacaaactaaacgggaaggttatcgacccaaaacgcgctaaagcaatgaagacaaaggaacccgtaaaaaagatattcgtcggaggactctcccccgatacaccggaagaaaaaatacgggagtactttggaggcttcggagaagtagaatccatagaactgcccatggacaacaaaaccaataagtag

SEQ ID NO: 125621 - DNA, 1585 bp, Artificial Sequence
  derived and/or modified sequence
ccattttaggtggtccgcggcggcgccattaaagcgaggaggaggcgagagcggccgccgctggtgcttattcttttttagtgcagcgggagagagcgggagtgtgcgccgcgcgagagtgggaggcgaagggggcaggccagggagaggcgcaggagcctttgcagccacgcgcgcgccttccctgtcttgtgtgcttcgcgaggtagagcgggcgcgcggcagcggcggggattactttgctgctagtttcggttcgcggcagcggcgggtgtagtctcggcggcagcggcggagacactagcactatgtcggaggagcagttcggcggggacggggcggcggcagcggcaacggcggcggtaggcggctcggcgggcgagcaggagggagccatggtggcggcgacacagggggcagcggcggcggcgggaagcggagccgggaccgggggcggaaccgcgtctggaggcaccgaagggggcagcgccgagtcggagggggcgaagattgacgccagtaagaacgaggaggatgaaggccattcaaactcctccccacgacactctgaagcagcgacggcacagcgggaagaatggaaaatgtttataggaggccttagctgggacactacaaagaaagatctgaaggactacttttccaaatttggtgaagttgtagactgcactctgaagttagatcctatcacagggcgatcaaggggttttggctttgtgctatttaaagaatcggagagtgtagataaggtcatggatcaaaaagaacataaattgaatgggaaggtgattgatcctaaaagggccaaagccatgaaaacaaaagagccggttaaaaaaatttttgttggtggcctttctccagatacacctgaagagaaaataagggagtactttggtggttttggtgaggtggaatccatagagctccccatggacaacaagaccaataagaggcgtgggttctgctttattacctttaaggaagaagaaccagtgaagaagataatggaaaagaaataccacaatgttggtcttagtaaatgtgaaataaaagtagccatgtcgaaggaacaatatcagcaacagcaacagtggggatctagaggaggatttgcaggaagagctcgtggaagaggtggtgaccagcagagtggttatgggaaggtatccaggcgaggtggtcatcaaaatagctacaaaccatactaaattattccatttgcaacttatccccaacaggtggtgaagcagtattttccaatttgaagattcatttgaaggtggctcctgccacctgctaatagcagttcaaactaaattttttgtatcaagtccctgaatggaagtatgacgttgggtccctctgaagtttaattctgagttctcattaaaagaaatttgctttcattgttttatttcttaattgctatgcttcagaatcaatttgtgttttatgccctttcccccagtattgtagagcaagtcttgtgttaaaagcccagtgtgacagtgtcatgatgtagtagtgtcttactggttttttaataaatccttttgtataaaaa

SEQ ID NO: 125622 - DNA, 748 bp, Artificial Sequence
  derived and/or modified sequence
tgtgcaacgcggagcgtgagaggaagtttcggttcgcggcagcggcgggtgtagtctcggcggcagcggcggagacactagcactatgtcggaggagcagttcggcggggacggggcggcggcagcggcaacggcggcggtaggcggctcggcgggcgagcaggagggagccatggtggcggcgacacagggggcagcggcggcggcgggaagcggagccgggaccgggggcggaaccgcgtctggaggcaccgaagggggcagcgccgagtcggagggggcgaagattgacgccagtaagaacgaggaggatgaaggccattcaaactcctccccacgacactctgaagcagcgacggcacagcgggaagaatggaaaatgtttataggaggccttagctgggacactacaaagaaagatctgaaggactacttttccaaatttggtgaagttgtagactgcactctgaagttagatcctatcacagggcgatcaaggggttttggctttgtgctatttaaagaatcggagagtgtagataaggtcatggatcaaaaagaacataaattgaatgggaaggtgattgatcctaaaagggccaaagccatgaaaacaaaagagccggttaaaaaaatttttgttggtggcctttctccagatacacctgaagagaaaataagggagtactttggtggttttggtgaggtggaatccatagagctccccatggacaacaagaccaataag

SEQ ID NO: 125623 - DNA, 921 bp, Artificial Sequence
  derived and/or modified sequence
atgtctgaggagcagtttggaggagatggagctgctgctgctgccacagctgctgtgggcggcagcgctggggagcaggagggcgccatggtggccgccacccagggcgctgctgctgctgctggcagcggggccggcactggaggcggcacagccagcggcggcacagagggcggcagcgctgagagcgagggcgccaagattgatgccagcaagaatgaagaagatgagggccacagcaacagcagccccaggcacagcgaggccgccacagcccagcgggaggagtggaagatgtttattggaggcctgtcctgggacaccaccaagaaggacctgaaggactacttcagcaagtttggagaggtggtggactgcaccctgaagctggaccccatcaccggccgcagccggggcttcggctttgtgctcttcaaggagagcgagagcgtggacaaggtgatggaccagaaggagcacaagctgaatggcaaggtgattgaccccaagagggccaaggccatgaagaccaaggagcctgtgaagaagatctttgtgggcggcctgagcccagacaccccagaggagaagatccgggagtactttggaggctttggagaggtggagagcattgagctgcccatggacaacaagaccaacaagaggcggggcttctgcttcatcaccttcaaggaggaggagcctgtgaagaagatcatggagaagaagtaccacaacgtgggcctgagcaaatgtgagatcaaggtggccatgagcaaggagcagtaccagcagcagcagcagtggggcagcagaggaggctttgctggccgggcccggggccggggcggggaccagcagagcggctacggcaaggtgtccagaagaggaggccaccagaacagctacaagccctactag

SEQ ID NO: 125624 - DNA, 666 bp, Artificial Sequence
  derived and/or modified sequence
atgtctgaggagcagtttggaggagatggagctgctgctgctgccacagctgctgtgggcggcagcgctggggagcaggagggcgccatggtggccgccacccagggcgctgctgctgctgctggcagcggggccggcactggaggcggcacagccagcggcggcacagagggcggcagcgctgagagcgagggcgccaagattgatgccagcaagaatgaagaagatgagggccacagcaacagcagccccaggcacagcgaggccgccacagcccagcgggaggagtggaagatgtttattggaggcctgtcctgggacaccaccaagaaggacctgaaggactacttcagcaagtttggagaggtggtggactgcaccctgaagctggaccccatcaccggccgcagccggggcttcggctttgtgctcttcaaggagagcgagagcgtggacaaggtgatggaccagaaggagcacaagctgaatggcaaggtgattgaccccaagagggccaaggccatgaagaccaaggagcctgtgaagaagatctttgtgggcggcctgagcccagacaccccagaggagaagatccgggagtactttggaggctttggagaggtggagagcattgagctgcccatggacaacaagaccaacaagtag

SEQ ID NO: 125625 - DNA, 921 bp, Artificial Sequence
  derived and/or modified sequence
atgagcgaggagcagttcggcggcgacggcgccgccgccgccgccactgccgctgtggggggctcagccggagagcaggaaggcgcgatggtggccgcgacccagggggccgcagcagcagctggttcaggagccggtaccggaggagggactgccagcgggggtaccgaaggcggctctgctgaaagtgagggagctaagatcgacgccagcaagaatgaagaggacgaaggccactctaacagtagtccaagacactctgaagccgcaaccgcccagagagaggagtggaagatgttcatcggaggtttatcatgggatacgacaaagaaagatctgaaagactattttagtaagtttggcgaagtggtggattgcacactgaaattagatcctataacgggccggagccgcggattcggcttcgtactgtttaaggaaagcgagtcagtggataaagtcatggaccagaaagagcacaagctgaacggcaaggtaattgatcctaaacgggcaaaagctatgaaaactaaggagccagtgaaaaaaatctttgtggggggcctgtcccctgacacacctgaagaaaagattagagagtacttcgggggctttggcgaggtggaatcaattgaacttccaatggacaataaaactaacaaacggagaggcttttgtttcatcaccttcaaggaagaagagccagtcaagaagattatggaaaagaagtatcacaatgtgggcctgtcaaaatgtgagattaaagttgcaatgagcaaagagcagtaccaacagcaacagcagtggggttcaagaggcggtttcgccggccgtgcacgagggcgaggtggagatcagcaatcagggtatggaaaggtttcccgacgcgggggccaccagaattcatataaaccttactag

SEQ ID NO: 125626 - DNA, 666 bp, Artificial Sequence
  derived and/or modified sequence
atgagcgaggagcagttcggcggcgacggcgccgccgccgccgccactgccgccgtgggcgggtctgccggggaacaggagggtgcgatggtggccgccactcagggcgctgccgccgctgccggttcaggtgccggaaccggtggcggaactgcctcaggcggtacagagggcgggagcgccgagagcgaaggagcaaaaattgacgcttcaaaaaatgaggaggacgaggggcacagcaatagctctccgcgccattccgaggccgctacagcacagcgtgaggaatggaaaatgttcattggcggcctgagttgggataccaccaagaaagacctaaaagattatttctctaagttcggagaggtggtggactgcacccttaagctagaccccatcaccggtaggtcccggggattcggttttgtgctctttaaggaatccgagtcggtcgataaggttatggatcaaaaggaacataaactcaacggtaaagtcatcgatcctaaaagagcaaaggcaatgaagactaaagaacctgttaagaaaatcttcgtgggtggtctgtcacccgatactccagaggagaagatcagagagtatttcggaggattcggcgaggttgagagcatagagcttcccatggacaacaaaactaataaatag

SEQ ID NO: 125627 - DNA, 921 bp, Artificial Sequence
  derived and/or modified sequence
atgtccgaggagcagttcggcggagacggtgcagcagcagcggcaactgccgctgtcggaggtagcgccggagagcaagaaggtgcaatggtggcagcaactcagggagcagctgccgcagctggatcaggggcaggcaccggtggagggacggccagcggcggaaccgagggcggttccgccgaatctgagggcgcaaagatcgatgcctctaaaaacgaagaagacgagggacactctaacagcagccctcggcatagcgaggccgcaaccgcacagagagaggagtggaaaatgttcatcggaggcctctcctgggatacaaccaagaaggatttgaaagattactttagcaaatttggagaggtcgtagactgcacacttaaacttgaccctatcacagggagatcaaggggcttcggattcgtcctattcaaggaatccgagtcggtcgacaaggtgatggaccagaaggagcataaactcaacggtaaggtcatagaccccaagagggcgaaggccatgaaaaccaaagaacctgtcaaaaagatcttcgtgggcggattgagtccagataccccagaggaaaaaatacgcgaatacttcggaggcttcggtgaggtagagtccatagagctgccaatggacaataaaactaacaagagaaggggattctgtttcatcactttcaaggaggaggagcccgtcaagaaaattatggaaaagaagtaccataatgttggactgtccaagtgtgaaattaaggtggcgatgtctaaggaacagtatcagcagcagcaacagtggggatcacgcggaggattcgctggcagggccaggggtaggggaggagatcagcaatccggctatggtaaagtgtcaagaaggggagggcatcaaaatagctataaaccctactag

SEQ ID NO: 125628 - DNA, 666 bp, Artificial Sequence
  derived and/or modified sequence
atgagtgaggagcagttcggaggtgacggcgcagccgcagcagctaccgctgcggtgggcggttctgccggagagcaggagggagctatggtcgccgctacacagggcgcagcagccgcagctggatcaggggctgggactgggggaggcacagcaagtggaggcaccgagggcggatcagccgagagcgagggtgccaaaatcgacgccagcaagaacgaggaggatgagggccactccaacagcagcccccgtcacagtgaggcagcgaccgcccagagggaggagtggaagatgttcatcggcggattgagctgggataccacaaaaaaggatctgaaggattattttagcaagtttggcgaagttgtcgactgtacactgaagttggaccccatcaccgggagatcacgcggatttggctttgtactctttaaagaatccgagagcgtcgacaaggttatggaccagaaggaacacaagctgaacgggaaggtgatcgatccaaaaagggctaaagccatgaaaaccaaggagccagtgaaaaagatctttgttggcggactgtcacctgacacccctgaagagaaaattcgcgaatatttcggagggttcggcgaggtggaaagtatcgaactgcccatggataataaaacaaacaagtag

SEQ ID NO: 125629 - protein, 391 aa, Artificial Sequence
  derived and/or modified sequence
MVEADRPGKLFIGGLNTETNEKALEAVFGKYGRIVEVLLMKDRETNKSRGFAFVTFESPADAKDAARDMNGKSLDGKAIKVEQATKPSFESGRRGPPPPPRSRGPPRGLRGGRGGSGGTRGPPSRGGHMDDGGYSMNFNMSSSRGPLPVKRGPPPRSGGPPPKRSAPSGPVRSSSGMGGRAPVSRGRDSYGGPPRREPLPSRRDVYLSPRDDGYSTKDSYSSRDYPSSRDTRDYAPPPRDYTYRDYGHSSSRDDYPSRGYSDRDGYGRDRDYSDHPSGGSYRDSYESYGNSRSAPPTRGPPPSYGGSSRYDDYSSSRDGYGGSRDSYSSSRSDLYSSGRDRVGRQERGLPPSMERGYPPPRDSYSSSSRGAPRGGGRGGSRSDRGGGRSRY

SEQ ID NO: 125630 - protein, 378 aa, Artificial Sequence
  derived and/or modified sequence
MVEADRPGKLFIGGLNTETNEKALEAVFGKYGRIVEVLLMKDRESPADAKDAARDMNGKSLDGKAIKVEQATKPSFESGRRGPPPPPRSRGPPRGLRGGRGGSGGTRGPPSRGGHMDDGGYSMNFNMSSSRGPLPVKRGPPPRSGGPPPKRSAPSGPVRSSSGMGGRAPVSRGRDSYGGPPRREPLPSRRDVYLSPRDDGYSTKDSYSSRDYPSSRDTRDYAPPPRDYTYRDYGHSSSRDDYPSRGYSDRDGYGRDRDYSDHPSGGSYRDSYESYGNSRSAPPTRGPPPSYGGSSRYDDYSSSRDGYGGSRDSYSSSRSDLYSSGRDRVGRQERGLPPSMERGYPPPRDSYSSSSRGAPRGGGRGGSRSDRGGGRSRY

SEQ ID NO: 125631 - DNA, 1176 bp, Artificial Sequence
  derived and/or modified sequence
atggtggaggccgacagacccggcaagctgttcatcggcggcctgaacaccgagaccaacgagaaggccctggaggccgtgttcggcaagtacggcagaatcgtggaggtgctgctgatgaaggacagagagaccaacaagagcagaggcttcgccttcgtgaccttcgagagccccgccgacgccaaggacgccgccagagacatgaacggcaagagcctggacggcaaggccatcaaggtggagcaggccaccaagcccagcttcgagagcggcagaagaggccccccccccccccccagaagcagaggcccccccagaggcctgagaggcggcagaggcggcagcggcggcaccagaggcccccccagcagaggcggccacatggacgacggcggctacagcatgaacttcaacatgagcagcagcagaggccccctgcccgtgaagagaggccccccccccagaagcggcggccccccccccaagagaagcgcccccagcggccccgtgagaagcagcagcggcatgggcggcagagcccccgtgagcagaggcagagacagctacggcggcccccccagaagagagcccctgcccagcagaagagacgtgtacctgagccccagagacgacggctacagcaccaaggacagctacagcagcagagactaccccagcagcagagacaccagagactacgcccccccccccagagactacacctacagagactacggccacagcagcagcagagacgactaccccagcagaggctacagcgacagagacggctacggcagagacagagactacagcgaccaccccagcggcggcagctacagagacagctacgagagctacggcaacagcagaagcgccccccccaccagaggccccccccccagctacggcggcagcagcagatacgacgactacagcagcagcagagacggctacggcggcagcagagacagctacagcagcagcagaagcgacctgtacagcagcggcagagacagagtgggcagacaggagagaggcctgccccccagcatggagagaggctaccccccccccagagacagctacagcagcagcagcagaggcgcccccagaggcggcggcagaggcggcagcagaagcgacagaggcggcggcagaagcagatactag

SEQ ID NO: 125632 - DNA, 1137 bp, Artificial Sequence
  derived and/or modified sequence
atggtggaggccgacagacccggcaagctgttcatcggcggcctgaacaccgagaccaacgagaaggccctggaggccgtgttcggcaagtacggcagaatcgtggaggtgctgctgatgaaggacagagagagccccgccgacgccaaggacgccgccagagacatgaacggcaagagcctggacggcaaggccatcaaggtggagcaggccaccaagcccagcttcgagagcggcagaagaggccccccccccccccccagaagcagaggcccccccagaggcctgagaggcggcagaggcggcagcggcggcaccagaggcccccccagcagaggcggccacatggacgacggcggctacagcatgaacttcaacatgagcagcagcagaggccccctgcccgtgaagagaggccccccccccagaagcggcggccccccccccaagagaagcgcccccagcggccccgtgagaagcagcagcggcatgggcggcagagcccccgtgagcagaggcagagacagctacggcggcccccccagaagagagcccctgcccagcagaagagacgtgtacctgagccccagagacgacggctacagcaccaaggacagctacagcagcagagactaccccagcagcagagacaccagagactacgcccccccccccagagactacacctacagagactacggccacagcagcagcagagacgactaccccagcagaggctacagcgacagagacggctacggcagagacagagactacagcgaccaccccagcggcggcagctacagagacagctacgagagctacggcaacagcagaagcgccccccccaccagaggccccccccccagctacggcggcagcagcagatacgacgactacagcagcagcagagacggctacggcggcagcagagacagctacagcagcagcagaagcgacctgtacagcagcggcagagacagagtgggcagacaggagagaggcctgccccccagcatggagagaggctaccccccccccagagacagctacagcagcagcagcagaggcgcccccagaggcggcggcagaggcggcagcagaagcgacagaggcggcggcagaagcagatactag

SEQ ID NO: 125633 - DNA, 1176 bp, Artificial Sequence
  derived and/or modified sequence
atggtggaggctgatcggcccggtaagctttttatcggcggtttgaacaccgaaacaaatgaaaaagctctggaggccgtcttcggaaagtatggccgaatcgtcgaagtcctgctgatgaaggaccgtgaaaccaataaaagccgaggcttcgccttcgtgacattcgaatctcctgccgacgctaaggatgccgcccgggatatgaacgggaaaagcctagacgggaaggccattaaagtcgagcaggcaacaaagccctctttcgagtcaggccgacggggcccaccgcccccccccaggtccaggggacctccaaggggcctgaggggggggaggggtggatcgggcggcacaagaggccctcctagccgaggaggccacatggatgatgggggatattcaatgaatttcaatatgagttccagtagagggcccctaccagtaaaacgaggcccgccccctagatccggggggcctccccctaaaagatctgctccctcgggccctgtacgctctagctctgggatgggtggccgcgccccagtgtctagagggagggactcttatggtggtccaccaaggagagagccactgccctcaaggcgagacgtctatctatccccaagagatgatggttatagcactaaggactcatacagcagccgcgattatccgtcctcaagagacacgagagactatgcccccccacctagagattatacttacagggactatggccattcctcttctagggatgactatccttcgagagggtacagtgacagagatggatacgggagggatagggattattctgaccaccccagcgggggcagctaccgcgatagctatgaaagctatgggaacagcagatcggctcctccaactaggggaccaccgccaagttatggaggatctagcaggtacgacgattattcatccagccgggacggctatggcggaagtagggactcttatagttcttctcgctccgacctgtatagctcgggaagggatcgggtaggacggcaggagcggggactgcctccttctatggagcggggctacccccccccaagggactcctactcctcgagctccagaggcgcccctcgcggcggcgggcggggcggtagccgaagtgatcgcggtggaggtcgtagccggtactag

SEQ ID NO: 125634 - DNA, 1137 bp, Artificial Sequence
  derived and/or modified sequence
atggtggaggccgaccgacctgggaagctcttcatcgggggcttgaataccgaaacgaacgaaaaggccttggaggcggtcttcgggaaatatggaagaatcgtggaagtcttactcatgaaggatagagagtctcccgcggatgccaaagatgccgctcgggacatgaacggcaagagcttggacggaaaagcaattaaggtcgagcaggcaactaaacctagtttcgagagtggccgtcgcgggccacccccacccccccgctcccgcggtccccctagaggcttacgcggtggccggggcggctcgggaggtaccagaggtccgccgagccgcggtggccatatggatgatggcgggtattccatgaactttaacatgtcctcctctcggggccccctgccagtaaagaggggaccccccccccggagtggcgggcctccccccaagcggtctgctccctccggccccgttagatcgtcatcaggcatgggcgggagggctccagtttcgagaggccgagattcttatggcggcccccctagaagggagcctctccctagtagaagagatgtctatctatcgcccagagacgatggctatagcaccaaggactcatattccagccgggactatccatcttcgcgcgatacaagagattacgcacctcctcctagggattatacataccgagattacggtcattcaagttcccgggatgactatcctagtcggggctactccgatcgagatgggtacggccgtgaccgcgactactccgatcatccatcgggtggctcctacagagattcatacgaatcgtacggcaattcccgctccgcaccacccactcggggtcctcctcccagttacggcgggagttcgagatacgatgattacagttcatcccgcgacgggtatggagggtcccgcgacagctatagttcaagtaggagcgacctgtatagttccggcagggatcgtgttggtcgccaggagcgcggcctgcctcccagtatggaaaggggctatccaccccctcgtgactcatattccagttcctcccgtggggctccccgcggcgggggtagaggcggatcccgttctgaccgcggcggcggtaggtcacggtactag

SEQ ID NO: 125635 - DNA, 1176 bp, Artificial Sequence
  derived and/or modified sequence
atggtggaggccgacaggcctgggaagctgttcatcggcggcctgaacacagagaccaatgagaaggccctggaggccgtgtttgggaagtatggccgcatcgtggaggtgctgctgatgaaggaccgggagaccaacaagagccggggctttgcctttgtgacctttgagagccctgcagatgccaaggatgctgcccgggacatgaatggcaagagcctggatggcaaggccatcaaggtggagcaggccaccaagcccagctttgaaagtggaagaagaggccccccacctccacccaggagccggggccccccccggggcctgcggggcggccggggcggcagcggcggcacccggggcccccccagccggggcggccacatggatgatggcggctacagcatgaacttcaacatgagcagcagccggggccccctgcctgtgaagaggggccccccacccaggtctgggggccccccacccaagaggtctgcccccagcggccctgtgcgcagcagcagcggcatgggcggccgggcccctgtgtcccggggccgggacagctatggaggccccccaagaagagagcccctgcccagcagaagagatgtgtacctgagccccagagatgatggctacagcaccaaggacagctacagcagccgggactaccccagcagccgggacacccgggactatgcccccccaccccgggactacacctacagagattatggccacagcagcagcagagatgactaccccagccggggctacagcgacagagatggctacggccgggaccgggactacagcgaccaccccagcggcggcagctacagagacagctatgagagctatggcaacagccgcagcgccccacccacccggggccccccacccagctatggaggcagcagccgctatgatgactacagcagcagcagagatggctacggcggcagccgggacagctacagcagcagcagaagtgacctgtacagcagcggccgggacagagtgggccggcaggagcggggcctgccccccagcatggagcggggctaccccccaccccgggacagctacagcagcagcagcagaggagccccccggggcggcggccggggcggcagcagaagtgacagaggaggcggccgcagccgctactag

SEQ ID NO: 125636 - DNA, 1137 bp, Artificial Sequence
  derived and/or modified sequence
atggtggaggccgacaggcctgggaagctgttcatcggcggcctgaacacagagaccaatgagaaggccctggaggccgtgtttgggaagtatggccgcatcgtggaggtgctgctgatgaaggaccgggagagccctgcagatgccaaggatgctgcccgggacatgaatggcaagagcctggatggcaaggccatcaaggtggagcaggccaccaagcccagctttgagagcggccggcggggccccccacctccacccaggagccggggccccccccggggcctgcggggcggccggggcggcagcggcggcacccggggcccccccagcagaggaggccacatggatgatggcggctacagcatgaacttcaacatgagcagcagccggggccccctgcctgtgaagaggggccccccacccaggtctgggggccccccacccaagaggtctgcccccagcggccctgtgcgcagcagcagcggcatgggcggccgggcccctgtgtcccggggccgggacagctatggaggccccccccggcgggagcccctgcccagcagaagagatgtgtacctgagccccagagatgatggctacagcaccaaggacagctacagcagccgggactaccccagcagccgggacacccgggactatgcccccccaccccgggactacacctacagagattatggccacagcagcagcagagatgactaccccagccggggctacagcgacagagatggctacggccgggaccgggactacagcgaccaccccagcggcggcagctacagagacagctatgagagctatggcaacagccgcagcgccccacccacccggggccccccacccagctatggaggcagcagccgctatgatgactacagcagcagcagagatggctatggaggcagccgggacagctacagcagcagcagaagtgacctgtacagcagcggccgggacagagtgggccggcaggagcggggcctgcccccatccatggagcggggctaccccccaccccgggacagctacagcagcagcagcagaggagccccccggggcggcggccggggcggcagcagaagtgaccggggcggcggccgcagccgctactag

SEQ ID NO: 125637 - DNA, 1176 bp, Artificial Sequence
  derived and/or modified sequence
atggtggaggccgaccggcccggcaagctgttcatcggcggcctgaatactgaaaccaacgaaaaagccttggaagcggtctttggcaagtacggacgcattgtggaggtgctgcttatgaaagacagggaaactaataaatctagggggtttgcttttgtgacctttgagtcccccgccgacgctaaagacgctgcccgcgatatgaatggcaagagtcttgatggtaaggccatcaaagtggagcaggctactaaaccttcttttgagtcgggacggagagggcccccccctccccctaggagcaggggtccccctagaggtctgcgaggcggacgaggcggctccggtggtactcgcgggccgccaagcaggggcggtcacatggacgatggtggatactcaatgaacttcaacatgtctagctccagaggtcccctaccagtcaagcgaggacccccgccacgatcaggggggccaccacccaagcggagcgccccctccggaccggttcgcagctcgtccggaatgggcgggcgggctcccgtttcgaggggtagagatagttatggcggtcctcccagaagagaaccactcccctccagacgcgacgtgtatctctccccaagggatgacgggtactctacaaaagatagctactcttcgcgggattacccgagctcaagggacacgcgggactatgcccctccaccgagggattatacataccgcgactatggccatagcagttccagagacgattacccttctcgggggtactctgatcgtgacggctacggacgcgatagggactacagcgatcacccttcgggtggtagttatcgcgacagttacgagagttatggcaactctagatctgcacctcctaccagaggaccccccccttcctacggcggttccagcagatacgacgattattcaagctcacgcgatggttacggaggtagcagagactcttatagctcctcgagatcggatctgtacagctctggacgagatagagtcggtaggcaagaacgcggtctgccaccgagcatggaaagagggtacccaccccccagggactcatattccagcagcagccggggggctccgcggggcggaggacggggagggtcccggagcgacaggggaggcggcagaagccgctactag

SEQ ID NO: 125638 - DNA, 1137 bp, Artificial Sequence
  derived and/or modified sequence
atggtggaggccgaccggcccggcaagctgttcatcggcggcctgaatactgagacgaacgaaaaggctttggaagccgtatttggcaagtacgggaggattgtcgaggtactcctaatgaaggacagagagagtccggctgacgccaaagatgcagcccgagacatgaatggcaaaagcctcgatggcaaagcaataaaagttgaacaggcgactaaaccaagtttcgagtcaggccgtaggggtccacctccccctccgcggtcaaggggtcctcctcgcggactcaggggcgggcgcggggggagcggaggcacgcgcggcccacccagcagaggcgggcatatggacgacggcggttacagcatgaacttcaatatgagctcatccagaggcccactgccagtgaagcggggacccccccctcgctcaggcggtcctcctcccaaacgaagtgcgccctccggtcccgttcggtcttcttctggcatgggcggcagagcgccggtcagccgggggagggactcttatgggggtccccccagacgggagccgttgcctagccgaagagacgtctatctgtcaccgcgggatgacggctactccacaaaagattcctatagttcccgggactacccctcatcccgagatacacgggattacgccccccctccccgcgattatacctaccgggactacggccactcatcatcacgtgacgactaccccagccgcggctatagtgatagagacggatacgggcgagatcgcgactactccgaccacccctctggcggttcataccgggattcctacgagagctacggtaattccaggtctgcacctcctactaggggcccccctccatcttacggcggaagctccaggtacgacgattatagctcctcccgagatgggtacggcggatcaagagactcttactctagcagccggtcagatctgtattctagcggccgagatagggtgggaaggcaagaaagaggcctgcctccttctatggagagaggttatcccccaccacgtgatagttattcatccagttctcggggcgcacccagagggggcggcagaggcggttcgaggtcagacaggggcggcggccgcagccggtactag

SEQ ID NO: 125639 - DNA, 1176 bp, Artificial Sequence
  derived and/or modified sequence
atggtggaagctgacaggccaggaaagctgttcatcggagggctaaacaccgaaaccaatgaaaaagccttggaggccgtgttcggaaaatatggcagaatcgttgaagtccttcttatgaaggatcgagagacaaataaaagtagagggtttgccttcgttacctttgagagccctgcggatgcaaaggatgcagcacgggatatgaatggcaagagcctcgacggtaaagctatcaaggtagagcaggcgacgaaaccaagcttcgagtccgggagacgcggtcctcctcctcctccccgaagccggggtccgccaaggggcctccgcggtggcagaggtggatctggaggtacacggggacctccatctcgcggtggacatatggatgatggcggttattcaatgaattttaacatgtcaagcagccggggacccttgccggttaagcgcggacctccgcctcgctccggtggaccacctcccaaacggagtgctccttcggggccagtccgctcttccagcggaatggggggacgggctcccgtgtcccgtggtcgggacagttatggagggcctccgagacgcgagcctctgccctccaggcgcgatgtatatctgagcccaagggatgatggttattccactaaagactcttatagttcgcgagactacccaagcagccgggatacacgtgactacgccccaccacccagagactacacctaccgtgattatgggcattcttctagtagagatgattaccccagtcgcggatactcagatcgcgatggatacggcagggatcgggactacagcgaccacccatcaggtggcagttatagagattcctatgagagttatggtaattcaagaagcgccccaccaactagaggacccccaccaagctatggcggaagtagtaggtacgatgattacagctcatcaagagatgggtacggcggatctcgggactcgtatagtagctctcgttccgatctctattcttcgggtcgagacagggtgggcagacaagagcgaggactgcctccctctatggaaaggggttaccccccaccccgtgattcctatagtagcagcagcaggggcgctccgagggggggtggacgcggtgggagtcgatccgatagggggggtggacgcagccgctattag

SEQ ID NO: 125640 - DNA, 1137 bp, Artificial Sequence
  derived and/or modified sequence
atggtcgaggccgacaggccgggtaaattgttcattggtgggctgaatacggaaacgaacgaaaaagcactggaagctgtgttcgggaagtatggccgaatcgtagaagtgctgctcatgaaggacagagagtcaccggcagatgcaaaagatgctgcgagagacatgaatggcaagagcctagatggtaaagctataaaagtcgagcaggccaccaaaccatcgttcgaaagtggtcgaagaggcccaccacctccaccgagaagtagggggcctcccagaggcttgagaggcggtagaggtggttccggcggaactcgcggaccacctagcagggggggacatatggacgatggaggctacagcatgaactttaacatgtccagctctcgcggtccccttccagtaaagaggggaccacctccccgatctggcggacccccacctaaaagaagcgctccctctggcccagtgcgtagcagtagcggcatgggcggtagggccccagtgagcaggggcagagattcttatggtggaccaccccgaagagaacccttaccaagccgcagggacgtttatctgtcgcccagggacgacgggtactctacaaaagactcctattcttcacgagactacccaagttcaagggatacccgagactacgcccctcccccacgtgattatacatacagagattatggacatagctcctctcgcgatgactatccctctcgcggttattctgacagagatggatatggcagagatcgcgattacagtgaccatcccagcgggggaagctaccgggacagctacgagtcctacggaaacagcaggtccgcacctcccacgcgcggtcctcctccaagctacggtggctcatccagatacgatgactatagcagctcacgcgacgggtacggtgggagcagagactcgtattcgtcatccaggagcgatctgtactcgtccggaagagacagggtcgggcgacaagagcgcggtctgcctcctagtatggagcgcggttatccccctccacgggatagctactcctcaagtagtcgtggagctcctcggggtggcggtcgaggtggctctcggtccgaccgcggtggaggtcgatctcgctattag

SEQ ID NO: 125641 - DNA, 2012 bp, Artificial Sequence
  derived and/or modified sequence
ctcgttgcgcagtagtgctagcggcttcgcggttcggtcctcgcacccggcagccgccactggtgctgagctgctaggaagcccctatcgccgagctcgttggagcttgaacccattgtcacccctccgactcaccggcccaaaaaaaaaaaaacatggttgaagcagatcgcccaggaaagctcttcattggtgggcttaatacggaaacaaatgagaaagctcttgaagcagtatttggcaaatatggacgaatagtggaagtactcttgatgaaagaccgtgaaaccaacaaatcaagaggatttgcttttgtcacctttgaaagcccagcagacgctaaggatgcagccagagacatgaatggaaagtcattagatggaaaagccatcaaggtggaacaagccaccaaaccatcatttgaaagtggtagacgtggaccgcctccacctccaagaagtagaggccctccaagaggtcttagaggtggaagaggaggaagtggaggaaccaggggacctccctcacggggaggacacatggatgacggtggatattccatgaattttaacatgagttcttccaggggaccactcccagtaaaaagaggaccaccaccaagaagtgggggtcctcctcctaagagatctgcaccttcaggaccagttcgcagtagcagtggaatgggaggaagagctcctgtatcacgtggaagagatagttatggaggtccacctcgaagggaaccgctgccctctcgtagagatgtttatttgtccccaagagatgatgggtattctactaaagacagctattcaagcagagattacccaagttctcgtgatactagagattatgcaccaccaccacgagattatacttaccgtgattatggtcattccagttcacgtgatgactatccatcaagaggatatagcgatagagatggatatggtcgtgatcgtgactattcagatcatccaagtggaggttcctacagagattcatatgagagttatggtaactcacgtagtgctccacctacacgagggcccccgccatcttatggtggaagcagtcgctatgatgattacagcagctcacgtgacggatatggtggaagtcgagacagttactcaagcagccgaagtgatctctactcaagtggtcgtgatcgggttggcagacaagaaagagggcttcccccttctatggaaagggggtaccctcctccacgtgattcctacagcagttcaagccgcggagcaccaagaggtggtggccgtggaggaagccgatctgatagagggggaggcagaagcagatactagaaacaaacaaaactttggaccaaaatcccagttcaaagaaacaaaaagtggaaactattctatcataactacccaaggactactaaaaggaaaaattgtgttactttttttaaattccctgttaagttcccctccataatttttatgttcttgtgaggaaaaaagtaaaacatgtttaattttatttgactttcgcattgcttttcaacaagcaaatgttaaatgtgttaagacttgtactagtgttgtaactttccaagtaaaagtatcccctaaaggccacttcctatctgatttttcccagcaaatgaggcaggcaattctaagatcttccacaaaacatctagccatctaaaatggagagatgaatcattctacctatacaaacaagctagctattagagggtggttggggtatgctactcataagatttcagggtgtcttccaactgaaatctcaatgttctcagtacgaaaaacctgaaatcacatgcctatgtaaggaaagtgctattcacccagtaaacccaaaaaagcaaatggataatgctggccattttgcctttctgacatttccttgggaatctgcaagaacctcccctttcccttcccccaataagaccatttaagtgtgtgttaaacaactacagaatactaaataaaaagtttggccaaaaccaa

SEQ ID NO: 125642 - DNA, 1948 bp, Artificial Sequence
  derived and/or modified sequence
ctcgttgcgcagtagtgctagcggcttcgcggttcggtcctcgcacccggcagccgccactggtgctgagctgctaggaagcccctatcgccgagctcgttggagcttgaacccattgtcacccctccgactcaccggcccaaaaaaaaaaaaacatggttgaagcagatcgcccaggaaagctcttcattggtgggcttaatacggaaacaaatgagaaagctcttgaagcagtatttggcaaatatggacgaatagtggaagtactcttgatgaaagaccgtgaaagcccagcagacgctaaggatgcagccagagacatgaatggaaagtcattagatggaaaagccatcaaggtggaacaagccaccaaaccatcatttgaaagtggtagacgtggaccgcctccacctccaagaagtagaggccctccaagaggtcttagaggtggaagaggaggaagtggaggaaccaggggacctccctcacggggaggacacatggatgacggtggatattccatgaattttaacatgagttcttccaggggaccactcccagtaaaaagaggaccaccaccaagaagtgggggtcctcctcctaagagatctgcaccttcaggaccagttcgcagtagcagtggaatgggaggaagagctcctgtatcacgtggaagagatagttatggaggtccacctcgaagggaaccgctgccctctcgtagagatgtttatttgtccccaagagatgatgggtattctactaaagacagctattcaagcagagattacccaagttctcgtgatactagagattatgcaccaccaccacgagattatacttaccgtgattatggtcattccagttcacgtgatgactatccatcaagaggatatagcgatagagatggatatggtcgtgatcgtgactattcagatcatccaagtggaggttcctacagagattcatatgagagttatggtaactcacgtagtgctccacctacacgagggcccccgccatcttatggtggaagcagtcgctatgatgattacagcagctcacgtgacggatatggtggaagtcgagacagttactcaagcagccgaagtgatctctactcaagtggtcgtgatcgggttggcagacaagaaagagggcttcccccttctatggaaagggggtaccctcctccacgtgattcctacagcagttcaagccgcggagcaccaagaggtggtggccgtggaggaagccgatctgatagagggggaggcagaagcagatactagaaacaaacaaaactttggaccaaaatcccagttcaaagaaacaaaaagtggaaactattctatcataactacccaaggactactaaaaggaaaaattgtgttactttttttaaattccctgttaagttcccctccataatttttatgttcttgtgaggaaaaaagtaaaacatgtttaattttatttgactttcgcattgcttttcaacaagcaaatgttaaatgtgttaagacttgtactagtgttgtaactttccaagtaaaagtatcccctaaaggccacttcctatctgatttttcccagcaaatgaggcaggcaattctaagatcttccacaaaacatctagccatctaaaatggagagatgaatcattctacctatacaaacaagctagctattagagggtggttggggtatgctactcataagatttcagggtgtcttccaactgaaatctcaatgttctcagtacgaaaaacctgaaatcacatgcctatgtaaggaaagtgctattcacccagtaaacccaaaaaagcaaatggataatgctggccattttgcctttctgacatttccttgggaatctgcaagaacctcccctttcccttcccccaataagaccatttaagtgtgtgttaaacaactacagaatact

SEQ ID NO: 125643 - protein, 320 aa, Artificial Sequence
  derived and/or modified sequence
MTMSSFLINSNYIEPKFPPFEEYAQHSGSGGADGGPGGGPGYQQPPAPPTQHLPLQQPQLPHAGGGREPTASYYAPRTAREPAYPAAALYPAHGAADTAYPYGYRGGASPGRPPQPEQPPAQAKGPAHGLHASHVLQPQLPPPLQPRAVPPAAPRRCEAAPATPGVPAGGSAPACPLLLADKSPLGLKGKEPVVYPWMKKIHVSAVNPSYNGGEPKRSRTAYTRQQVLELEKEFHFNRYLTRRRRIEIAHTLCLSERQVKIWFQNRRMKWKKDHKLPNTKMRSSNSASASAGPPGKAQTQSPHLHPHPHPSTSTPVPSSI

SEQ ID NO: 125644 - DNA, 1728 bp, Artificial Sequence
  derived and/or modified sequence
aaaacgacaacgcgagaaaaattagtatttttgcacttcacaaattaatgaccatgagctcgtttttgataaactccaactacatcgagcccaagttccctcccttcgaggagtacgcgcagcacagcggctcgggcggcgcagacggcggcccgggcgggggccccggctaccagcagcccccagcgcccccgacccagcacctgccgctgcagcagccccagctccctcacgcgggcggcggccgagagcccactgcctcctactacgcgccgcggaccgcccgcgagcccgcctaccctgctgccgcgctgtaccccgcgcatggggccgcggacaccgcctacccctatggctaccgcggcggcgccagccccgggcggccgccccagcccgagcagcccccggcgcaagccaagggcccagcgcacggcctgcatgcgagccacgtcctgcagccccagctgccgccgcccctgcagcctcgcgccgtgcccccagcggccccgcggcgctgcgaggcggcccccgccaccccaggcgtcccggcagggggcagcgcccccgcgtgcccgctgctcttggccgacaagagcccgctgggcctgaagggcaaggagcccgtggtgtacccctggatgaagaagatccatgtcagcgccgttaaccccagttataacggaggggagcctaagcgctctcgaaccgcctacacccggcagcaggtcttggagctggagaaggagttccacttcaatcgatacctgacccggcggcgccgcatcgagatcgcccacacgctctgtttgtctgagcgccaggtcaagatctggtttcagaaccggaggatgaagtggaagaaagaccacaaactgcccaacaccaagatgcgatcctccaattcggcctcggcctctgccggcccaccagggaaagcacaaactcagagcccacacctccatccccacccccacccgagcacctccacacccgttccctcctccatataatcttctagagatcttaaccagtttctatcccttacctgcttttctcttctcttctcctgctccgttcctcatccacccctccccatctggaccataatagacaccaaaacaaacccaaattggtgaaaagaataatcaaaaagaagacattatccggttaagagtctgtgctggttgccacccaagagagaacagttgtccaggatgctggctggtggaacaacctgctggcccgaaacaaggctgccaggtgtggatacctgagaaggactacttggtatcaaatacttttgagatggctacagtcagctagctggacagcccatgctgagtggggacatacacttgcatctttgttgaaagcagaagaagacagaccctttccccaccttccttacctcctcttcccccattaaggcagctcatccaagcttgtatttaactgaataaatgagtagacattgtggacctcacaagattatttaattcttaagatgtgtagaccttgatggtaggtgtgacatgttagtttttcttacttgcatttatttaagacactgttacagagatactgttgtccccttctggggcacggtctttggggagaggggagtgcatttagacttatgtggaactgtacaaattgtgatgtggctacatagaaagccatgtgctaagaataaactccatttaaaaaacattaaaaatctaagattca

SEQ ID NO: 125645 - DNA, 963 bp, Artificial Sequence
  derived and/or modified sequence
atgaccatgtcttcatttttaatcaatagcaactatatcgaacccaaatttccacctttcgaggaatatgcacaacacagcggtagcggcggggccgatgggggccccggagggggtccgggctaccagcaaccccccgccccacccactcagcacctgcctctgcagcaaccacagcttccgcacgccggtggtggacgggagcctaccgcttcctactacgccccccgcaccgctcgggaacctgcataccccgccgccgctctctatcctgcccatggagctgccgatacggcctatccctacggatacaggggcggagcctcgcctgggcggcccccccaaccggagcaacccccagcccaggccaaaggccccgcccatggcttgcacgcctcacatgtgctccagccacagcttccacctccgctccaaccacgcgccgttccacccgccgctcctcgacggtgcgaagccgcacccgctacaccaggagttccggctggggggtctgcacccgcatgtcccctattactcgctgataagtcacctctagggttgaagggtaaagaacctgttgtttatccatggatgaagaagattcacgtatctgccgtcaaccctagttacaatggcggcgagcctaaacgtagtagaactgcttacaccaggcagcaggtgctcgaacttgaaaaagagttccattttaacagatatcttacgcggcgtcgtcgcatcgagatagcacacaccctgtgcttatctgagcgacaagtgaaaatttggtttcagaacaggcggatgaaatggaagaaagaccataagctacccaataccaagatgagaagcagcaactccgccagtgcttccgctggcccacctgggaaagcccagacacagtcccctcatctgcaccctcacccccatccctcgacatcaacacctgtgccctcttctatctag

SEQ ID NO: 125646 - DNA, 963 bp, Artificial Sequence
  derived and/or modified sequence
atgactatgtcttcattcctcatcaattccaattacatagagccgaagtttcccccattcgaagagtatgcccagcactcgggcagtggaggtgctgacggagggccaggtggcgggccagggtaccagcaaccacctgcaccaccaacgcagcacctgcccctccagcagccacagttacctcatgcaggtggcggtcgcgaacctacagctagctactacgcgccaaggactgctcgcgagccagcctatcccgccgcagcactctaccccgcccacggcgcagctgatactgcttacccctatggatatcgtggaggagcttcaccaggaagacctcctcagcccgagcaacctccggcacaagccaagggtcccgctcacggcctgcacgcttctcatgttctgcagccccaattacccccacctctgcaacctcgcgcggtgccaccagccgccccccggcggtgcgaggctgcacccgctactcccggggtgccagccggggggtccgctccagcatgccccctgttgctggcagataagtcacccctggggctgaaggggaaagagcccgtggtgtacccttggatgaagaagattcacgtgagcgccgttaacccttcatacaacgggggggagcctaaaagatcccgcacagcgtatacgcggcagcaggtgctagaactggagaaagaattccactttaaccgctatttgaccaggaggaggcgcatcgaaatcgcccacacactgtgcctgagcgagaggcaggtgaagatctggttccagaaccggcgcatgaaatggaagaaggaccataagttacccaacaccaagatgcggtctagtaatagcgcttctgccagtgccgggccacctgggaaagcccagacacagtcccctcacctccaccctcatcctcatccaagtacatctacccctgtgccaagctccatctag

SEQ ID NO: 125647 - DNA, 1747 bp, Artificial Sequence
  derived and/or modified sequence
ggcctcggcaagcccagaaaaaacgacaacgcgagaaaaattagtatttttgcacttcacaaattaatgaccatgagctcgtttttgataaactccaactacatcgagcccaagttccctcccttcgaggagtacgcgcagcacagcggctcgggcggcgcagacggcggcccgggcgggggccccggctaccagcagcccccagcgcccccgacccagcacctgccgctgcagcagccccagctccctcacgcgggcggcggccgagagcccactgcctcctactacgcgccgcggaccgcccgcgagcccgcctaccctgctgccgcgctgtaccccgcgcatggggccgcggacaccgcctacccctatggctaccgcggcggcgccagccccgggcggccgccccagcccgagcagcccccggcgcaagccaagggcccagcgcacggcctgcatgcgagccacgtcctgcagccccagctgccgccgcccctgcagcctcgcgccgtgcccccagcggccccgcggcgctgcgaggcggcccccgccaccccaggcgtcccggcagggggcagcgcccccgcgtgcccgctgctcttggccgacaagagcccgctgggcctgaagggcaaggagcccgtggtgtacccctggatgaagaagatccatgtcagcgccgttaaccccagttataacggaggggagcctaagcgctctcgaaccgcctacacccggcagcaggtcttggagctggagaaggagttccacttcaatcgatacctgacccggcggcgccgcatcgagatcgcccacacgctctgtttgtctgagcgccaggtcaagatctggtttcagaaccggaggatgaagtggaagaaagaccacaaactgcccaacaccaagatgcgatcctccaattcggcctcggcctctgccggcccaccagggaaagcacaaactcagagcccacacctccatccccacccccacccgagcacctccacacccgttccctcctccatataatcttctagagatcttaaccagtttctatcccttacctgcttttctcttctcttctcctgctccgttcctcatccacccctccccatctggaccataatagacaccaaaacaaacccaaattggtgaaaagaataatcaaaaagaagacattatccggttaagagtctgtgctggttgccacccaagagagaacagttgtccaggatgctggctggtggaacaacctgctggcccgaaacaaggctgccaggtgtggatacctgagaaggactacttggtatcaaatacttttgagatggctacagtcagctagctggacagcccatgctgagtggggacatacacttgcatctttgttgaaagcagaagaagacagaccctttccccaccttccttacctcctcttcccccattaaggcagctcatccaagcttgtatttaactgaataaatgagtagacattgtggacctcacaagattatttaattcttaagatgtgtagaccttgatggtaggtgtgacatgttagtttttcttacttgcatttatttaagacactgttacagagatactgttgtccccttctggggcacggtctttggggagaggggagtgcatttagacttatgtggaactgtacaaattgtgatgtggctacatagaaagccatgtgctaagaataaactccatttaaaaaacattaaaaatctaagattca

SEQ ID NO: 125648 - DNA, 1595 bp, Artificial Sequence
  derived and/or modified sequence
atgaccatgagctcgtttttgataaactccaactacatcgagcccaagttccctcccttcgaggagtacgcgcagcacagcggctcgggcggcgcagacggcggcccgggcgggggccccggctaccagcagcccccagcgcccccgacccagcacctgccgctgcagcagccccagctccctcacgcgggcggcggccgagagcccactgcctcctactacgcgccgcggaccgcccgcgagcccgcctaccctgctgccgcgctgtaccccgcgcatggggccgcggacaccgcctacccctatggctaccgcggcggcgccagccccgggcggccgccccagcccgagcagcccccggcgcaagccaagggcccagcgcacggcctgcatgcgagccacgtcctgcagccccagctgccgccgcccctgcagcctcgcgccgtgcccccagcggccccgcggcgctgcgaggcggcccccgccaccccaggcgtcccggcagggggcagcgcccccgcgtgcccgctgctcttggccgacaagagcccgctgggcctgaagggcaaggagcccgtggtgtacccctggatgaagaagatccatgtcagcgccgttaaccccagttataacggaggggagcctaagcgctctcgaaccgcctacacccggcagcaggtcttggagctggagaaggagttccacttcaatcgatacctgacccggcggcgccgcatcgagatcgcccacacgctctgtttgtctgagcgccaggtcaagatctggtttcagaaccggaggatgaagtggaagaaagaccacaaactgcccaacaccaagatgcgatcctccaattcggcctcggcctctgccggcccaccagggaaagcacaaactcagagcccacacctccatccccacccccacccgagcacctccacacccgttccctcctccatataatcttctagagatcttaaccagtttctatcccttacctgcttttctcttctcttctcctgctccgttcctcatccacccctccccatctggaccataatagacaccaaaacaaacccaaattggtgaaaagaataatcaaaaagaagacattatccggttaagagtctgtgctggttgccacccaagagagaacagttgtccaggatgctggctggtggaacaacctgctggcccgaaacaaggctgccaggtgtgggacagcccatgctgagtggggacatacacttgcatctttgttgaaagcagaagaagacagaccctttccccaccttccttacctcctcttcccccattaaggcagctcatccaagcttgtatttaactgaataaatgagtagacattgtggacctcacaagattatttaattcttaagatgtgtagaccttgatggtaggtgtgacatgttagtttttcttacttgcatttatttaagacactgttacagagatactgttgtccccttctggggcacggtctttggggagaggggagtgcatttagacttatgtggaactgtacaaattgtgatgtggctacatagaaagccatgtgctaagaataaactccattt

SEQ ID NO: 125649 - DNA, 963 bp, Artificial Sequence
  derived and/or modified sequence
atgaccatgagcagcttcctgatcaacagcaactacatcgagcccaagttccccccatttgaggagtatgcccagcacagcggcagcggcggcgcagatggcggccctgggggcggccctggctaccagcagcccccagccccacccacccagcacctgcccctgcagcagccccagctgccccatgctgggggcggccgggagcccacagccagctactatgcccccaggacagcccgggagcccgcctacccagctgctgccctgtacccagcccatggagctgctgacacagcctacccctacggctaccggggcggggccagccctggccggcccccccagcctgagcagcccccagcccaggccaagggccctgcccacggcctgcacgccagccacgtgctgcagccccagctgcccccacccctgcagcccagggctgtgcccccagctgccccccggcgctgtgaggccgccccagccaccccaggagtgcctgctgggggcagcgccccagcctgccccctgctgctggccgacaagagccccctgggcctgaagggcaaggagcctgtggtgtacccctggatgaagaagatccacgtgtctgctgtgaaccccagctacaatggaggagagcccaagaggagcaggacagcctacacccggcagcaggtgctggagctggagaaggagttccacttcaaccgctacctgaccaggagaagacgcatcgagatcgcccacaccctgtgcctgtctgagcggcaggtgaagatctggttccagaacagaaggatgaagtggaagaaggaccacaagctgcccaacaccaagatgaggagcagcaacagcgccagcgccagcgctggccccccaggcaaggcccagacccagagcccccacctgcacccccacccccaccccagcaccagcacccctgtgcccagcagcatctag

SEQ ID NO: 125650 - DNA, 963 bp, Artificial Sequence
  derived and/or modified sequence
atgaccatgagcagcttcctgatcaacagcaactacatcgagcccaagtttccccccttcgaggagtacgcacaacacagcggatccgggggcgcggacgggggaccaggcggcggcccagggtaccaacaaccaccggccccacccacccagcacctaccgctccagcagcctcagctcccccacgccggaggtggccgcgaacccactgcctcctattacgccccacggactgcccgcgaaccagcgtaccctgccgctgctctatatcccgcccacggagcagctgatactgcctacccgtacggctatcgcggcggagccagcccagggaggccaccgcagcctgaacaaccccctgctcaggcaaaaggacccgcccacggcctgcacgctagccacgtgctccaaccacagctgccccctcccctccagcccagagctgttccccccgctgctcccagacgttgtgaggccgcccccgccacgccaggcgtgccagccggggggagtgctccagcctgtccattgctcctcgcagataagtctcctttggggttgaaagggaaagaacctgttgtttacccatggatgaaaaaaattcacgtgagtgcggtcaaccccagttataacggcggcgaacctaagagatctagaaccgcatacacacgccagcaggttctggagctcgaaaaggaatttcactttaaccggtacctcaccagacggagaagaatcgaaatcgctcacacgctatgtcttagcgagcggcaggtaaagatctggtttcaaaatcgcagaatgaaatggaaaaaagatcataagcttccaaatacaaaaatgagatctagcaattccgcctccgcctcagctgggcccccaggcaaggcccaaacccaatccccccacctccatccccacccccaccctagcaccagcacccctgtgccctcttccatctag

SEQ ID NO: 125651 - DNA, 963 bp, Artificial Sequence
  derived and/or modified sequence
atgaccatgagcagcttcctgatcaacagcaactacatcgagcccaaattcccacctttcgaggaatatgctcagcatagcggcagcgggggagccgatggcggccctggcggcggtcccggttatcagcagccacccgcccccccaacacagcacctaccccttcagcagccacaattgcctcacgctggcgggggtagagagccaactgcttcttactacgcccccagaactgccagggaacctgcatatccagcagcggccctgtatcctgctcacggtgctgcagacactgcatacccttacggttatcgaggcggtgcgagtcccggacgcccacctcagcccgaacagcccccagcacaggctaaaggccctgcccatgggctccatgcttcccatgtgctgcagccacagctgcccccacctctccagccacgagcagttccgcctgcagctcctagacgatgtgaggcagcaccagcgaccccaggggttccggccggagggagcgctcccgcatgcccacttcttctcgccgacaaatccccactgggactgaaaggtaaggagcccgtcgtatacccatggatgaaaaagattcatgtgagcgcagtaaacccaagctataacggtggcgagcccaaacgtagcaggaccgcatacacacggcagcaagtccttgagctggaaaaagaatttcattttaaccgctacttaacaaggcggcgtcgaatcgagatagcccacaccctgtgtctgtctgaaagacaagtcaagatttggtttcagaatcgtaggatgaagtggaaaaaagatcacaagttgcccaataccaaaatgcgctcaagtaattccgcatctgctagtgctggccccccaggcaaagctcagacacaatcccctcacctgcatccacaccctcacccttctactagcacacccgttccttcctcgatctag

SEQ ID NO: 125652 - DNA, 963 bp, Artificial Sequence
  derived and/or modified sequence
atgactatgagctcattcctgataaactcaaactacatcgagcccaagttccccccattcgaggaatacgcgcagcatagcggttcaggtggcgcagatggcggacctggcggaggtccaggctaccaacagccccctgcacctccgactcagcaccttcctcttcagcaacctcagctgccacacgccggtgggggtagagagccaaccgcttcttattacgctcccaggactgctagggaacctgcttaccctgccgctgctctgtaccccgctcacggagcggctgacaccgcttacccctacgggtatcgaggtggcgcaagccccggaagaccccctcagcctgagcaacctcccgctcaagccaagggcccagcccatgggctgcacgcctcccatgtcctacaaccacagttaccaccccctttgcagcctagagccgttccgccagccgctcccaggagatgcgaagcagcccctgccacccccggtgtgcccgctggcggttcagcgcctgcgtgcccgctactgctggccgataagagcccacttggccttaagggtaaggagcccgttgtctacccatggatgaagaagattcacgtttccgccgtcaaccctagttataatggaggagagcccaaaaggtctaggaccgcttatacgaggcagcaggtgctcgaattggagaaggagttccatttcaatcgttatcttaccaggagaaggcgtattgaaattgcacacacactgtgtctgtctgagcggcaggtgaagatatggttccagaaccgaagaatgaaatggaagaaagaccacaagttgcctaacaccaagatgcggagcagcaattctgcctcagcctcagccggaccacctggaaaagcccagacacagtcaccacacctgcatccacatccccatccctcaacttcaacccccgtcccctcatctatctag

SEQ ID NO: 125653 - DNA, 963 bp, Artificial Sequence
  derived and/or modified sequence
atgacaatgagctctttccttatcaattctaattatattgagcccaagtttcccccttttgaagagtatgcgcagcactctggtagcggaggggctgatggtgggccaggcggaggacctgggtaccagcagcctcctgcccctcctacccaacatctgccgttgcaacagccccagctgcctcacgcaggagggggacgcgagccaacggcttcttattatgctcctcggacggcgagagagcccgcatacccagccgctgcgctctaccccgctcatggcgcagcagatactgcctacccttatgggtatagaggaggagcctcccccggaaggccccctcagcccgagcaaccgcctgcgcaagccaagggcccagcccacggcttacatgctagtcatgtgctccagccacagttacctcccccacttcagcctcgcgcagtccccccagcagctccccgaagatgcgaagctgcgccagccaccccaggcgtccctgcgggtggatcagcaccagcatgcccactccttttggcagacaaatctcctttaggactaaaaggaaaagagcctgtggtttacccttggatgaagaagattcatgtaagtgccgtcaacccctcttataacggcggagagccaaagcggagtcgcaccgcgtacactaggcagcaggtcttagagcttgaaaaagagtttcatttcaaccgctatctcactaggagacgacggatagaaatcgcccacacactgtgcttgagtgaacgccaggtcaagatctggtttcagaacaggcggatgaaatggaagaaggaccataagctaccaaacaccaaaatgcgctccagtaattcggcttccgcatccgccggacccccaggaaaagctcagacacaatccccccatctccatccgcatcctcacccaagtacttcaactcctgtgccttcaagcatttag

SEQ ID NO: 125654 - DNA, 963 bp, Artificial Sequence
  derived and/or modified sequence
atgaccatgagcagcttcctgatcaacagcaactacatcgagcccaagttcccccccttcgaggagtacgcccagcacagcggcagcggcggcgccgacggcggccccggcggcggccccggctaccagcagccccccgccccccccacccagcacctgcccctgcagcagccccagctgccccacgccggcggcggcagagagcccaccgccagctactacgcccccagaaccgccagagagcccgcctaccccgccgccgccctgtaccccgcccacggcgccgccgacaccgcctacccctacggctacagaggcggcgccagccccggcagacccccccagcccgagcagccccccgcccaggccaagggccccgcccacggcctgcacgccagccacgtgctgcagccccagctgcccccccccctgcagcccagagccgtgccccccgccgcccccagaagatgcgaggccgcccccgccacccccggcgtgcccgccggcggcagcgcccccgcctgccccctgctgctggccgacaagagccccctgggcctgaagggcaaggagcccgtggtgtacccctggatgaagaagatccacgtgagcgccgtgaaccccagctacaacggcggcgagcccaagagaagcagaaccgcctacaccagacagcaggtgctggagctggagaaggagttccacttcaacagatacctgaccagaagaagaagaatcgagatcgcccacaccctgtgcctgagcgagagacaggtgaagatctggttccagaacagaagaatgaagtggaagaaggaccacaagctgcccaacaccaagatgagaagcagcaacagcgccagcgccagcgccggcccccccggcaaggcccagacccagagcccccacctgcacccccacccccaccccagcaccagcacccccgtgcccagcagcatctag

SEQ ID NO: 125655 - protein, 301 aa, Artificial Sequence
  derived and/or modified sequence
MDYNRMNSFLEYPLCNRGPSAYSAHSAPTSFPPSSAQAVDSYASEGRYGGGLSSPAFQQNSGYPAQQPPSTLGVPFPSSAPSGYAPAACSPSYGPSQYYPLGQSEGDGGYFHPSSYGAQLGGLSDGYGAGGAGPGPYPPQHPPYGNEQTASFAPAYADLLSEDKETPCPSEPNTPTARTFDWMKVKRNPPKTAKVSEPGLGSPSGLRTNFTTRQLTELEKEFHFNKYLSRARRVEIAATLELNETQVKIWFQNRRMKQKKREREEGRVPPAPPGCPKEAAGDASDQSTCTSPEASPSSVTS

SEQ ID NO: 125656 - DNA, 906 bp, Artificial Sequence
  derived and/or modified sequence
atggactacaacagaatgaactccttcctggaatatccgctgtgcaatagaggcccgtccgcatacagtgctcactccgccccgacgagtttccccccaagcagtgcacaggcagtagacagctatgcctctgaaggcaggtacggaggaggactgtcaagcccagccttccaacagaacagtgggtacccagcccagcaaccaccaagtaccctgggcgtccctttccctagctccgcgccatcaggatatgctccagctgcctgctccccctcgtacgggccctcccagtactaccccctcggacagagcgagggggacggcggctactttcaccccagcagctacggagcacaactgggtggcctgagtgacggatacggtgcaggcggtgccggccccggaccttatccccctcaacaccccccatacggtaatgaacaaaccgcatccttcgcccctgcttacgcggatttgctgtccgaagataaggagactccatgcccctccgaaccaaatacacccactgcacgcacttttgactggatgaaagtgaagaggaacccgcccaagaccgctaaggtgagcgagccgggcctagggagtccctccgggctcaggaccaatttcacaactcgccagttaaccgaactggaaaaggagttccacttcaataaatacctttcacgcgctcggcgggtggagatcgcggcaactcttgagctgaacgagacacaggtgaaaatatggtttcagaacagaaggatgaagcaaaaaaagcgcgaaagagaagaaggaagggttccacctgctccccccggctgtcccaaagaagctgccggggatgctagtgaccagtctacctgtacgagccccgaagcaagccctagttctgtcacttcatag

SEQ ID NO: 125657 - DNA, 1358 bp, Artificial Sequence
  derived and/or modified sequence
attcgagccccagcgctgtgacatactgccgaaaggttgtagggcaagagggtgtctcccccaaacgggccgaccctcctgcggccttgacgcatggactataataggatgaactccttcttagagtacccactctgtaaccggggacccagcgcctacagcgcccacagcgccccaacctcctttcccccaagctcggctcaggcggttgacagctatgcaagcgagggccgctacggtggggggctgtccagccctgcgtttcagcagaactccggctatcccgcccagcagccgccttcgaccctgggggtgcccttccccagctccgcgccctcggggtatgctcctgccgcctgcagccccagctacgggccttctcagtactaccctctgggtcaatcagaaggagacggaggctattttcatccctcgagctacggggcccagctagggggcttgtccgatggctacggagcaggtggagccggtccggggccatatcctccgcagcatcccccttatgggaacgagcagaccgcgagctttgcaccggcctatgctgatctcctctccgaggacaaggaaacaccctgcccttcagaacctaacacccccacggcccggaccttcgactggatgaaggttaagagaaacccacccaagacagcgaaggtgtcagagccaggcctgggctcgcccagtggcctccgcaccaacttcaccacaaggcagctgacagaactggaaaaggagttccatttcaacaagtacctgagccgggcccggagggtggagattgccgccaccctggagctcaatgaaacacaggtcaagatttggttccagaaccgacgaatgaagcagaagaagcgcgagcgagaggaaggtcgggtccccccagccccaccaggctgccccaaggaggcagctggagatgcctcagaccagtcgacatgcacctccccggaagcctcacccagctctgtcacctcctgaactgaacctagccaccaatggggcttccaggcactggagcgccccagtccagccctatcccaggctctccccaaccccaggcctgggcttcactggcctggggatcctctctagggctgaaatgccagtttagagctgcctgggggtgggaggggggatggggaaacatttttctcagacctgggtggctgggggccctacaggaccagaggcctgggaggcatggaacctgtcaaatgtagagggaagggcttctgcctttgatctggggatcagctcagtgtcaacatgtggtgggggtgggggccagcctcatcctcctggattcatcctcctttcccttccaacttgggtttatt

SEQ ID NO: 125658 - DNA, 906 bp, Artificial Sequence
  derived and/or modified sequence
atggactacaacaggatgaacagcttcctggagtaccccctgtgcaacagaggccccagcgcctacagcgcccacagcgcccccaccagcttcccccccagcagcgcccaggccgtggacagctatgccagcgagggccgctatggaggcggcctgagcagccctgccttccagcagaacagcggctacccagcccagcagccccccagcaccctgggcgtgcccttccccagcagcgcccccagcggctacgccccagctgcctgcagccccagctatggccccagccagtactaccccctgggccagagtgaaggagatggcggctacttccaccccagcagctatggagcccagctgggcggcctgagtgatggctatggagctggaggagctggccctggcccctacccaccccagcaccccccctatggaaatgagcagacagccagctttgccccagcctatgctgacctgctgtctgaggacaaggagaccccctgccccagcgagcccaacacccccacagcccggacctttgactggatgaaggtgaagagaaatccacccaagacagccaaggtgtctgagcccggcctgggcagccccagcggcctgcggaccaacttcaccacccggcagctgacagagctggagaaggagttccacttcaacaagtacctgagccgggcccggcgggtggagattgctgccaccctggagctgaatgagacccaggtgaagatctggttccagaacagaaggatgaagcagaagaagcgggagcgggaggagggccgggtgcccccagcccctcctggctgccccaaggaggccgctggagatgccagtgaccagagcacctgcaccagccctgaggccagccccagctctgtgaccagctag

SEQ ID NO: 125659 - DNA, 906 bp, Artificial Sequence
  derived and/or modified sequence
atggactacaaccggatgaacagcttcctggagtaccccctgtgcaaccgggggcccagcgcgtacagtgctcattcagcccctacaagttttccaccatcttcagcccaagccgtggactcttacgcctccgaaggccggtacggcggggggctgagctcgccggcattccagcagaactccggctatcccgcgcagcagccacccagcacactcggcgtcccttttccatcttctgctccttcaggctacgctcctgccgcctgctcaccctcgtacggaccctcacaatactacccgctcggtcagagtgagggcgacggcggttatttccatcccagctcctatggagcacagcttggcggcctgagcgatggttacggcgctgggggggcaggtccgggcccatatccaccccagcatcccccttatggaaacgaacagacagcaagctttgctccagcctacgctgatctgctgtcagaagacaaggagacgccttgcccttctgaaccaaatactcctacagcccggaccttcgattggatgaaggtgaagcgtaacccccctaaaacggctaaggtgagcgaacctggactgggaagcccatcaggcctcagaaccaactttactacccgccagctgacagagctcgagaaggaattccacttcaataaatacttgtcacgagctcgaagggttgaaattgccgccactctggaactgaatgaaactcaagtgaaaatttggttccagaacagacgaatgaagcaaaagaaaagggaacgcgaagaaggacgagtccctccagccccaccaggttgtcccaaggaagcggccggggacgcatctgaccagtcaacgtgcacaagcccagaagcctccccttcaagcgttacttcttag

SEQ ID NO: 125660 - DNA, 906 bp, Artificial Sequence
  derived and/or modified sequence
atggattacaatcgcatgaattcatttctcgaataccccctctgcaaccgagggccatccgcctatagcgcacactctgcccctacttcttttcctccgtctagcgcacaagccgtggattcttacgcctccgaaggcagatacggaggtggactgtctagtccggcattccagcagaattccggatacccagctcagcagcctccctcaactctgggggtcccattccccagcagcgcacctagtggctatgccccagctgcctgttcaccgtcttatgggcctagccagtactaccccctcggccagagtgagggagatggaggctactttcatccctcctcttatggcgcacaactcggaggattgtctgacggctatggggcaggcggagcgggtcccggtccataccctccacaacaccctccatacggcaacgagcagactgcctcattcgcgcctgcctatgccgacttattgtcagaagacaaagagaccccctgcccctcagagcctaatacaccaacggcaagaacattcgactggatgaaagtcaaaagaaatcctcccaaaactgcgaaggtatcagagccaggccttggctctccatccggcctgaggaccaacttcaccacacgtcagctgacggagctcgagaaagaatttcactttaacaagtatctgagccgagcaagacgcgtagagatagctgccacactggagttaaacgagacacaggtgaagatctggttccagaaccggcgaatgaagcaaaaaaagagagaaagagaagaaggacgtgtccctccagctccaccagggtgtcccaaggaagctgcaggtgatgccagtgaccaatccacatgtactagccctgaagctagccctagttctgtaacatcctag

SEQ ID NO: 125661 - DNA, 906 bp, Artificial Sequence
  derived and/or modified sequence
atggactacaacagaatgaacagcttcctggagtaccccctgtgcaacagaggccccagcgcctacagcgcccacagcgcccccaccagcttcccccccagcagcgcccaggccgtggacagctacgccagcgagggcagatacggcggcggcctgagcagccccgccttccagcagaacagcggctaccccgcccagcagccccccagcaccctgggcgtgcccttccccagcagcgcccccagcggctacgcccccgccgcctgcagccccagctacggccccagccagtactaccccctgggccagagcgagggcgacggcggctacttccaccccagcagctacggcgcccagctgggcggcctgagcgacggctacggcgccggcggcgccggccccggcccctaccccccccagcaccccccctacggcaacgagcagaccgccagcttcgcccccgcctacgccgacctgctgagcgaggacaaggagaccccctgccccagcgagcccaacacccccaccgccagaaccttcgactggatgaaggtgaagagaaacccccccaagaccgccaaggtgagcgagcccggcctgggcagccccagcggcctgagaaccaacttcaccaccagacagctgaccgagctggagaaggagttccacttcaacaagtacctgagcagagccagaagagtggagatcgccgccaccctggagctgaacgagacccaggtgaagatctggttccagaacagaagaatgaagcagaagaagagagagagagaggagggcagagtgccccccgccccccccggctgccccaaggaggccgccggcgacgccagcgaccagagcacctgcaccagccccgaggccagccccagcagcgtgaccagctag

SEQ ID NO: 125662 - protein, 176 aa, Artificial Sequence
  derived and/or modified sequence
PRCPPGPRVPLDEREEIRQETQPIRHVSFSGRLRRSGGVGSPADGLGRRLVAAGQAAHGLHQHAAAGTGEFHFNKYLCRPRRVEIAALLDLTERQVKVWFQNRRMKHKRQTQHREPPDGEPACPGALEDICDPAEEPAASPGGPLAGGVGSLLSPAGGGAGGLKRGPPAFSRSLRG

SEQ ID NO: 125663 - protein, 356 aa, Artificial Sequence
  derived and/or modified sequence
MNFEFEREIGFINSQPSLAECLTSFPAVLETFQTSSIKESTLIPPPPPFEQTFPSLQPGASTLQRPRSQKRAEDGPALPPPPPPPLPAAPPAPEFPWMKEKKSAKKPSQSATSPSPAASAVPASGVGSPADGLGLPEAGGGGARRLRTAYTNTQLLELEKEFHFNKYLCRPRRVEIAALLDLTERQVKVWFQNRRMKHKRQTQHREPPDGEPACPGALEDICDPAEEPAASPGGPSASRAAWEACCHPPEVVPGALSADPRPLAVRLEGAGASSPGCALRGAGGLEPGPLPEDVFSGRQDSPFLPDLNFFAADSCLQLSGGLSPSLQGSLDSPVPFSEEELDFFTSTLCAIDLQFP

SEQ ID NO: 125664 - DNA, 531 bp, Artificial Sequence
  derived and/or modified sequence
cctagatgtcctcccgggccaagggtgccactagacgaacgggaggagatacgccaagaaactcaacccatcagacatgtgagtttcagtggcagactgaggaggtcaggcggcgttggcagccctgccgatggtctgggacgcaggctcgtcgcagctggacaggcagcccatgggcttcaccagcacgctgcagcaggcaccggtgaatttcactttaacaaatacttatgtcgaccaagaagggttgagatagcggctcttcttgatctcaccgaacggcaggtcaaagtgtggttccagaataggagaatgaagcacaaaagacaaacgcaacacagagaacctccagacggtgaacctgcgtgccctggggccctggaagacatatgcgatcccgctgaggaaccagcagcttctccggggggccctcttgccgggggggtggggagtcttttatcacctgcaggcggcggagccggaggtcttaagcgcggaccccccgccttctcaagaagcctgcgcgggtag

SEQ ID NO: 125665 - DNA, 1071 bp, Artificial Sequence
  derived and/or modified sequence
atgaatttcgagttcgagagagagattgggtttatcaattcccagccaagcttagccgaatgcctgactagctttcccgcagtccttgagactttccagacaagttcgatcaaagaatcaactttgatcccccccccccctccatttgaacaaacctttcctagcctgcagcctggcgcatccacactgcaaagacccagaagtcagaagcgggctgaggatgggcccgcgctaccacctccgccccctcctccattgcctgcagctccccctgctccagagtttccttggatgaaggaaaaaaagagcgctaaaaaacccagtcagtccgccacttctccaagtcccgccgcctcagcagtgcccgcgagtggtgtcggaagtccggccgacggcctgggcctgcccgaagccggcgggggcggtgcaaggcgccttagaaccgcctatactaatacccagctgttggagctggagaaggaatttcatttcaacaaatatctgtgtcgtccgcgtagagttgagatagccgcacttctggacctgactgagagacaagtcaaagtgtggtttcaaaatcgccgtatgaaacataagcgccaaactcagcaccgggagccacccgacggcgagccggcttgccccggcgcactggaggatatttgtgaccccgctgaggagcccgccgccagtcccggcgggccttccgcgagtcgagccgcctgggaagcttgctgccatccaccagaggtcgtcccgggcgccttgagcgcagacccacggcccttggccgtcagactcgaaggtgcaggggccagtagcccaggctgtgctcttcgtggcgcaggcggtctggagccaggccccctccctgaggatgtgttttccggccggcaggatagcccttttcttcccgacttaaatttctttgccgccgactcgtgccttcagctatccgggggtctgtctccaagcctgcagggctcccttgactctcctgtgccatttagcgaggaggaactcgatttttttactagcactttgtgcgccatcgatttgcaatttccgtag

SEQ ID NO: 125666 - DNA, 528 bp, Artificial Sequence
  derived and/or modified sequence
ccccgctgcccccccggcccccgagttcccttggatgaaagagaagaaatccgccaagaaacccagccaatccgccacgtctccttctccggccgcctccgccgttccggcggggtcggatcgcctgcagatggcctgggacggaggctggtggcggcggggcaggctgcgcacggcttacaccaacacgcagctgctggaactggagaattccactttaataagtacctgtgccggccacgccgcgtcgagatcgcggccttgctggacctcaccgaaaggcaggtcaaagtctggtttcagaaccggcgcatgaagcacaagcggcagacgcagcaccgagagccgccggatggggagcctgcctgcccgggagccctggaggacatctgcgaccctgccgaggaacccgcggccagcccgggcggccccctcgcgggcggcgtgggaagcctgctgtcacccgccggaggtggtgccgggggccttaagcgcggacccccggcctttagccgttcgcttagaggg

SEQ ID NO: 125667 - DNA, 2652 bp, Artificial Sequence
  derived and/or modified sequence
cttttttcttttttaactagcacaatggcaaaaatgggagggaaagtctctttgtcctaggggaaaatctccccaccacactcatgcacacacataacgctgatctgaactttgagagtgctctaagttaaaccaatggctacctcagttcttgttcatgtccctggatatggatacagatacaagcttgaggcttgagtgggtacatgcacatcttagactctgcctgtttttgggggatgtcacagagaagcatggaagcctgaaagtgaggaaagcaggggtacataaggggcagaggcagtgctgcaaacactgggcagagaagagaacccagaccatacagcgatggaggccagaggcccaaaaatgccccttatgctccatctcactcctatgtgtctgcctgggagttcctgtccatttcccaagatttaactgttgtttttggagggtaacagggatagtggtgtgatgattgtaaatctctttcttattttcaccttaatactgacctttttcaaagagtggaagcctctttcgactccctcttcctccaacgcggagatcctcactcatcttttcctggggaaggggagaagggaaggggatgctgctggccacgtaaagaaggccttaatttactctattaaaatacttggaaaagaggaaggtttctcccttagagtctcttcttttccaggcttctgaaaccttctaaccttcgaaggggatgaggaaaaggttcctctagcttttctggagaaacggaggcattggggagagagcatgtgaggcactggtgtaggaatgggggctcatggtgtcctggtcgtggtcctctggtgtttttgaatcaattaaaccaaataatgctctctgttttccaccaggcccagacgagcgattggcggaggccggtcccgtgaccacgaattccctgtaatttcgctggagtcctgggtttaatagagagagtccccatacgcttgtatttatcagcaatatacaattataaaggcccaaaattaaaaaaaagagagaccgaaatctccccctcccaaaatcgctccattacataaatcggggggggtgcaggaggggggtcccttccgatcctccctcctgacgccccccccagcagccccctcccccaccattgaaagccatgaattttgaatttgagagggagattgggtttataaacagccagccgtcgctcgccgagtgtctgacttccttccccgctgtcttggagacatttcaaacttcatcaatcaaggagtcgacattaattcctcctcctcctcctttcgagcaaaccttccccagcctccagcccggcgcctccacccttcagagacccaggagccaaaagcgagccgaagatgggcctgctctgccgccgccaccgccgccgccactccccgctgcccccccggcccccgagttcccttggatgaaagagaagaaatccgccaagaaacccagccaatccgccacgtctccttctccggccgcctccgccgttccggcctccggggtcggatcgcctgcagatggcctgggactgccggaggctggtggcggcggggcgcgcaggctgcgcacggcttacaccaacacgcagctgctggaactggagaaggaattccactttaataagtacctgtgccggccacgccgcgtcgagatcgcggccttgctggacctcaccgaaaggcaggtcaaagtctggtttcagaaccggcgcatgaagcacaagcggcagacgcagcaccgagagccgccggatggggagcctgcctgcccgggagccctggaggacatctgcgaccctgccgaggaacccgcggccagcccgggcggcccctccgcctcgcgggcggcgtgggaagcctgctgtcacccgccggaggtggtgccgggggccttaagcgcggacccccggcctttagccgttcgcttagagggcgcaggcgcgtcgagtcccggctgcgcgctgcgcggggccggcgggctggagcccgggccattgccagaagacgtcttctcggggcgccaggattcacctttccttcccgacctcaacttcttcgcggccgactcctgtctccagctatccggaggcctctcccctagcctacagggttctctcgacagcccggtccctttttccgaggaagagctggattttttcaccagtacgctctgtgccatcgacctgcagtttccctaacctgtttcctcctcccggtcctttcgacccccgcgctccttggccgtctactggaaaaatcgagcctctcccaccctcagtcgcatagacttatgtgttttgctaaaattcaggtattactgaattagcgtttaatccactccctttcttcttcttctaaaatattgggcactcggttatcttttaaaattcacacagaaaaattccgtttggtagactccttccaatgaaatctcaggaataattaaactctagggggactttcttaaaaataactagagggacctattttcctcttttttatgttttagactgtagattatttattaaaattctttaataataggaaaaggggaaagtatttattgtacattattttcatagattaaataaatgtctttataataccaaaa
